United States Patent Application Publication US 2007/0083945 A1 - sequence listing, part 33

SEQ ID NO: 223104 - DNA, 463 bp, Glycine max
  unsure (1)..(463): unsure at all n locations
tgcctcanagaggtccaggaaggacaaggcagcagaatgttctatttccgctccggagtatgatagtcaccgctttaggagcgcggtacaccagcagcgcttcgaagccatcaaggggtggtcgtttctccgggagcgacgcgtccagctcagggacgacgagtatactgatttccaggaggaaatagggcgccggcggtgggcaccactggttactcccatggccaagtttgatccagaaatagtccttgagttttatgccaatgcttggccaacagaggagggcgtgcgtgacatgagatcctgtgttaggggtcagtggatcccgttcgatgccgacgctatcggccagctcctgtgatatgcgttggtgttagaagagggccaggagtgcgagtatggtcagaggaggaaccggtctgatgggttcgatgaggaggccatcgcccagttgctatgtata

SEQ ID NO: 223105 - DNA, 469 bp, Glycine max
  unsure (1)..(469): unsure at all n locations
agcntttcttctgattgctttgacagggttttcaagtgttagaggaaaggagaaaagattggagcctcaatttcgttttctttgttcaaggggtatttttctctctacagacattatttcataaatcccaacggtgggaatatgtagaaatgagttttgaaggtgtcttccgaatntcatgatgatccaacggttaatacagttgatatcataattttactgagataaactttggtatatgcgagagagaaaaaaggttttgggagaataagaagaaaaaacgaatttgagagaaagaaaaagtgtagaccagtatcatacatgtaacaactgacctaatatgtctctatttataactagagaactctcaacgtattatttacttactctttcattgaataaataaccaattaaaacatcactttattgtcctaaacattattctactctatttcttttataatactat

SEQ ID NO: 223106 - DNA, 466 bp, Glycine max
  unsure (1)..(466): unsure at all n locations
tggtgttgcaattataagtgtgtgtgtgtgtatgtgtgtgtgtgtgtgtgtgtgcgttcaaatgttgaatatgacaaaaattgaacctctaacttatgtttaataaacttgttttgcaccttatggatgatgggatactactactagtgaaagtgtaataacatggtgagtgacacgcatgtttagcatcagcgccttggatcattttttctcacaaggatatattttctgccactgtctgcccaatgggtaaatgacacttgcgagaaggcaacattgatgttcctaatttatttaaggtcatgtntgggagggtggatgtttgctttcttgtgtcattgctgctactgtttcattcaaactccttataaagatttaagggatatgaatatgatggttcacttcaccactaacctttggtgtggtaacatcagtgtcatgagacataagacaaaataagacagtc

SEQ ID NO: 223107 - DNA, 409 bp, Glycine max
  unsure (1)..(409): unsure at all n locations
agcttgcatgccgggcagggcacgtaaccatcaaattcccttggcttgaaagccaagggaccatcatatacttacgcgtgagaaatgtacaacacgttctgtgagacacganatgacaaatcagcccttttatagagaaattatgccttaccctatcaacaatttagtgggcattatggtctttatgctggtggggctccatctggtggcgtttcatttttgaagttagaggcaatgtaaacataagaaaggtgaggacattcccatgttaatttcttccgaggcgtcactagaagcccttctcatattaatttaccaccttatttgcgcacggcaccaaagaaaactaactagattaagaaatctgcattaatcctactatataccggcatagtcattcattctttta

SEQ ID NO: 223108 - DNA, 444 bp, Glycine max
gtcggggttgatgagtgagatctgccgctcatatgctctattgctcttaaagagacattggaccttctatataagtaatctcctgaatatatatttaaccgcactctattgaacatgctctatgaccgagtagtactccagaattgagaagatcctgctagttaagatcgcctgacagcttatattgatgaggatatatgtgaataaagagctgatgatataatagtattgccagaagaagtacgcctacaggacgacggtgacttcgtgcgcatgataattgacctacatctagagatgataatagtagtgaattgcgagtgtggctctcttatggaaatgatgttgatgtatatattaatgaggaaactgaacgcatacgcgcaagagcactggtgctggcaagaatacatctcagcagatggctccaccagtaatatactc

SEQ ID NO: 223109 - DNA, 339 bp, Glycine max
  unsure (1)..(339): unsure at all n locations
agctcgggnagctcatgtagagcactgctattctattntacaatcaccggcagcacaccccgaattcataatggccaacaatctcattcttcaccagaagcgcatttggctaccacgggatttccagatgatccccaccttgctcaccgagttttacttgactccgacagggggtcacatgggcatagccaacacccttgcccagatatcagagaactttagttggccaggtctccataatgatgagagaaaattcattgccccatgcgttgattgtcaacacaccaagtataaaactaagaaaagtgtccggttgttgtgccccgtgccaatgccgca

SEQ ID NO: 223110 - DNA, 295 bp, Glycine max
cactatcagcgattatctacttcttttaggagacccaccgctccacaattctatttcagtcacaaccttcaccattcatattattatactttcatacacatccaatatatgtggttttggctagatacatccaatatatatatatacttcacataaatcagccaaacataaaactaaattttagagagactaagcattcgatcgttaataaattgacgattatctataaattgtgggtcatatactattatagaaaaagaacatttatgaatttaatttaactttcaagcttcct

SEQ ID NO: 223111 - DNA, 423 bp, Glycine max
agcttataagccaagctaaatacagcagctactgtagaacagcagaatattaatagtagaataaaaaaaaaaaaccacacttcaaacaaagaaaaagaacataaaacataattaagcacattcaaaattagatacaaatttacatcatataattacataggcagggtttggaaaatgaaagcatagttacatatacaggggttgcctatcactaatcactatccactccccaagggaaagagaatgcaaggatggaaaattcacccagcaacaacatatagggtaattaattatttcactcattcgaaaactgaaagtgattaagaactaaccattttatttaaaaaatcagttactatattaactcttttcagaataacggttcattcctgaccaatcataagcatttagcagatgcaaaac

SEQ ID NO: 223112 - DNA, 468 bp, Glycine max
  unsure (1)..(468): unsure at all n locations
gctgctttgtttccttctttccggagatatcctttgtcttaacggaaggagcaacccttatcagaaactgaaacaaaccatgacacaaaaaagatctgaaaataagtagaaccagaattcaaaagcaaatgatggctgcctttttctgttctgttgaagacaagaagggcacatgtgcagtgcagtcaaatactcaaatcttttcatcatcattacgcggatccaccagtgaatctcaccatgaatctccacaggtaaaaaaagggaacacaactaacgcataagggtaaataatgagtctatcataaataaatagcttgaatatatccacccaaaaaaaaggctgaaaatcgaaagaaaatgaacataatgataactgacctggagagtgtnttatatacatgaaaccgatcggttgatagctgagagagaagagaagaacactcgattgtatttggttagatgatg

SEQ ID NO: 223113 - DNA, 432 bp, Glycine max
  unsure (1)..(432): unsure at all n locations
anctngagaggatngatggagacccggtgttgatagaaacgaggatatgggctacgtgggagtacgtgagctcagttggaggtgggcaacaggggatggtgggtttatgcgcgcattgtggatgtggaaagcttgttgtgcaccatcgcccgaccgccacctagtaccacatgtgatgggtaccccataattctacaagcttgagatgaggaagtgttgaagggtgaaacttcctgcttttattgttgaccacagagtggtacctggagatatgtcgcgggggtcaggagaccttggggacgtcaggtggggtgctattgcccaaaaccaagcttgaccaatcccgacccaacccgggcatagtcggtcagtgagaacctgtgatgtacctaaacaggcgagcttctggcagtcaacagattaaaggaaaac

SEQ ID NO: 223114 - DNA, 472 bp, Glycine max
  unsure (1)..(472): unsure at all n locations
tctanactttatacaagaatgaagctctgataccacttgttagacaagtggcctcagatatcttaagaagggggggttgaattaagatattccaaactatttcccctaagtaaaaatctatttcactttttactcaagttatgaattcccttaatgacaatcttcttaaatattaattcaaatgaaacaatttgaatatgaatataaagcaataataaataaaggagattaaaggaagagaaaatgcaaactcaattttatactggttcggccacacccttgtgcctacgtccagtccccaagcaacccgcttgagagttccactatcttgtaaattccttttacaagttctaaacacacaaggacaatccttcctttgtgtttagaattcctttacaacaagagactcacagtctcttaatcccttagagaatgagaagaagaagaagaataaatctctctagaaagagat

SEQ ID NO: 223115 - DNA, 417 bp, Glycine max
agctttcctacaagtcctaattgacatcctatactagaatcaactcactttaaactcaaatttacactaacaccaaatttggctttctaaacctcaaaatctcacacttttccacttacaacactatcattctcacatttaactctaagctaactctccccatcctctctaccaattttctatctacattttaagcacacatatatctcaaaacatcattattgaaccctaaatcaacatcgacagttttgcttacattaaacatgtcaagtttagcataattacaacaatttccttcagaaacaactaccctaaagcaataacctagtagaactacacattatagctcccaagaacccaacacccatagatttctagtgaggagaagtccacccttacctgaaattgaaggcccac

SEQ ID NO: 223116 - DNA, 463 bp, Glycine max
  unsure (1)..(463): unsure at all n locations
taggcaagtgacccncattntcaactctaagctggattttcactacattntcttgctctattctcacttgtaatttcaaaaccttatttttcactcttgaaggttggaaacttgaatctaaactcccacatccttccttctaaattttatggagactaccagaggtaagagagttctctccaactcttaaaccatatgcttgttgttgaacttcctttgagcttgctagcatgtccttaatctgtgtgctgagttttttccttgagttttttatgccaaaaatgagttctttgcatgtaaaaacatatagttagcctcaaatttcacttaaattggagtttcctagcaaaagttataaataaaacaagtttaaggacccttagtaaaatgaaaaatcggtaacaaattgggactgagttacagaagtatggactggttttattaaagttttgaaactcaaaat

SEQ ID NO: 223117 - DNA, 445 bp, Glycine max
  unsure (1)..(445): unsure at all n locations
agcttaggttatggttcagtatatggtttccttgatcctcagtctatacacaatgcataggacatgcatcaagaatgtcaatattacattgaaacatgggttaaggaatcacaacgacaaatgtacttaggaccttacctgaatcaataagtgaaaataatgttatgaagnggactttttcttattataagtagctaactatagtttttcatgttcagggcacattggcaacttctttgtttgtgtccagaggacaatattggtgtttggttatgttctttgcgtaagaagcctgatgttaacattaaggctaccgttaacatgtaatttccaaaatataagtcaattaatgtataccaattgtagcgtcgcaacacaataattcttatttatatacattcacattattttggaaactatgcaatgatgacattactgctacttg

SEQ ID NO: 223118 - DNA, 465 bp, Glycine max
  unsure (1)..(465): unsure at all n locations
ntacagcaaatgccactctactccaagttattaaaggatatgttaacaaggaaacacaagtatattcaccaggaaaacatttttgtggaaggaaattgtagtgctgtgattcaaaagatccttccacccaagcataaagaccctgngagtgtaaccattctttgttcgattggagaagtcactgtgggaaaggctcttattgatctgagagccagcattaacttaatgccactctccatgtgcagaaggttgggagagttggagatcatgcccactaggatgactttacaacttgctgaccgctccattactagaccttatggagtaattgaagatgtgctagtcagagtaaaacattttatcttccctgcagattntgtggtaacggatatctgtgaagataatgacattcccgctatattgngaaggtcattcatgttaactgcaagctgcataattgatatg

SEQ ID NO: 223119 - DNA, 412 bp, Glycine max
ggtagaagtctccacagaggccattgcctcactcgcccagcattatgaccagccgctgaggagcttcacctttgaggacttctagctatcacccatgcgagaaaaattacaacagaccccggcatgtcctctatggggaacgagaccatacctctttccaaggttctatccctcattagctaccaattctaaaatagtccaaatctcgacgcaggaattagaccacaaaaagcaagcccaaaatgggatggttggaataccgacacaatatttggaggcaaaagcaacaatcttggcaggtaaacgccaatgggccctcgacataaacattctcgcactgctgattccggacgatcctcacttccaatgagatggtgtggtgacccacagcaatcgatgctttctccctacc

SEQ ID NO: 223120 - DNA, 464 bp, Glycine max
  unsure (1)..(464): unsure at all n locations
tctatagaaggttcgntgctaattaatatacgattgtattacctttcaatgagctggngaagaagaatgtggcatttacctgtggtgaaaaacaagagcaagcctttgctttgctcaaagaaaagcttactaaggcacctgttctagctcttcctgacttttctaaaacttttgagctagaatgtgatgcctctggagtgggagttggagttgtattgttacaaggtgggcaccctattgcttattttagtgaaaaagaattcatagtgccactctcaactaccccacctatgataaagagctctatgtcataataagagccctccaaacttgggaacattaccttgtttccaaggaaattgtcattcatagtgatcatcaatcacttaagtacattatagggcaaagcaagttaaacaacaggcatgcaaaatgggtatagtacctatagcaatgtccatctg

SEQ ID NO: 223121 - DNA, 339 bp, Glycine max
  unsure (1)..(339): unsure at all n locations
agncttgacctagagccagtacaggtattttcttgggctttaagcctcacactaaagggtatataacctttgatatttcctccacagccataaaggtatctagacatgttattttttatgaagaattgttcccttatgcctctcctagtgcctatcaatcgcttcccactttccttgtacattcctatcctaccatttatgaccatggaaaagattctggtttctcttcaccttcatcacactctactatccttgataattctcaatataacatttctattgatcattcacaattggattccataaacacttgttctgatccatcaaactcaccaatta

SEQ ID NO: 223122 - DNA, 462 bp, Glycine max
  unsure (1)..(462): unsure at all n locations
acactataaaaaacatcagcgtagcgccagcacgcgcccagccgaaagtgacgactgtaatttaattggcctagcgagcaagctcgctaagcccaattcccaaataaaacaaaatagagaagaaattgtgcttagcgagacagactcgcttagcgcatgaacaaaagctcagaaagtaaaaatcctttaggctcagcgagacagactcgcttagcccaggcttattcaacctacagaggctgggtggcttagcaagactaactcgtttagctaccaacagaagacataaagcctcttagactgtgactcaagcaacacaactcactaagcacggcatgccagcttagcgagttcatacgacactnaagacaaacaggaagattaaatactcgctgagcccgacgtgcaatggcttaacgaagttatacaaacattcatanaatcaaacaaaattgatgaaca

SEQ ID NO: 223123 - DNA, 382 bp, Glycine max
agcttggaatacctaatggagatggcttttttattggtctaccggcgcggccgaactatgaccacaacccaatcgttacagtcaaatgaacatcatggtgtttagtatctacaaagtgtctcatgccagcctgctgttagacgacatttgcgactaacttttgtattgaaaggtatacaaaattaacatctattccctcaacttatggttcttttggcaggacctgtgtatactttcatgtttagttagatcttgcttaacagatactcccatttttctgatataatgtgaaccaactccagtttcatgctaacaatagaagatagtgaagctgctagtgtctcactaaacgaggcttatgctcttagtcaggaacatccgc

SEQ ID NO: 223124 - DNA, 141 bp, Glycine max
ggaattcccgcaaagtggcagagggaatatttttatatgcgctcatgccacatgagatataagcctagtactcctaacaccgtactcaaacgaactccattcacaaaatttcctttacgcatacatagaggccgcctggac

SEQ ID NO: 223125 - DNA, 393 bp, Glycine max
agcttgccctatacaagttattggatgattgttcatcaactcaatttttaaactattggcaatggatccaagcatacagaatgtgggtatatatgtatatgtgtgtttaatgcattgcataagctgctttttactcttattagtttaactataatgcatattttgaaatttttacatggtattgattgcatgttattcacttgtttatgcacgcagctccatcatttcctagttcatttcctcacctattttctggaaaagagaatctttctctgttaattccttgtgcaatagaccaggtctgttgctcttcaatgcttttatatgctagttgatatcatggttatcgcattcacaatcaaatcgtgaattgcgaaagctattttatgaatc

SEQ ID NO: 223126 - DNA, 463 bp, Glycine max
cgcttgtgtggcttcaatggaggtgggatctttgagcttctatggcgtcctttaacggcgattttccaccatggagatgcagcggaagacaaaggaaaataggtgagaggaggcgtcatccattaaggaataagccatggaagaaggagcttcaccactaagatgagccttggataacaagctcggagaggatgcttcaatggaggaaaagaaagagggagagaaagagaggggggagcacgaaattgaaggaagaaaaagggagagaagttgaactttgagttgtgtctcacaagactctcattcatcaaagttacaactagtgttacacatgcttctatttatagactaggtagcttccttgagaagctttcttgagaagacttccttgagaagcttctttgagaaaacatccttgagaagctagagcttagctacacacacccctctcataactaagctc

SEQ ID NO: 223127 - DNA, 470 bp, Glycine max
  unsure (1)..(470): unsure at all n locations
cacctgcggcatgcagctcgccgccataggcgcgtgtatttatacactcgacaaggtgtgaagtagaagagaccttcaatcctattacgcaacgtgacggacaaaagtggacagntaacttgaatgatcattattgtcaatgcacaaagtattttgcgcttcactatccatgttcacacattattgcagcttgtggttacatgagcatgaactactaccaatatatagagtgtgtctacacaaatgagctcaaaagtttactccgcacaatggtggcctcttgggaatgaagcgactattcctccttctaatgacgcatggacacttatccctgacccaactacaattcgcgcgagaggtcggccaacgtaacaaggataacgaatgagatggatagggtcataccatctaaccaccgacaaaatgtatagatgtggagcaaaggcacactgcgtgatgtcaatgcatct

SEQ ID NO: 223128 - DNA, 470 bp, Glycine max
  unsure (1)..(470): unsure at all n locations
agcttgcacactcagagggacatttcacctatatctttatgaaaaaatatcatgtacatctctcctttacacaaaaataacaccatctaagcaaacttaactgagtagagacttgtactctccttcttccataccaatctgtcctcctcactcagaatcaaattaatacttccaaagtcatggccttttatctaagcaaattattatatttatttctcctactgatatagagatttctccattcccatctccacaatcaatttccctccctctggtcacctaaatttggcattctagattttatggttactacaatgttgtataatctagtatacttcctaaatatgaaaataaaccacttccacccagaggtcttcagaanataaaagtatctgccaacccctacccaccttctaacaaattnggaacacctncccttgaaatgcatactatttcttccctctcatagg

SEQ ID NO: 223129 - DNA, 421 bp, Glycine max
ctggtctctgcagatcttcacacagcagaatctctcataactctctggaacttggacctttctctctctagaaaccctagacatgcaaagctctgaatcccagtccaaactcccttcacaaaatctgatttcaggcttaaataggtggccttattcatgctcatgcgcttagcgcatgtatagaccacttagcgcacgttagtgatttttggcttaaggcgcctttctcgcttagcggatgaactaaagcggtgtgcttagatagatgaagcggtgcgattagcgaacctgtacagctcatcttcttccagagtcttcctcgcgcttagcccaagagtgttgcgcttagtggacgctcgctaagccagcagattggcttatcaagaaggtgaaaaacaacactttccaaagcttgcctaat

SEQ ID NO: 223130 - DNA, 455 bp, Glycine max
  unsure (1)..(455): unsure at all n locations
agcttatcaggcaggcccaactgctattactattatatgaggcccatgatttaggaagagggcaagaatacagagggcaagaaagatcgtttttagagaagaaaaatgagtttggcggcgtctaagctcaaggactgcattttgtttttctcttcatcaaatcctttgattcccatagctatgagtaactaattccatgtctgttgggtttggtgtaattagactaccttcatctaattcctgctttttttattcaataaagcaattgttattgttcttcttttgtgcctattgcctttgattgatcacctaattacttgattcattgtgttcaattgtatttggaaaaatctatttgaactgtgaatagaagaagacaatgaataatttctatgcctaaggatagtgtnacaaggattgctcatcgttaaaaccccttatccttaatgcaagtc

SEQ ID NO: 223131 - DNA, 457 bp, Glycine max
  unsure (1)..(457): unsure at all n locations
tcaaccccgtaatccaaggaatggaaattctgatcgccaatacttcaacaacatctcatagggatgaatgactcgggcatactttaagcttatgcacggaaaatgtaattatgaaactgagatgcccgaagaaacaccatttcctagttaaccatgcattaggtaccatgttcaattattttgttnttaagtgaaacgggtttatgatcccaacacggttggctcgtggtgcctaacacatgaaactaagaatgtagtgtgaagtttcacgcttcccccttttttgtttttgttttgtagaggaaaacgcaaggatgagcaaacatganaacaaatggtatgcaattttgcagatcataaagtttgttgaacgcatatgcatgatgatgccatgactcatgcaaaatgtgaggctggaatatgataatggacanatgcangatatgtccattatgat

SEQ ID NO: 223132 - DNA, 447 bp, Glycine max
agcttgtagaatctacataagcattagttgcttgtattttataaaactcaggatatttatttttcataaattaataactaattctttgaagtattgaaatgatttaaaagaccaaccttttcttatagatttttttttactcctaatagatatcaagaatgacatggcttaatcaaatttgtttgataaataaaaatgagagacactagaacaactttaaataatttgaaactaacaaagtatgactgcattaaaataattaaatgtatactaaaaataataagatataattttggccataaaatcatgataacaataactgagtattgaattgttatcatatataatatataattatatacatatgagtattggtatttataactatggacaaagatattctctattttctattgatttcacaaccatagataatagtgcgttttt

SEQ ID NO: 223133 - DNA, 469 bp, Glycine max
tatggtcatacactctaatacagtaatagtgtgtataggcatattttatgctatataaactgggaacatgttgtctttttagataattttggataagatctttaacatttatatctttatttaactgtatacaagtctaaatataatatgtttcactcttttacttaatttatatttttgtcacttcattttaaaattaatacattcgattctttattttagaaaatttataaaaaaaattcaatcctcaatatttccaacattttatatattgtttattttggtccaagttaatcctatgtctaacatatttatttaagatactatcaataaatgatctagttaattaaaatgtatgaaataaaagacataaatatatataacattaagaattagactaaaattagagattctctacaataaacaattaaatatatttattctataataaaaaaactaaaatcatgga

SEQ ID NO: 223134 - DNA, 455 bp, Glycine max
ggatccttgagtcacctgaggcatgcaagctttgagccaaaatctggactcaccatatatcttaccctcggaagcaaaaaaggaaggaaggaaaggaaattcccaatcaaagagaaagaaaaaaaggaaggaaaggaaattcccaatcaaagagaaagcaaacaaggaaggaaaggaaattcccaatcaaagagtgggagaaagagaaaaaaaagatacgaaaggaaattcccaatcaaagaagtgggagaaagaataaagaatagaaagaaaattcccaaccaaagaatgggagaaagtaaaaaagaaggaaaccatgacctaaaagtggtcttctccctttgattaccaaccaaaatcctgtgcgctagcgactttatcgccccgcgctaaacaaaaacagataaggaaaatagcccaccaaatatcaaagccaaaacacacaaagcccaaca

SEQ ID NO: 223135 - DNA, 469 bp, Glycine max
taggaacccaaacttgtagcttcaatgcaaggaaacatgcttatggctaggaatccaaaatttggttttagaattagaaaagcatgaaaattaggacttgcttgtgagagtttttgctcgaatttgggctgccccatgtttgatactttacatagaggtagcgtggaaaacaccttgcaatagtgtgtacacataggtaaatataaggggcatgaaattctttgcaaagggtgaaggaatattgaggtcgcttcctaaatgaatgtatgatagcacgggaatctcttttgaatgcaagtatgtgcataatgtaaatagcttgccaatatgcataagtgtgagtgaaacaatgaaagttcgtatggtatatatatttcgagtgtgtgtaggtagtttgtgatagcaaatgtttacgacatagttaagtgtataatttgacgcaatgccttgagcgtgagaatgtgtgttc

SEQ ID NO: 223136 - DNA, 443 bp, Glycine max
  unsure (1)..(443): unsure at all n locations
agcttcatgatgaataagattgatcaattagtttgatgatgacaaanagctcaaaagtcaagaacacttcatgataacaaagatgatgatctcaagaatcaaagaatgagttcaagattgaatcaagtacacttcaaggatcaagaggaaagttgaattcgagaatcaagaatcaagtttcaagattcaagattcaagttccaagaatcaagatcaagattcaagactcaagattcaagaatcaagagaagactcaatcaagataagtattaaaaagttttttcaaaaactgagtagcacatgatattttctcaaaaccttctaccanagagattttactctctggtaatcgattactagattattggaatcgattaccagnagcaaaatggttttcacaacacttcaaactatatttacaacgctctaattaattcaaaatg

SEQ ID NO: 223137 - DNA, 458 bp, Glycine max
  unsure (1)..(458): unsure at all n locations
aatcttcttaaggaagcttctcaaggaggtgagtttatttatgagaggggtgtgtgtagctaagctctagcttctcaaggaagttttctcaaagaagcttctcaaggaagttttctcaagaaagcttctcaaggaagctacctagtctataaatagaagcatgtgtaacacttattgtaactttgatgaatgaaagtcttatgagatacacttcaaagttccacttctttccttcttttattccttcaatttcgtgctccccccttctatctttcttttcctccattgaagcatcctctccaagcttcttatccaaggctcatcttggtggtgaagctccttcttccatggcttattccttaatggatggcgcctcctctcacctctnttcctttgtcttctgctgcatctccatggtgaagaatcaccattgaaggacctcattgatgctcaaagat

SEQ ID NO: 223138 - DNA, 378 bp, Glycine max
aactttttactcggatgtccgattgagacctgcaatatatccagacgctcgaaattgaataccgaagctcttagcaaattcaaacgacaatatatgtttactcggaactcagattgagtcccgtaatatatcgagacgctcgaaattgaatatcgaagctctgagaaaaattcaaacgacaataactttatgctcggctatccgattgagtcttgtaaaatatcggaacgctgcaaattgaatgttgaagctctgagcaaattcaaatgacactagcttttttactcgggtgtccgatggacgcctgaaatatatagagacgctcgaataggaataccgaaactctgagcaatattcaacaacaataatcttttactc

SEQ ID NO: 223139 - DNA, 438 bp, Glycine max
tacgcgacctatgaaactaagcttcaacattcaatttgagcgttttgatatatgtacgatactctatctgacatccgagtaaaaagttattggcgtttgaatttgctcagagcttcggcattccatttcgagcgtctagatatattacgggactcagtgaaacaaccgagtgaatagatattgacgcttgaatttgctcagagcttcaacattcaatttctagcatctcgatatattacatgactcaatcagacatccgagtaaacagatgttgccatctgaatttgctcagagtttcgacattcaatttcgagcatttcgatatattacgggactcaatcagacattcgagtaaaaaactgaatgtcgtttgaatttgctcatagcttcaacattcaactatgagcgctctgatatattacgatactcaatcggaca

SEQ ID NO: 223140 - DNA, 434 bp, Glycine max
  unsure (1)..(434): unsure at all n locations
agcttatgcgcctatatacttacaaacgttctcttgcacaagacatttaaccgaaaaaatgcacccatatacaatcaaggcagctncgttacctagattatttacacgtacctccaaggtgtatttgttacttacatcacacacatctccttggctaaactcacatacatgcatactcaagcagtttggggcaccaaaaattgcacatgtgcacatcttggcatttctaatacctacatacgcaaacttcatgatgaatcttgactatctacacaataaggcgctacatttcatgctcttttntcaagattttgctatctaaagccgcatgcaattcaaacatattttcctttgctgactaaaattgcattcaaattaaaaagatattttttgaatatgtttcttacaaacatgcacatattatatatattttt

SEQ ID NO: 223141 - DNA, 457 bp, Glycine max
  unsure (1)..(457): unsure at all n locations
cgtagggttcaccccanattccgttgtcatatgctaaacttgatcccatatctacttgataattcaatggtagccataaccctagccaaggttcatcaacctccatttctccgagaatacgactcgaacgcaacgtgtgcttgtcacggagaagccccggggcgttccattgagcattgtagggctctgaagtgtagggtgcgaggtctaattgatgctggctgaaatttgaggaggatcgtgtgtaaatcctgacattgacaagagatgccacacatggggcaattntgaaagctgctgntagatgtctctaataactcaccaggattttcaactttcatcggaattgggtgcaagccattggtctatttgctcaagcgacctgtgaccattcaatcagaggttactcgtcttgcacgttggcggggctgccgtanaacaacanataaagctcaaa

SEQ ID NO: 223142 - DNA, 364 bp, Glycine max
  unsure (1)..(364): unsure at all n locations
agcttaaaaaccatattagtgtttcagttatttacgtacaagtaaacataaattaataaacattactatattnctatattataattaaaatatcataatactccgtgagtgtcatatcaataaaaaaaatataatcataatataaaaggatgataaagcctttaatttatttattttctcaattaaacattcttagtatttntttgatcttttctctatatatacatttcatacattatatctctttaatcatttattcctttttatttatattctaaattgaattttaatttttttataagctatcgataaaaaaacctcatgttgcaatttaaattgctcaccttcttcttttatatatata

SEQ ID NO: 223143 - DNA, 419 bp, Glycine max
  unsure (1)..(419): unsure at all n locations
gctaagaaatntctcaaagctatagagaacgctgattgcttatgtaagagcaaaaacagcggagcagagagtatgggaatataagtggttagaggatacaaactattcagcataagctaaatgaagtggaagatctagcctctaatataattctgtctgaggatgagcccaaggctaaaaaatccttaccgaagattagtgggatgctacaaatgcctatgaatcctctattgaggcagaaatctacagtccagtggttaaaaaaaggtgattgcaacacaacttattttcacaaagtcactaatcacacaacatattacaatgctctccaaggtagtcaaattgatggtgcgtgggccagccaccttaggtatgcgaaaacgatgctgttaatttcttcctcaagagatgcactgaac

SEQ ID NO: 223144 - DNA, 368 bp, Glycine max
  unsure (1)..(368): unsure at all n locations
agcttgntgaatcaagctgtaaacttatacttttgtcataaccataagcactcttataaactcaaataaattctggacaagttcttcacaagtccaaatgcccctacttgccataccttgcagttgtggagatcaactgtcatctttcttctattgtgacaaagtatggggacagatatccgcgatcaaattgcattccttccacaatataaagactattctcggtactccttccagtttcaattgacactactccgcttctgcctacttggtgcaaagcctcggacatcatgtttccaactgaataatcattcgcagcactgactgcagcaacatctgcaagctcatgatcctcaatctacaagtgc

SEQ ID NO: 223145 - DNA, 451 bp, Glycine max
taggactagaccaccctctatacactatgtgggaatgattctttctatacaattcctattggcatctctttgattgaaacaagagtcatttctaaagagccaaagctcatgcacagtttctgtcaaagctaatctaacaagtgcagatttccagcctttacctccatagcaattcaaaaaccaatttatctcctcattccaaattcttggagtatgatggataccaagccaatgaagtattccaacccagaacttcttcaacataaaacaatcagagaataaatgatcaatgtgttcaacctcagtacaaaagacacattgattattattcaacattccaaaccgatgcaatctggcctttgtggctaaattcccatgacagatcatccataatgtaaagattgcacgaggtcttgctctattgtggagaattaacttggccgacactaca

SEQ ID NO: 223146 - DNA, 410 bp, Glycine max
agcttcaacattcaatgtgcgagcatcttgttatatgacaggactcaatcagacatccgagtaaaaagatattgtcgtctgaattggctcatagcttcaacattcgatttcgagcgtctcgatatatgacgggactcaatcagacatccgagtaaaaagtctttgtcgtttgaatttgctcagagcatcaacattcaatttcgagcatcttgatatgtgacgggactgaatcagacatccgattaaaaagttattgtctgttgaatttgctcagagcatcaacattcaatttcgagcgtctcgatatattacgggactcaatcaaacatccgagtaaaatgttattggtcgttgaattgtctcagagcatcaacatttaatttcgagcgtctcgatttattacgtgactc

SEQ ID NO: 223147 - DNA, 458 bp, Glycine max
  unsure (1)..(458): unsure at all n locations
gtgagcanattcaaacgacaatgagcttttactcggatgtctgattgagtcccgtaatttatcgacacgctcgaaattgaatgttgaagctctgagcaaattcaaacgataataaattttttctcggatgtctgatatagtcccgtaatataacgagacgctcgaagttgaatgttgaagatctgaggatattcaaacgacaataacattttactcggatgtctgattgagtcctgtaatatatcgacacgctcgaaattgaatgttgaagctctgagcaaattcaaacgacaataactttttactcggatatctgatatagtcccgtcatataacgagactctcgaagttgaatgctgaagctctgagcaaattcaaacgacaataacattatactcggatgtctgattgagtcccgtaatatatcgacatgctcgaaattgaatgttgaagctctg

SEQ ID NO: 223148 - DNA, 401 bp, Glycine max
  unsure (1)..(401): unsure at all n locations
agcttatggccgtcggaataatttctttttctccaagccatggctgaattttaatttacatttacattggagaaaatagttggataatttctttgctccatcttatatattcttcaagttacggtggaatgaaattcaattaaaattttagaatgaagcctataataattactagttaggtttaaatttttatcacacattatgattaaattaatggaagtatatgaaatacaagtaaagtagaaaaaaatggaaagaaaattgaagacatgatggattttttttntaatttttgacgaaacgatgaaatatgatggatagtaatatagtcatgtataataaagtattgaatgtatctataccttaatttaattatggatagtaatataggcatgtataat

SEQ ID NO: 223149 - DNA, 463 bp, Glycine max
  unsure (1)..(463): unsure at all n locations
ggaccttgaatctcagctatcctctacctttcaatctggggggtattttattcatcctactggcgcatcttcttcatccaacccaagattttaaataccaaccacagtcacattgtggtttcatcgtgtttgttgatatcacagacaaatgcgacagttgtgatctcagttgcagttgtagcgacagttaaaaaaccttggtattgcagtccaaatcacggtcgcagacgaccatttttaaaaaccttgatacaaccctattgttagacaagcatgagatgagatatgcatgtgtgtgtttagtcaagtctaagactgaatttttaaattgtcatactttctaagctttcttgttatgcatttataatttcctattatatgttgcccaacattacatttcaacctgttgttgtccagcttcttgtgaaccactgctcataactattattttnttttgaaatct

SEQ ID NO: 223150 - DNA, 472 bp, Glycine max
  unsure (1)..(472): unsure at all n locations
agcttagcaaatatacctgagtgtggcccattttcatcatatcttccgtaatactcgccacctctattatatctaataattttcacatttatgtctaattgtctttttactttattctagtagatttctaaggcatccattgcctgagaaatctcaggcagtaagtagacataaccataacgtgaataatcatcaataatggtgataaagtatccttcctttctgaaataactaacatcaaaaggttcacaaatatcagtatgcacaatttcaagaagttaagtgcttcttgtagctcctttctttgtatgttttggttgttttcccttaatacaacccacacaaatatttagatccgtaaaatgtagataagggaaaattttcattctttattaatcttttcatcctttctctagaaatatgacctaaaggtttatgccacaagaaagcagatcgttcattcactanacta

SEQ ID NO: 223151 - DNA, 461 bp, Glycine max
  unsure (1)..(461): unsure at all n locations
caaactttgctactggtaatcgattacagtaaactggtaatcgattacagtaaactggtaatcgattacagtaaactggtaatcgattaccagagagtaaaaactctttggtaaaatcttttgtgaaaacttcatgtgctactcaatgttttgaaaaactttttagtacttatcttgattgagtcttctcttgattcttgaatcttgaaatcaaatttctcttgattcttgaattgttcttgactcaatcttgaaaccattctcttgggaattgttcttgactcaatcttgaaatctttctcttgggctttttgtcatcatctttgttatcatcaaaacaacttgaatcaatcttgattcatcatcatcatgaaccttgcttctacaatctccccctttttgatgatgatgaccctganatcaagaaacacatatacacantttttcctaattgatcactc

SEQ ID NO: 223152 - DNA, 457 bp, Glycine max
  unsure (1)..(457): unsure at all n locations
agctntaatggagcttacatcatgtggtatctttctcatcttcatctaggggatgttcttttgcttcctctatctttctgttcggtgaattatctttaattccttgttcttcatcttattctccatgtacatcctccattgtcttgtggtttggtgttgtttagagcatattaaaaaaaataaaccgattaaatcttaaatctacacttgttcttgcatttctatggttcaaattttgtagatctactcttgaatcatatttttgagttgattctagtttctatcatttatcattcataatattcttgtgctgaacctctagatctaaatgttctttctaaatattgattagaacaaaacacanaaatctaagtgtaatcacttagtccatgttgtcttaaagtcatgtntagacatacaaattgtcacattatgctctaagtttgcgtagattttt

SEQ ID NO: 223153 - DNA, 467 bp, Glycine max
  unsure (1)..(467): unsure at all n locations
tgagctcgctgttgctaccccacatagcctatcgaaacttgttttggccccattcttcctttcatgccctctatgtttcccgttccaatgctttggctatggccacatagacgtctctcaactcgtcgcattcttttcggaccttgatggccattgtcttgaacctttccttgaccgcttgcaccctttcaagttcggccttcaaggcttgcacctcttcactctcctcaggggtttccacctcttcctcacttgaaacctttagcttccggagccaatctaactcttgtgtccgagccttcagccacttgtgatagtcgccgaagatcccattgctgcttcgcctaagctccttatcttttctttgcaccatgctccatgcctttcanaccctttgaaatatccttgcattgnggtcacttaaaccccgtgtgatgaagggcgtgatactttctttcaacgatgct

SEQ ID NO: 223154 - DNA, 437 bp, Glycine max
  unsure (1)..(437): unsure at all n locations
gcatgcaagctcgggagagagacagcacgctggcatctatctntcattnnntncgcatacccccaaatttgtcccagtaaaactacgatcccaaactcgttaaccggtggatcatcgtcaaagtagaacattagggtggaaattatattcacacatctccaccattgggatttgaaaaataaggcctacggagggagaattgctcatcgcacacagacagtgcaacgaaggttataatcccttcttcttctctctaacacttgaaaactctaccaagaggaaacgtctggggaatcttaagataccactagagatttctctcactatcaaactacactcatgagcctacttagaggtaagagatgagtttatcgcaattagggttaaaatgaacatctgtagggatccgtagaggatcaaatttacgttattttggg

SEQ ID NO: 223155 - DNA, 468 bp, Glycine max
  unsure (1)..(468): unsure at all n locations
ntataacaatccaacggggaatgagtctaagatcgncatttttctgggatagatttggcggtatgcgggaaaagagagagttttgggaggaagagaaggaaaaacgaaattgagaggaagaggaggatgagaagctatcgtcagtctgaaaattgagctaaaatttctctatttatagttaggctactcacaacccattatttactctatttatttatttttgttattttataaaaacaaactctattttattttctatcaaatgaataaataaaatatcctttttattttctctcaaaccattattctaattaataaagctatttctccttatttatttaattataatgatctcatcatctttataaaactatttatttacaaataacaatatttcttaaattagtttacgaaaaatgggatgttatatctttccttttcccgcagacacccaaaatctatccgagt

SEQ ID NO: 223156 - DNA, 245 bp, Glycine max
ccacccaggaagagcgaagccaagcccctactttagaggggcaactcccaccttaagaagactatcccgggcaagacgacggggaaggagatacccatctcggccccctgctccaccataaagatccgtccccgcaagaactaccccaaccgaacatagtccgtaataccccggcctcacccacacccgtaaaagaaaccggtccctctgcggaagacaagggaaagacagaagcgcctgaagag

SEQ ID NO: 223157 - DNA, 455 bp, Glycine max
  unsure (1)..(455): unsure at all n locations
tcttttggaccttgaacaggcaactaactcctctntcataaccatgcttatgtgctcgcgactggtccctttcttcctttcgcaacttgagttcactattgctaccccatagagctccgcgaaatttgttccggccatactcttccttgcgagccctcttggtctcttgttcaagggctcttgcggtaattgcattctcttcccgtaacccggcacactccttccgaacgtgtgtagcggccaacttgaacttctccttggcaagttttgcctttcctaactcgcttttgagagcttggacttcttcgtgctcttccggtgcttcaaaactctctttgctgacgacttttaacttggcgagccaatctaaacctcgtatatgaactttcagccattcgtggtacccaccaatgatgccgctacgaatgcctctaagctcttgatcttttcttaac

SEQ ID NO: 223158 - DNA, 356 bp, Glycine max
agcttgtataagacagaggatgataatgtttctgctcaaaccttcgacaaaaagttggctaacatagcaccgtgtggtgaccaggaggctgttttcgaatcaagcgacactgttatacactctgtcaaactccatcctacctatgggtttatatgggagagggaggaaatggatgctgctccctctgaagatggagtcattccaccagctgggtggaatatatatgaagattaatatgactgaggccactgcatgggccaaaattactgcttatatggccgaagatagactaaatacggcctttgaggctgaatctcagccaaatatggcagttgaagcctagatcgaagatcatg

SEQ ID NO: 223159 - DNA, 448 bp, Glycine max
  unsure (1)..(448): unsure at all n locations
ngggtgaggttatttaccataaactagtgtacgtgagtaatggctatgtagagtatgacggaatggaactatgattntccattgtattaataggcatgtgttgtttgaacataaaagcatgataagaacacttctctttgaattcttggccttcacaaagttcaacacaacaatgccttacatattagacaaattatatgctacaaaaacatccaatatcataatgaagatgcatctgagactacatcataatgatgatgatcttgactctaataaaccatatgaattcactattattcacaatctacacctttaggacaatatcatgatttccaggggcaatcacacatactgagggctcatcataagatacatgttacaacatttgccagtgcaccattgctcacatcctcatgcctatagaacatatgtaataatattggatcat

SEQ ID NO: 223160 - DNA, 333 bp, Glycine max
  unsure (1)..(333): unsure at all n locations
accactggggctaataaaatgtacaatttaaaaataaaaaatgcttaataagtggagtttttgtccacaaacagtcaccagaggcaaagcaattgcaaagattcattaaatatgtacattaccttctattggaggtatattgaccctttcctttagtaataaaaactcgaacacaacgtcccaaatatactttattattcaattcaagaacttgtgattatagtagaaaattgattntcaggttcaagtcatagctgtcaacagcggtcgtagcggccactatagcgacggagcagagcgacacccatccgtgaccgacacgtgtgtagtggc

SEQ ID NO: 223161 - DNA, 467 bp, Glycine max
  unsure (1)..(467): unsure at all n locations
taggtaattaaataaaattcgattaattgattaaattatctgtttgaattgttataattttttatatatttaattattgtgggtaaaaagaaaattgcatgagcactgtaaaaattacaactaatgtagtactgatcgtgcgtggtacatgtgtagctgaaggagtaactttcttctctcggtcaattgaccatggactgttcaacatgtgttacacgtttgacattgacagtttattttattttatttatttaatcggtggcatcttttgagttactctacttggttaactctaaaactttntagtgtttaatattttgttttagtacttaattaattaataaattctttatttattttataataaattaataaattttattttagtttcaattaataacaagtgaaaattctntatcaaaaaataaacataataattattatattagccggaactaaaaataaat

SEQ ID NO: 223162 - DNA, 397 bp, Glycine max
agcttcaatacaaatgatagtgagcttgtgttctatccatgtttaaccttaaaggactcttgctgttatgctaaaaaatataaaatcattcttggactgggatcatctatttatgattttttcaaggggatttcatcagttataacacagtggctgataatggctttgttttgtagatagagacagttcctatgtccacaatttgaagaggtctgtacgagaaacggctctgtcattgcggtcatgtaattcagagtcatcacgggatagtcaatctgatgaaagttctgagcattttcttgtccctctttcagaaactagcttttctaatttacatgcagaccagacgggagctttattaacgaacaaaagattatctgtatcctcaatggatgat

SEQ ID NO: 223163 - DNA, 461 bp, Glycine max
tatagaatatataataagagaactatgactattgaagaatctattcatgtttcttttaatgagtctaatgctatttctccaagaaaggatattttagatgatattgcagaatctttagaacaaatgcatatttatggacaagattctaaaggaaaaggaaaaggaagcaatgaagatcctctagtagaagccaaatcaaatgatgaacttctgagagaatggaaagcttcaagagatcatccccttgacaacattattggtgatatctcaaaaggggtaacaactagacattctcttaaagatttatgcaataatatggcttttgtgtctatgttgaacctaaaaacttaaatgaagtcataatagatgatcattggatagttgctatgcaagaagaactaaatcagtttgagagaaacagtgtgtaggaactagtagagaaacctataactactctatat

SEQ ID NO: 223164 - DNA, 359 bp, Glycine max
  unsure (1)..(359): unsure at all n locations
gcgagcattggtgcttcctccagaacaacagcttctggaggaatcttctggagggcccaagtgggcctggttgctatttacaccccctatttactaaatgcgtctccctttctatttttttggaaatctttttccgtaacgttacgaaactttacgaatttcgtaacgatacttattttctttccgcaagggtacgaatccttacggattatgtgtttattcttttttagctttcgaagaagttacggagactcacggattgcgcaaaaacacctcttttcgatttccgccacattacggaatttcactaatcacgcaagcctgcttnctttcgatttctgagacgtctcgggacttca

SEQ ID NO: 223165 - DNA, 460 bp, Glycine max
  unsure (1)..(460): unsure at all n locations
tgtgccccattntcctataaatagggtgagaggtgaaatggataaatgttcagccctcctggtaattcgagaatcacttgaaattagtgaaaaaaattgtttccgtgaagaaaatccaagccgaggcgcttccgtaacgtttccgtgggtgatctcgcgaagatgttcaaccgttcttcgacgttcttcgttcgttcttcatcgttcttcggtcttcaaccggtaagttcctgaaatcgaacttttcaattcattctatgtacccttagtggtcctcatttgtttcacgtgcttttattttcatttcatttactttccgtacctccttttgacgtgctttagtcatttttttgcctaatcaaaaaataaaataaatttccagcgatcatttgaattgtaatatccgctaatttctggtaaaatgaaatccgaccgtttggtcatgccataaccacgttgt

SEQ ID NO: 223166 - DNA, 436 bp, Glycine max
  unsure (1)..(436): unsure at all n locations
agctnggaattatagacattgctttatatgttaatacatgagtcacatgaatgcttaaaattgtttggtttgaattggcctagttgtttggttaaacttgctgcactagggtggtcacattgcacataaattgttgtaaaatatcaaattctttctttcaaaataatatacactgagtggtgatctttattagttgtatggtaacacctacaataaataaagaccacacaaaaattggttgacttcttggttgctatacttgggataacgaaaatagtatggttgttggatcaagtggcctcagaataattaagacggggggctgaattaattattaatgaacctctactaattaacaatctatccttcttaatggtactaaaatcaattacgcttttactataatgttgagaaaggaaagaacacaaatagaaac

SEQ ID NO: 223167 - DNA, 463 bp, Glycine max
  unsure (1)..(463): unsure at all n locations
tactnnnttttgaaggtaatcctgattaaagcatattcatatattaaatgtaggtatttttttttttgagaattcaaattttagtttatcaagatataggaaattaatatctttcaatagaactaatttttgttagttaatattgatatatcttctaaggggaattcacacataattaaatttgtcatgttgtagaagattaatttcttttactagatacaaccctcgttactgttagatacaaccctaaatttcttataaaataaaattatataagtttgttgtgtaaataattgatctcttatgattgttgtaccaaaaaaagatctcttatatatgattatattcgttgttgagatttctttattactagaagaaatttanaacacacataagtgattccattgacttgagaatacgaagcggaacanaattcagtacattcaatcaacatacgttaaca

SEQ ID NO: 223168 - DNA, 413 bp, Glycine max
agcttagaagcatatcaaggaagatctccttatcttcctctttcaacaaacatagaagatcacctagttagaagatcaatttttataagcttttgaaaaaataaatcaaatggaaatgatgcacactttaaggggagtaacatttattttctcaaaagtctagtcatagaataaatagagagagaaaaaaatggagaagattcaacaaaccccttcttaacatgcataaagcatagttagcagatgactttgggcatcgtgtgataccctcttgggatatgtactgtgcgatagggattttcagatgggaggcacagtgtcaaacttattattctgcaatgggagagttatcttaccattagatctttcaactcgaattggggcttaaaagattccttgttcttttctgcttt

SEQ ID NO: 223169 - DNA, 386 bp, Glycine max
  unsure (1)..(386): unsure at all n locations
ngaaatcacaaacaaacagaatatagagcagatgcatatttgtattaacctattatataattgaagcatataaaaatacttggtacatatccaattcaaccggtgataactaagtaaataattattaaaataatcataaatattaaatattaagagtgtatcccgtgcaaatgcatctagccagttacacttgatgacagctagacagactctatatagatatagacaaaagtttaacgctgaatgtcatttgattctacctctctttctatataactatttatttattatttatgacaactaaatgcctttaactattatcccgtgtcttattataatataaaaagggggtacatactgccaaaaccaactacagagaaacaaga

SEQ ID NO: 223170 - DNA, 474 bp, Glycine max
  unsure (1)..(474): unsure at all n locations
agcttgcattatttacattctgcgccttgttattcaaattcttcttgacatcatcaagatcttcatgatttacattctccccctttntgatgatgacaaccacctgtaggttaggagcaaaaacaaagaaaaatatctatttgcatatagtttactcccccttggttttgcaatgattccttatatgagacatttgaagatttcatatttttcatatgtaaacaaattgtctcataaagaataaataatttttcttactattttatcttttatctttctctcctcctttgtcaacataaaaaacaaaccatgaatagagaggagaaaaatgttaccacttgttgcaatgtatgagaatcaagtgataccaaaaggcattaaaacaatcattcaatattaatcaagcataaacaagtacaataacacatcaaccaatcatcaaatatttcaaatcacattaatgaaattaacaat

SEQ ID NO: 223171 - DNA, 472 bp, Glycine max
  unsure (1)..(472): unsure at all n locations
ngaatgaccatntgatagccatgttggacatgccaaatgttttcataagtaggtagttttgcttttgaattcttagacagaaatggataaagtagagggacaaatagtccattntgaaaaaacttattgtcaacctctttcagatatgaatatacctgattcagaagggaagaacttgcatcaatatctcaatttcaattgaaacatgggtttgattcacactccatgttctgagaaatatttaccatccaaaaaaaggagagatagacaaagacacacacacacataatcactgcaattaaatatgcataagcataaaagactcaacatagagtttcctctgtcggtccgagttgtaattnttgtcacagtgttacaaccaacaccataaatatttggtaaaaaaaaccaataaacttatatgtgttagtaattttgatttaaggatattatagtaatttattattccatt

SEQ ID NO: 223172 - DNA, 454 bp, Glycine max
  unsure (1)..(454): unsure at all n locations
agcttggtcccgtaatttcccaattaactatgttccctgagaaagtgctcgacagcttttggaagtcacgctcagacatgacatcattcccaccgtcgccaccgtgctatgcaatggcaacatcgactgtgcactctccctttcttcttatcttggatctgctagaagaagcgttgtatgctttgaaattccttccatactcttagagatgtgtctttgtatcttgattctaatagtgtcgcgcaagttggttccttctttgtgagacaacaatcaaatcttgttcaccagttttactccgattccagtagcatgattcatgttgatgcagattcagttgaaaccatgcatgacgtgtttcaaattcattgaattgtgttgttactggaatttactacgaatganatcaagacanataattctctcgactcgtgggatggaggtgtgcttttga

SEQ ID NO: 223173 - DNA, 404 bp, Glycine max
  unsure (1)..(404): unsure at all n locations
caccgcagcagcagcctgcctaaaaacagagaggtgtttttgggagaggcgcctgcattttgtttaagagtatgtcccgctggtaaaactaactttccaaatgtttgccttcacaggaaatggccccgaggaagcttgcctcaaagaggtccaggacggacaaggcaaccgaacgaactanctccgctccggagtatgatactcaccgctttaagagtgctgtacaccatcatcgcttcgaggccatcaagggatggtcgtttctccgggagcgacgcgtccagctcaggaacgacgagtatactgatttccaagaagaaatatggcgcctgcggtgggcaccactggttactcctatggccaacagtgatccagaaataactcttgagtttatgccaatgctt

SEQ ID NO: 223174 - DNA, 469 bp, Glycine max
  unsure (1)..(469): unsure at all n locations
ntatcgaatgaattaagtaaactcgagtctctgtggagacatatctcttttataaatatganatctacaacgacaattggtacgcttgccaaaagtcttaacaactgggtcaagcttagaattagaggagaggcataagtcatcctaatagtcatcttaatagaactgtttgatcactttagttgttgtaaatagctaaactagttaaattggcactactagaaaataaaattttaacattagttattacagattttcaacattggttcaacatcaattttgaattaatattgaaacaaccattgttaaaagtatcatttttaacatcagttatgaaaatggatgttgaaatccaccatacaacattggttcttcccaaaattgatgtagtatagtacgaaatagacaaaagatagataatgaaaatgcaaaaacaacattggttctaccanaaccgatgttatatagt

SEQ ID NO: 223175 - DNA, 330 bp, Glycine max
atcacctaaccattcccattcatccgatccttgccgctgaatgtgtataccttcgatgtcctttaaataattgactgctgactcaatttcattttcaaacagtggtcttcttccaaaaactaccactcccaacctgactgcatgtgctggcccatgtgtctgatggtttggttttgctgtgtacatatttggtacactctaagatacctctcatctagatgttgctgctgctgatgccaattatccttcctcaagcctgatcttatcaccttttacaatgttccacctcatgttgctgcatactatatcttcatgttgcgctgaattgac

SEQ ID NO: 223176 - DNA, 438 bp, Glycine max
  unsure (1)..(438): unsure at all n locations
ctatgaaactcagcttacaagcaagcttccatcataaacactaggttgtactttctgtatttaatcatcngantaatattaatcttgattttagtgattgataaagttgattatataaaaatatatttctataagaaaaaaaatgagaaaaatggttatgcagctacagtggcagatccaggaccctaggttagcaaggatattttgttttaaaaaaaggtataataattgttagatttaattacttatttagtccttatactatttttatatttcaatccttatatatataaaatagacattttagtccatacacatgcacttttaattctattttgatcccttgcaccaagtaatgttaactctcttaactcataccacccaattctattntttggcaatggacaacaaccacaaattttgtgttaaaatgacaat

SEQ ID NO: 223177 - DNA, 440 bp, Glycine max
  unsure (1)..(440): unsure at all n locations
ngagatgtgatataccttattctcattcagaatnttatctttagatatagtcttctctacatcttgtccttctctgcgaatgcagactactctataatctttgcatatagttttaacctatagtacaataagtcaataacaaaattatagttcattgtttccacaacctatggcaaaccagtattcattaacatatgtggaaattcaatctgtttatccactaaccgtccaatccatcacgtataaatcaaccaatcaatctattcaattataaaaataaaacttaatagattagttgaattggatcaccatttgctattggatagacaatgaaccgtttgtctttatgagacaaatattggattctatggtatttgggtgtcagaatgtgtataaatattaaaactctgtttagaataatagaatataatggatggatt

SEQ ID NO: 223178 - DNA, 241 bp, Glycine max
acagaacatctatcaataacagcatgcagtagcctcttcataacataccttccatccataccaagaataatgactgcattctttaggagaccaaatgcaactgtagaatgagagccctcttgtatgtgaaactgagcaactgaccactcagaagtgaagtacttgggcaacacccctacaagagcaaagttacatatacaatcaacaagggagaagggaattaatcaccgcactcttccaa

SEQ ID NO: 223179 - DNA, 457 bp, Glycine max
ctaacattattatattgaccaaggtgtgtaaaactttacttttgttggattaaagtattcagagagtgtatatatgtttgagtgtgagtacagagtagtatactattatctgagttacatgaattttgaaattaaacaaatattctcacacttgttttgggtgaactgaaatcactccatctgttaattcgacgagctctattgaaaaaatttcaatgcatgtgtttttattgtttaacaagctatctttccaacaaaagtatgaccaaaatattatatttgtgtttaatttttttaattagaatcatcaagagttattacaaacgtgtatagcttatgagaaacactctgtttgcaatacatcgaaacaagttatatgaatgctctgtttagatcacaattttgaagtcttatgcatttgctagtgttatatcaccactaatttgataatatacta

SEQ ID NO: 223180 - DNA, 395 bp, Glycine max
  unsure (1)..(395): unsure at all n locations
ngaacagacttgaactctctctagcataagcaacaatcttattttctagtacgccatgaatgctcctcacacccaaacctgtttatagtcagaaagcttccttccatggaacctcttggactcgatcttccacaatgtatacccttcaaaagagcaaactaaagatatatagccacatatgttattaaatgaaaattgactctgctaggcccatagatctagctagcccttacaattaacaggctcatatacatctttgaactttaaaactgatgagcagagtgattcataccgaatctcacttcatatatattctcgggacaatactgatatctctatcaactgcgtactccatctgctgccactgtctgcgactactgtatttggatatttct

SEQ ID NO: 223181 - DNA, 402 bp, Glycine max
agcttgggctattagaagaagtataatcattattttaagccagattgcttccttcacaccttcagctagggccatgtattatgtttcagtgtgaaagacaacaactgattgttgatttgctttccaactgattgatgtaccaaacaaagttaacacatatcctgttaaggacttccttgtgtctacatttcttgcaaaatctgcatctgcatagcctgtgactactgcttcatgtgttgtcttcttgtactttaaaccagcttataaagatccatttagataccttagtgtccacttcacagcttcccaatgtgcgctgccaggatctcccatgaatttgcttataatacttataacatgagccaaatcaggtgtgctgcaaaccatttcatacattatgct

SEQ ID NO: 223182 - DNA, 376 bp, Glycine max
cccccaagaagcttagagaggcgagaaatcttattattgtgaactaaagacatttgggtgtattgcttatgctcatctaaagcaggataagttggaaccaacggccttgaagtatatcttcatatgctatccacaacgagtgaagggatacaagctaaggattttggaacctgaacacaagaagtgcatcatcagcagagatgtagtgtttaattaactacaaatggaaaatttaattatgccattcaagtatggtagaagtcaaagttcacaggttcatgtgaagtctgaagagagtgtgactacttaaactcatgaggaatcagttgtggcacgatacaagttgttcctacatctagacaagcaaatgaagaac

SEQ ID NO: 223183 - DNA, 465 bp, Glycine max
  unsure (1)..(465): unsure at all n locations
agcttagaacaataaacatggccttctcttaattgacttagggcttggcgaccactatcaataaagtactttcggcacctactatatgttgacttcaccaacgctgntattggaatgctgcgacaatctttcaacaccttattcacacattctgataagttggttgtcatgtgaccatatcgtcgtccagatgtatcgtaagccatgctccattgttcctttgagattcgatcaatccagtgggttataactggactcaatggacgagacttttctaggttttgatcaaacacatgcttgcaaggagtgtacgctgcatcaacattggtatcatcaacagttgtacgtagacatgaaactcaaattatattaatgtataaaataaaccgtacccaatttcttgaacatctctttttgtttcccgttgttgaatttgcgatagagattgctggctatgtgtcggac

SEQ ID NO: 223184 - DNA, 466 bp, Glycine max
  unsure (1)..(466): unsure at all n locations
ctatgaaactcagctaggaatactgcatatactaatggtggagttgttctctgctttgcctgacaataacaatagcttgactcacaacaacgctggaggcggtaagggacaatggtcattcaaataaacctgtggtacatgaacaaagattatatcatgcggagaccgactcaaatgaaccatggaagacattgcataattgttatactagctatattcaatgtacctgaacaaaaatgattgccaaacgcgtgaccgacacatatcatgcggtgcccaaaagaatcaggtggtggttgacttctaagaggaaaaaatgtcatgctatattgacgggacaacaataaaaggattacgttatactgtgacgcaatcacatatctcatctctgatatatccatccacttgtccaactaacctgcataagcanaatacacatgtagtaattaaagtttgtattataaaa

SEQ ID NO: 223185 - DNA, 386 bp, Glycine max
  unsure (1)..(386): unsure at all n locations
cgcttgctacaacagaatgctgcagcagcaagcatactttcttttgcaccaaatagccttgtcacctgctctgccacattgtcctcatgtcaatcaagtcagcacacctcaccatcctttggatatggtggtaacaagatntcgcttcacactaaatcctatggattctcttaaagtgtcgagcacacactcagcacgcttatcttaagagcagctgtacgaaacacgtacgataaaggcccgcaggacctgtgttcacgtcaacttccttgtcatatgtacaacgcacgtcatgacgcctgactcgcatcatcatttgacctaactttcgcctcacggctaaccacctattattctgaaccttcaaccttttatttaaacacccc

SEQ ID NO: 223186 - DNA, 471 bp, Glycine max
  unsure (1)..(471): unsure at all n locations
agcttgcccagagaaggagtccacggaggatttgtcttccacctcanaagactggaaagcggtttctaatgactcctctgcggcttccacataaggcatagaggatgggcagctcaccaagatgtcttcctcgcctgatacgatgaccagatgcccttccactacgaatttcaacttttggtggagtgttgagggaacaactcctactgagtggatccacgggcgccccaacagacagctgtagggagggttaatatccattatttggaaagtaacttgacaggtgtgagggcctatctgtactgggagatcgaactctcccctaacctctcggcgggtgccgtcgaaggtacgaaccaccattgaacttggttttaagtgggaggcattgaatggtaatttctccaaagtgctcttangcatcacgtttaaactggaaccattatcgatgagcacttntgctacgatatg

SEQ ID NO: 223187 - DNA, 466 bp, Glycine max
  unsure (1)..(466): unsure at all n locations
tgttcatgagagaaaaagagatgaagagaatggtgttatctatacaacctatgtatttactaatgcattatgattattgtccatcttctattgctagttgttctcccccaggtgtggaagaattattgaagaagtttggggattacttccctaaagatccccctcatgggttgcctcctttgagagggatagagcaccaaattgatctcatgcctagagtttctataccaaataggccaacatatagacgtaatctgaaagagaaaaaagagagtcaaagacaagtggagagcttgatggaaaatgatgggttagagaaagtttgagcccatgtgctatgtttgtncgtttggtaaatcaaacttctaaggtgctaggtaggtaagaattagaaagcttgggagggaatgcctaccccacactgaattgcttataataggatagtaaattctactacttcttattc

SEQ ID NO: 223188 - DNA, 470 bp, Glycine max
  unsure (1)..(470): unsure at all n locations
agcttcagctctcagccanactcccttattattctaatttcaagcttaaataggtggccttgttcgtgctcgtgtgcttagcgcaattctaaaccgcttagagcacattagtgaatttcgatttagcgcatgcctttctcacttaacggatgaactgaagcggtgcgcttagcgaacctgtacagctcatcttcttccagattcttccttacgcttagccaatgagtgttgcgcttagtggacactcgctaagccaacggattggcttagcgagaaggtgaaaaacaacacttttcaaagctttcctaactaacctgaaattgagagaaaatgattattaaacacacaaaatagaattactaagtatttattacctatctttaactaanagaacttataacactacaaaataaccataatttggaggagtttgatacnaattacacaagttttatacacaaaagttagtc

SEQ ID NO: 223189 - DNA, 468 bp, Glycine max
  unsure (1)..(468): unsure at all n locations
ntagccttaggatgttccatgttgctgctcccttagctcttattaactgtcaacacaaacggttgcaaagtgcttcaactccaaagattaaactntgtgcttgtgttgaaacaaagccatgtagtctcttttataacgatgtattgagcatatggtcaaccatgtttatacttttctaaaatgatgccttaagttcaatataagtatgttatccattgcatcccaacaagtacataaatctttcatgctatcacaaagcagtttagtgtaatgtcaacataagatacataacaaacaaaatgtgaaacaagcacttacaaaaatgaacctattagttgttgtgtttcaaagatgcatatagccatgcataataaacatactcctgagatagccatgcaataataaacatgagcccgctatagccatgcataataaacatactcatgagacttanggtagatttcagtc

SEQ ID NO: 223190 - DNA, 376 bp, Glycine max
cgactgcagcatgcaagcttcaacttgctaggagggggcagactatctttcttatttttcgcctacaatctccttcaagaatagcttaagcaacatcattataggttagacaagtgacattattattactcgttatggtgataatgagtttatcatataaatctggtcaactctaaagtaaaagctctacccgcttgttttcttctatgttaaaatttgatgagggaaattgggaaaataaagtattcacgttttcatgtggtatgacacccaagaggactcactcgttcgaagagagcagagttttctcttcaagaatattctagtctgaagtgacctgatctcatacaatttgtggaaagtataccaaatatcc

SEQ ID NO: 223191 - DNA, 463 bp, Glycine max
  unsure (1)..(463): unsure at all n locations
nttagcgaccccggatgcagcggccaaacatataattgctgcttatattgtcactaaaaactcaataattgccactaagaactagttttggtgtagtggttatacgttaaagctagactagaactatataaatgtcattctgagtggtggtgaaattcactactatgctcgttttactatgttactacgcctagacccatgtgatgcacggatgatttatttatttattatcatttttattggatgtcttaaatattatatatcaaaaaggcaagtacgataggaaaggaagtagttgtgtttaaaaatactaatactttagtcagtaaaatctgactaaatatttttagaattccaagagatgtgaaataaaagtcattcttatcttttaaatgtgtcacaaaattgctcccgctgtgtggaacagatagttggctaaacttgatgaatcctgcaaaatgca

SEQ ID NO: 223192 - DNA, 418 bp, Glycine max
  unsure (1)..(418): unsure at all n locations
ttgaggggggttttaggcctaacgagatattactggagatttgtcaagaactacaatcttatagctaggttacttacacaattgttgaaaaaagataatttcaaatggagggaagaggctttggaggcattttanaaattaaaaaaggcgatggtaaacatacatttgttgacaatgaaaaattatcagttgccttttgaaatcgagacagatgcattcggaatgggattgggttctatnttgatgcaacaaggaaagccattaactcttttcagcccagtnttgttagaaagagctaagaggaaattggtttatgagtggaaatcgatggccattgtgnttgccttgcaaaaatggagacaatacttgatgggtcatcantttcatattaaaactgatcaagggacctaaaatattt

SEQ ID NO: 223193 - DNA, 458 bp, Glycine max
  unsure (1)..(458): unsure at all n locations
ngagatgaggaagtgtagaagggtgaaacttcctgcttttattcgttgaccacagagtggtacctggagatatgtcgcgggggtcaggagaccttggggacgtcaggtggggtgctattgcccaaaaccaagcttgaccaatcccgacccaacccgggcatagtcagtcagtgagaacctgtgatgtacctaagcaggcgagctcctggcagtcaacagataaaaggaactaagaccacaaagcaaggaggcttgtgtggtggctggccagctgtgaacttgattgatatgtgagatatggcctctggtaatcgattaccaagggtgggtaatcgattacaaggcttaaaaatgaaggcaggaggctaagatagtctctggtaatcgattaccaaggggtgtaatcgattactaggcttgaaaacgaggtcaggaagctaggggagcttctggtaatc

SEQ ID NO: 223194 - DNA, 400 bp, Glycine max
  unsure (1)..(400): unsure at all n locations
ttaagtcacctgcngcatgcaagcttatggacagatctgcgacataactatggttgttgtctccacagaggccattgcctcccttgtccaatattatgaccagcctttgaggtgcttcacctttggggacttctagttaacgcccacggtggaagactttgaagagatcctgngatgccctctgggaggaaggaagtcgcatcttttctcagggttctatccctccttagctagaatttctaaaatagttaaaatctcgacacaggaattggaccgcgggaagcaagtcgacaatggggtggttggagtaccaaggaaatgtttggaagctaaggcgagagtcttggctagtcaagacgaatgggccccgttcgtggacatactggcactcttgatcttc

SEQ ID NO: 223195 - DNA, 462 bp, Glycine max
taatacatagcacattgaagatctctatatagtggaacatgtgattatggcgtgatacaaccactctacacaacatgtggaagcaacataatacacaccactccttgataaatgagaagataggttgagggagtcaatattaagattctagatacttaacacctgagtagggtgtgataatactacacctaggtccaatactaggcttctagatacttaatgtgtgagtaagacgcagtaaattaaaaccactttacacaccacacctaagtctaatagtacgatgctaaatacttaatatgtgagtaacatgtgataaaatcactcaacacgcgcaagtgggaacaacacaatacacatcaccctttgagaatgacaaaaaagactaacaccatcattacataatatataatataaatagatgtgatatccttaatatcacacgtaagccaagcactacta

SEQ ID NO: 223196 - DNA, 467 bp, Glycine max
  unsure (1)..(467): unsure at all n locations
agcttctgtacggtagataaccactattgngatcatacactnatcttgtcactgtgcctttctacttattatcatgacgtatatatgcccaaatatatatattgctgcacacattaatcaaaccaaagttttatttttggctcactcatttcataaactttatgatgataatattcaattcaaagttcaaaaccaacaaatatgttcaacaatctttccaattgttgtgctcaacaaatttgtgatgactgtgacactactagcttaagcttcctattgaagtgtttgtttgaattcaaacataaagatattgagattacctattttaatttcattggagttgcagaccctatagacacggctaagggaatccaataataatcaagaaacttacgttttctggtcatgaacacagagagcgacatttcttcacttcctataataaattccccgcagcataataagta

SEQ ID NO: 223197 - DNA, 467 bp, Glycine max
ctagttcgctacatggatatagtgagagaagaggatttattttagtgaaaacagctacgagagaggaaaggacatgcgcttaatgataatacgtgaatgtcatgatcttttctctttactcaattgcaaaataatgaatactacattctcgattctttctataagaagtaagtgactaatataaaagaaactattacttatttcttatatttacgaaggaccagaaataataataaaatgcttttgtcatgacaataataagttattttttgttgactaataatcacactatcacgtgtatattaacacagcatcttatatatttaacattaattattgattattgactttgaaaatcgatcatattatgcaatatactcgcaatgaataatccatcatgttggtaatgccacggcacaacatattgacaatctattagaccgccattctgaaaatcgattcatgcc

SEQ ID NO: 223198 - DNA, 393 bp, Glycine max
atggtggggtggtaaaataatcttatcaatatgtctgacttttatcttttctatcatactttggacctttctacctttctcttaactctgattaactatcttatttttctcatgataaatatgttaatattcattctacattcttagcaaattacctcctcgtggagtcaataaattgtcacaatgtgcagacttcacatctcctttattattatgttctaataactttaaggtcctgttcagataaattctctataaacaaaatagtaaagcaaaatgaataaagtttctttcctaagcttaaactagcttatgcatcagtgtattatagacgctctctcatgaagctctctaaagtcgttttattacgcatggctatttaagctataagag

SEQ ID NO: 223199 - DNA, 334 bp, Glycine max
tctagccaaatggacttaccttgagataagtccttttattgtccctttgagcctatgttcccctttctttgttttgaagctcattacaagccttaagtgaagaaccatgatatcaccttacccttaaggaattttggagctttggaattgttttgggaataagctgggaataagtgtgggggggtgtggaggttctaagctatctcttaatttcgggctaatggaggtcatcatgactcaaactagcttgtaatgtcattataacatgtgaatatgtttctcgacctagacagattcaccattgctctagcgagcacaaccatttctagcttaa

SEQ ID NO: 223200 - DNA, 430 bp, Glycine max
tataagaacaaaatagcctcaatcattagcaaatattcttgtgaattacgaagcatcaacaagaatcaagccaatgctattgtgcaagcaatcaatggggcaaaacacaccaatatattatgatgatggatggctcaaattcttacaaaggtaaacttatcactttcaaattgagctttcaaaactatcatgacatgtagaggagaatcaaagatttcaagtcacaaaatgtcaaaaacttttattttcaaaacaattacccatttcttgaacatatcctataattcaaagaaaaacatgcaaagtcgtacatgcacacagaattgacccaaaatattaaactagaaatccgacgaaaataacaacattaacaaattaacacaactaacaaattaacaaaaccgacataactagcataaccaaagaacac

SEQ ID NO: 223201 - DNA, 457 bp, Glycine max
  unsure (1)..(457): unsure at all n locations
agcttcatattgtatttgtgggtaagattattcaactnttacttaattaaaaggaaataaaaactatcaattcggtgctttgtttgtagctaaactatgtttttctcctagttagtaggaagcatcctaaactcagctaattaattagattgaaatggacctattggaatcaagtcttttatttggtgcataaattgatcagtttttttttgttttaatttcctaaaataaaattattctatttacattttatgataaataaaactagttggttcctctaagcaatagtgatattttaaaaaataaagtgcaaagtcataactattgattgaaaaattaaactcaccactattataaaaaacgtaagtacgtacataataaaaaaatggttattgtacgaataacgttttgcaaatgcaacaatgcacgatcgtgattctgcaaacacttatatttt

SEQ ID NO: 223202 - DNA, 445 bp, Glycine max
  unsure (1)..(445): unsure at all n locations
tgtagaatggctagacatgatacatgtcagggtttggtttgtttcacggataaaagggatgccccacattatttccatgacacaaaatgcaaaaatgatgatttggaaattttatgcaaaactggtcatgcatgcacctatgtggacgctcaactgttaaatttctatggtcatgtgatactagggctcaggattcatttcctctatttttagtcaacccaatgtttccaaaatatgtccttttatcaatttgtgcattcatccgagtccatttcgggcgtccggggaaattttcacagcattcacccctcaggtgtatacacattttttttaagaaactagttatgaattttntttctaagaagagttggaaatcatctcttttcagaagcatgtcggtttttagctagacaactaattctctctttttcaccttttttcttac

SEQ ID NO: 223203 - DNA, 368 bp, Glycine max
  unsure (1)..(368): unsure at all n locations
gcttanatatttttgaggcgttacagtatgtataatctggctctgacgaaaatagnttgtctggtgctttgactgcttgttcaatgatcaaacgccatttggaggggatccagctacatggactagctgtcaaatgcgggttagggtttaatatttgtgttgcaaatacaattttggacatgtatggaaaatgtggagctctgatggaagctcgtttaatatttgaggagatggaaagaaaggatgctgtgtcttggaatgcgatcatagcagctcatgagcaaaatgaagaaatagggaaaacactttcactctttgtttcaatgttgcgatcaacaatggaacctgatgattttacttatggcagt

SEQ ID NO: 223204 - DNA, 439 bp, Glycine max
  unsure (1)..(439): unsure at all n locations
tgaaaatggagggccattgagatgtgctaggcttccaatgcttggatattntttttcttagatgagaaaaatgttcattgttacttaatatatataggacaacatgaagtcgttacctattgtttgagtggtttgcttgcatttagtttttgtgtaaggaattatacactctttaaaagaatgacaagtgttagagatcacataattattagatacattaaaagttgttcctctaaatgtaaatttgtgaaataattaaataaatatatgttttaaaagttgaccaagttaatattaaaaatgttttgaagatttgacttcgttctttatgtaacaaatttaagattgtataattntttatcttttaattactccctaacaaatttgaaagatgaagctatgaaaagagaaattgataataatggattaatggtccctc

SEQ ID NO: 223205 - DNA, 428 bp, Glycine max
agctttcttgagacaacgtccttgagaagcttctttgagaaaacttccttgagaagctagagcttagctacacacacccctctcataactaagctcacctccttgagaagcttccttaagaagattcctaaagaagctaaagcttagctacacatacctctctaatagctaagctcacctccttgagatgagaagctagagcttagctacacaccccctataatagctaagctcacccccatgagaaaaaacatgaaaataacaaaaaaagtccttattacaaagacaactcaaaatgccccgaaatacaaggctaaaaccctatactactagaatggccaaaatacaaggcctagacgaaggaaaaacctattctaatatttacacagataagcgggctcatacttaggccatgggctcgaaatcta

SEQ ID NO: 223206 - DNA, 464 bp, Glycine max
tgtcgaaattgccatgttggggtgagttagacatacccattctgttttagggtttttgtgatgatgtttgtgatgtttatatgctgaaattgctgatggaaatctgttagagatgaagggtagaactaacccaaggttagaaagtgagaatgtgatgttatgagtggaaaaagagtgagactttgagagttggaaggctaagtctgaattctgtggtaaatggaggttagagtgagttaatactagcttgaaatgtcatttagaacatgtgagaaaggttaggctgagctatagagaaaaacaaatgaccaaagtgaaccaagagccatttctatggcaaaatttgggtgttgaagagtcaaattttgattcggtgaggttgtaggtgtaaatccagcttgaacaagtctaaatagatgttatggactggtgtgaggtgagagtttgcttcaaagttacctcat

SEQ ID NO: 223207 - DNA, 448 bp, Glycine max
  unsure (1)..(448): unsure at all n locations
agcttctagccaaatggacttaccttgaattaattcctttgatagcccttnttgagccttgttttcctttccttgttttgaagctcactacaagccttaaatgaaaaaccacgatatcaccatatccttaaggaattttggagctttggaattgttttgggaataagtgtgggggtttttgtttcattggataacatgttttgttggctatgcttcatgatgtattttgggccatacttgatgtacattgtatattggttaaatgttggacatgcttaatgagatgatgtctctcaaaggctacgtacgtaaaaaaaaaatcgaagaagaaaaagaaaagcaataaagttgagtgaataagatcttacatgacaanagaatgatgagactctcggctctactctctatgcttaacatntaactttacttctttttatattcttatttt

SEQ ID NO: 223208 - DNA, 419 bp, Glycine max
tgttcagaagggcagcagtgagttgtcactgtcactgtcactgtccttctctctccatcttgtactctatatatatatatatatatatatatcttttttgaaatgaataaagctgtgagagaaaggaggaaatttctccttcagtttcaagttggtaccagagcaggtttcgaccgtcgtccttcgtcgcgccgttcgtcgtactccactgtgtcgctgtcgtctgtcgtcgtcgtcgatcgtcgtcatctccgatggatttttcggcgagaccacggttcggatcgcctctaacagcgtgatccacccctggaacttgcgcagccgtcggacgccccacgcgtcgcttcttcctcgcgtgtttgtcgacgcgtgcagctcatgcgtcgccgtgccggcgtcagaagactgcccttccg

SEQ ID NO: 223209 - DNA, 439 bp, Glycine max
  unsure (1)..(439): unsure at all n locations
agcttgctaacccatggaagctcctaatatctcctacactattnggggtgggccattcttggatggccttgattttctcagggtccacttggatcccatttctaccaactacaaaacctaagaaaactatattatctacacaaaagttgcatttctctatatttgcatagagggtgtttttcctaaggattgaaagaacttgcctgagatgtcctaagtgatcatctaggctcctactgtacactaaaatatcatcaaaataaacaactacaaatctacctatgaaatcccttanaacattatgcataagcctcataaaggtgcttggtgcattagtgagcccacaaggcatcactagccattcatacaaaccaaacttggtcttgaaagcgaatttccactcatcaccctttntcatcctgatgtggtgataaccact

SEQ ID NO: 223210 - DNA, 455 bp, Glycine max
  unsure (1)..(455): unsure at all n locations
nntggagttccaagtgccaattcgtcttcttctttagtccagtcttcttctggcttcaattcatcagagggctttccttctgtgtccagcatcttgggatgttcccagcctttgatgacagctttccaagttctgctatccagtgatttgagaaaggccaccatccttgctttccagtattcatagttggtcccatccagaattggtggtctgttcactggtccgccttctttctccatgttcatcagaatttatctccctagatctcactcagtgatttcgagtgcctgctctgataccaattgaaattctgatactggggacagatgtcgtacaggatgtcacgacatcacgcttcagaacatgcagattgtctntgactgtatgaacagattanacaagtaaataacacaagagaattgtaacccagttcggtgcaacctcacctacatctg

SEQ ID NO: 223211 - DNA, 438 bp, Glycine max
  unsure (1)..(438): unsure at all n locations
ttatagtaacctgctgcatgcaagctngtgactcttggcggtatctttacatnattctactaacaagatgtgacttttgaaaaaatcttcagaaacaagtcacttgaagaattatgacttttggaaatgtatttttcgaaatcagtcactggtaatcaattaccattaaggtgtaatcgattacacatcaatagtgtagaagcaaagcttcatggtgaatcaaaagtgattcaaaggtgttttgatgataacaatgatgataacaaaagatgataacaaaaggtgatgacaaaaagctcaaaggtcaatcaaaggatgagttcaagatgtttaagaagaaatcaagaacaaattcaagactcaacaggagaagttgaagaacacttcaagattcaagaagaacgatgaattcaagaatcaatcttcaaagatcaagct

SEQ ID NO: 223212 - DNA, 469 bp, Glycine max
  unsure (1)..(469): unsure at all n locations
ctagaacatgacanacatcggntgaggtgtgaacaggttcattatacattnngattgttatagaacctataccaactgacttgcaaggagcattgttacctattagaacattaccactagacttcttctcatatgttacaaaccagcttctatgtggaaacatatgataagaacaacctgagtccagtatccattgtttagaatgatgttgtggttgttcaccaacagccaaaaccaaatcgttttcagatgaagagtcattatgaataatggcaacaacacaatatttatttgctgtggtcggacaataaatcttccattgactagattatgtgcagtaattacagatgtcatttggatcaaccttacttttcttgctacctttgcctttcttcttcttctgccctctagtagaatcaatcactaataatgtggacgtaaaggcttcatcaccattcctagatgctta

SEQ ID NO: 223213 - DNA, 357 bp, Glycine max
agctgatctaatagtcactatgaggacctttttaacactaaatgaaaggaacaaaagaacttaccatgtgtctattatctaacatgctctcgttctccagagatatggcactggcacttattcactgaaatctacttcactgaaatataccactggtacttattcactattactaactactagtctaaaatataactgagaacagggctttaaaataaagaaaggccaaaccagaccatgatctctctctttctaatgagggagtttttctttacagaactactgcaaatcatatgatttaatagaacattgttatattgagctttctgctcaatcttttgacacaccttagatata

SEQ ID NO: 223214 - DNA, 470 bp, Glycine max
  unsure (1)..(470): unsure at all n locations
cgatcataggctctagttgattntgagaatcaataatttttattatgactaggattggagaaaaattggtactagtgagtcataacctctggtaattcttatcatcatttaaacttctctaatattcatttaattgctttattatataaactagaaccataaaaatatttaaatcctttttctaatcaattctagtgttagtttaataggcttaactaattaggaataaaattggtcctttaggttcaatatccaaacttttgagttcactattactattgtgtaaggtacacttgtccttatgcgagcctaacatattttacgcatcaagtttccggcaccgttgccaaggattagttgtgtaattcccaactagtttaattttgttaaccaaacaatcttgtttataaaaattattctatgctgtatttaatttaatgctatgtattcttttatttcccattgcactc

SEQ ID NO: 223215 - DNA, 400 bp, Glycine max
  unsure (1)..(400): unsure at all n locations
agagcccgagtattcgaagagaagctcaagtccatagccatcaaagtctgaaaagagtatgatgaactaagggacgtcaatatggccaccgctgaagccttggaacgagaaaccaagaaggcccgacaggaagaacacgcgcaagcaaagttntgaggggctttatagggcaagcatagtatgctcaagctctgaagaggtgaaaggaatcatcacgggtcaaaggcatgatcttgaagacgagctaaaggcttaccttaggtcgaaaagaaatttgtcccaacaggtaagcgagactgaaaggaaattgtggcgccgcctccatgagtgcaagagaagctaaatctagcggcgactcacgagcaaacgcttgaggatgatgtcgcccagatatcatcac

SEQ ID NO: 223216 - DNA, 464 bp, Glycine max
tcgtcactgcactcatgctctcactagagacaactactttatgtctttctagatgcgatccacactggagatatttgtgcacgcccttgctacatattgtagagcaaatgaataaaagagaagttactacatttagtattggtggtgataactaataagcttttggctttttaccagtcattgattcataacttgtccctgatgtaagcttcattggagcttgtaggcctatgatcttcttcatcaatggattcctttgcttctcggaagatgaatggaagcggatgagtctataagatgctcaccaccatatgtggccatggataagagcttgtaggaagaaggagatgaatgaagggagaggaagagaagagcatgagattttgtgctctaaaagagctctgaaatctgaagtttaatattcaaatgatcatagcctaaaaaatgcacacacatgacctcta

SEQ ID NO: 223217 - DNA, 453 bp, Glycine max
  unsure (1)..(453): unsure at all n locations
actaagctgaagttgcatagtgctacgcctctgggttagttactctatattgttgacaaccaacttgggttgctacctttgtgatcatttagttaaatgcgctaagcagcttcaagtttggtctttggcgagtgtgtgcaaagttagnacctatcactgtctatagaatttgacgctcatacctcgctatggaaacgtaaagcttcacgtctttaatatgttagttcttaaatatttctggaggtagatgttgaaggtacttacatctggccttgtgggagagctcattttcttgaaggctatgtcagtttttagtaaaaggctatgtcagtttctaacagcgatactttatcgctatgaaaaatgttgtctctgagagcggtgacgctcacacaatatttagacacaaagtatcaataaatcgcgtatggaacgacacttcataaaatacag

SEQ ID NO: 223218 - DNA, 417 bp, Glycine max
  unsure (1)..(417): unsure at all n locations
agctggccactgtgggtagtggngcctttttttaagacacaatagatacattgaaaagatgtatggtcatgcggaataggtttatcccccaaatcttttttttttttgcaaataagctatgttgaaaaagttgtttagtgttggactttctaaagtttgaaacaaacaagtattttaatttttgagcttaagctggagacactattctgtgtactgtaggcacaaaattcatgtttagcccttaaaattgtgcctggttgactaaaactattatgcttttcctagaatgtaaactataattgcacatattctgataggagttacaaagaattgatggccaagtgcaatattcttggaagaggtaaggctcgttatagcaaacagcttgagaaggctaaagagaagatcacaaaactg

SEQ ID NO: 223219 - DNA, 465 bp, Glycine max
  unsure (1)..(465): unsure at all n locations
tcaccaattccaactaaacttccagctggtgctcatttattctcttgtgctgggcctggtatgtataattttgcacaaaattgctgtctggttttttgtttgaatatcctgtttttaaatagcatgttgttttcttctagaatcgcacaaaaatatttacttgtcatgtggcttctaactttaataatctttaacaatctttaattaaggaatgatgcccatttctgattgcatgaataaatgaattggaatccatccaatccttagaataacttctcatgctgtcatgcatgaggagtaaagtgcaattttattcttatgccaacatatataaattcctgaaccaatcaaatatgttattaacttattatctattagtatgaggttcttctttgaatgtttcatttcatgtagaanaaggtggacctgagtatcccagacacatgccaggagctgatcacaagc

SEQ ID NO: 223220 - DNA, 454 bp, Glycine max
  unsure (1)..(454): unsure at all n locations
agcttgctgccactggttctagaaatgtngtgattatanaatatggngcgtcaattcctatacaatcaggttcgtctattttgatcaagcggngcctttgtctattatttctatcaaattttccaatcggtgctttcttgtgtcactttatcatccacttttgtgcttatttccttttggttgtgctctccttttagatgtcatgcggcgcttatgaacatttgccaatttctgaattgagttttgtggttggtctcaatttcagtgtgctggttggttggatttcaagtgctctagtgctgcgtcaattttattgacccattcctattntgtgcgttccttttaattccaattgatggttttggttgtgtcaatttcctggcttgtttgtttagcatcaattatttctagaatttggccaacgataggtcaacgtcatgctgaattttatttg

SEQ ID NO: 223221 - DNA, 470 bp, Glycine max
  unsure (1)..(470): unsure at all n locations
tgaagacaagactatacgaggtatcttccttgggtatatctatatctctaagggctatcgtgtctacaacttgcaaactaagaaactcgtcatcagtcgagatgttgaagttgatgaatatgcttcttagaattgggatgaagaaaagtggagaagaacgttcttatacccactcaactacctcaagaagaagctgaggaagaagacccaggtgaaccaccttcacctccaccacaacaacaagatcaagaactatcatcaccagagtctactccaagacgagtaagatctttggtggacatatatgaaacctgtaacttggccatacttgaacctggaagctntgaagaagcgccaaagcacgaagtatgggtcaaggcaatggaagaagagatacagatgatcgagaaaaacaacacatggaagttagtaaatcgtccccatgganaagatatcattgggggtaagtg

SEQ ID NO: 223222 - DNA, 339 bp, Glycine max
  unsure (1)..(339): unsure at all n locations
agcttaataaatctatatgtagggtttatttatgcctcccgttaggggcaccttaagtttcatgggataatttcttatttggttctgatanaacaaaccccatggatcaatgcgtataccacaagatcagcgggagtaaaatatgctttcttgttttatatgtagatgatattttacttgcagccaatgattggggtttgctacatgaagtgaaacaatttttctctaagaattttgacatgaaggatatgggtgatgcatcttatgtcatcgtcattaagaatcatagagatagacctcgaggtattttgggtctatcacaggaaacctattttaata

SEQ ID NO: 223223 - DNA, 448 bp, Glycine max
tgtaggccttggatcttcttcatcaatggagtcttttgcttcatgaagtttgatggcagtggaatggagaaggagaaatatgattggagacgccacttcaagaagaagatgagtctagaagaagctcaccaccataggaagctatggataagagcttgaaggtatgagaagatgaatggagggagagggagagaaggagcacaaaattttgtgcctcaaaagaggtctgaactttgaagtttaattctcaaatgatcaaagttgaaaaaaattcacacacatgacctcaatttatagcctaagtgtcacgcaaaattggacactcggatttgaaattaaatttgtggagctaaattttggagccaaaatttcactaattaagattagtgaattctagttatggttcagcccactaatccaagatcaagtccaagattctccactaagt

SEQ ID NO: 223224 - DNA, 437 bp, Glycine max
  unsure (1)..(437): unsure at all n locations
agcttntcaaggaagtgttctcaagatagtttctcaaggaagctacctagtctataaatagaagcatgtgtaacacttgttgtaactctgatgaatgagggtcttgtgagacacaactcaaagctcaacttctctcccttgttcttccttcaatttcgtgctcccccctctctctttctctccctctttcttttcctccattgaagcatcctctccaagcttgttatccaaggctcatcttgggggtgaagctccttcttccatggcttattccttaatggatggcgcctcctctcacctcttttcctttgtcttccgctgcatctccatggtggaaaatcacccttaaaggacctcattagagctcaaagatccagcctctatagaagccccacaagcaagcttccatcacttagggtctagaatgactctattat

SEQ ID NO: 223225 - DNA, 460 bp, Glycine max
cgccctaggcatcttgttaggttaaatatagcatagttgaatataaacggcagatccttgatacattgaatgaagtcatcatatgagtttttttataaagcatgtgtttgtatcattaaaatgataaactcttgttggacgcaatacttgtaacaaatctctttgatttgatacgacaatgtgttcagagttggagggggatgctttctatgtgtgtccccataggatttgattttataatgtctttgcatcatctatgtctaacttccttatcaacttcttaccttgaacaagggtttcctattcctaagatacttgacaaaatgaatcttctattctctattgcgcatttcggtgttgaagtacaacttgaaattcatctttttgtctttatcacacatgggtagtctacgtcaactcctatttggtaccatcttaatatcgataggtctacttatat

SEQ ID NO: 223226 - DNA, 395 bp, Glycine max
  unsure (1)..(395): unsure at all n locations
agcaagcttccgctgcgtagcaggctcaatctgtatcctcacatcctgatcagntgtgctgctgcattgcaacaccaaaccacatcgtcttttccttcccactctataacacgcactcgtggttctggatcctcttctacttctaacaccatagtactccaaggttgagcatataagtttctgtgaagcattggggctgctcgccaataaatgagccattcatgcataaaccaaaccaaggctaggctttctcacttcacattttgtattcggggcgggaccgagtggtacttatatgcgtggcctttctggcttctgctattgcggctgccatttatattgtgatccatatgcctcgtgcaatcatgtcagccaagaaacctatttcttttttt

SEQ ID NO: 223227 - DNA, 454 bp, Glycine max
taatttaattgcgatggatctattcaaggccatcctatttatgctactacgactggatgtgtttttagaggccatatatgtaatctcatctttggttttgttgttaatattggtttgtatgatgtggttggttcaagtcaagctttggggaattttattaggcatttgtatatttgtattgcctggagcacgggagttctagtttttgttgtcgaatctgactcccaacatgcaattattttgcttcagcaaggctatgtaaggtctcattcataccatggcttggttcagaatattttgatacttagactcaaggagggagcttttcctaacttcacacgcttcgtgaagctaaccaagagttaggatgcactttatggactgttggatttacttggaacatataataatatcatacatttcatgcactcgattatgcttatttcccttaatc

SEQ ID NO: 223228 - DNA, 448 bp, Glycine max
  unsure (1)..(448): unsure at all n locations
agcttctatataagctgaaccattttatcttaaacacaagttgagttttattcagaaaattagagtttatctcttttatcttagtgagagtgattctcctaaattcttgagtgattcaagaacaccctggctgtatcaaaggactttcacaacctttgtgtgttgccctcgctggaaagagtgattctttccttcctatcatctccacccttgttctttcaaaccacaattccagaaaatccacctctgcccaaaattatctcgtgaacataactcccattctacacactcaaattaagtgattcttgagcctaaattgaatttcanaacgagacctttcacctcgttttggaatcacctcatgtggagccctgtagcttccgatattgccatttctatatttctggccagccaccacttaacctacgttgtaccatcccattcattc

SEQ ID NO: 223229 - DNA, 456 bp, Glycine max
  unsure (1)..(456): unsure at all n locations
tctcgatatgttatgcgtctgaatcggacatgcgagtgataaattatgaccatattaatttcccgagagcttccgttgttcaatttctagcatctcgatacgctatgtgcctgaatcggacatgcgagtgaaaagttatgaccatttgaatttctcgagagcttccgttgttaaatttctagcgactcgatacgctatgcgcctacatcggacatgcgagtgaaaagttatgaccattttaatttctcgagagattccgctggtcaatctcgagcgtctcgatatgttatgtgcctgaatcggacatgcgcataaaaagttatgaccattctaatttctcgggagcatctgttgttcaattctagcgtctcgatactctatgcgcctgaatcggacatggcgagtgaaaagttataaccatttgaatatctcgagagcttccgtngtaaatttcta

SEQ ID NO: 223230 - DNA, 408 bp, Glycine max
  unsure (1)..(408): unsure at all n locations
gcttactatatatagtgcttgtattctttatgcactcatagttttacttgaatttagataagagggtatatttatatttggataactctaacgttagttttgttagctagagtagattcaatttttactttcttatttctaattatatgaatgatatcactgtgtntagatgggagaagtgccggtattgcaagactagagagcaagaagagaagcatgtgttcttaggtacaaagagaagcgccagaacaggttgttctccaagaagataatataccaagttcggaaattaaacgctgataaaagaccaagaatcagggtcacttttttaaattctcctgtctctattcgtcccatagcgcatgctcattttgttattaatattgaaagcacttcttccgatatttt

SEQ ID NO: 223231 - DNA, 411 bp, Glycine max
  unsure (1)..(411): unsure at all n locations
tcttgagaaaccaaanagcacatagagaaaatctatctcttatcaaactcttacaccaccaagctatcagcatatatagcacctaataattagaacttgataataaataaatgataataattaagaacttgatcgaaagaagcattctgcacaaaggggaatcctaagcccaactacatcaagatatgttcatcaaagtgaagaggacgtacaagaggtccactactcatatatgatgacatggaaggcatttttagcctagccttaagccagaaccaactcctaactttaataatgtcaatcacctcctaacaatccaaccgtgctcaatcgaaacatatttaatttcaatgttaaccaaagcttccaacactccgtgaatttagttccatgtgccaaatcatagatcga

SEQ ID NO: 223232 - DNA, 463 bp, Glycine max
  unsure (1)..(463): unsure at all n locations
acgggaccttaagcaccgcggctgcagctcttaattttgggattgagctctttatatagcngcgtatatattaaaccgagttccaaccaatgctgtctcaaagacaccttctgagttattcaagggttggaaaccaatttgtgacatatacacgtttggggatgcccgtttgaagtaagaatttataatccacaagagaagaaactagaccctatgactattactgggtatttcattggatatgctgaaaggtctaaagggtataggttctattgtccatcccacaacactaggattgtggaatcaaggaatgcaaagtttcctgaacatgacttgatcagagggagtgataaatttcagaacatttcttctaaaaaggatcactataaagctgaaccttctgggacaagtaataggttggtagtcatttccacccttcaagttacaatgggcgttagacaac

SEQ ID NO: 223233 - DNA, 381 bp, Glycine max
agcttattggaaatctcaagaacacggggttgtttgtggactggatgtacgcacgggttgtttccaaaccagtataaatcttgtgactggcttattcttccctacactctttactatcctgctgtgcattttttatttccgctttactcttatctaagatatggcacctgctctttactttctcataacttagtagtaaagccttattgaatctagtaacattaagaaggattaatctttaattagtcaagacacattcataattaattcaccccctccttcttaattattccgaggccacttgatccaacatgaattagggaggaggacagaacaagcatagttaggttccttcgtgggcttaatatggaagtgaggaac

SEQ ID NO: 223234 - DNA, 452 bp, Glycine max
ttgacttgagtcatcaagagattataaagatgtgaccatgtgtttattgtcaaataattatcataatcaatcatctatgaatcatctatcttttacatcatcttctttcaacatccttgaatcaatctttcaatcttctctcaacagcattcaatatctttcaactctttctacagaattttcttattctttctctcttcatctttctaaaagtcttttatcaacactttttctttaaagaaaagttctttgttcaaaaacgaaggactaaccgcctgaattcttttgtgaaaagaacgaaaagaacagttttctcttcatctttctaaaagtcttttatcaacatcttttctttaaagaaaagttctctcaacagctattcatctttttcattctctactccctttgcgaaaagaacgaaggactaaccgcctgaattcttttgtgtctct

SEQ ID NO: 223235 - DNA, 336 bp, Glycine max
attggataataacttttcaagatacaaaggccacagaaatattcacatatttacattcggcatgcaaacatgttggtggtgtttggttacactagcgaatgttattatttttaaaaagaaaagccaattatcatccatagatttcgtagctcacattaaggaaatttcttggcaatggttgctatgcacaactggagttaggtagggctgctctttctcatcttagtgtataaatcccacacaatgttcattggggtaaggaagaacgatacgaaactcgggtttttgggatcgatattttcttattctccttttgaattcacaaagctcactctg

SEQ ID NO: 223236 - DNA, 396 bp, Glycine max
  unsure (1)..(396): unsure at all n locations
gagtccattctataggcgaaatatattgtccagtgtcgagggtggtaaccttgacaaatttaatgattttaggcttaacaatcccctcatcctanaaaaacattgtccgggctatggttgacaagttgtctagcatgatttatgtccctttacatagactcaagcattgggatgtcttataaagaaggtccctgactttgacctttttgatcattcgtgtaaggggacatcttaaagatgcattatgtggctctttctcctcgtttaaaaggaatgtgcgttaggttttcaccatcttcaatcttcaacaccccctttcagaatttagctttcgatagttccttcaatctcgccttacaattgtcgtgactttntttaccctggatattttcagct

SEQ ID NO: 223237 - DNA, 349 bp, Glycine max
gatgccaaagataaacgcttctcacgtttgatccaagccacgaatccacaaatgcaagacaatcgctgaacataggcgctagaatctcaggaagagtctcttaattgacgacgaacagatccggccacacgatcattttcacaaatattcttgagaaacacaacggtgacaataactctctggtaatcgattaccagaggctataatcgattaccagcggcccacataattcccgaaatgctcttacaaaatttgaatacacattttaagcctgcaatcgattacacacggcttgtaattgattaccacaggttctaaacgttttataatagccattaaaatattgaat

SEQ ID NO: 223238 - DNA, 330 bp, Glycine max
cgcctgttcgcacatcgatcgcgtgtgcgatatccactcgcacaggtttgaagcaaacgacaccttcaagtgtactacgcaacgtggcggacagaaatgggcagttaacttgaatggacattattgccaaagccaaaggtatactgcgcttgactatgcatgtgcacccattatagccccttgagtgttcgtgagcatgaactactaccaatatatggattttgtttacaccattgaacaccttttacaaacatactaagcacaggggaggcctcttgggaatgaatcagcgattcctccttctaatgaggcatggacactattccctga

SEQ ID NO: 223239 - DNA, 435 bp, Glycine max
  unsure (1)..(435): unsure at all n locations
tgtaacatatntgagcactgaagacccaataattttgttgtgatnggcgggtgcatgaattattcgcattggccatggaacaatcagactacgaaaaggacggtttatattattatcggaggcaattatttgagggacttgacgctggttgatgagtatcgtgaatatcgagatgatatacatgatgtcctggcctggcgtttttaaagatcagttgagcacttccagctcggatatacgatatagattggaatatggtgttgagctttcgtggctggaaggtttgtgcaagacatacattttcccaaccctgcaggttgaacctgacaatgtctgtccccgagtctcgcaatacgcacatgtatgaacgtttgttaaccacatttagtaaatataacgtctcggatattggcttaaaacttatgtgctttttct

SEQ ID NO: 223240 - DNA, 456 bp, Glycine max
agcttttcaattattatatgtacctgtgttggtccacattgtgtttcatgtattctcatttactttttatacccccttttgacgtgcttaagccatttatttaagtcgtttctcgcctaatctaaaaataaaataaatttccaccgatcgtttgaattgtgacatccgttaaatttggttaaaatgaattccgaccgttcggtcgtggcgtaaccatgttggaaatcaaaaaagaggtaaaataataatataataatcaaaaaatatctttttagtaaagtaaagcgaaaaaatcaatcggacgttttctctttgggatttctcattcttaattgaattgactaataactaaagtgaaactaaggctaatatcaactcgcctagtcaagctcgtccacaaaaataggtattcttgaaagtttatcatttcacgttcttactaagtaaatggatcat

SEQ ID NO: 223241 - DNA, 467 bp, Glycine max
tccttcaattttgtggattgatgcacttaagacggctgtgtatatattaaattgagttccaaccaaggctctctcaaagacaccttttgagttattcaagggttggaaacaaagtttgtgacatatacatgtttggggatgtccgtctgaagtaagaattcataatccacaagagaaaaaactagaccctaggactattactggatatttcattggatatgctgaaaagtctaaagggtataggttctattgtccatcccacaacactaggattgtggaatcaaggaatgcaaagtttcttgaaaatgacttgattagtgggagtgatcaatttcagaacatttcttctgaaatggatcactatgaagctaaaccttctgggacaggtaatagattggtagtcatccccacccctcaagttaaaatgggtgttagacaaccagtgattgaagttccacacagctgtg

SEQ ID NO: 223242 - DNA, 407 bp, Glycine max
  unsure (1)..(407): unsure at all n locations
agctncaccttatggtcctgctcatagttgttgcatgaganaacatgctctattttcatctcccactccaagtacgcctccggatcattctttcctttaaatggaggaatgttgagtttaataccatcaattcggttttgtctaggaacaccatcattccctcttctcctcctttcttcttcattatgatctctattctccatttgattcaacctctcatggagcgcatcatctcgttgtttcattaacctctccaaatgttgcatcaaagcttgcatttggaattgcgaaagccccactccatcattaggattagtacctgacatctcatacanacaaatcaaacgtaacaagacaattatagttgctgttggaatacctcacccactcaagtgtatcacacaatt

SEQ ID NO: 223243 - DNA, 463 bp, Glycine max
  unsure (1)..(463): unsure at all n locations
ngagatgatgaagtgctgaagggtgaaacttcctgcttttattgttgaccacagagtggtacctggagatatgtcccaggggtcacgagaccttggagacgtcacgtggggtgctattgcccaaaaccaagcttgaccaatcccgacccaacccgggcatagtcggtcagtgagaacctgcgatgtacctaatcaggcgagctcctggcagtcaacagataaaaggaaaacatgaccacaaagcaaggaggcttgtggtggctggccagctgtgaattttgtgtaatatgtggattgaggcctctggtaatcaattactaagggtgggtaatcgattacaacgcttaaaattgaagacaggaggctaagatggtctctggtaatcgattaccaatgcgtgtaatcgattaccacgcttggaaactatagtaggaaacttatggagcctctggtaatcgaatac

SEQ ID NO: 223244 - DNA, 447 bp, Glycine max
  unsure (1)..(447): unsure at all n locations
agcttaacctcaccgagaattgtgtgttttctttggcacctgatactcaagctgcccttgaggcgcaacttggtgagcaattcattagtttgaagaagctggaaaaataaactacacaatttataattttgctgctacagcccgaccaaaagaagtttttgctgtatcacattgcttgcacactcgacagaacaaaacaagttagaaaatacagtgccatccagaanagcaaagcaattccgtgatactttaaatttattctgcttgcagtatgctgaaaacggtgctccgaacatccttgaggtgcttgcagtaagaattttnggtaaaacttaatttagtcttgcttggcttttggatatgctttgttttagtaactcgacattgtacacatgagatttgagttgtaaaaaggctaaatattatggtgttaacttatgccttctt

SEQ ID NO: 223245 - DNA, 253 bp, Glycine max
tcttgacacgcaacgagtcccctcgaagtgtgaaagcacatctatctactacaactaactacctatatctcgcatcaacggttattatgatgcaagtgtctgatgaatctgatattggagaatgggcatagcagggtccctgtcttgtatgaccagcccacagatattattggactcatactgatatgcactgccacccgaatcttacgttaatccatcaataacagccatcttgtcttatgtgaaaacgtta

SEQ ID NO: 223246 - DNA, 268 bp, Glycine max
taacgtgacaaccaatatgcaaaagcattcaacaaatcatactacgtgatatatcatataaaatttgcccataaattctacatcaaatatcaattgaaacataatataatcaggaacataatgatgccttagtagtattaacggatgttgatcgtaaattttttaaagtatacaaataactgacattactatttattttcgaattcaaccaatcgaatatctattaaaacaattatgacctatgtaagttgatgaaataaatttaact

SEQ ID NO: 223247 - DNA, 457 bp, Glycine max
  unsure (1)..(457): unsure at all n locations
taattccttccagagcaggagagaagacagtcaccttcattttgtgctctgctgcacataacatggccaaaacccaataatagataggtaaatttagctgagatcaaatctaccacctatatggatcacctttcttgtctctatctggtgaatctctaaatatgaaatccacgggagaaaaacacagaactttcatcagtagcaggcatgaatactacagcaaagactggatacaattgaaggtgaataatgtgcgaaatatctaaagatcacactatcaaaacgatgaaaagaagcaaatttaaagaacattgcactagacaacgcattaaaacttataatataaaacaataaattgtggtgagtagtacctatttcccatgatgcaaatagctatgtacatnctactagcatatgaccatcacacaatgtttttcttaacataactgaactccca

SEQ ID NO: 223248 - DNA, 405 bp, Glycine max
  unsure (1)..(405): unsure at all n locations
agcttctacttatgtggcagggctgtcttccttcactntcttgtctcaaccgcgagctttgaccaccgcccttccttcccgcgatgcttctctttacatctgcctgagtgggcttatagcctaaaccatacttcccacgatntcctttggcatttatcaggctagttatgccaccgctgtctttgcctaaacccattccgggttcgtaaccgttccccaacataactcgggccatcattacttctgcatcggacaggcaagcttgcccagagaaggagtccacggaggatatgcttaccacctcataagactggacagcggtttctaatgactcctctgcggcttccacataaggcatagaggatgggcagctcaccaagatgtcttcctcgcctgatacgatga

SEQ ID NO: 223249 - DNA, 388 bp, Glycine max
  unsure (1)..(388): unsure at all n locations
actatagtctgataccattgagactgcaatataagtgttgaaggaagtgttctcccggtatttccaggaagacacccgttgtgtttagccaagacaacgattcccactatagtggtacgattttgacacaactaaagagaaggtgagactcatcctcatcacaaattctgcaaaatgtacaatagacattgtccagttccacattccttctcctcaagttaacctttgttggcaatctatcccgaatcagcctccaagcaaagtgtgatgctctacttgcgattttcagctttcaaagagcaataaatgctccttcatgattttaatctatcatatatcgattgagcaacatgtaagcattntccactgtgtagctcccgcttggatc

SEQ ID NO: 223250 - DNA, 378 bp, Glycine max
  unsure (1)..(378): unsure at all n locations
agctnctctaatagcctcaatgtattcctcatcatctccaatgaaacccatagcaaaacatgcttccttgaaagttggatattcaatgtctcccacagtcttaattgctccataactacatggtccttttgcaacaattaacattaatctaagaaaatataacttgcctgtgcttggaggaacccacatcaaccttccaatcgtataacctgacttgcgtggtttccaagttcttctagtgttgacatagacaaacttggacacaaactgagtatagggtagattctctgcctctggatattttctatatgcatccatccacgaggtgaacatcgattcggtaacacttgggtttaaaagaacatcactcatcaattt

SEQ ID NO: 223251 - DNA, 461 bp, Glycine max
  unsure (1)..(461): unsure at all n locations
tcataaaagtttatatggcttgaaacaagcaccaatgtattggtacaagaagtttaatgagtntgtgagcaactcaggattcaaatagatgtgacatggaccattattgctacattaataaatatactaatagctatgttatccttgccgtgtatgttgatgacatgttgattgcaggatctagtatggtagaaattaacaggttgaagcaacagttggcagaaaaatttgaaatgaaggatcttggtccagctaaacaaatccttggtatgagaattcttagaaacaaatcagaaggaattttgaagttgtctcaggagaaatatatacacaagttgcttgacaggtttcaccttgaagattctaagaccaggaatacccctttgngatctcatttgaatttttcaaaagtaattttgcatacagatgaagaaaaagttacatgtcaagagtaccatatg

SEQ ID NO: 223252 - DNA, 363 bp, Glycine max
agctggccacccagctcgcccaagcgagcttggttgcttcctccagaagcaacagtcttctggaggaatcttttggagggctgttgcttctggaggaatcttctggagggcccaagtgggcctggtttctattcgcacccccatttttactaagtacaccccttgcctttcttttggtgattattttttcgtaaagttatggaaacttatgaatttcgtaacgatacttgttctctttccgtaatgttacggaaccttgcggattacataatcatcccctttttgacttacggaatgttacggaacctcactaattgcgcaacgatgattccatttgatttccggtgtgtcacggaaccttac

SEQ ID NO: 223253 - DNA, 385 bp, Glycine max
  unsure (1)..(385): unsure at all n locations
cctgncatctcaaacaaacaaatcaaacgttacaagacaattatagttgttgtttgaatacctcacccactcaagtgtatcacacaattatggcttttctctaatgaaacactcttgccttataccactctaattccccttgagttcttaggcaattcaagagattatggccacaacaaagaacaattcaccaatatgtgtaaggtaaggctagagagacaaggaaaagggtaaccaagaaaaaggctaacaatgtttttaggcacaaatgaaggaaataaaattcaaatattacgaattcaagtaaaaatccttcatgcaaccaatatattaccttaaagagatatcttttttaagttcttcaagcatgaaccattcagcccaa

SEQ ID NO: 223254 - DNA, 369 bp, Glycine max
  unsure (1)..(369): unsure at all n locations
tccacaagatgacttcttatgcaaactggtgccttatgttaatatccaagatactcagcatcttcaacttcgtgacatttaagaccaaggcaagtggcattttgagacactatcttcagcatcatcaaagaaactggatctcaggattntcaggtcattgtggcatttctactagtctcaaagtggagctgttggcctatgcttggcgtggaacgacgaccatagatntactgtttatgagaccgcatccaagatggccttggagctagtcaacaacaatttggagctttgttatcgttatctcccattcatcaggaagaatcaagacatgctagccttggactggaacgtcagttgcaacatactcta

SEQ ID NO: 223255 - DNA, 292 bp, Glycine max
agccggagctgctggaatttcatagtgagctcttcacagtctttgtattttgaactaccttcaaaaccattttgttttcaagagagaatataatttttcaaaacctcaattcaactccccatctcttattttggcactgttacattatgcatctccctctatcagggaccaaccccacatttcttttttactcgacacacgctccagtgtgtcttcttaatagccatcacactatcattggctccaatgaagttccttcttgaaatggggtggcaatgacaaaacaacacta

SEQ ID NO: 223256 - DNA, 335 bp, Glycine max
ttaacatgacctctgagatggaagccatttgatcttttaaggccgatagatcggccttcatctgttcctgcacgccctcttcattatccatttttctggatcgagtgttatatgggtgccatggagtcttcttatgtatgatgaaattcctaaagaaataaacaacggtgagtatgccaccaaaacgtgagtatgcaaatggatgatcggagcactaggatccaccctaaagattttagataacgccatgagtccagaacttctcattttataaaaagaaccaagctttatctagccaagatatacaaggtgtacaaaaacctatgattctaata

SEQ ID NO: 223257 - DNA, 457 bp, Glycine max
  unsure (1)..(457): unsure at all n locations
agcttcaccggatgacgccgatcgaacatttcttcttacgtcatgcaaatntcgttcagggattgaatngaaaactcgttaggcgacatctgtcgtgaagtagcgaccgatanttttcagccgacattgcacaatttcttttagaaaagctcgctggtcgataatggtctttttacggcagagtaagttttcttgtgttggtggtgcataaaaaagttacaatgtacttcggctaggtttttcgtgcgagttcaaccgacattttgtttcggccaggaaaacattatcccacctctgcaaaaaaaatatttgctaaccgtcttcatgcatatttcattcaacgattgaatagaaaactcaatatccgacaacggtcgtgaaatagtcccgactgatatttttcgcccgcattgcgcatttcttcttaaaaaacgctcgctggcagatatggtttttc

SEQ ID NO: 223258 - DNA, 335 bp, Glycine max
  unsure (1)..(335): unsure at all n locations
ttttttcgatccatttccgtgaatgatatttttttggcgagatgggcttatggtttcctggcccaataaattggaaaatgccagtttccggccgaaccaaaagtcgggtgggctcgcacaaaaaacctaaccgaccctcattttaaaatttttatgcaacacccaaacaagaaaacttcctgtgccgtaaaaaaaaaaaaaacaatacatgacagcgagcgttttgaaatacaataatgcgcaacgtcggctgtaaaatatcagtcggggctttttcacgaccgatgtcggctattgagtnttaattcaatccgngaacggaatttgcatgatgt

SEQ ID NO: 223259 - DNA, 346 bp, Glycine max
  unsure (1)..(346): unsure at all n locations
catttaactggctntgggcttggcggacacgctcaacaaagtactttcgacacctactgtacgttgatttcaccaatgctgttatgggaattttgcgacaatcctttataaccttattgatacattctgagagggtcgttgtcatgtggccatatcgacgtccttctctatcgtaagccatcgtccaattntcttttgagatgcgatcaatccatgttgctatggctggacttaattcacgaaatttttctaaattttgataaanaatgtgcttgcaaggagtgtacgctgcataaaattagttatgaataacaatttaaagcataaatgaaagtaaaataaacgt

SEQ ID NO: 223260 - DNA, 432 bp, Glycine max
  unsure (1)..(432): unsure at all n locations
gcagctgaagctgattgtgagtagctttttctttttctcttnggnnataggcaagtcatcaaagaaacttcaaagaacaatgtccaatgatttttttattatttattcaaagatatattgattattttattattattttctcaagatatttcgattattttattataattttgctttttttttatttaaccgaggttacaacgtgaatgatcgattaaattttgctgtagtagtgattaaacgacactacaacacatatgaccggctgaaattcattttatcatttattatgcgagataacgacttaaataaacggttaaagcacgttaaaaacggaagaaaagaaaattgaaagtgaacgagatgaagatgaaagaaaacaaaacangacatgaattgaaagctctgattggaacactaccagtgaagaac

SEQ ID NO: 223261 - DNA, 448 bp, Glycine max
  unsure (1)..(448): unsure at all n locations
gtggttcgaggtacttacccgttgaagatcgaagatttattttatacaatgaagaacgtcgaagaacggtggaaatctttgcgaaattcctcaccgaaaacgttacgaaaatgtttcagaagcgcctcggcttatattntcttcacggaaacaatttttccaagcaaattcgaaagagagagaagtgccaaaggggctggatccctttcttcttcatttcctcccctatttatagcaaaataagggaggtggttgccgcccagctcgcccaggcgagctcagctcgcccaggcgagcagggttgcttcctccagaagcaaccgccttctggaggaatcttctggagggcccaaatgggcctgggtgctatatgcacccncattttactaagtacaccccctctgctgtgttttggtgattcttttttcgtaaacgtaccggaacttac

SEQ ID NO: 223262 - DNA, 345 bp, Glycine max
tactagagcttaacaactatctgaactgactatagtaactgtcgactaacctaaggatagatgacgttaactaacataactaacatacatctaccctgccctgtgcccaaacctcacaaagtgggagcctcgtgctttggctcacctcatgtcatacttcacgattcaactaaatgctaaagccaacatttcgaacaaggaaatagttgtttagtttcctcaacattaacagttgtgaattctatttagcaactaactatgatgtcttagagattagagcacagatcgtttactatacattgtgagatgacattgacagatatagaccgagagggagacggatag

SEQ ID NO: 223263 - DNA, 471 bp, Glycine max
  unsure (1)..(471): unsure at all n locations
agcttctttaggaccttgaacaagtatctttctttctntcagaaccatgctatgtgctcgcgactggtccctttcttcccttcgcaacttgagttcattattgctaccccatagagctccgcgaaatttgttccggccatactcttccctgcgagccctcttggtctcttgttcaagggcccttgcggtaattgcattctcttcccgtaacccggcacactccttccgaacgtgtgtagcagccaacttgaacttctccttggcgagttttgcctttcctaactcgcttttgagagcttggacttcttcatccgcttccggtgcttcaaaattctcttcgctgacgacttttaacttggcgagccaatctaaacctcgtatgcgaactttcagccattggtggtacccaccaatgatgccattacgaatgcctctaagctctagatctttccttaacggagtttcccatgc

SEQ ID NO: 223264 - DNA, 186 bp, Glycine max
acaccattcgcccggtactctatttggctcttaaccctctcgtgccaatcactatacaaactctgagctagattcccgcttcttatgtataaaataaacgtcccctgggaggggaatgatgactaacggtgttcagggattaaacccctacaacctcatatggggactggttggaggttctatgaa

SEQ ID NO: 223265 - DNA, 188 bp, Glycine max
agaaaagcattagtgacatcaagctgaaataactcccatcctttgaaagagcacgagtgagaacatcatgaattgtgacaggcttgaccactggagaaaattgtctatgaaagtcaagaccatgaacctgatgaaaacccttagcaaccagcttggttctgaacttgttgatagaaccattagcattt

SEQ ID NO: 223266 - DNA, 395 bp, Glycine max
gagaagtgaaaatgtgaatggggtaatcttggagcatactctcatctcaaacaagtctataacgtaaatctaaactcgctcaaactggttttacgatgaaaactctaccgaatcaaaatttgactcctcaacacccaatttaccctagatatgactcttgtcttcactttggtcactcatttttctgctttgcacagcccaagctttcccacagtcctaaatgacatttcaaactaagattaacttactataacctgcaattaccactaaattcagatctagtttttcaaacccttcaagcattacacttttccactcatattactacattctcactttttaaccctaaggtaactctaccgttcatctctatcaggtttccattcagcatttta

SEQ ID NO: 223267 - DNA, 237 bp, Glycine max
ctcagcttttgatgctagaggacccttttgttattcctttttcaactcccgggccctgatgtcttgctaccgatatgtgccacacctatattggacttgcattagatgccatggggatcctctggcaagctcatcacattattcggagcccataagtatgcccgcccgtcatggaccccttttcatgggagcccgcggagcttgctacctgtcttcatttacttcccgttattgacc

SEQ ID NO: 223268 - DNA, 347 bp, Glycine max
  unsure (1)..(347): unsure at all n locations
agctntntctttcacaatccggctgtctattgactaattnttctactggaagttcacactctggttctttcttttttcaacatgcatattcgttcaaattcatgaaaagaaacacagatctcatcttaagcatgcattcaatttaaaacaaggcatacatccatttcacaaaataaataaactacttcactgctataccaacaaaagttaagttaaactgttccagatgctttaggatgagcaactacactactcatgcacaaaactaataaaaagtaaataatgtactaacaccataattatactaataaatcaaaaagcacaaaanatcaacaggaatttaaaag

SEQ ID NO: 223269 - DNA, 317 bp, Glycine max
  unsure (1)..(317): unsure at all n locations
atttgttactagtcatgtagcctcttcactaacatgactaattaaatgccagtttgtttatcaatcaatgattactagctaccaatgcatgtccaataatcgtgaaccttcaagaataaataaaccattacttttattcttggtacccttagctatgattaaagatccatttgaaatcttaagaacaccatttgaaattctagttgcatatcctagatcatcaaacatgtttatggaaataagatttcttttgagttntggaatgtaccttacatttttcagtagatactctctgttatcaaacatcttcagtctca

SEQ ID NO: 223270 - DNA, 388 bp, Glycine max
  unsure (1)..(388): unsure at all n locations
agctnttcaatgtctggagtaaaaatatcatattgtcttattccttaaccagaaatggatnttctgtaccaactgatgattgaacttgtatgttatttcacatttctatggttttgcactattctgcgagtcggctatgtatgatggtcatacaaatattattttgtaggtatgttttagattctcagacagctgctcctctcattctttctatgcttgaggtgatgcttaaataaagtacttgttctctgttatgccatctgtaattcttttgggtactaatttatttcaaatgcatatttcaagatatgcttagttcttctaaaacagcatgcagggttcgtgcttttgatttaattctaaaccttgcggttcatgcacatcttct

SEQ ID NO: 223271 - DNA, 414 bp, Glycine max
  unsure (1)..(414): unsure at all n locations
tttttttaaggaagngatggagggaagacatcccgatactatccagaggatgtaaataacatgctgaagtttctagcaagtttatctaaaagattaatgtacaagtctaaattgttagtcgttttatccatcaagtaagattttagtatggttaagagaaatatcaaattcacatttatgaaaaagataataattaattntcaattcttaagtacttgtaccatctcacaatgacataaatcctataacttactacgtatattcatatttttgtgggacaacaaaagaaaatatataattagtaattntctgaggcccaccaaaagttaaaaattcctggcatgagttgctgttatgtgccaaaaataggatggcttccanagcanatnggtatttcacaaaacaaatttcatt

SEQ ID NO: 223272 - DNA, 477 bp, Glycine max
  unsure (1)..(477): unsure at all n locations
tgcaagcttggataagaaaattgtttcttcccatctgtttttctatctccttagaaagggagatttcttagtatattaagaagactactgaaanagaaagttctgagaagactcggaacttataaaaacatactgaagatgatnttgaggatgttcagaatgaggttgagaaagaagaatctcctctttacaagaaggatgtatcaaaggaagaccctttagaagaaccattaaactatggttcctatcatgttgactcaaaacaccattataaggaagagcagaaggatgaggaagaccattatgagcctcaaaaaaaggaagaaagagctcacaaagaggaagtgataaactatattttgagtgatatttggtgtcagttattggtctattttcatgcattttggtgccaggactcacatttggacactaattttttcttctagaatacaactgttcaattaagtgaaaaagtcg

SEQ ID NO: 223273 - DNA, 409 bp, Glycine max
  unsure (1)..(409): unsure at all n locations
tcctgccatggcagtgcaacagcggaaacgcctcagtcaaaggccaattaccattaccattggcgggttgccttgcccacggatcaccaacatggctggcgagttgcctttgcttgaaaattttggttcttccattataaaagcaagagcttcgagagtgcatagctgcgcttccttcctttgcttccattgctttgctattggtcttcataagtttctccattagactgactgcgttcttcttatnttgntggtatcttttggttntggtaagtatttttgaaagataaatatttattggcgatatatatatatatatatatatatatgaatagcaaatattntgttaatattttgacggctggtgctttgttcactccttatacgtggnttgtctcctcttctcctc

SEQ ID NO: 223274 - DNA, 377 bp, Glycine max
  unsure (1)..(377): unsure at all n locations
agcttaaccgagactcgcgctcccggtaatggctatgagtttccttttatcagnnctgggccacccctgatattggaggggaccaactgtgcaagcacaaccagagagggaggctatcatgcagctactatgcatanccgggcaaagaattcacccgtgccactgcaaagagacgagtgtggatcatgcgcaccaacatgaccactcttacacagatataaatgacgttgttacttagcaacattctgcccagcgaccgtaatgccgatctccccctgcgaaagtatcagttggtctgtgccgtcccgacatangtaggtatgcattatttccaactaatttctaatgccatctactatttgcagggatcgcaccca

SEQ ID NO: 223275 - DNA, 215 bp, Glycine max
aaactatcattaatttagtattactcactgtcatagaatcccaactagggtcagcaccattacaaaaaccctatatataactacaaactagatcttgaaactgctcttctgctcaactgttcctaaggcctgggtatggaactggctgtctgctaatggaaactgcaaacttcctattaccaacagcttaaacaccttctaccactccctaccag

SEQ ID NO: 223276 - DNA, 432 bp, Glycine max
  unsure (1)..(432): unsure at all n locations
agctcgtatgagtactgggaaagattcaagatttgtgtgctgttgnttcttaccaccagatttttagcaactccttctgcaatatttctatgagggacttagcaacattggagaagagtatgattgatgctgccagtggtggagctcttggtgatatgactcctattgaggctaggaatttgattgagaagatggctttcaactcccaacaattcagtgcaagaaatgaagctaatgtccttagaggagtccatgaggtggccatggattcatcttcatctgctgaaaataaaaagcttgagggaaaacttgatgccttggtcaacctagtaactcagcttgccatgaatcaaaaatctgcatctgcacctgttgcaagagtctgtggtctatgttcttctgaagatcaccatacagaatatgcaatttcag

SEQ ID NO: 223277 - DNA, 287 bp, Glycine max
tcttaaaacacaaatgacatacaacctcctcccatagatacaaacatcaatggtaaattagagcaagcttatgcgcatattttcctacgaacgttcacttgcacaagacatcctattaactaagaaaaatgcacccatatacaatcaaggtagcttcattacctagattatttacacgtacttccaaggtgtatttgttatttacatcacacacgccttcttggctaaatttacatacatgcatactcacagcatgttggcgaccacatattgacatgcgctcatct

SEQ ID NO: 223278 - DNA, 383 bp, Glycine max
  unsure (1)..(383): unsure at all n locations
ggacttaacactgagctgcacttgaacaagaaacctttttttttaaaacacccnagccgaaactttgaagttgagatgttgattctatgatcctcataagaattcgtatcatttaacctttaaaagaatttagaaatatataaatattataatttacttttctatacctatcattttataatatattatgctttaaacatttatgataacgtataataaactctattaaagtaagaaatttatatgttgcatttggaattgcgatgagacaacataattnttcttaatattcccatatcttttatttgttttaaaatatggagtggattcttgattctcccaaaacctcatgtagttgacatttgatcatttccatttttgtt

SEQ ID NO: 223279 - DNA, 466 bp, Glycine max
  unsure (1)..(466): unsure at all n locations
tcctcttcgtgctagcacagttgaagctaaggattctgtttcttatcttcatggncgcgaantttttcgtgctatggtccttgaggctgaggaaatttgtacccttgtgatcgtatgtcaactatctttataagatcggtgatcaacccttaacttggaggctgacaaatccttttcccgagaggatcatctcttatctcacctccaaattaaagccacatcacatccacatgggactattttttttttttttcataggagaatattttcaaattatttntataacgtagaacttttattatgatccattggttatttatttctttaatggaaatcgtaaaattatctataatttttaaatcttttatttaggatttcaaagttattaaattcttattntattttataatttcgaagtcgaaactattntgttttatttacgattctgaatcataatgttatatta

SEQ ID NO: 223280 - DNA, 308 bp, Glycine max
ctttatgaatcaagttgatctgtatgcacttaatatcaacctacggatcaagctgatctgtatcaaccttacgaatcaacttaatccgtacaatttatgaactatcctcacgcacacacattacaaatgcgaagaaagcgcatagacaattttgacattttaaaaaaatgcttgatacacctagcaatctcatacttcaacactaacaccattttctacagttgctccgaattccttggcctcatttcgaagaaccaaatcaaaacacattggaaacatctccgaaaagagtagaggagaggatgaat

SEQ ID NO: 223281 - DNA, 364 bp, Glycine max
tttactttcaatccttaaacttgctagatgatactctgatgatcattattcagattgttgacaacctttatatacgcgcatttatttatctactatcatcaatggaaaaatataataaatatctattctattttggctataatctctaataggtattagtattctaccgtttttattataacaaagaagcagctatccattactgcataacatttttgttaaactgcacattcatggcgtaaataattacgaaaactatacttggacactcaagcgctaattataaccacggagaaagagaatatatacgctatcacgtgaacactgaagatcaaagataaaccatttagtagttcctacaata

SEQ ID NO: 223282 - DNA, 421 bp, Glycine max
agagaggcgggagcactatattgaaggaagacaaagggagagaagttgaactttgagttgtgtctcacaagactctcattcatcaaagttaccacaagagttacacatgcttctatttatagactaggtagcttccttgagaaactttcttgagaaaacttccttgagaaacttctttgagaaaacttccttgagaagctagagcttagctacacacaaccctctaataactaagctcacctccttgaaaagcttccttgagaagaatcctaaagaagctagagcttagctacacacacttctctaatagctaagctcacctccttgagatgagaagctagaacttagctacacaacctctagtatagctaagctcacccccatgacaaaatacatgaaaatacaaaagaagtcctactac

SEQ ID NO: 223283 - DNA, 446 bp, Glycine max
  unsure (1)..(446): unsure at all n locations
actcttaaatggttttgactttttcaaattggttttaaagttctctaaaagttataactcttcaaaatggttctcttgaccagacatgaagagtctataaaagcaaggctttgttttgtatttttaatcaatctttctaagcaatctttctatcaattcatctcaatcatttctttcaatcatctttcattattttctttcatctctctcaacagttggtctggttcatcttctcttcatctntctaaaaagttttggtcaaaactttctcttccaagaaaagatctctgttcaaagacatgtgctattcatccttttcatatccttcntccttngccaaaaagaattcgccaggactaaccacctgaattctttttgtgctctctcctcctttccaaaaaacaaagactaccgctgaatctttgttctcctttccttgcaacatc

SEQ ID NO: 223284 - DNA, 469 bp, Glycine max
  unsure (1)..(469): unsure at all n locations
agctttaatttcaatacaaggaacatgttttatgcttatgaatctaatttttggttntgaatgtagaaaggcatgaatattatgacatgtttgagaggtttttgttagaatttaaatttggctgccccgtgatgaataccttgcacctaggtagcatgaaaaatacctttcagcggtatgtatataggtgaatgtatatagtgtggaaatgctttgcaaagtgtgtgaatataaggcataaaataccttgcaaagtgtgaatgtatggccaataatgcatttaaaaaaaaatctatatatgtaggataggtagtgtaaaaatgcctttcaaaatatgtatatctgtggataggtagcataaggggtttttcanaaaaaatgtacccatgtcaaaaatgacacgagaatgcttccanatgaatatatgatgtgaaatngcctttcanatgtagatagatgacatgaaaat

SEQ ID NO: 223285 - DNA, 450 bp, Glycine max
  unsure (1)..(450): unsure at all n locations
tgcttgtggagcttctatggaggctggatctttgagcttatttgttgtccttcaatggngattttccaccatggagatgcagtagaaggcaaaggagaagaggagaggagaggcaccatccactagggaataagccatggaagaaggagcatcaccaccaagaatgtgccatggataagaagcttgaagatgatgctttaatggaggaaaagaaagagagaaggggggagcacgaaattgaaggaataaaagagggagagaagtggaactttgaagtatgtctcataagactttcattcatcaaagttacaacaagtgttacacatgcttctatttatagactangtagcttccttgagaagctttcttgagaaaacttccttgagaagcttctttgagaaaacttccttgagaagctagagcttagctacacacacccttctaataact

SEQ ID NO: 223286 - DNA, 416 bp, Glycine max
  unsure (1)..(416): unsure at all n locations
ccccaaatcttttaaacggagggttcctatgctcttgaccttgactagatacaacctcttttaaagcgaaggcgcttgactcgatcccatcgttactaaagtgaaacaaaaccccaggcgaatcagaactccgacatctatcatgggtggaatggatgaatgcatggagaaatgtatatgacacagatgcaatttgtgaatacgggagcccgggaaattgcccccttcttagatacaacatatgcgcagcatggcgcccgacatatgtattgaagaaggtgacacgaacctttcgtcggtttgacaaagtgaggggatcaagatggaatctatgcatgatgcatatgtgaaaggcaccacacttgggatgtacataatacgactatatccacaaacaanagacatttaggactaca

SEQ ID NO: 223287 - DNA, 394 bp, Glycine max
agagtttatctcttttatcttagtgagagtgattctcctaaattcttgagtgattcaagaacaccctgactgtatcaaaggactttcacaacctttgtgtgttgccctcgccggaaagagtgattatttccttcctttcatcttcaaccttgttctttcaaaccacaattccagaaaatccacttatgcccagaattatctcatggtcataactcacgttttacgcactcaaattaagtgattcttgagcctaaattgaatttcaagatgagacctttcacctcgctttggaatcacctcatttggagcccttgatcttgagtctttgccatttctatatttctgtccagccaccactttaacctacatttctcatctcaatattccattttat

SEQ ID NO: 223288 - DNA, 421 bp, Glycine max
  unsure (1)..(421): unsure at all n locations
gacttaccttgaatttatttcttngatagtcctttgagccctgnntccctttccttgttnntgaagctcactacaagccttaagtgaaaaaccatgatattaccatatcctntaggaattttggagctttggaattgttttgggaataagtgtggggggtttttgtttcattggacaactcgtgatgcaatcctactccgcaagggcattggatagaaaaactccaagtagattgggccagagatgcaagagaaggccctatggttcttatgagccttagggtagatttcgggcccatgggctaagtacgagcccgcttatctttgtaaatattagaattacggttcattatttttgggccttgtatttacggctccattatgtangtagggtaccctataaatatatgaattttcaaccc

SEQ ID NO: 223289 - DNA, 233 bp, Glycine max
taaggcacacaatagattgtggaattgaaggagaggttgaataaaactaaaaaagatgagaaaacatctcccggttatttctctctctttgtttatgtagcatttgttttggaaacaaatctcataacccgatagatctctgatgaggaattgattgtttagtaaggcggaatttttttagaaaacagtttctaatatgaaacaaaggcaggggattatcaagcaccccctta

SEQ ID NO: 223290 - DNA, 386 bp, Glycine max
agcttctggtgggacatcttgacttgcttttattctgtatttcaccacagattctgccttcttctattttcagattgggaatgcctctaacagcacctttgtcaatgattttcttcatgcctcttaagagcagatgtccaaatctttgatgccatattttgacttcatcttctttggagactagacatgtggaggagtaactggtttcttgaggtgtccataggtaacagttgtcctttgatctgctgcccttcattaggacttcactcttctcatttgtcaccaagcattctgactttgtgaagtttacattgagtccttcatcacacaactgactgatgctgatcaagttcgcagtcagtcccttcaccagcagtactttgttc

SEQ ID NO: 223291 - DNA, 125 bp, Glycine max
ttgaatgaatgagatacatgcatacgtgtacaaaaggctttatgatccctacttctcttatcatgctaggaatctcagcttttatctatcgtatgaccaatgtattgtgtcataattgctactcc

SEQ ID NO: 223292 - DNA, 275 bp, Glycine max
  unsure (1)..(275): unsure at all n locations
cacgcaagcnggccacccagctcgcccagacgagcatgttgcttcctccttatgcaacagccttcaggagggcccaagagggcctggtagctactcgcacccccaatatactaaacacaccccctgcccactctatgcggagagtcgtctttcggaaagatacggaaactgacgaaattcggaacgaaacttgttatctttccgaaaggtaacggaaccttgcggatcacataatcatcccttttttgacttacggaatgaaacggaacctcacc

SEQ ID NO: 223293 - DNA, 393 bp, Glycine max
  unsure (1)..(393): unsure at all n locations
caaagaagaatcaaacaaagctcattttgctttcagaataatacaagattggttcaaccaacaaagccttgattcaagaattcttcaagatcaagtcttgcctcacaatgaaaggtttcaagtcattccaggcacatgtaatcgattaccaatgcatgtaatcgattaccaatattaattgtttgaaagtgtgtaatcgattacacatcatatgtaatcgattaccagagactccgaatgttgggaattcaaattttaaatgaagggtcacaactgttcaagaaaaacaactgtgtaatcgatttccagagaggatnttcaaggaatatcgccaatagtcacatcttatcatttggattntgatggccatcaaggcctatatatatgtgtgac

SEQ ID NO: 223294 - DNA, 350 bp, Glycine max
  unsure (1)..(350): unsure at all n locations
ccccatttttactaaatgcaccccctttctattttttttgaattcttttttccgaacgttacgaaaccttacgaatttcgtaacgatacctaatttccttccgcaagggtacgaatccttacggatttatgtatttaactctttttagctttcgaagaagttacggaaacttacggattgcgcaaaaacacctcttttcgatttccgccacattacggaatttcacgaatcacgcaggcctgcttcctttcgaatctgagacatctcgggttttcattcatagccttgagggtccgcacttangcaatcatgaaactcagcttcaaactcgaaagtggaggacacatgaa

SEQ ID NO: 223295 - DNA, 470 bp, Glycine max
  unsure (1)..(470): unsure at all n locations
taagcttctccggaccttggcaaacctacaactcatacctcaagtttaattgtctactcgngactggtccctttcctctctctggagcttaagctagtggtactggcccacagagccccctctatagttagttccggctgtgttttccctacagcccttggtctcttgtccaagacctaggtggtaactatatatacatctctcagctcggcattctccctttggatcttgagagctaatgatttgaacctttctttgactatttgggcttgctcgaattctgccctaagggcctgcatctcttcgactgtctacagagcctcaacttcctcccctttagtggttctcaaactcaggagccaatccaaaccctgcatgtgggcgtgtaatcacttattgagccaacgatggcgccgtgttctgcctctgattcttgtcctcttttgaccatctccacccttgcgaccttt

SEQ ID NO: 223296 - DNA, 319 bp, Glycine max
  unsure (1)..(319): unsure at all n locations
agctctacagcagattttagtaatgacccatacttattaatattatatctnacngccatgaacctagggaattaaaaaaaacttaatggctgagtgtaactgaaatagtggcaaccaaaagtcaccctcaacagccaacaagtcagccaccatttggtcttccaaaaggctgatgcctaggatgccaattgggcccttattacaacttgaactaaacctaaccaaagcccttttaattgattaacccaaaacatatttttggtcagccaactttacaaggattgggccattatttatacaaactaaacactctaaaaat

SEQ ID NO: 223297 - DNA, 361 bp, Glycine max
tctatagagtggtcctctaatctggcagatgcctttatgtaattagaaagggaatgtactggctgagaccttttccaagaggagcaacacatatgtacttaagtcaggggttgtagctggtacttaattcatcttgtgtaccagctatgttcaaaatatatttgtactcagagtacctctggtactctttcatctatctaatacatatctatctttgctgagcaaaaaaaattatctttgctgataaaaaaaaacaaaaataagtacacttgccctaaaataccaacattatactcactattgtccagcttgccataatttatataaaaaacaatataatcctcatacagatacaatcatg

SEQ ID NO: 223298 - DNA, 146 bp, Glycine max
ccgaacatagttcgccatataccggccttacccacactctgaaaagaatatgttcccttcgcggaatattatggaaagattgatgtgcttgaagagaggttaacaacacttgagggccttggctattacccattatctgattttgc

SEQ ID NO: 223299 - DNA, 398 bp, Glycine max
agcttcgtactcagatccctcttgtggactatgcttaatttagatagccctcctaggtttagactaacttaaactaagcttcatcctcagatccctcttgttggactagacttagcttaaatagattacaaaagtttagactaatttagcctaagctttgtcctcagatccctcttgttggactagacttagactaaacaacattattgaaaaggaaacacttaatgtccaagcacctacatggacgaagtataactatgagcatactccatctgaggcctttaaggttttgcagataaaggacatagttcatattcctccccctcaatgaacttgtccagtgtagcctaatattatcaagatgctccccactggttggacctggtactcaacaatga

SEQ ID NO: 223300 - DNA, 478 bp, Glycine max
  unsure (1)..(478): unsure at all n locations
cttctcgtggcttctttgagaagctttctaacaattttctttttaagctagatccttatctatccacaccctgctattaactaaattaacttccttaacaataattaccgatgaaaataacgcaacaaataatcaaacatcaaacataattactaataatatatagatatatatatcagggtgttacaatctacatagattagagcttgaagcatgagccggtttgaaagcttgagatgagtttgtgagtgattgtgagatcctagaggtgaaggagacatcctcaccacttgtatntntgcaatccttcatcttgttcttctctttgttgtaaagaacgcctgggtatggaaagccaaatcctctgtaggatttttcctgtaggtaccctgatgaaatctatttttatttatcaatgatgtttcggtgttcttgtgcttctcgctttaatcaattacatttacttgatccgtaaacc

SEQ ID NO: 223301 - DNA, 53 bp, Glycine max
  unsure (1)..(53): unsure at all n locations
cgcagcagcaagcnagccaanaaaaggacttattttgttattgccaccccgac

SEQ ID NO: 223302 - DNA, 405 bp, Glycine max
cccgacggagacactgaaaaatacttatcctcccatatctggacaaaggattacatgctgagagccactaaaatctccttctaaagaccttggatgcaactgtgatcgtattcccatctcggctagatctccacgggtgttcaagacatccattcgcttgccttgaatgttaggagcatccaatcacactatcacatacattttgtcccatgcatatataatacaatgtctaaatctagataaccatgaggatatccacgaaaggacccattttatatgcaagcatctatatctttttgggtcttcaatcaaattatgtgcgacctgtggataccctaccagcactgatcacgataatggactagcattcataaaacctttaacatttaaggatatggggtacaa

SEQ ID NO: 223303 - DNA, 331 bp, Glycine max
ctagttccgccccggagtacgacagtcactgctttaggagcgttgtacaccagcagcgcttctaagccatcaagggatggtcgtttttccgggagcgacgcgtccatctcacggacgacgagtatactgatttccaggaggaaataaggcgccggcggtgggcaccactggttactcccatggccaagtttgatccaaaaatagtccttgagttttatgccaatgcttagccaacagaggagggcgtgcgtgacatgagatcctgggttaggggtcaggggatcccgttcgatgccgacgctatcacccagctcctgagatatccgatggt

SEQ ID NO: 223304 - DNA, 269 bp, Glycine max
acatatgcaacattgcctatgggaaatatgaacaaacgcatcagcgcatctcttaccccaataactctaggattgataactatgacaaattcatttcctgaagcaagtcgctcagtaactatataactttgaatagctagcagcacgatcattgggggatcttatgatgtaccttctcaccaatgaaatatataaatcgcacgcactaattacttaggtctttgcatcacgatcactacatttgatcctagacaccttactgatcatat

SEQ ID NO: 223305 - DNA, 451 bp, Glycine max
  unsure (1)..(451): unsure at all n locations
agcttggatntccttagctccagaaacctctctttcttatgtgatcccaaactcaatctctgggttggaaaataacctttttgcgccccttgtttgcttgtctagcatagctctcattcctattttcaatttgggtcttgactctttcatggagctttttcacatagtccgctttggcttgtccttctttatgcttaaaaattgaaatattaggcattgacaacaaatcaagaggagttagtggattgaaaccataaacaacctcaaaaggataacaactagtagtgctatgcacaaccctattataagcaaattcaatgtgaggtaagcaaacttcccaattnttaagattcttttccaaaacagcccttagcaaggtacctaaagtcctattcacaacctccgttngtccattcatttgagggtgacaagtagtagaaaatagtaactt

SEQ ID NO: 223306 - DNA, 426 bp, Glycine max
  unsure (1)..(426): unsure at all n locations
gctgagtggagtttaaagaaattnttgcttttacatgcctaactcctttgagtgacanttcgattgggtggtatcttgattgatggatcttagtacatttgatatatgttttgcatcatgcatcatcattgcttaggtgaaggaaattttctaagttagaaaaatttctccaaaggaaaaaactctctattttaatcgattacaaccaactgtttgaagcttttagagttgagtctcgtattggtttaatcaattacatatatctcacaatccattacattgttatttgagacaatgactaatttagtcaagagtctctgctttaatcgattaccaagtggattaatcgattattatttctctctcattaacgtttttagatggtaacaagaacacactactacaaaagtcatttactacgacgta

SEQ ID NO: 223307 - DNA, 495 bp, Glycine max
  unsure (1)..(495): unsure at all n locations
accttaagncacctgaggcatgcaagcttggttacttccttcttcactacatcataatattttgttgagtcttctctggggctagcttactggtttagccccatcctctaaatttatccgatgcatacatgtggatgggctaataccaggaatgtccgccagggtccagcctatagccttcttatgcttcttgagaattgataacagcttctcctcttgctcatcagcaagggaggcaaatataattactggaaaacttttgctatcatccaaataagcatattttaaatttgatggcagaggcttcaattctggtgtgggtggctggatagtggtagaaagagatggtttctcagcctgtacctcataaagaaagtcagaggtatatgtacttcctgaaacatggntagttctatctgactctagaaaatcaatctcaagaggtaaaacatcaccagacatataatcattatcaacttacatttactctcacat

SEQ ID NO: 223308 - DNA, 357 bp, Glycine max
  unsure (1)..(357): unsure at all n locations
ctcatgggccactttgggatagactagacccttgtcttactcaaagaagaatttctatgggccccatatgacagaaagatgtccataagcattgcactaagtgtgtggcttgtttacgagccaagtctatggtgatgcctcatgggctatacacacccttacccattccatctgcaccttgggtagacattagtatggactttgtccttgggctccctagaacccaaagagttgtatactctatctttatggtggnggataggtttagcaagatgacacactttataccatgccacaaggtggatgatgcttcccacatctcaaaactctttcttacggaagttgtgagactccatg

SEQ ID NO: 223309 - DNA, 469 bp, Glycine max
  unsure (1)..(469): unsure at all n locations
agctgggttagaggtacttacccatngaagctgaagattacgaagaacgaacgatgaatcttgaagaacggtcgataatcttcgcgtaattactcacggaaacgttacggaaacgttacggaagcgcctcgacttggattntcttcacggaaataattttcctcagcaaatgagagagagagagaagtgcctaaggggctgaacccttttcttcttcacttctccccctatttatagcaaaataggggagaagcttgccacccagctcgcccaagcgagctcagctcgcccaggcgagcaaggttgcttccttcagaagcaacaaccttctggaggaatcttctggagggcccaagtgggcctggttgctatttacacccccatttttactaaatacacccccctttctaattttttgtaattttttttccgaacgtacgaaactttacaatttcgtacgatacttatt

SEQ ID NO: 223310 - DNA, 527 bp, Glycine max
  unsure (1)..(527): unsure at all n locations
tctggcctaggaagtggacatgattcatatccatgatgtgtttctgtttatatgtgatgncttttctagaggatggaaattggagaatctttatacaaatataactactgaggttagggatagtattcttggtatgagtgttgttattcacccaagcatccttgacacgtgggtctagtcagatgaccttattggttagtattctgcacatactagttacaattggcttttgaagcaagtagagttgaatccaaatttgcattgggcttggttatggaaggcacaaataccagagaatgccaagtttttcctctggcaagtgggtcatgatgcgtttcccactanggagttcctaaggagaatgcatactattgcggatgaattgtacttgaggtgtgggacgataaccgaatatatctcgcataatctatggaagtgtgggagtattgacttggtggggaagttcttcatatatcttgccttctgatagagcttgagttggatggtgactggatatataacatact

SEQ ID NO: 223311 - DNA, 460 bp, Glycine max
  unsure (1)..(460): unsure at all n locations
agctngtgagtcagaggaaaaactnttcattgaatcacttatgcatgcatatgtcttacttttcaatttcatttaattgcacttattaacttctgtttatacctttaccattttgcaaaggtttaatccattaacataattataaattctaccaaactattaatataagatagtatgaaactctgaaggtcatcatatctctaatttatttatttatttaaataaaacaagtaagaagaataatggaagacaatcatcagatgggaatggtagattacttcacttatccccttttccccatctctctatatagcaccaaccattttcttctgttattgggtgtgtatgtgacttgtcttttgatcttgtaggctatacttgattcaacaagttccttanctgagtttgcttgtgaagtggaaataacagagtaggtgctcaaaatccttttcacatgaaa

SEQ ID NO: 223312 - DNA, 384 bp, Glycine max
  unsure (1)..(384): unsure at all n locations
agtcaacatttaactttagatattcaactaactatcaatagaaaaaatgaacaaaatgtttcattttaaaaatatggagactaaatgtcttgatttataaatagtgagattaaaataaaaaaattttaaattatagaaaaatcaaaattataatttaaccttaaatattctaagtttacattgattgtagagttagatcaatcataataagaatttatctaaaaagtatttttttacatcaattgtagagttacaaatccaaaaatgtgtcgtgttaggagtttcaaaaattgtataagtatgtcaagattctatatgggaattgctatttctacttctcctaattactaatacacttcctttttaaattttatnttattaaaa

SEQ ID NO: 223313 - DNA, 470 bp, Glycine max
  unsure (1)..(470): unsure at all n locations
agctnttctcagtcgtctgtaaggatgattgttgttataaagctgctatgcctactgtggactgtttttctcccatgtttcagttgtgtataacttgtattttcttcacagatggggcatgcatgatgacccttaacactgtaaccgctgagattcccatatgctgggaagtcattaatggtacaaaaaagcattgcacgcatttcaaacgtctccttgcgaaacgcatcaaacactacaaccccctcgtcccacaactttctcaaatcttcaaccaacagaattagataaacatcaatgtcatttcatggctgtcttgggcccgatatcatcatagacaacatcatgtattttcgcttcatgcacaaccaaggagggcaaatgtaaattactagcagaactggccatgaactgtgttgagtgctaaggtgccatatggattcattccatcactggctagtccaagtcta

SEQ ID NO: 223314 - DNA, 453 bp, Glycine max
  unsure (1)..(453): unsure at all n locations
ctcagcttttatccaggctcatcttggggtgaagctccttcttccttggttattccctaatggatggcgcctcctctcacctcttctcctttgtcatccgctgcatctccatggtggaattccaccattagaggacctcattgaagctcaaagatccagcctccatagaagctccacaagcaagcttccatcataaagtaaattaaatatggtgtaattagtaccaccaaacaaagaacaacatagtaaactaaaattgcagttcaatattattagttaaaaatcccaatcttaggcttctatntaacagtgttgatttgggaagttttagaagcataaatcanagagcactttccacacttaanaaatatatttgacccacaagaaaagggaatataatccatagctggaggctagagtatctaaagggccataagtatcgtcttttgatta

SEQ ID NO: 223315 - DNA, 227 bp, Glycine max
gagaaaccctgcgagacgatcttgagctccgacagcgaaaacacatgcaggttagaccccactagagaaacggagagaacctccgaaagcgcggagccagggaaacacaagcccggcatagagaccccgccggaagaagaaccacccttcgtagccaccactctgggtggctccggagaaggtgacacaaactcaccctcataacaactagagaagctcgaccccac

SEQ ID NO: 223316 - DNA, 352 bp, Glycine max
aagaacaaaaaagatgtgttaaatggaaagcgtctggagatattttttaattgatccataatcatatcctcctatatgtacctgcgtgcactaacctaaacagagagacaaaacataagcaggtttggaattgattaacgcattgggcagatgacacaagctctgtagtataaatcatgaccgccatgagttcctcttctagaggaatcagattataaacatcaattattatcagtgttatatttatatttattatcattataggtatttctactggtgctattattactattattattatttatattgatggggtaatttaaacaaaataatgatgagatggtgaaaagcc

SEQ ID NO: 223317 - DNA, 437 bp, Glycine max
gattaacgaaagaaattattttatctagtttttatagaacttaattctatcgaattgtatatgccaatcttttttattgaattataggaatatgatttcatgcatatatgtgcgcgccaccactccaaaataagcacacattatttatactagctagagaatatgtagccatgatgtgccagaagaaaatgctgatgtggccagttgaacaaataatcaaatgtattcaaattgaaatattattggctgaaaaatgataatgaaaaaagcgtccattgatttagctctccatcactttttgtccgtttttgaattcgcaccatacgcttattagtccgaaggaaagagaaaagaaaagtggtacgcgtgcatgttctattacactcatgagtaagactctttatcttgatacatttaatgcactggatgtgggatct

SEQ ID NO: 223318 - DNA, 445 bp, Glycine max
  unsure (1)..(445): unsure at all n locations
accagcagcatcaacatgacattttcaatattagagttcgagttgcatacagggtgtccataattttcatgggcaggacgttagctgaacacagcctaagattgttataaaatttgagaattctcatcttggggaagattttcattaaccctacccactctttcaattaattnttttatattttctctttcttgcatagtgattttatactatttatgaaagtggaattgattttntaaaattatatactctttcaaatttaaatttaaattattatcatatatttgcgtttaaacttagtcattttttaatgattactattatctttaagtttaaattaaatggttctaatcgttaccagtatgggtattattttaaacaagttaaatcttgttntacttaagttctatggatttctattatcttaaaaatattatatatatta

SEQ ID NO: 223319 - DNA, 453 bp, Glycine max
  unsure (1)..(453): unsure at all n locations
agcttttcttatctctctgggtgtatattataacgattatgaaatctttcagtaaaacgagaaggacancttataaccatttctctggcaatctcgcttataggttttaccgtcgtttgtatagcagacaacgcattatttaacctcacatcgtccagtatactttggaaacttaccccctcgcttgctagacggcgatgtaatgtagaaacagaaatgtagagatatcgagcaaccttgtttgctgtccattttgtgccgggttcggatagcagcaggttataacaacgacttatcaatgattggttactatatgataaaagtaaatgattaacatgattcactcctaacgaaagtagaacgcccatngctaagtagctcttgaatttagttgagaaagcctcggaaacagatgttttaagtgctccaacaatatattaactcaagattctg

SEQ ID NO: 223320 - DNA, 421 bp, Glycine max
  unsure (1)..(421): unsure at all n locations
ntgccgtaactgtatatgatccagatgcacctacattctgttgttggtggcattggactgttgttaatattccagcaacagtaacatatttgcccgttgatgcagggagacgtgatggaacaaaactgccgactggtgctgttcaaggccgaaatgattttggctatgctgggtttggtggcgcatgtcctcctaaaggagataaaccacatcattaccagtttaaagtatgggctctaaaaactgaaaagattcctgtagattctaactccagcggagcgttagttggttatatgcttaatgctaataaaatcgcaaccgctgagataacaccagtttatgagataaagtagggtgagagtatgctggcaagaggtaagactaacttaaagatcgaagaatacggatgataaacatcatg

SEQ ID NO: 223321 - DNA, 434 bp, Glycine max
aaagggaactaccttttaaaaacttctccccactgcatccaataatgagactatctatgattacaatgagaatgaagccaattcttggccttccctatcaattagagtgaggaaagaatatccaagcttaagcttgaggaaaaaatattagaagtgagaattgttcatggataaaagcccattatcaactggagggtccctattcaacccccttttacatgaaccattgacccaccttataaaatgccccaacttttcacgtttgcacccttggtcactaagacataattcagcctaggcatatatttacgcaataaaattggccacgggtgatatgtgtatgaaacctacttgatggaccagccataggtgtcagaatggggcaaatatacgatgtaaagtcgtgaaggcaactctattcttctcattgatgt

SEQ ID NO: 223322 - DNA, 295 bp, Glycine max
agctaggccgcctcatacggagtttttttttttattgactcatgaccgacatttttatctatcgatacaaacttactcacggaatcgtgtcgtctacatgggactctggtctgcgaatgaaactgcatttcgaaatgctcacatgacacatgcgtacatctggttggaggccgatgaagatcatgatgatggagagggaccatggtatccacattctgacatgtgcattgttgtcgtacgagtttctgcttcatactcaatgtcttccttatgatatgaaagaccacatgatcat

SEQ ID NO: 223323 - DNA, 51 bp, Glycine max
gtgggactcaaagactacctgtttagcagcaaagaaagcagcccccgaatc

SEQ ID NO: 223324 - DNA, 443 bp, Glycine max
  unsure (1)..(443): unsure at all n locations
tggtgagagcttgagttgtaagagccagaattttttttgtttaatactcgcaactcgccgaagctagtggaacttagtggttaatcaagaactgaacgcagtcttaatggtaaagaccaactactataaatatttgcgtcttatatgcttttatttattctcatccttaaattgacctaaggtttgaatttgattatggtttgaaaactctgcttgttttgcaaaatctgtttccattgtataaatgtgtatttgcgaaattttgttatttgtcttacaaactttctctatagacgataactctgttttccaagaaaaaggatttaaaattttctaanatcacaattccaacccttcttgttatatttgtatttacaatttggcattagaacttagtctttaacggttgagtacctggtaatgtctagaggaaaaaatcttga

SEQ ID NO: 223325 - DNA, 449 bp, Glycine max
  unsure (1)..(449): unsure at all n locations
agcttgagaaaatgaactagatcattatattattaatgnnnaagntaggttctatttcatgcaggtataccacataatcattcgaaatagctgatctcatttctctttaagacctccttaatgctacttcttatggttcttccataatgagttcattatgtataatgggctcattattgtgttgttcttcttcatatattgttgtttggagcaataactaaagtagcaatcaccttactactaaaggcacaagttaaaaggacttgcactctaacttctttaatttccacatctcgtggaactttactcccatagatttcaccattttcaatgaaccctgcattgtcaattttgacaattctcatattatatatgattaggacaataaaacacgtacccctttgacttttctagataaccaattaaaatatcactgnatattcttgcat

SEQ ID NO: 223326 - DNA, 385 bp, Glycine max
  unsure (1)..(385): unsure at all n locations
tggatattcagcctaacgagggatcgaaggtttagtaatttttgctatagcatagaacacaagagcatgattgattagagaaatatatttctatgcaccagcttgcttgttagaaagacccaacatatctacctactgttgtcattntatttaccttgcattttatagtttttagcataatggtttagtttaaattttgtatgaaattatcacttatacatgttctctcaacaatgcttcaattctgaacttaatttaggctaacattagttccctatgttcgatactcgaattcatccattntaattntaaatacttgacgatccaatgcgctttccgataaacccccattgaaatttccttgagacataaatgcacaaaaaaa

SEQ ID NO: 223327 - DNA, 424 bp, Glycine max
actatatatgggtgttcttcttttatctctacctgcttaaaaaggtgataattcactcctcatgtgttggttatatttggatcatgtgatgatcttaaaccttgtgtttgtgagagcaaatgactaggtgaattactttaagaaaccttgtgatggaggactccgagacacaatattttgatagaatgtaacattggaacaagagtttttattttaattgcatgacgtatcaaacatgtcattttactttatttgataaacttgaacagtcttgttttaagtcataaatatttctaagaaattttatttggtaatagtgaaccgaatgtgagcattacccacgtcgattgatttacgattttattgaataaaattgatttaattagattccgcactttatatatggtttttttttcatttatat

SEQ ID NO: 223328 - DNA, 381 bp, Glycine max
  unsure (1)..(381): unsure at all n locations
aatcacaaaatcatattctataccttcacattaatcacatgctcataacaaaacatctcaagtacaacacaacatctctcacacacaattcattacccaccatcacgtagcaagtcacaatgatcatcacacagacgttatgcaacatatatactaagactcaatcctatattgaatgtggtatcttgtcagtgaaaaataacactagggcaaatctctccaccaaagggaggctttcttcacaacatctgaatttcccaatccccttcagcccccatactttgatttaaaaacattgcaccacagaatcccgtcatggntttaaattgacggtgtggtctgccagaaaatcttacatttgcaaaaaaatgcgattgatat

SEQ ID NO: 223329 - DNA, 466 bp, Glycine max
  unsure (1)..(466): unsure at all n locations
ttaagtcacctgcggcatgcaagcttgttatgaattgatttagcctttttcttttgtttattagtcaatccgattaagaaagataatcccaaagaaaaacgtccaatcgattnttttttattattttatttaaagatatttttttggattattatattattattttgcctcttttttgttttaaacgtggttacggcatgaaagattggccggattttattctaacagaaattaaaagatgttacaactcaaatgatcggtggaaatttattttattttttgagtaggcgagaaagtgacttaaataaatgactaaagcacgtcaaaaaggggtacggaaagcaaatgaaataaatataaaagcacgcgaaacaagcggtgaccactaagggtacatagaatgaattgaaaggttcaatttcgggaacttaccggttgaagaccgaataacgaacgaagaacgatg

SEQ ID NO: 223330 - DNA, 434 bp, Glycine max
  unsure (1)..(434): unsure at all n locations
tgtttcatttactttttataccccctcttgacgtgcttaaggccatgtttacttaagtcatttctcgcttaacctaaaaataaaataaatttccaccgatcgcttgaattgtattatccgttaacttccgttaaaatgaattttgaccgttcggtcgtgccgtaaccacgttggaaatcaaaaagaggtaaaaaataatataataataaaaaaaacatcttttagtaaaataaagcagacaatcaatcggacgttntctctttgggatttctcattcttaattgaattgactaataactaaagtgaaactaaggctaatatcaactcgcctagtcaagctcgtccacaaaaataggattttgaaagttatcatttctgttcttaccaagaaaatggattgttttatggccaacgcttaaatgatcactttaagt

SEQ ID NO: 223331 - DNA, 474 bp, Glycine max
  unsure (1)..(474): unsure at all n locations
ccacctgcggcatgcaagctagcaatgataagttgagccctttattttcccattttataanaaantggccaaatcattagggctgtttttattatcaaacctgatatcaagatcaatgaagatctatgtcttcaggattaatagagctacagctacatgcctacatttatgaatatccttgttctttttcctcgcccaaatgaatttcaagtngataaagatactatcctctcttcttcttcttccttttttcccgattaaacgggggctaattaaagtcgaaaggcgcaaacaaaaataaataaataaaatagatgtaagcttcatgttagagaccttatcaatttctgtccatgcaggaaaaaaaaaaagagtgacacttttatagttcttgtcaaacaattcagtgttactgggacataagcacgtgaaagcgcttgatgaagatatattagttcttcgattcatttcctc

SEQ ID NO: 223332 - DNA, 384 bp, Glycine max
tcgaaccggaattcttccacgccggccttgaaaaccgctatttcggtcttgcatgtccattcagaaggacagaggttgagccaaagcgggtcgggtcggaatagcgatgattacgaaccgggtgcggttatatgtagggagagtgttccactgggagggagttccggaagctgtatgggcttttgcgtttgggaagtatgaggaaagaggagtcctattcggggcccatagagaaagaggctccacgtatctagactcgggtcggataaaagtaatcggggtttctttccttttttattttctacaaaaaaatgataattgcttgccaacgtgcccgaggttcttattttgcacatagaaattatatcgctgatctaccaagaa

SEQ ID NO: 223333 - DNA, 448 bp, Glycine max
  unsure (1)..(448): unsure at all n locations
agctttctgctttgaaaggacagatagctgtttgttttgtcttccatcacgangcgaganattaaatttctgatttccttttgttgcatctccctatcagaataatagaattatagttgtaagttacaaatgtggaaatgttcatgtggtagcccagctgctctgctgctggttccttatgatagtgaatttgagccctgcagttggcttatgcatgattcttataggttgaaatggcttctgttntaacacgaagcaatattttaaaaaaaaaaacatttttcctcattttattacacttaaaatgtctagggttgtttagaaaaatgttctgataatgctatgctcgaattcgttttaccatggtgaatagaagtcaccagtaggaatctttgctttaataatatcattgcttgcctgcaagcatcatatcttgaagacaataaaa

SEQ ID NO: 223334 - DNA, 446 bp, Glycine max
ctaagctatcacatactacgtcagactgtcaccttagagatttttattgtttgctgggagagacacacaatggttgaacgattcatctaagtgtctcaagcttggacaattgtaaataatcgcgtgaatatccttcgtctgatagatcagccatacccgaagtgtaatgtctctaattttgggcaagctgaatggcttccttcgaaccttctaaatgactctcgaagtagataacaacctccaattcttaatgtgacaaaatttggcaacacaaataaactacttggtaaatgttggagtcccttacaaccttcaatgtgaagatagttaagcccagcaagtttcttaatggattctggaagctcctggatagctgcatataacatttgaatccttaatggcttatccattgttctctcaatctctgggaagtgtgcgaatcttga

SEQ ID NO: 223335 - DNA, 436 bp, Glycine max
  unsure (1)..(436): unsure at all n locations
agcttctacttatgtggcagggcgggcttctctcacttttttgtctcccacgcgagcnttgaccactgctctttcttcccgcgatgcttcttttcatgtccgcctgagtgggcttatagcctaaaccatacttcccacgatttccttgggcatttatcaggctagttatgccgccgttgtctttgcctaaacccattccgggttcataaccgttccccaacataactcgggccatcattactgctgcatcggacagacaaggctgcccagagaaggagtccacggaggaaatgctgaccacctcaaaagactggaaagtggtttctaacgattcttntgcggcttccacataaggcatagaggatgggcagcttaccaagatgtcttcctcgcctgacacgatgaccaagtgcccctccactacgaatttaacttt

SEQ ID NO: 223336 - DNA, 389 bp, Glycine max
ctaacttacccagagtttagaatgacccactaacctagaatattatacttatatgccttaacccacggaattaaaaaaacttaatggctgagtgtaactgaaattgtggcaaccaaaagtcacccccaacagccaacaagtcagccaccatttggtctcccaaaaggctgatgcctaagttgccaattgtgcccttattacaacttgaactaaacctaactaaagcccttttagttgattaacccaaaacatatttttggtcagccaactttacaaggattgggcaattatttagacaaactaaacactcctaaattgaaactaagtggtgtcatttagacctcctccatttgggccatgatacaactcacaaccttggattttctcct

SEQ ID NO: 223337 - DNA, 310 bp, Glycine max
  unsure (1)..(310): unsure at all n locations
attggtaccctttggaatagatctttgaatagagaaaaaattgtttcgtgaagaaaatcaataccgaggcccttccgtaatgcttctgagacattttcgtgagcgatttcgtaaagattcttcaccgttcttcatcgttcttcgttcgttcttcgtcgttcttcggtcttcaaccggtaagttcctgaaataaaacctttcaattcattctatgtgcccatagtggtccccacctgtttcacgtgcttttattntcatttcggttggttttccgacccctttttgacgtgctttaccattatttaagtcg

SEQ ID NO: 223338 - DNA, 464 bp, Glycine max
  unsure (1)..(464): unsure at all n locations
gtcacctttggtcctnctcatagntggggcacgagaaaacatgctctattttcatctcccactccaagtaggcctctggatcattctttcctttaaagggaagaatgttgagtttaataccatcaattcagtcttgtctaggaacaccatcattccctcttctccttctttattcttcattatgatctctgttctccatttgatccaacctctcatggagtgcatcatcttgttgtttcattaacctctccaaatgttgcatcanagcttgcatttggaattgcgaaagctcccctccatcattaggatttgttcctgccatctcaaacaaacaaatcaaacgtaacaagacaattatagttgttggttgaatacctgacccactcaagtgtatcacaccaatatggattttctctaatgaacactcttgcttttacactctattcccttcgttcttagcattc

SEQ ID NO: 223339 - DNA, 440 bp, Glycine max
  unsure (1)..(440): unsure at all n locations
agcttaataactttgaaacctctactcttatcactctcactagaangctnttgcactctgattcacaacctctcatggcactgtaactccgtcatcgccagcattgcaacctctcatggtgctacaacatcatttttgtcctcagtcacagcgcactacaacctcattgtcactctcacagttttgcaacatcattgtcagggatgtttatatccatactgatgtagctccaagtggagcttgtaggccttggatcttctccatcaaaggagtcctttgcttcttgaagattaatggcagtggaatggagaaagagaaagatgattggagacgccacttcaaggagaagatgagtcaagaagaagctcgccaccaaaggaagccatggataagagctcgaaggtaggagaagaagaatggagggagaaggagcacggaat

SEQ ID NO: 223340 - DNA, 478 bp, Glycine max
  unsure (1)..(478): unsure at all n locations
tcgtctacagatccctatgtagactaggcctattctanttatttattattgtaacaacataatgaagaccaaatcttaacccgcagatccctcatgtatggctaagtttcaatcgggcttcaatcaagttctaaggcagcagtacatttcccaatgctaaagtcacctaactatgaacacatatgggtgatcagaccaaaagcatacaaacattatcattgaaggaagcattgaacacagaaaacataatcaattagatattaggtatttacatcagttgttcattagaaatccccaactagggtgtttagcccgccattacaaagaaacccaaacaataaatgagattaaaagcagagaatgatagttccttacataagaagggggaattgctcttctcttcttagcatctcacactcactctctaattaataatctatcaaatgacaaaacctaggtgtcgtaacctacccttcag

SEQ ID NO: 223341 - DNA, 462 bp, Glycine max
  unsure (1)..(462): unsure at all n locations
agcttgtggatntctcattaggtatatgtttttccatttcattagntattnttggcaccacttgttaataatttcgagtgatgttatgtctttcctcaatttggagctattnttccattccagtgagttntaatttggcatcataataatttgaactgttttttcaatcataggaactgatactggaggaagtgtaagagtacctgcatcatactgtgggaattttggttttcgtccttctcatggtgctgtctcagaatcaggagtaatccctatgtcgcaaagttttgataccgtgggtaaataatccattagattgacgactatgttaactcttcatttttgggtgaatgcatcactacagaggatagtacagaatgacataacacaaacacatcaacatttatgactttactaataatatttctcattaagcttattaaaacaaaaaagttcataatg

SEQ ID NO: 223342 - DNA, 420 bp, Glycine max
  unsure (1)..(420): unsure at all n locations
aatttatggaattaagcaatagcattaaggattaatgaaggtcaataaataaatatgacgttcgtgttaattntaacatagcttgagccatgaaggtcaatgtattcatttacaatatgttaatttacacgtccaaacaataaaaagacaaaagaagaanatgcatgttagtgtatgtatcaaatatcaacattcatcttaaacaaatcgaaactgtaaaagagaacatataacatgcgttgaaactatgctcgcgtgtgaaagataaaaaaaataaaaaaataacatgtttgaaactacgctcaaactcacatccaaccctcattaacatgaaagctaaacacactattaacctttaatttattttatttttacacgaaaacacactattaacctatctacttaaatacctggaaaaaa

SEQ ID NO: 223343 - DNA, 422 bp, Glycine max
  unsure (1)..(422): unsure at all n locations
ggaccttaagcaccgcggctgcagcttgagggcgcacccaccttttttatttttattactgnaaaagngnctaccatcatgattatcgtctcccattccattattgggggtaccacctgngccgccagatccctccaccttttgggcgtgttctttgaatgatccgtccccctttttgcacatgttctgtagttgcatcctatccggaaccatatcaaaattgtactgatactgcctaacaaaggcaaccattatgtccttccaagaatggactcgggaaggttccaagttagtataccaggtaacagctacctcagtaagactttcttggaaagaatgtatcagcaattcctcatcttttgcgatttccccatattctgacatacatctttagatggtcttgagacaagtatcccttgtct

SEQ ID NO: 223344 - DNA, 349 bp, Glycine max
  unsure (1)..(349): unsure at all n locations
cctcagctaactgaatagacctttcaataacaaactccctgtaattttttttttatacagagccactcgcataccatntgcaacatctgttattctagcttcaaatgaattttttggggagattcctgtgagtcttgcaaactataaatttcttaatacccttaaactcgatcagaatcgactcactggtcaaattcctccataatttggtgttctctcacgaatcaagacattntatgtatccgacaatcttttgatgaggccagttccaatctttagcgctggagtttcagaaaattatgcaaataaccaaggcctatgtggaggataatcattcgcgccttgcaag

SEQ ID NO: 223345 - DNA, 268 bp, Glycine max
aaggccaactttactggacgctcattcgcttatcagacctcaaaccacatggaacttcaaaactcaaggctaacttatcctcggatggcgactcagtgcatatatattagacgctcgaattgacacggacctctgataattaaatggcataactttaacccgagaccgattttgaccccattataaatcttaaatgacaacgaactctcagagttcaaggtctactttcctcgaagcagaaccggctaactatcaaacctcaatgaca

SEQ ID NO: 223346 - DNA, 309 bp, Glycine max
tcggattaccttgtgaaaagttatgaatatgtaaatttctcgagagcttccgttgtgtaattatttggcggtggtgatatattatgcgcctatatctgacatccgagataaaagttatctccatttgaatttcccgagagcttccgctgatcaatttcgagcgtgtctatatattatgcgcctgaattagacatgccagctacaaggtatgaccattcgaatttctcgagagctctcgatgttgaatttcaagcgtctctatatattatacgccacaatctgaactccgtgtgaagacatatgaccatt

SEQ ID NO: 223347 - DNA, 120 bp, Glycine max
  unsure (1)..(120): unsure at all n locations
cacaaagggggccnaagcaaagcacagctaccaagggaaggagagtagcgcaccaacacaaggcgaccagtcgtcggggacaacaacactgaaaaacacgcccaccacaaacgcaccaga

SEQ ID NO: 223348 - DNA, 498 bp, Glycine max
  unsure (1)..(498): unsure at all n locations
gatccttaagtcacctgcggcatgcaagctntngcatgtatagagatttctagagattatttgccaagttccagagagttttgagagcttttgctgtgagaagactggcaaagaactgagcgagaagagaaagccatcctgagagcatgagatgagtctgagtgattgtgaggttctagaggtgcaggagacatccccactacttgtatttatttaatccttcatttttctcttctctttattgtaaaggaagcttcccagatatggagagctaaatcctctgttggttcttccttgtaggtacttgatgtaaatacttgtatatctatttaatgatgttttatgtgttctctgtgctatcagtacgtcatttcagtgtgcatttgccttgatcatgtagatgtatgctttgntaagatcattcaacagtgaaaactggtctgattcttaaaacatgataggacagggctagtttatcatattatcacgagggatcgg

SEQ ID NO: 223349 - DNA, 444 bp, Glycine max
  unsure (1)..(444): unsure at all n locations
tctattgacagccactcatgacacatgtcctcaggcttcccttctttgttagttattgnngcaanggcatgtcggcatggcatccctacatcaaagttgtaaaatcagcacacatgtaggttatgaatgaaaaaaaactataaaaaacacaacctgttagttgccatactccacaagtgcatgtccattcacctaaattgacctcaaccttattcccccacatgtggacctcatatctcaggcccatgttatcaccacaccaaatgggagtccattgattagcaaaatggaattttttttctagtcttttatactgcactggacataatggtccaggttttccagaaagtttaaccttgcgggcagccatggntctcatgatataacttctaatttcttcaagcattgtgataataggcttgcatctatactgcagaattctgg

SEQ ID NO: 223350 - DNA, 446 bp, Glycine max
  unsure (1)..(446): unsure at all n locations
agctntactatgcagagaatatccaacgatttatctttatttgactcagcaccaaatnttgctaaggtatcttttccattattcagatacaaaacatgtacagccaaagatgtgaagatgtgagacgtctggttctctgccattgaacaattcatatggagttttctttaagatgggtcttattaaagccctatttaaaatgtagcatgcactgttaacggcttcaccccagaaatattttggaagaggtgtatcatataataaagctctagcaatctcttccaaagagctatgtttcctttcaacaacaccattttgatgaggggttcttggtgcacaacagttatgctcaatcccatgcttatcacacaatatttcaaattcttttattttacactcacgcccatgatcactcctaatagacataatcttgagattttcgtatt

SEQ ID NO: 223351 - DNA, 305 bp, Glycine max
tgagttcactattgctaccccatagagcaacggcaaatttgaaccgggcatactatatcttgcgaaccctcttggtctctcgttcaagggcccttactgcaattgcattctcttaccgtaacccgagacactccttccgaacgtgtgtaacaaccatcattgaacttctcctttggcgaggtatgcctttcctaactcgcttatgagagcgtggactttctcgatcttttacggcgcttcaaaattctttctgctgacgacttttaacttggctagccaaactaaacctcgtatgcgaactttta

SEQ ID NO: 223352 - DNA, 407 bp, Glycine max
gagacaggtcccacaacagaactttaatgaaaaagcacaataaggaacgcgaaccatacgagcgcaaaaagccaccctcaacacaacaacagtaacaaacattcttcatccaacatgtcatatggactaggaaagaaaaacaaattcattcaacaatgaagtcacactaaacattataagacaacaaaagccaacctaaaaacccataatgcaaagctgaaaaccacgccttgaattgagcaaacctaaaccccaaacatctaactgtcaacttcagaatcccgagaccaaacttccaaaatatcaaagcggaaacccaaccctacaacccagaaacgtatttccaggtacattgtagacagagcataaccgtaaacccgaaaaacaaacataacaccaaagcccac

SEQ ID NO: 223353 - DNA, 404 bp, Glycine max
  unsure (1)..(404): unsure at all n locations
agcttaaccgagactcgcgctcccggntaatggccatgattttccttntatcagnttctgggccaccccctgatattggagggggaccaactgtgcaagcacaaccagagagggaggctatcatgcagctactatgcataccggggcaagatttcacccgtgccactgcaaagagacgagtgtggatcatgcgcaccaacatgaccactcttacacagatataaatgacgttgttacttaacaacattctgcccagcgaccgtaatgccgatctccccctgcgaaagtatcagttggtctgtgccgtcccgacataggtaggtatgcattatttccaactaatttctaatgccatctactatttgcagggatcgcacccacaagacacccagtggacccggaaa

SEQ ID NO: 223354 - DNA, 379 bp, Glycine max
  unsure (1)..(379): unsure at all n locations
ctcaagcttcgtccgcagatccctcatgtaagactaggcctaaactaaactagatttgtgttcnaanaagnaaaaccaaaacttaacctgcagatccctcatgtaagactaagttttgatcctgcttcaatcaagttctaacgcaacggtacattttctaatgctaaagtcacctaactatgcgcacaaatgggtgatcagactaaaagcatacaaacattaagcattgaacacagaaaacataatcaattagatattatgtatttacatcagctgttcattataaatccccaactagggtgttcagccaaccattacagaagaaaccctaataattataagcttaccaaacctaggtatctcttcaaaagctgtcttt

SEQ ID NO: 223355 - DNA, 461 bp, Glycine max
agctttgatcttcaagtacatgctgttgttcttcctgttcctctcgatctcgtagtccccattcagaacagcttccactctactatctcgctctcgcacgctttctttcaccatcccacgtgtgagttctccaggaacttgttttgctcatgttttcctattttcatgaacaatgttagatttacattgttttttatttattttagtttttatctgaagatttgatttgattctataatcggcatttgttagtgattgattatttcttaaattttttggtgaactcaagtaaagattccattgttgtcaatgctgttcttccaaccctaatgactgcatattgctataatagcccttccttcgtccccgaatgaccctgataggccagggactataccaaaggagatggacctgcaggatacaagaagcagcagttaccccaagcacccgaaagacgtgtg

SEQ ID NO: 223356 - DNA, 385 bp, Glycine max
  unsure (1)..(385): unsure at all n locations
actcctcactgcaacttcttggtactgttctctncattttcctcacgtcatccttataaccccttctattatcccactctaacacttccaccattaccaccttcttccattcccttagcactagaagctgatcaaccaactcgttttcatgaaataaaaaatggttctgattctgattctgattctaacccggttgaagcacatgcagtgaacaagaagaaggatcaaatggtaatagctgaagaaccaaaaactggttgtggttcgataggatttgtaaagaagcgagctttcaaggcttacattaatggccggtgtcttgagagttggagaacaaagagttacccgccgagaacgaaggtggaagaaaatggtcaacgtaaaa

SEQ ID NO: 223357 - DNA, 441 bp, Glycine max
  unsure (1)..(441): unsure at all n locations
agctnntaaaaaattaaattcaaattctaatagccgttataaacagttttaacctctggtaatcgattacataccttgtgtaatcgattataggcttttaaattcaatataaaaatttgtaaattgtttcagaaatcaatttagctactagtaatcgattacatcctctagtaatcgattaccagagaggaaatatcataattttgaaaaataattgttcttaaaaacttttttaaaatatttcctttagccaaatctatgcagtatcaattaaggaattctttctaagatcctatcaactaagtacatcgttcttcttgcatttttgaattcttgacttgaatcacacttaactttgacatcatcaaaacttcatatcatatatgcttctacaatctcccctttntaatgatgacaataatatgaaatcaagaataacga

SEQ ID NO: 223358 - DNA, 468 bp, Glycine max
  unsure (1)..(468): unsure at all n locations
ntaatgtccccctggtctttacaccatcgnntatagtgtatctcaagttcctcaacttatttttaagggcaattccccccccccccccaaccaccctgcagatctgtattccaagcctctttgatcatagagtggtaccctttatgattaagctaccagtccacaacccgaaaaggcttagggccccagtccaccatccttgtcttcaaaatgattggacaatgatcagaataatctctttgaaggacatgttgggaagtatcaggccacaagtataaccactgatcagacaccaagaatctgtcaagcctactcttggcactatcattgggcctaaaccaagtaaaattgctgccaaagcatctaatatcatggagctccatctcagatattcaatcattgaaatctgacgtatctgaggtgacaacactcctctgagatagctaattctctcatcctggcttctga

SEQ ID NO: 223359 - DNA, 464 bp, Glycine max
  unsure (1)..(464): unsure at all n locations
agcttttcgtcttatggaaggtatgtnagtttctatatgannaanccagctagcagagaaacagcttcagccacatttgagacgccaattntgttccatttgaatatctgcatgaaagtttgtggattgtgatgtctggttacatagcttgaagatggcttacttatttatgattgaaaaatgaccaaaaggactgactttgagcaagttgattgcaaccacttattattattattatttagagtaaactatactaatactcctaaaatttcgtcaattttttccccaattctccttcctttattatacctaattacctatactaagtcaatcattcaaaaaaacattacagacatctcctcgtatctaagaaatgcattacacggtgtactcttataagggactactatagatgtngaaaaagtatgacgtcangtgtaatctcaagaaacctcatgaggatg

SEQ ID NO: 223360 - DNA, 476 bp, Glycine max
  unsure (1)..(476): unsure at all n locations
tcatcaatgtctcaatctctatcagcacaacaaaatgtgtnngtgtgattatgaacaacacgtccgtgctctgttttcactagcagcaaaggctgcctcaactattatttntattgatgaggttgatagcatgcttgtgaagcggactaaatatggagagcatgacgcaatgataaagattaaacatgaattcatggcccactgcgatggaatattgacaaaacctggtgagcgaattctggttcttgctgcaaccaacaggccatttgaccttgatgaagcaattataagacggtttgagcgcaggtaagaccacacctttgtcttatggttggcatgatcttctgaggattacttgtgtctgttcagcagctatattttctttattagaacaatcacaatcattattttcatcatctgtggtgaattgctgggtgctcataagacagcaagatatgtgagacagagatttcatt

SEQ ID NO: 223361 - DNA, 418 bp, Glycine max
  unsure (1)..(418): unsure at all n locations
agcttgtggactataccttcactaacactttcgtgtttctgnctcggcccggatttaaggtgggctgcagccccggctcggcttccctaactgtagtggaggcggttgtcgaggctttatcctctatagttttctggagttttaacatgacctccgagatggaagccatttgatcttttaaggccgatagatcggccttcatctgttcctgaatgccctcttcattatccatttttctggatcgagtgttataggggtgccttggtgttttcttagttatgatgaaattcccaaagaaataaacaatggtgagtatgccaccaaaacatgaatatgcaaatgaatgatcggagcacttggatccaccccaaggttttttagataacatgatgagttcagaacttctcattntataaaa

SEQ ID NO: 223362 - DNA, 476 bp, Glycine max
  unsure (1)..(476): unsure at all n locations
cttatgtaaattgtatcaaacctcttccacattatggttattttgttttgctataagtatcctctgcnaagcataggtaataaatacttagtacttccactttgtgtgtttaataatcattttctctcaattttaagttaattaggcaagctctgaaaagtgttgtttttcaccttctcgctaagccaatctgttggcttagcgagcatccgttaagcgcaacactcatgagctaagcgcagagaccagagcttgaagatggagccggtttgagagcttgagatgagtttatgagtgattgtgagatcctagaggtgaaggagacatcctcaccacttgtattnttgcacatcttcatcttgttcttctctttgttgaaagaaggcttctggtatggaaagctaaatcctttattgggatcttcttgtaggacctgatgtaatatattctatttttaatgatgtttgtctgtctct

SEQ ID NO: 223363 - DNA, 401 bp, Glycine max
  unsure (1)..(401): unsure at all n locations
atccttaagtcacctgcggcatgcaagcttgaccaatcccgacccaactgggcttattcagtcagtgagaacctgtgatatacctaaacaggcgagctcctggcagtcaaccgataaaagaacaaagaccacaaagcagggaggcttgtgtggtgactggccaacaataagtcttgagtgagatttgggatatggcctctggtaatcgattaccaagggtaggtaatcgattccaagacttaaaagtgaagacaggaagctaagatggccactggtaatcgattaccaagggagtgtaatcgattaccaggcttgaaaatgagatcaggaagctaggagggcttctggtaatcgattaccaaggggtgtaattgattaccaggcttanaaatgggactgga

SEQ ID NO: 223364 - DNA, 377 bp, Glycine max
  unsure (1)..(377): unsure at all n locations
cccatcacatggtggactaggtgtttgtctgtctgatggacacaacaagtttttccacatncacaatgcgcgcataaacccaccatcccctgttacccacctccaactgagctcacgtactcccacgtagcccatatcctcggttctctaacaccgggtcccatcaatctccaagcttccccaacatcaaagtaatacaacattcaaacagcacaaactatcacagccaagaaaacagagcaaaggcagaaaactctgccaaaacaccaaccaaaatcacaacttttctcacttaaagaccccagtaacaattccttcgttccaattcgttaaccggtggatcgactccanatttttacttaaagtctctagtacat

SEQ ID NO: 223365 - DNA, 399 bp, Glycine max
  unsure (1)..(399): unsure at all n locations
cattcctacggcagggcatccaacgctgtactgctacattccaaatataaaattaaatgtgacttactagtcacacaatattagattggaaattttgggacatgcttcccaagcaagaatttccttatcttagaatgaatagatgcgtcattttctttctctcccttttcttttcattctgaatcttcatcttctagtactaacggatgagatttgtctctagggaattttctcccaccaagaacattcaaagtatatcttgctttagggattgatttttgtaataatcgtttgtaattataatgtgtttcgatcttagaantgttcaatccttgttagttcttattacttcaaatacaatattcacacgggtatttntttcttctaaagatcacatga

SEQ ID NO: 223366 - DNA, 251 bp, Glycine max
cggtcattcttgatgcaccactaaacaatgcgccctattccttaaccaaaaagcgacgtgttaacattttctcacaagtctaagttgctgagagaaacgcaaactgatgacgcgatccacgcgcttaaacccgatgaacgtggcgagcataactcccatgaaattcaagtattttgtgacgaccaggcgataatttcatgacgtgacatcactctccctatacacctcaacctaatggtgttgctgagaaa

SEQ ID NO: 223367 - DNA, 387 bp, Glycine max
actcaagcttgcaccactcgagatcttgagcagattattcgagcaattatagtgatgttgctttagaactctatctctcactgtggtccttcaaacagaaagtgaatcgcatgtgacaatgatatttgaggtggagtattatattatgtggttgcggcatctccaaatgcaccacagggggatgcttaatctacacttaagctccatggggagggtttcatgaacgtgaaaagttaagtccatagctggttctgcatggttcatatattaaactaacctggctctagattcctgctctttcccacacagttctaactagttggcaaccaaaagaagactcgtgcaatggactcctttctttatattgcagcctggttcttgtaggga

SEQ ID NO: 223368 - DNA, 233 bp, Glycine max
accacgaaggaagcattgaaagggccccaaacaagcggcagcacgcggcgaaaaggggggcccaagaaccccgcaggaacaggagcacgaaggaccgagggcaacccacatcggccgaagacacacggggcaagaggggaagacaggggcccaaagaagggcaccccggaaacaagccccgggccagaaggaaaacgggagggcgaagccacgcgggaaccccccagccgaag

SEQ ID NO: 223369 - DNA, 464 bp, Glycine max
  unsure (1)..(464): unsure at all n locations
agcttatatntaagcttaatatctgaaagttgttagtctaaatctagtaagtatagtactaagatagtatcaaagcacatacagtcaaaagcttctttagatttgctgccagtaccatttcctaatctttcagagaagatatcagcatattcaactattcatatctattttaactttcttttgatgtcttggatgttgaagcttccacctatgtccaacaagtctgaagttacgggatgaatttgtaaatcatccatcatcacgtaagttttttcaccatatttcttctttggaaagaaattgcccctccacatttggatagaggaatttaattgagaaaagtatttatcagaagaattgaattctgtatggttgggatttttttgtgaagaatttaanattttggaatttaaataactaanaatctgaaatttcaattttcttctaaaatgtgagaaattgaa

SEQ ID NO: 223370 - DNA, 422 bp, Glycine max
  unsure (1)..(422): unsure at all n locations
actccctacaagtaagtgccacttcccttttatctttggctttccattgtagnattttagtgctttggttgcttgctttttgcaaattgcgtgagatgaattatgtgtgaattcatgcttgattggttgggttggggggctataggggatggccgtaggccctatttgaattctgagatgaatgggcatgtcacattgcccctattcctcatttttttcattttaaacatgtgcccaccaagtgtttggtgaaatgcctcaatggctnttgcgtgtggtattggtgaaatttgcttgtggaacgaatttgtgcatatatgagctgccatttgagtgtgtggacagtttatagaagctagaataaagtgccaaaaacatgacttangcctaggaatctaagttttttggtcttggacgtaaaa

SEQ ID NO: 223371 - DNA, 469 bp, Glycine max
  unsure (1)..(469): unsure at all n locations
agctngagcaggttagaattggaaggcaactattatctggagaaataccctcttcccttggtaatcttaaaaagcttcaattcttgtaagtatggcattctgtttgctaggttctacagatatataatgagtcttaggccttagcatgtatttttttttgtgcaatgtttaaaagtgtctgtttcttgtcctgcaaccagaacattaagtcaaaacaatctcagtgggactattcctgaatcacttgccagtcttccaatcttaatcaatgtgtatgtaaaataatggtttctataactttgctgtatttttttaagtatatttcattaatttagtatctgattgattattcaaacttctgttttgcagtctgctagattcaaataatctgagtggccaaatcccagagcagttattcaaggttcctaaatacaagtatggatggtaaaactggtaaattagtatatga

SEQ ID NO: 223372 - DNA, 531 bp, Glycine max
  unsure (1)..(531): unsure at all n locations
actcagcttgcacgaattttatcttgagtttctgtaaattagcaataatattttttttctttttaatttacaagtaaccaataaaatgaatgcatgtgggattcgtgcggattcgttccatgactcgttctaagaaataacattgctatttaattttatgatcaaatattaattntaaaagtattaaaaataatttatattattgcagaaaaaattataggatatctctctccattcttctaccctcacccctccaatcatttttacctattttatttgggggtcaaaatcattgtaaaatctaggaatgttcaaattcaaaccgatccaaaataaaaatcgaaaatcgttaaaaaaaatgaanaatcaaaccaaattgattctntttttaattggttggatgaatttttttctcaaacccgttggtgttgtgttgaactgaaccaaccacacacttatattaactttatattatttagtggtatgcgtttatatgatatcactgagttcatatatntatatgtatgaaat

SEQ ID NO: 223373 - DNA, 429 bp, Glycine max
agcttcttgcgtagccgctcttggtgctcaaaaattcttaaacaaatccctcttattactagctattttgaattctttagttcctgaatgtacaaccttcaaattgttggtcgttcccctatttcttttctgcaaaaaagaaaatcaaacgctgtgaaacacatggatgaagtcctaagaaaatcaatatcaaagaaaacatggatgaaatcacaattaaaaagcacaactacctatcttttagagtcctttggttaatttgtcttgtctccttatgtggaggggttttgtttaataatgttatacttttgccttccaaaaaaaacttatgactaatcctcttttcattaatccaattttgtatgttattgtataaaagatcatgggttctccacctgcctccagtactcctcctcctcctcctcctcc

SEQ ID NO: 223374 - DNA, 501 bp, Glycine max
  unsure (1)..(501): unsure at all n locations
actaagctatcgatgattataagaattgacacttaaattctgagacacgtctatcaatatctcatttttatcactattaattattctaatatttntatttcttttctccactcttcgcgtgacttttttattcatgaaaaagttacctgtgtgacccatgatgagtatattttaattgcatgtagtagcttaattataaaggtaattgtcctagaagaatttagtttttatattcttaataaattttagtttcacacccattaaaaaggtagtgttgttgcttccataagatttttcttaaaaaaatgaatgtacaaatttattcaagataaaagagagtaaaattatatcatgtcaccccgagtttcttgaaggtttgaatgtaacttggtcaatggtaattgtaagcactttttcttttcttggttgcatcatcatcatgacatttgtgttgcagaatggtagtgatcatcatcaaaggtacgaatgtctttcatactc

SEQ ID NO: 223375 - DNA, 458 bp, Glycine max
attgaacaacggaagctctcatattattagtggtctataaatttcacacagatgttcgattcggggaaataatatatcgagacgcacgaaattgaacaacggaagctctcgagaaatttgaatggtcataacatttcactcggatgttcgatccggggacataatttatcgagacgctcgaaattgaacaaccgaagctctcgacaaattagaatggtcgtaacttttcacgcgaatgttcgattcggggacataactcatctagacgctcgaaattgaacaacggaagctctcgagaaatttgaatggtcataagttttcacacggatgtgcgattcgggaacataatatatcaagacaattcgaaatgaacaacggaagctctcgagaaaatcaatggcataacgttcacacagatgtccgatcggggacataactatctaacactcgaattgaca

SEQ ID NO: 223376 - DNA, 451 bp, Glycine max
  unsure (1)..(451): unsure at all n locations
actcagctctattaagctgaccatttatcaataacacaaggagagttctatttctaaaattagagagcatctctgttatcttagtgagagtgattctcctanattcttgagggattcaagaacaccctggctgtatcaaacgactttcacaacctttgtgtgttgacctcgctggagagagagattctttccttccaatcatctccacccttgttctttcaaaccacaattccagaaaatccacctctgcccaaaattatctcgtgaccataactcccattttacacactcacattaagtgattcttgagcctaaattgaatttcaaaacgagacctttcacctcgttttggaatcacctcatatggagccctgtagcttccgtcattgccattctatattgctgtccagccaccactgaccctacgtttaccatcccatcatccttttat

SEQ ID NO: 223377 - DNA, 504 bp, Glycine max
  unsure (1)..(504): unsure at all n locations
ggatccttaagtcacctgcggcatgcaagcttagcatctggaaatatttcgttttacatcatcagcattatttcaaaaggcattagaattaaatttcgaagctaacacagagtgcaaacctggatacacaatgaccaggggttttctggcctcattctgtagagtacgtggaccatttaaccctatcaatagatgaagacttctccaaatacttcttcaccaagcagagatagagacacctcttgcatgatatctgtaattcaaataatccttctcatgaaagcaagtctcacattcataaattaacttaaacacttataccaggnctgggtcttcctttatttctttttcttctcccaattaacacacactgactttgtctctctctcgaacacaatgtcaaactccaccatcggcaccaccgcggccttaccaccaaagcccaccagggtcctcccatactgaaccgagaatctccgcgaggtctacaccctaagctaaaag

SEQ ID NO: 223378 - DNA, 354 bp, Glycine max
gatggtgtcgagaagaaatcacatgtttgtcatcatcaaaaaggtttagaatgtgaatgtatgtatacatgattttgatgatgtcaaagaagaatctaacaaggctgcttcaaatgataagcatttgcttcaagaataattcaagattgcttcaacaaacaaagccttgtttcaagattcactaaagaccaagccttgccttaaaacaatgtgctttcaagacatgcaaggctctggtaatcgattaccaggaagtgtaatcgattaccagaagacagggttgagaaatagctgttgaaaaaagttttgaatttgaattttcaacatataatcgattaccatatgtctgtaatc

SEQ ID NO: 223379 - DNA, 460 bp, Glycine max
  unsure (1)..(460): unsure at all n locations
atccttaagcacctgggctgcagctgcttgaggtttacccgttgaagtttgtagaacgatgaggaacggatgaagaacgtcgaagaacggtcgaaaccttcgcgaaattccttacggaaacgtttcggaagcgcctcggcttaaattttcttcacggaaacaatttttccaagcaaattcgaaagagagagaagtgcctaaggggctgaaccctttttcacttcacttctccccctatttatagaaaattgggggagaagcttgccacccagctcgcccaggggagcagggttgcttcctccagaagcagcagccttctggaggaatcttctggagggcccaagtgggcctggttgctatttgcacccccatntttactaagtacacccccttgccttttcttgtgantctttnnttcataaagtacggaaacttacgaatttcgtaacgaatacttttt

SEQ ID NO: 223380 - DNA, 327 bp, Glycine max
  unsure (1)..(327): unsure at all n locations
gaaaggcctggtatgtcccgtccttgcaaacaagtttgctggaactgctccatgaagagagtgtggcgcacaaataatagtataagagaggaagtcggaaccctagacaaggcgtctacgactacattttgggcaccggcgttatatttgatagtgtagtccgaaccgagaagcttaaccatgcagtgctgctgctcaggagtttgaataacctgagacatctacttcttttagctacggnggtctgtcataatgacaaacgagtgcccgagcagaaagtggcgcatttacctaccgcagtggtgatagcttgtagttcgcggacat

SEQ ID NO: 223381 - DNA, 445 bp, Glycine max
agcttgagtataattcatagttttgttattattctacatcacataatgggattattgatgtttctgtcacgatcaagtgatagttgatatctccatatgtgcgtacactgtgattatgttttcgtttctagaattcatttggagtatctactgttgattctagatgagtgatccttcttgatttaaaattattgtctcctaatcaatcgagtgttcatcttattattggctgctcatcttccaatcatgtctagttaaactgcttgataatctttcttgttgttacttctaatatgaataaagagagacttcgcctttgacaatcatgttaagatgttttgagaggaaatacttgagtagacatgatcattgttacctatagacgaaagtcaactaagtaagacgtgtacctgtgttcctagaggatatgcttagttaccaccta

SEQ ID NO: 223382 - DNA, 544 bp, Glycine max
  unsure (1)..(544): unsure at all n locations
tcggagattatgtgtgggtggtgatgctctatggatgttctctaatgactatatgaactagctttacactttctcatccatacatctcacctcaaccagagacgcctcccatatacctcaccaacatactacaccagacagacacctaggtagaggattaacttattatttttaagtatgtatcaagaatgaaagatatcatattaagaataaaagaaatgaacgatagttttcgaattcattcaccaaagtattacaaaggtgatttatttatataaatatagagaataaccaacttctagtaactcttactaactaacttcaataatttctaataacataactaagtaactattcacctaacttctaataactcatagtaattaacttcaaccgctgcttaatcgcgatagnatgtttatatctttggctcttctatcatataactgtattggagttatagttttctcttctggacatgtnttttctaggcatcagttaggatcttcagacccatatatatttgaggtcagtgaccgctgac

SEQ ID NO: 223383 - DNA, 457 bp, Glycine max
agcttctgattgagccaagatcagtgctgttattatttaaagaaagatgagaagaaaagtgcgtataaacaataactcacaacttctaatctcttgattgtgaagatcttttgtgataagtgagttgtgttactttcatgagtacaagaagccaccttatcagtcaagaaaggttttgcagaaaggattgatcaagttgtgtctatctttaatcttggtttttatgtatggttatatacatccttttgtttttgcatgaatctctgaaggcatgctagaataggtgtttctagtttgggctaagggtaggtttctcttaggttcttattcatagaggactctagtgttgggtgcctaagtctttttttctaggggggaactatagatggcttggtgatgcttgtaagaattctatatgcatagtgaaaatctaattcggatttttggatagaaaact

SEQ ID NO: 223384 - DNA, 502 bp, Glycine max
  unsure (1)..(502): unsure at all n locations
taaatccatgtctaaccaataaaagaaaaaaggaccatttcttgacgttggacctttaaaaatgggttttttaggtgatgacaaaagcttggtttatgaattgattttagccttaatttcacttgggttattagtcaattcgattatgaaagaaaaattccaaagagaaacgtccgattgattttttttggttattttagtaaaagatattctttttattattatattattatttttcctcttttttggttttaaacgtggttacggcatgaccgaacggtcggatttcattttaacagaaattaaaagatgttacaattcaaatgattggtgaaaatttattttattcttctattaggcgagaaaatgacttatataaatgactaaagcacgtcaaataggggtacggaaaggtaatgaaatganaataaaagcatgcgaaacaacaggggaccactaagggtacatagaatgaattgaaaagttcgatttttggaactta

SEQ ID NO: 223385 - DNA, 396 bp, Glycine max
gttcaaatattccgcgtgatttctaattggaaatggttggttgtcttttctggtatgtgtggctataccaacattcttgctgaactgtttgtcatctttcatgatttcaatgtaccttggaactctacttattggcatcataaaattgtagcatacattaatgtttcaagaaagatagagtctaatttcaacagtttttgaataaatctacaccaattaattctgaaacatgaagaatactaaactaaaactgagagaataattatgggttgaagtttgaacaaatgaaatgggcggctgagatcattcacatcaatgcatgtgataaaagtaaaatacaacacacattaattggaagacttataacttgtcgcttacatttcatagtctaacaaa

SEQ ID NO: 223386 - DNA, 278 bp, Glycine max
ggtggagacactcgggatattggggactctctctattcaacttttttgttcgtcctatcagtagatttcgttggtagttccgaccccaattttcttggcttcttcagttaacagtgagtaagatatggtctaattattaatgtcttttcttttttgtcgaaaattcaattacataaattattgcagaacctcttgcaaaccttaaaaccactatatttgacttgcgaattatatgatgagctaacttttttttctttttctttgtcacagctacttaa

SEQ ID NO: 223387 - DNA, 427 bp, Glycine max
agcttgttaaagcagaagaaaagtaactgttttgtttctaaattaaagtaaaagtacacaaaacaagtagggaccactaagggtgcatagaatgaatcgaaagattcgagttcgggaacttaccggttgaagactgaagaacgacgaagaacgaacgaagaacagtgaagaacgatgaagaatttccacagaatcacttacgaaaacatctcggaagcgttacggaagcacctcggcttggattttcttcatgaaaacatattttttcacccaaaacaaccgaaatgcatagccaaggggtcatgaacattttgaaacagcccccctcccctatttatagggaaaaagggaggtgtcttcccccagaggcttcttgaggaagattctaacacacaccattactaagtcaccccctttcatacttacg

SEQ ID NO: 223388 - DNA, 445 bp, Glycine max
  unsure (1)..(445): unsure at all n locations
gatcccagagtcacctgcggcagcaagcttactggggctgatttgttntttatactagcaaggatggngttgagtttgaatttgttttacactagccaacaatttctaggccacaccagcttgctacaaagcacttatgaggcacacaaaaggctaagaatgttgttttctgaacctttatcaattgacagccatttgccatagcctttgttaatgacccagataaggctacggctggaaacactgagttaaggtggagagaactttcaaaatagaatggtgagcctctgaggcagaagttacatggaatgttacctgtcagagcattatcagactattaagctcagaaggaatttctccatgtagtttgtttccaaccaaattcaggtatgtcaagctagaaagatgactcacagctgtagggattgaccagacaacatgttat

SEQ ID NO: 223389 - DNA, 499 bp, Glycine max
  unsure (1)..(499): unsure at all n locations
gaggatagagacttctcaagctatttatcttctctctatgtgatgctcnccaccnggantgagtcaccctatggnggctcactcaagcttgaggatagagacttctcaagctatatatcttctctctcagagaggcttactcaagcttgaggatagaaacttcccaagctatttatcttctctctcagagaggctctctacttggattgactcactctacggtggctcactcaagcttgaggataaagacttcccaagctatttatcttctctctcagagaggctttttctcactctaagaagtggattcactcttatcttggatggataggaatgaaggctcctacccttatttatactactccatctncacaataaatggtggagatttcttgtatcataaggtgaagaataattctctagactgctccacacattctcaggagttctacactcttccatatcccttcataacgttccagaaagttcacacatctct

SEQ ID NO: 223390 - DNA, 461 bp, Glycine max
  unsure (1)..(461): unsure at all n locations
agcttcaatggagctacattagttactctcttgaatgtttgattttgaagatatatatggaaagcatcttcaatttgcttgtatatttggtggttttttactgagaaaaataatgaatttgcctactctaaatgtggaaaacatcttcaattttttatttcatgtagaaattgcgataatatgttttttcctcttttgttgcatttatacgtaaccaattaattaaatctgaatatacaatatgaaacttgaagctatatatttagtttagcaaatactgtgagaatctataattattatactcaattgattagtgaaagaatgagttgagaattttttggtgcccaacataagtaatctctatatgaatagtcggcaatttaggttttttttgttttattagtagtcaacaatttaatttgagccatagtaaaattgtaaaatacctctntcaatgtccg

SEQ ID NO: 223391 - DNA, 469 bp, Glycine max
  unsure (1)..(469): unsure at all n locations
ttagcatattaaatgctgataaccgcggcatgttattcaaaagttgaataaatagtgcttacaataggatgaccatcatgatgtacaataaacaaactatagcacatagctagtgagctaaaagcaactatagtggcgtggtgacccgattgcaccttatacgtttagaactaggttattttccttggtgagggtgtagttaattntcaactaatggagcaaagctactgctacttcttttgtctaagttgatgctacttcttttggggcttgtaccaaagctagccacacttaatgcactcacatttaatttctacttgaatatgtatttcttagcttaaaatagatcaaagaacaaaaatggagcanagcatgaggttgatgcacgctaataactccactatgtgtgaatatcaaagaactaacatagaatgaaatcatgaanaacataatngattatttaatgact

SEQ ID NO: 223392 - DNA, 291 bp, Glycine max
gagcgtctcgatatttacgggactcaatcagacattcgagataaaaggtattgttgtctgaatttgctcaaagcttacggattcaatttcgagcctctcgaataatacaggacctcatgagacacccgagtaaaaaagatattcgtcgtttaatttgcttagagcttcaacattcatcttcgagcgttccgatatttacaggactcaatctgatagcccagcaaaaaagtattgtcgtttaattcgctcatagcctcagcggtccaatttcagccgccccgatttatttcg

SEQ ID NO: 223393 - DNA, 202 bp, Glycine max
cgaaaataactctttattcggacgtttgattgatcccggaatatatcgagacgctcgaaattgaataccgaagctctgagcaaatccagacgacaataactcgttactcgcatgtctgactgagttccgtaatacatacgagacgcttcgaaactggaaaccgaagccttgaacaaattcaaacgacaataactttttactc

SEQ ID NO: 223394 - DNA, 135 bp, Glycine max
  unsure (1)..(135): unsure at all n locations
agctntacgattctgagatacagtaactagttttttcttttacaaaatctaatcttagatttaaaattaggtttaattacttatttagtttctatagttcccaaacttatgcaaagactagaaatggagaggaag

SEQ ID NO: 223395 - DNA, 351 bp, Glycine max
  unsure (1)..(351): unsure at all n locations
ntngatggagcaattatttntcctgttggactccaaacatggttcttatgatgaaagctcttgacataatctctcaatccagggagatacaactctttgagagctctggcccactcaacatgatttgggtctttgtttctgtactccacaagcacctaattattattacaataaaagttaggcaaaactattatcctttactcatgatataacatgcaatatgaggtacgaaagtgcaacgaaagtctatgagcctagtgcaagatcaacacacaccattccatatgttaatgttgatcaaattcaaatcaagcatttaaaatcaaattactgagcctaagcacataatca

SEQ ID NO: 223396 - DNA, 249 bp, Glycine max
gcagcaactcttggaccagacaacaaaaactcctgtttttataccgctaagagctagcgacaggtccctttcctcccttcgcaacatgagttcaatattgctaccccatacagctccgggaaatttgttccggccatactctttcatgcgaaccctacttgggctactagttcaaggagactcttgcgagaaattgcatttctcttcccgtaacccggtgcactccttccgaacgtgtgtagcagtcaa

SEQ ID NO: 223397 - DNA, 249 bp, Glycine max
ccaatatctgttttcaactggcattgatagctgttcaagttgacccctataaactaagtttcattcacgcatgtgtggcgtttatgatattatcaatctcgtgacaattgaagcctgtgtttgtataaatcccaaatttacttagctgtaaggaaaaactcctttcattcgtttcaagcttactgcagaaaaacgtactgcttgtataggtggagtatattctgtaatctccctcttgcactggtatga

SEQ ID NO: 223398 - DNA, 369 bp, Glycine max
ccattcttatgcttaataaaaagccttataaacccgatgggccgcccattatattctatatacctataatattcgttgggcgcaacttatattatttttctaaaaaactagctgaattcatatctataaataaataaaattttaattacaaggtgggaaacaggtgtttccttttcacttcaagctttttgatagagggaaataacattatggggttagcctattatagatgggatgttatatattgttcttttgggaaaaacaactagcgatattataaatttaatgtgaagaagcactttaaatatgctttttaataggctaccacggcaggctaagcttttaaaaaggcacgcccagccaaaaaaa

SEQ ID NO: 223399 - DNA, 467 bp, Glycine max
  unsure (1)..(467): unsure at all n locations
tgnattctaaatggccgcatgctcgcttagatggaaagaatcttttttttcaacctgtgctatccttctaaatctgcaataatctctctttaggcttcccaaaatagaacatgtgccttattaatttatatgaaaggtctatttttgcgtctttattccttgaaagatttcttatttatatattttctaactcgcctgctgcttgatcatatttgaggaaaatacgttcatttactaatagataatgaaccccaaaattatatataaaaaagtcgaggcttaaatgattttttttctcanaaaagatattttatttattcattatgttaaagccaaaactttcattctatatcagacaacactaacctatactaaggggtgccagaaaaaaatataaggagtctcatcccgagttgtaatacatataataatactagaatacatattcttattaccttatttctcat

SEQ ID NO: 223400 - DNA, 291 bp, Glycine max
actagggggacacatgggtaaggccaagaccctacaacgactccaggataatttcttctgggacagtatgcgccgtgacgttcaccgtctggtctcagagtgtcgcatttgtcaacaaatgaagtacaagagtaagaaacccatagacctccctcaaccaatacccaccccttcatgattgtgggaggactcatccctggatgtcatcactgggctgccgccgtcccatggattcacgaccatcttgattgtcgtggacaggtactcgaaaggcacccaatcttgaagctt

SEQ ID NO: 223401 - DNA, 453 bp, Glycine max
  unsure (1)..(453): unsure at all n locations
ggctgcacaaatntgacagcttctgctgcacaatanggcttatttttaaatccaacttgcccacattcaattctactcaaatcggattcaacaagtcctaaatcatgtataaatcatatttaaaccaaaagcaaacttcataccaaggcaaatcaaaatataggtatccaaaacccaccaatttagtgaattctcaaggtttgaaaagtgaatatgagaattgggtaactttggggtaaactctcatctcaatcaagtctataacattgagttaaacttgctcaaactggttttaaggtgaaaactccaccgattcagaatttgacctctcaacacccacattaccctagaaatggctcttttctttacatttgcactcatttctctgcccaacttctacaagcctattgacatctaacataataactactttaactcaattcactaccccaa

SEQ ID NO: 223402 - DNA, 301 bp, Glycine max
agcttaatgacgccacgagagaagatcatttttctttgtcgaacaaggaccaaatgctggagtggctaaatagacaagccttttattgcttcttggatggctactccggggataattagattacacgagatcctaaagacccagtaaaaattggctttacatgccctttccgagctatacttacaaatgatccctctgggtatgtaagcctttgcacctttaaagatgatgctactattttgtgatcagtaaaaaatgcatcacgcgtcgtcacgatcctctgacttggctccccttgact

SEQ ID NO: 223403 - DNA, 320 bp, Glycine max
agcttatcctcacatctgtcccgacctattctatatgagcatataattcatattcgtcaacattatataatctaccatctcatatagattaaaagacacgttttttttatataattaaaagacatatctgtgcaattttcatgtagtattattcgaattagatacaaatttttaaaaaataggtgagagcgtatttctccgaaattggaagactctcctttctctctctcttttttttattgtatatataattactggcactatctcttccttcctgcatgatctattctttaattcttacaaacacctaaaagaaaata

SEQ ID NO: 223404 - DNA, 392 bp, Glycine max
  unsure (1)..(392): unsure at all n locations
agcttgtcagttctaaaacatgctatattatttctaggagggtatgataacaaaaacttttattatgctgggccttggagaatctgatgatgaagtgaaagaagcaatggctgatttaatggccatcgacgttgatattctgacacttggtcaatattngcaggtttgataatgtcacaaatactttaatggtttccagacctgcttctcgtagattagaaaccaaatctcaaaatcccatccatcatgcttacagatggtgctaatctttcatttgatctcataatttaaagatgtgataacactgtttattgaatctatacgaggttacagtatggtttgctcagctgataattatcataatagaccttgcangtctttattattgatcg

SEQ ID NO: 223405 - DNA, 264 bp, Glycine max
ctcagctttaactggcttaggcctgatgatccctgacctgattattatgatgacttggcagaatctgaatccgaggacgatgaggaggtatgcgacggtacttgaattttatactgactagacacgactctactaaattgaatgctatacctttgtcttctcattctctcacattagggggtgttgctttctaaaactgatggatggtatattgacttaaatatgatgtatgctaattattatgtcctcgaagcgtttcttatt

SEQ ID NO: 223406 - DNA, 443 bp, Glycine max
  unsure (1)..(443): unsure at all n locations
agcttaagaggtatggcggtgctaacaagtgttcttttacaaaggagaagatgtggaggttgtctaagaagggaagtttctttaatgtttgtctttattgcaaaatgtctttccttcttagctaacctcttggaggagacacttacatccttacactcctccttaaccattaaatggtgntcttcttttcttttctattcttttcctcatcccatttgagttttatttgtacttgatccttagctacatgtgaaggtgtttgaggatgcaacacaaatttagtgccatgatgggtgagggtaatctcattagttaggccattgtaaatgatcttcctttcaaattgccatggccttcctaagagaatatgccctgcctccatggtatgtgaataagagaagaagaaatcaaatgaataaaccactaatataggtaatgctata

SEQ ID NO: 223407 - DNA, 405 bp, Glycine max
  unsure (1)..(405): unsure at all n locations
tgtgtggtatatgatcatcatataccacacanattaaaatacctgtgatatgtaacttangaactatataggtcatgccatgaccataaatccgttattcttcattattcttcaattaaagtgcaaaattaatctgtgtgtttaaaaggggtttatcaagtagaactatatacatatatattaaagtgggttggagggaatgattgtctcggtgatngctaaattgtcatcaaaacacanaccaagaagggggacgtgaattggtttcaaaccaattntaaacctcacataaaaaaattcgtaaatagcttcctttaatccaatngaaacaagagattcatatgtgttgcaaataccctttgatttcttaatcataattacacaatgatacaaatcaaaatatca

SEQ ID NO: 223408 - DNA, 445 bp, Glycine max
  unsure (1)..(445): unsure at all n locations
ctgcagcttatccaagcactagaatcaggtttctttacccctcaatttagtggatnttcaaggtttgagaagtgaaaatgagaatggggtaaatttagagtaaactctcacctcacacaagtctataacatcgatctaaacttgctcaaactgattttatgcctcaaattccgccgaatcaaaatttgactcctcaacacccaattttaccctaggaatggctcttgccttcactttggtcatttgtttttctctcttgcacagtccaagctttctcataagtcctaaatgacatttcaaactaggatttactcactttaacctccatttaccactgaatcccgttttagccttccaactctcanagcctcactctttttctactcataacactacattctcactttctaaccctaggttaactctacccttcatccctagcaat

SEQ ID NO: 223409 - DNA, 451 bp, Glycine max
tacgtctctgcaagaaaaacgagatagttataatgaagaagtattgtttctcatgagtcatggacatatacctgatacatcaaatcctaagaacaaaattttgggaatcttttcaagcttctattttgaaactatagtcattctcattgtcatgtgaaaacacatacacacagcataacaatattatggaaattatgttccagaaattactcctaccaacaggatagtaccagcttattgatcatacaaaaacctatgttccaaatcacccaaaataaaggatggactatctttttttctctaatgaaagttgttgagaatcacgaaattaatgtataatgatatgataggatatgatatctgatttagaggacactgaatattcctctattatgtataaccaatactacctgtctatataaacaagcatcttgtgtgtattctaacacac

SEQ ID NO: 223410 - DNA, 229 bp, Glycine max
ttttaacatttctgaggattgggctatgaactgctgaaaaaggccctagggttctcatgaacctcagggtagatttctgagcccatgggccaagtttgggtccaattctctttgtacatattagactaggatgtcattatatttgatccttgtatttagggctccatattgtaggtagagtaccctagaaatataggatttttcagctcttgattttagggcacctgac

SEQ ID NO: 223411 - DNA, 453 bp, Glycine max
  unsure (1)..(453): unsure at all n locations
aatagcttaagtgtacttctcttcttcctcatatctcttctctccttcctctcctttgagcttcgtccacctcccttccttctctcttatcttcttcttttcatggatttccctcataatagagcttgagttcctcaagattagttgacttttgtttcctttgttgagcttgtaatactataaaatgagtttttgtaaccgtattgtatcacacaaatgatcctttatttgtagtgaaattcattacaatatatggaaacccaatattcccaaataatgattataatccctaataatcagctgaagatatttcctatttacaaatcatgtatttaatacactattagaaaatatgctttctacgtcgattatttatgactttctacatcggnttttaatcgatgttaaaagtattatcgctaacatcgattttataaaaaccgatggtaacgt

SEQ ID NO: 223412 - DNA, 307 bp, Glycine max
tttttcacttttatcggataaaatgaacctttcaaaatctaaaaataatcctaatcgtaactcttttgccttcaaagaactatatatggctgagttccctcttcataatcagaatacgttaaagcaagagccacactcttgtcgaccccaataagaataaaaaaatccttagagagggaaaataaataaaacttgaagtcatgattttgcatatttgattaaaggttttccgtccttggaggggatgcatggggtgctaatatcttccccacacgtaaacaactcccaaaccttttatcatttaaat

SEQ ID NO: 223413 - DNA, 427 bp, Glycine max
  unsure (1)..(427): unsure at all n locations
cggcataagtactactctaatacgccttgagcgttatatgttattataagtaaaacactggatcatgagtccaaatctaaagaaccaacgctccaataaggcactttagtgagaacctgtcgattctcattaatttcatgcctctttgaaagtatatatttattgtgaacgttgggtatttttgaactgaattatgaaagcaatgttttacatgtagctcaactgaagaatttcatgcattgtaccttactcaaataagtagcgccttgattccacgatttatggaggctagtggaatcagatgcatatcgtttaagactttctgcctaatatcttattgactcaaatcgcgcattntgataatctttaattgtttataagctttaggggacaaacattttgctaatttctattttttggctgaccc

SEQ ID NO: 223414 - DNA, 365 bp, Glycine max
agctttacttctaccctaaggaagctgctagtcagactaacacaaacacaatcacaacaattacacaagagaattcaattcccattgaaattggaaactctccattaaaatgtatctacatataccaaaacacacctatatcaagtcctatcgcatataaacacgtggtcgaccgttgccagaatcataacttcaagtctcgaatccgtaaccaacagtaataacttataacacgagatacaatacaaagttgcagaatttaaccaaatcatttccaatccacaagcctaactgcaaaactcattgaaataaaaaataccctcactttctctgctccaactaacaagggcaccaaatgaaacttt

SEQ ID NO: 223415 - DNA, 394 bp, Glycine max
  unsure (1)..(394): unsure at all n locations
cggatgaacagtctgagaaagaagtcatcaatgggtatcacaacttttctaacaaagacagaaaagtctgatgcctaaaattatagtgctcagcattntatttacagagatatatgatgattaagaaaaacgtgagaatgaatgcacagtgttgttgcgtcttgagaatatatacaccaggctaagcctttagcttagaggcgctgcaaggaaaactggccttaccacaataagattgcctttgttctcaagcagctgagccaatctgagtgctgcaactgtgttagctccagatgatatccctacccgagaaaattagaaagaaaaataattgcagattcagaatttgagtaccaactcatgaacagtctgttgccaggtagtaaggaatcat

SEQ ID NO: 223416 - DNA, 467 bp, Glycine max
  unsure (1)..(467): unsure at all n locations
acctgcggcatgcaagcttaatagtcttctaagaaagaatttacttgtagcaataaaaatattaatcagctatatatcacgggtgatattaaataaacctgctaattataaattatttcatgcattgggctgataatagcagtaanatatttatactcaaaaccgaggcgttcaagttcaatgaagttaactacttcagtacttcatatatgggacgcagtatatataaaatggatacttcttagccaaaaagattaattagtctaaatattctacacattttatatttaaaatggatactttttaattaacaatatatatatactcatttcttcttttaaatggatacgttttaattntatngtgatacacttacttaacttcttttacagattttgaaaccagctttcacaataatagctgatcatgagatgaaatgcctttcgttattgattcgtggcacacat

SEQ ID NO: 223417 - DNA, 391 bp, Glycine max
ttatttgattgcccgctatggtaggaataacaagtattcctttatcctgtgcgacaattaacaccaggagataatagggtggtattgaagcatacagcggacttgccaaaataaattattttagccactttcattataagaatctgtgtacattgttacactagactaattgcttatctattttccagtcttccaataatctaatctaatttctaacaacgttcattgacttaaaataacctatatatgaaacaagagtaagaacagactaatacctttaatagactatgcgaaacataatagattcacaacaaggatattgctcattatgtaggcgagtctattttaagcacaggacacacgttattacaatataaatgtacaccaccta

SEQ ID NO: 223418 - DNA, 400 bp, Glycine max
  unsure (1)..(400): unsure at all n locations
agcttcacaagtatctgagactgcactatttttgtataatccctattcagataggaatgagaattttttagagatggcatgtgatgtgtacgaatggccttctttttttgtaaacatagttcgagtgattgtatgcaaaggttgagtagtgctcctggtgtcaacctagttgagatcatcggccctattttgatgcctctcatgttgcaacccttaataaaaaaaaagaagtttgggtgattgtgaatagttttttttggggggggaaacagtatggtatatcaatttggggtcattggtggttcattntggaattaatgtcaatgcttttttctttggacacagtattgttgatgttagacaattattacactcatattatccaacgggtgaaaaattt

SEQ ID NO: 223419 - DNA, 366 bp, Glycine max
  unsure (1)..(366): unsure at all n locations
taaaaactcaagcttcacatccaanaaacagagagttgtggctctagaagcttgttgaatatagccatcacaatggggagagctccatgctgtgagaaaatggggttgaagagagggccatggactccagaagaagatcaaattctcatcaattacatcaacacttatggccatgctaattggcgtgcactgcccaaactaactggtacgtgtgaaggaatataattaattaacccaatattcttattgatcaaatgcctgaaacaagttatttgaagaacataacatacgaattcaattgtggtacgtttcatgaatatagttaaccaaagtttctatatatctctttctgatcaacagggctat

SEQ ID NO: 223420 - DNA, 395 bp, Glycine max
  unsure (1)..(395): unsure at all n locations
aattctctgggtctctcttcttaagctctttatgtgcattttggaaagttgtaaaactctcaaaacatattgtatatcctaagagaaaaaaaaaagtgtttaagttatacattcgtcttggtagataattaagaactagtcactgaataaaccaacaacaaatcttcttatttgttttatagccactagtgacttggtaaaataacaaatactagattctaaaacttggtgatagacatgggttgtaagaattagaagtgagagtgaacaatacttgtaaccnttaaagttggtaaaagctaatgatttatcaagaacgagacgtaatcttggtaagtgaaatgaaccaataaagtcttggtcattatatctctatatgctatatactaattgac

SEQ ID NO: 223421 - DNA, 384 bp, Glycine max
  unsure (1)..(384): unsure at all n locations
agctagccaagaaggtgcgcagacatttncttatctggtngtggaagncattaatagtgaagaggacaaagctgatggcataaagaatctgtacatgtatcggtctctggacgggccacgggatgatgcttcaaaagttggtaccatcctttgctgattctttgaaacttaactaggtnttagataaacctgccacaagaatgatgatttgtactgtcaatgtcagaaaaagttgagctaagaactcatctgtttttggccaacactgttgtgatggcaggccatagaggactatagattctattatgtcggcaagcatttcatattctgaattcttgtatatgggacagagcttggtgaaaatcaacgggagagggtgtgctg

SEQ ID NO: 223422 - DNA, 457 bp, Glycine max
acacaaaaactcaagcttgacatacctctgaagtacaggcaagacattttctatattctaatcagaaggagctcgaacaggtgcggttataattctagtagctcttatgcctgtgccatagtactctcttgtgctccaagagtagtcactaggaagctccttcactatggacacttcatcacggaggacatcaataaagtgatccacgtcaaaaatatctgcaaatgaactgcggaaacacaacaatttcatataaatggaaactttccggtttgaaaattaaacatattaaaggttgaaaaaatagcagactctgaatataccttgaatcttgccacacagggttcacttcaaaatgtgggagcaccagcgtcgcattcaaaatcttatcaacagcaacagcatcacataccttttaaagagaataggaaggagaatgatattatacaagtgatca

SEQ ID NO: 223423 - DNA, 428 bp, Glycine max
  unsure (1)..(428): unsure at all n locations
agcttcgggtntcaatgtcgagcgtctcgatatattacgaggcttaatcagacatccgagtaaaaagttattgtcgnttgaatttgcaacgaccatcaacattcaatttcgagcctctcgatatattacgcgactcaatcagacatcagagtaaaaagttattgttgtttgaattggctgagagcttcaacattcaatttcgagtgtttcgatatattctgggactcaatcagacatccgactaataagttatggtcgttgaatttgctcagagcttcaaaatgcaatttcgaggggctcgacatattacgggactgaatcagacatgcgagttaaaagttattgtgcgttcgatttgctcagagcttcagcattcaatgtcgagcgtctcgaatattatggggcatcaatcaacatccggtaaaagt

SEQ ID NO: 223424 - DNA, 397 bp, Glycine max
actcagctcttttgttcggattgcctaaaaaatatgcaatgtagtttttctatgtttcttcgggcgagctcaaccgaagttgtatttcggccgacaccggcattttgtcggccaggaaaacattatcccacctcggcaaaaaaaacatgattcactggtattgacagaaaaaaatgctggccttattcggccaggaaagatgaccgatcgaggtctaaaaaagaagcatgaccggattacgccgatcgaacattttctaatagatatcctccaagcattattcagggattgaatggaaaaaacaatagccgacatcggtagttaaatagccgcgactgatatttttcagccaacattgcgcaatttctttcacaaacgctggccgataatatttctt

SEQ ID NO: 223425 - DNA, 323 bp, Glycine max
tctttccttcttttattccgggactacagagtggtaccaggagatatgtcgcgagggtcaagagacctttgggacgtcaggtggggtgctattgaccaaaaccaatcttgaccaatcccgacccaacccgggcatagtcagtcagtgagacctgtgatgtacctaaacaggcgagctcctggcagtcaacagataaaaggatacaacaccacaaagcatggaggcttgtgtggtggctggccagctgtgaactttgttagatatatgggatatgggctctggtaatcgattaccaaggtgtcgcaacctacccttcggcggga

SEQ ID NO: 223426 - DNA, 228 bp, Glycine max
aacccatgttgtggctgttgtccctacatggccaaatttcccgctagctcaacaatatcaatactcacccaatattaggccttctcattacccaccaccctatcagccaagaacatccaatcatccatagaggccacccctaaaccaaccacaaaactcgctttgtgcacatgcgaggccaaacaacacccttaatacgaaccaaaacaccaaccaaggagatgagct

SEQ ID NO: 223427 - DNA, 474 bp, Glycine max
ttaagtcacctgcggcatgcaagcttcttaatttcagatgatgcagatgggtttgtttctacctcatgcactcctctaatgactatggcatcatttctggcactaaactgctgggagttggagaccatcttctcaattaaatttctggcttcaacaggagtcatgtctccaagggctccaccactggcagcatctatcatacttctctccatattaatgagtccttcataaaaatattggagaagaagctgttctgaaatctgatggtgggggcaactagcacatagtttcttaaatctctcccagtactcatacagactctctccactgagttgtctaatacctgagatatccttcctgatggctgtggtcctggaagcagggaaaaatttctctaagaatactctcttaaggtcatcccagctcgtgatggaccttggagcaaggtaatacagccagtcctttgcactccct

SEQ ID NO: 223428 - DNA, 432 bp, Glycine max
tggaagaagaagaaaaactgaacctctctccctcaatgttgaacttgtgataatggaggaatggacggcttcaatttttttcttcacaatgaacaagaagataaggcataggtttcaaggtgacaagacttattgacacttgaatgaccccttgcccagccatgttgaacatgccacttaatgccacaaaatgggtagttttgctttttgcaaaactataaaaaatggaaggtataggagttgccaaaaatgggtatttttgttttttttctatcaaaactagtaaatcttatcttaattgcctaggttattgtgttaatttttctaagaatacgtgtacctagagtgaacctcacacggagttcaattacactatcactcaatgcacaatggtaatttgctatagatgaaaatttttgttagacagttttc

SEQ ID NO: 223429 - DNA, 460 bp, Glycine max
  unsure (1)..(460): unsure at all n locations
aagtcacctgcggcatgcaagcttcaggttcccatcgataagacaagcgttattatatttcattaccaacatttttcttgctacaatttgtatataaaccttgacaagcatgagaaaatagtgcagacttttgtaacataaaggtcatggataaatgatcctcttgccctctcttcttgtaagtattcaatctcactattggactgactcatctaaagaatatagtcgattagaagataaatgttggagttatgagtttatcatgcaaattgtgaattacaatatccatttcacgtgcttatcaagcaaatgtttggtggatgttgactctntcatgttagctcgtcacatgatgaaagaaagatactaaaatatttacaatanaactttataagctntgtctgtctttctcacaacataagtattatacgggacatatttagtattgtatttctcaata

SEQ ID NO: 223430 - DNA, 460 bp, Glycine max
  unsure (1)..(460): unsure at all n locations
aaccagtaaagataagcgatatgtgcatctgtgttaatatgcctctatcncctatcctttcagttaaaagcgatcatttttatatttagatattgataaatttgatccttaattaaattctaaagagtatgcggattaatttaggctctctagactctagaggaataattaaattcacatctttgttaaagtacgagactaaattcatcgatacaaaagtataagaatcttaaccacttcttgactgaaaatttgaaattatatttttcccacatatatgtgcttatggtcacatacatcttcagttctactgtttacttgaagacttatatattgccattggctatatatatatatatatatcaaggatgcacgtagcatattttaataaattgcctgaagagtgcatgatacgagacgtgctaattaaaccatgttctttcttttgtccacactacga

SEQ ID NO: 223431 - DNA, 413 bp, Glycine max
  unsure (1)..(413): unsure at all n locations
agctttgagccaaaatcctgactcaccatatttcttgacccagggtgagaatgcccatccttacccttggaagcaaaaaaaaaaagaaaggaaaaatgagaaggaaaatttccaatcaaaggagaaaggaaaggaaattcccaatcaaagagtgggagaaagcaaaaagaaaagaaagaaaattcccaatcaaagaatgggagaaagaaaaaaagagagaagtaaaaaagaagaaagctcctggtcagagaaaccagaagaaatgtgccgagaggtccttggaccagacaatatctgaacaatacagaattgtcaccaaatgaataaaagagagggaaagganaccacgacctanaatggtctttcccctttaattgcaaccaaaatcttgtgcgccctgcactaaacaaaaa

SEQ ID NO: 223432 - DNA, 360 bp, Glycine max
  unsure (1)..(360): unsure at all n locations
ngntgtatgagtcgatgatgactcatgcccttaggcacaatcttttattgttaacaagccttgcataacccctaacaccatctgaaattaatcttgcaataaaaatcacaatcagcaaccattttctcagtgacaattatggaagaaaaaaaatcaacaaaatccaatatgcattacctagcaaaagaagtctccacctagcacatactatgtcgatgtactgggatgggctagaaatgtaccagaccacgagaatggtgcccctcctctggtggaacgacataaaggtggaaaaccttgtaaaaccaacggagataggcagatatgctaactctaagagccgctagtggcacaacaatg

SEQ ID NO: 223433 - DNA, 459 bp, Glycine max
  unsure (1)..(459): unsure at all n locations
ttaagtcacctgcggcatgcaagctttcaaaactgaaagtgctttaaatgagcatgagttatcacaatatataggccatcaaatgcaatgatcatcaaatgatgatgctttatttattaatgagttttgacttttgagactcttcttctacttgcacttgggttctttccagttttaattccaacattctaactccaaccatcaactatggatgccacctccactcttccaacaccggcatcaccgacattgctttgctctcctccaggatcaagtcagaaaaaggtatgtgatgtgttacttgttgcttctagtttgctgtatttgtccctcttaagcaactaaaaaatattcttgattttttactcttatataattaaagaattgttggttggttgctatgcgtcttcctttncaatcccatctcatccttaacgtaaaatcaacaagcttattcac

SEQ ID NO: 223434 - DNA, 462 bp, Glycine max
  unsure (1)..(462): unsure at all n locations
tgagacgaggaagtgtngaagggtgaaactttctgctattattgtttactccagagtggtacctggagatatgtcgcggcggtcaagagaccttggggacgtcaagtggggtgctattgcccaaaaccaagcttgaccaatcccgacccaacccgggcatagtcggtcagtgagaacctgtgatgtacctaaacaggcgagctcctggcagtcaacagataaaaggaaaacaagaccacaaagcaaggaggcttgtggtggctggccagctgtgaattttgtgtaatatgtggatggtggcctctggtaatcgattaccaacggtgggtaatcgattacaaggcttataattgacggcaggaggctaagatgggctctggtaatcgactaccaaggcgtgtaatcgattaccaagcttgaaaacgaagtcaggatacttaaggagcctctggtaatcgatac

SEQ ID NO: 223435 - DNA, 382 bp, Glycine max
  unsure (1)..(382): unsure at all n locations
tcagagtcacctgcggctgcagctgctattcaacatagcttagaactttcttattggcatctctctaaattggcttcaacacgaagtgagcttgataatctaaagcaagaaaatgaaaaactcgtttcaagttataaagccactaattgtgtttgtgtttctacatcttctaatatggatgattacaaatccttgcaagatgagnttgaatagtttaaaaaatatcactatgaagaacatatgaagttgcaaactgagctttcctatcttgaagatcttgttagaaaatgaataaaggaaagagtaatcttaatcacttacttagtgtgcaaaagcatacaattgataagactgttttgggtataacaagcaaactgacatt

SEQ ID NO: 223436 - DNA, 372 bp, Glycine max
tgtagactaacttggccctatccagattaagatcagaagtattgtatgtttgcgccaaactagaataaaatagaacactccacggttgggccacagtggtaagatcttttctcatgagcttccacgggagaccctcaatattaagtacaaatcccctcccaaggatacacaaccgggctgcaagctcttgaggatcaagcctcaatctacaaacctggagtagaaggcagctctctcttgcccacgaccgtgggtctcaaaaaggtgtgagggatcaacataaatttttcaggtgcctcaacccaacttgtttgggttttgtcctcaggacaataggttgcataaattcttgcaatggccataatgcttcct

SEQ ID NO: 223437 - DNA, 432 bp, Glycine max
agcttggtccttttagtttaatgcacaggtcttgtataacaacgtacaagtttcaattattcaatcttgcaagtaaccattattatctcctaaattgccgactttgtacatgacaaaataagtaaatatgttttaataaacggttttctatactcactcttctcttaattttatgtattattcagctcttttatttattatattttcttgtcgcatttcattcatttatattccttttttatatgcacatataaaatgatatcaatgttagagagcctaaaattaatttcaatgtctatatacatatatgatatatccagaccattaatattctaggtagttggtttgtaccgaggcacaactttaaaatggttcacgaggctgaggcgtagtcggtgcaatgtctaaagtataggcacacacttagatatt

SEQ ID NO: 223438 - DNA, 351 bp, Glycine max
tcacagcaaaaaccaatttcacactcttctagcctttgatttgttttatatctgcaaaacagtaccaattgcttgagctaagaatgcatatacaaatatagaaaatgtaattattatgttggtacgatcagtagtaattactgctcatcaatgagaatgatcaatggtttgatttgatgtatgaaatcagaagaagaaaattagtatgggtgaaactaaaaactagcgttgccattcttgctgataaaaaaaaaaaaaaaaaaagcattaccattcttttgcaaagctgaaaatccaatattttcacccttgctttaagcaagtaaatcaaaaaaggttatggtaggtagt

SEQ ID NO: 223439 - DNA, 330 bp, Glycine max
ctctctgaagcagaaacattcctcttccttctccatagctccttccgaatgctgatcgagcaataacatcgctagtcagattctgaaggaaaggccatgcatccatatcacatgatcccttctgaaacaacattccttcccattaggtaaccagatcattgtaactttggaggaacaatggtaacatgatctgtgttgaacaaggaaaaactcgtgctaaaatccctcactccactaaccgcaaaacattagactgagagcaggtgcttataaccaacctatgtgttacatatatatgccggaaaactatggctgatagaatacgggaca

SEQ ID NO: 223440 - DNA, 439 bp, Glycine max
  unsure (1)..(439): unsure at all n locations
tcctctttttttattattttattcaagctctgccacatgtccctatttgattggagcaaaaagggcccactttctctttntgactgtgacccatactcagtcacaaaagtgagaaaaatctgacctttgaaacgctaaaatcctgcctcggtttgcgtgccatttctctggttccagtttctcgcgtttctctgcgtccgtcggggccagttttcgaaagcaagcaatatgtatatcaaaacgctcagaataaaaccccgagcgtggttcagaggttggtttcgttaaattctaagtcgcacgcacaacgatgatnttaactaattaattaggaattaacccataacctcccaggtatggatttctctcctctattagcctaacccgcatatcttgcccccgctattctactttaccaagacatataggctatcactga

SEQ ID NO: 223441 - DNA, 403 bp, Glycine max
cggatcttaagcacctgggctgcagcttaccctagaggggatggacttttatgttttggagaggatcaataacaatgcctataggttggacctcccagaagagtatggcgtcagcaccacttttaacatttctgatttaactccttttgcaggtggagctgatattgaggaggaggaactaacagaattgaggtaaaatcctcttcaaggggaaggggatgatgcaatcctccctaggaagggaccaatcacaagaaccatgagcaagaggctccaagaagattgggctagagctgctgaagaacgccctatggttctcatgaaccttatggtagatatctgagcccatgggccagggttggttcaattatctttgtacatattagactaggatgtcattata

SEQ ID NO: 223442 - DNA, 487 bp, Glycine max
  unsure (1)..(487): unsure at all n locations
tcgacccggatccttaagtcacctgcggcatgcaagcttcgaagagaggagagagatcggtcacttgtgcatggcatgatcttaaaagaagagttagttgcttgcgcgaggtctaaaaggagtttggctcaacacttggaagccacggagcaaatcatgctagccatcatagggcaatacaaggaagaattgaaccagtccatggcccatgaacaaaagctagtggaggatnttgcacaagtgtatgctgaaaaagaagcaagaaggagggtgattgatgcgctgcatcaagaagcgactatgtggatggatagattctccttgaccttgaatggaagtcaagatcttccgcgtctattaaccaaagcacaagccatggccgaagtgtgtactgccctcgatgagattcatgggctaatcaattactgccaacacatgatagaattgatgggccatattaataggaatcgctacgttcttttgaaca

SEQ ID NO: 223443 - DNA, 323 bp, Glycine max
  unsure (1)..(323): unsure at all n locations
acctctcatcttgtatatgacgattttggacgagtcaatggggtgtatgctggggcaacatgatgagtctgggaaaagagagtgtgttgtctactacttgagtatgaagttcacgacctgtgaaatgaactactccctactggaaaagaacatgttgtgctttagtctgggcgtcccaccgtctaagacaatacatgttgagccataccacctggctgatatccaagatggacccgatcaagtacatttttgagaagcctgctctaactgggcggaacacccggcggcaggtntgctatcttgagtcgatatagtctatgtca

SEQ ID NO: 223444 - DNA, 311 bp, Glycine max
agcttgcttctacaaggagtgaaatatattctttttgcctgtcatgtgttgtgagcaaccattgtctatgtaccatgattggtgtttccttcctgctatcaaggagatctacaacaaaaattattttgctctcacgtacctaaatctttttgggttcttttttttcttgttagcttgtgggtgctgataagcactgggcaaaccctttgatgggttgccctcttcagggaggtccttgcacttatgagccttatgacccacttttccataaaaataggaaacaatgacttctttatcaattcacaaccttt

SEQ ID NO: 223445 - DNA, 384 bp, Glycine max
tctatacataagttaggcgcattttattatttacaaactcccataaatttaaaggtgttcttgtgctccagcaaagaaagaacatttcacttttcatcaagtgacaaagacagcggccaatcaaaagaaaaaggtggttgattcatcaaggacatcaaccatatgaactgaatatcatggaatgcttaaatcaatcacttctcacaagcacgccacttttcaaagataggagcaccaccattagagtcacaaccaaaataagctagtaagcatgacaaaaatcaaggaaggagcatcaaccacaacctcacagtcattgtgtcactcaaactcaagcgggtaggcgtattccctcataaacaaccaacactatacaatcaaagc

SEQ ID NO: 223446 - DNA, 407 bp, Glycine max
  unsure (1)..(407): unsure at all n locations
agcttggagaatggctagacatgatatatgtcanggcttggtttggntcaagggtaaaagggatgccccacattatttccatgacacaaatgcaaaaaatgatgatttggaaattttatgcaaaactggtcatgcatgcacctatgcggacgctcaagtgtcaaattnttatggtcatgtgatgctagggctcacgattcattttctctatattaaatcaacccaatgtttccaaaatatgttctttcatcaatttgtgcattcctccaagtccatttcgagcgtccggggaaattttcacagcattcacccttcaggtgtagacancgttttttcttcaaaaatccggtatgatcaatgaatttcttttcaaagaagagttggaaatcatctcttttcaaaagcat

SEQ ID NO: 223447 - DNA, 245 bp, Glycine max
tcaaatccgcatgaaagaaggcgatgaatggaaaatagcttttaaaacaaaatatggcttatatgagagagtggtgatgccattcgacttaactaatgcacctaatacctttgtgaggttaatgaaccatgttttgcatgttatcattcaaaagaatttgaaaaaccgggagaaatgcttgccacatgttagagttgcttataacacgttggatcattctatgacttcttattttcccttcgaag

SEQ ID NO: 223448 - DNA, 113 bp, Glycine max
gtttctggagatcttgaataggctgaaatcaaggacaacattttacaatactgcagaccctctgaacaaacaagtaaatataagaaatggaccattgtacagaaaatagaaaa

SEQ ID NO: 223449 - DNA, 103 bp, Glycine max
tatggttaattttgagcgtctcgatatattatacgcctgaatcgaacctcagtggaaaaagatatgaccatttgaatttctttagagcatccggtggtcattt

SEQ ID NO: 223450 - DNA, 413 bp, Glycine max
  unsure (1)..(413): unsure at all n locations
tgcagcttatatacttaaaaaaatattaatgttctttgattgatattggagttattggagtaatatataaccgaatttaaatactttatgagaaagtcaaccaaccatcttaccaaatacaaaaaaaaaataaaaatcattgaccaattaactcctaaccctatatactaacaaaagacttacgagaaagagttaaccaaccaacctccatcaagaaagacttgtgagagagtgaaccaatccactccctagacatgaagataaggcttgagacaagattcaatcaaccaaatctatgcattaaaaaagactcatagtgaaagtcgaacaantaatctctatacatatagagaagagtcatgggataattaacaagccctaatatggatcactcgactaagccagggtctatg

SEQ ID NO: 223451 - DNA, 405 bp, Glycine max
  unsure (1)..(405): unsure at all n locations
tgtatcctccattgaagctcatcctatcaaagcagttcatgttgtattgaagtcctttntggctaaaatttacaaaaggcagaagtagagtcaacttaaggcgaggaccaaaattgtttaacatgcaatagaaactagagttctgatttctatctagtatctagagcagtatcatgtttcgtggcttggaatcttttaaaaattgattttcttcttgcctttgttttttctaaatttgttttttcagtgttaagatcttgttgtattttatcttgtaatattgtttgactattttcttctgaaacttttgggtcattattattagagctctgctatttatataatatattntcacgattttctctctatctatataagtgcttaattttttctctttctatcata

SEQ ID NO: 223452 - DNA, 399 bp, Glycine max
agcttgcattgttgtgcactaagcccagcttttaataattaacttgaatttcaaattgggcccaacgcgacggtcagctaagcaagaattttgagaaaccaaacgtctttctcactcacttagcgcactgactcgctaatcgagtttgtcgagaatggcataagttaagtgtaacaaaagttacacttacacttagccaaagttacgaagcaaattcctgcaacctctctcccgtgaaaaaaaataaaatttcacattgcatcttgagcttccatcttgcttccttctgcaaacatcttgtgaacatcttcgattcaactaagttcctgacttgacttatgcttctttcttctattggtgatactttaggatagaaaaccttaggttaaacaatttaat

SEQ ID NO: 223453 - DNA, 430 bp, Glycine max
  unsure (1)..(430): unsure at all n locations
tctcaactntgtacaagaatgaagctctgataccacttgttttacaagtggcctcagatatcttaagaggggggaggggctgaattaaaatatcacaggctattccccaatcaaaaactctacttttaatttgatccaacaacccaagattccctttaaaatagaactcctaaataataatgcacattaattcttactgaaaggaataataggcaatacacaataattcttacgtgggtatatactttatggcgcctattcttggctctttaggattgactatattctccttactgctgattatgcttcaaaatgggcggaagccaaactcaccagaactaacaatgctagtggtaatgtctccttatcagagtgtctttcgaaaggcatgtcatcttcctgtagagatagagcacagagcctacagggc

SEQ ID NO: 223454 - DNA, 213 bp, Glycine max
cctacttgcgccctcatggaatgatatcctctaccattgagagcatatcacagacaaaagaacactagataatgagacctaataatcagcaacaacataaaccaaaatttttggctgaaggcatacgcccatcccccacatatgaactccgatgatacaatctacaaactccccccgccctccataaaatgaatcaagaagaaaaaaaataac

SEQ ID NO: 223455 - DNA, 382 bp, Glycine max
agcttaaacctttggtgatccatttcaccaatgacattaccactcatataccccgagttttccaaccccctatagcaaagactccagcacccttcctttacaagagtgacaaggcaataccatggaaatatggcgtacaagggcccaacaaaaggcagaatgcgtctgtcatatgtgtcgagaatggcatgctggctgctaagatcacaaatatttttggtactagcggcatgactcgtagtggatgcattttcgctcctcccaaactaccggcaaggtcgaaagacaaggggaaggcaaaggcaaatatttgcgagagggagaagaccggtccgaccgagaatgacgacgcccctattggatagctggcggggaaggggat

SEQ ID NO: 223456 - DNA, 481 bp, Glycine max
  unsure (1)..(481): unsure at all n locations
ttagatactcagcttaaggagcacttcaaccaaatgtatttatccccaacgcctacacttcgagaagttcgttaagaatgatacctcctgatttaagtccaacctanaaaatattttaacatacagactctacctataaactatgcaaaacacacaactactcaattggtntcaaaatctcaattatattcaaaattattctaactcatcacgcctcaagtaattaaactcgttggatttccatagtagaactcatcacaaacttgttgcacattaactcattgcacagttcatatctcacaactcattgcatacaacatctaaatttatcacttaatccactttatgttcatttatacatcttcataacatttataacaatgttcatatgacacaacatatacatacgcatatataacgatcaaaccatagtgttccaattccatgacaatagcattttaaaatcatgtatgatatacta

SEQ ID NO: 223457 - DNA, 250 bp, Glycine max
acatcctaccatcctcatgcaagagaataaagtcattttaaaccctcttgggactcgactcctgaaaaagccccatcaaactgaccatgtgtacaaaccacactatgcaggtctaacactcccgctgatgggcctacaaaacatcaaccacaaacgaactatctttgctataatttgaatggaaaacccgaagggcatgcccacaacgctaactcgttggcggctctacatgaccctcggagctccaaaa

SEQ ID NO: 223458 - DNA, 389 bp, Glycine max
  unsure (1)..(389): unsure at all n locations
cacccccacgacaaaaaacatgaaaacacaaaaaaaagtccttactacaaaaactactcacaatgctccgaaatacaaggctaaaaccctatactactagaatggcccaaatacaaagcccagacgaaggaaatacctattctaatatttacaaagataagcgggctcatacttagcccatggactcgagatctaccctaaggctcatgagaaccctaaggccttcccttggatctctagcccaatctactcggagtcttctacccaatgccctttgcgggggaggatcgcatcaggaaatgagggaactctcttctcgtgtggggactacccaaacgttccgntgatagggacgaggcggtagaataactataatcccacacttgcta

SEQ ID NO: 223459 - DNA, 339 bp, Glycine max
  unsure (1)..(339): unsure at all n locations
ttggctaagtggctaattcacacaaaacatggccttcatcatattcaaactcatgcattcattccataatcagagattcatgcaaaaatcattacttaatgctagtcgttctctcacaattcaaggtcacacactcaccgggttgtggttaatgagcaccttcacaatcaaactgttaaactaactaacattttcattcatgatcctaatccatgttctttctcttctaatcactgcatgcttattcanaacatatacacattccaattcactcaaatcatgtaatcgatcaattccacccaccaacattgatttttttttcaaatcaacatcaaccat

SEQ ID NO: 223460 - DNA, 432 bp, Glycine max
  unsure (1)..(432): unsure at all n locations
gtatttgatgcacgcatatggaatgattgtttccagccaggtcagcaagtatccccccaatggcctttntgtggcctcttaacacatgcaataacttcacctcatgctcaagtggaaggatgttggatatgatgattggaagcttttgagcatcgtctaaatacgcatatttaaggtgctcaagtagtgtgttcaactccaatgaaggtggttgaatggtggaaagcaaaggaaggttggtggttggtggctggtggttggaggttggtggttggtggatggtggaatggaaattccatactcaagacttgtacctgtacacaatctgagtgatttcagaggacatctttcnctatactcatacacagtcactttcactgactagtgaagacctagattaaatacaaagaatttgtctacctaacccttcta

SEQ ID NO: 223461 - DNA, 445 bp, Glycine max
  unsure (1)..(445): unsure at all n locations
agcttgggacattggggaagggttntggtatataaaaagagaaagtaatggttgttttccaaggctacacgtaaaataagacttgaaacactcaagtgtttctactctcaagaaaagaagcgtttctcacacaccaaaagacattgcagatcacaacggtcagatcatggacatctaccctatgaacctccagaccaaatttcgagaagatccaacggttaatgtatacaggaggcgcttttaccgagatagcttcgggcagcttcctggagaagcttcctcatgaggcttctttgagaagcttccttgagaggcttctttgagaagntaaagtcttaactacccacacccctctaataaataaactaacctcctctgaaataaaacatggataaaataacaccacctataaaatcaaacatcaattattaataataatatttca

SEQ ID NO: 223462 - DNA, 437 bp, Glycine max
tgcttgtggatcttctatggaggctggatctttgaccttctttcaagtccttcaatggtgattttccaccatggagatgcagtggaagacaaaggagaagaggtgagaggaggcaccatccactatggaataagccatggaagaaggagcttctccaccaaaaatgtgccttggagaggatgcttcaatgaacgaaaagagagagagaaagagagagggggggagcacgaacttgaaggagtaaaagagggagacaagttgaactttgagttgtgtctcacaagactctcattcatcaaagttacaacaagtgttacacatgcttttatttatagcctatgtagcttccttgaaaagctttcttgagaagcttcttctagaagctttcttgagaagctagagcttatctacacacacccctttaataactaagctca

SEQ ID NO: 223463 - DNA, 365 bp, Glycine max
  unsure (1)..(365): unsure at all n locations
agctnntgggaaggtgagttcagagcttattgttatttagaaacactcgaagtctttcaaacatatcatccacatattctccttctttcacgaaaatgctctcatggtgccttattagagtggaagtttttctcaatcaatatcctttgttccttcatattagatgctccacgagtcccagatctcgttgggtacccttacagatcttgctgtacttattcctggacagagcacatatcaaagtttaatgagctttggtgttaagcttcattatagcaagatctacctgtgtccattttgcttctggtctaagaatgggtatgtctccattttaataacatctaagcttgaactgagtggacttg

SEQ ID NO: 223464 - DNA, 380 bp, Glycine max
  unsure (1)..(380): unsure at all n locations
tttatttattctcgtctacctagtatgtgaatagtaaattaggtcacttttagnngagtaacactaatccctacttagtcaactaacccttaaccttacttagtcacataaccctaattagtcacacaaccctaaaccctaattagtcacacagccctaaaccctaatgtcgcaacctacccttcggtgggagggcgatgcgtgactctcgggtgcgtgttccaagaaaggaatacgcgcggagtcgccaccaatgtttattttgaggaaaacgtcggaaaaatcggaaaagacgtggtctatgaactttaagtgaaagggtcgggagttgtatttacgcacggggaaagtattaacacccgacgcgtctgcacaacaga

SEQ ID NO: 223465 - DNA, 354 bp, Glycine max
  unsure (1)..(354): unsure at all n locations
cgcaagctttcgattcattctatgtacccgtagtggtccacattgggtttcgtgcatttttattctcgttttgtttactttttataccccctcttgacgtgcttaagccattttacttaagtcatttctcgcttaacttaaaaataaaataaatttccaccgaacgtttgaattatattatccgttaacttcggttaaaatcaattccgaccattcggtcgtgccgtaaccacgttggaaatcaaaaaaagaggtaaaaataatataataataaaaaaaaacatcttttagtaaaataaagcgganaatcaatcggacattttctctttgggaatttctcattctaatcgaatt

SEQ ID NO: 223466 - DNA, 478 bp, Glycine max
  unsure (1)..(478): unsure at all n locations
ntagctntgtccccaaggcttcatgtagactggtccaaattttctaagtgaacctcggatccctgtcagatacaatactagaaggaattccatgcaaccttattacttccttgatgtacaactccactagcttctccattctatacttcatattcactgggataaaatgagcagatttggtgagtcgatctactataacccacacagcatcatgtccacgactagtcttgggtaaactagatacaaaatccatagatatgctctcccatttccattctggaatttccaatggcttcaattctcttgatggtcgctggtgctcaaccttagccttttgacatgtcaaacatcttgctacatattcagctacatctttcttcatgccatgccaccaaaaacttctcttcaaatcttggtacatcttagtcattcctggatggaaactaagacgacttttatgcgcatcagatatcgagac

SEQ ID NO: 223467 - DNA, 375 bp, Glycine max
  unsure (1)..(375): unsure at all n locations
agcttgctctcaagattttgcctctctactgatgtttncataacagtagagtccaagcagtcaaacaatgcactgtaaaagtaccatgctttatcaactctctccatcaaattggaaccattcagatttgattcttgttcagtaatcactactagttttggntgaagttttctaatagcattgagaaagatccccatcttaggtgaggcacccaaagaaagcggtgacaaagcagaatcaggactcaaggtatatgcattgatcatatctctctcaagccactctgcaaaagtcctttgacccatatgcagtgctttctgcacattcatagatgctgccgcagccggtgagatcctccctgccatatcatcatca

SEQ ID NO: 223468 - DNA, 369 bp, Glycine max
  unsure (1)..(369): unsure at all n locations
ngatatgaggaagtgtgaagggtgaaaattcctgctcttatgttgaccacagagtggtacctggagatatgtcgcggtggtcaggagaccttggggacgtcaggtggggtgctattgcccaaaaccaagcttgaccaatcccgacccaacccgggcatagtcggtcagtgagaacctgtgatgtacctaagcaggcgagctcctggcagtcaacagataaaaggaacaaagaccacaaagcaaggaggcttgtggtggctggccagctgtgaaacttgattgatatgtgagatatggtctctggtaatcgattacaaggcttaaaagtgaagacaggaggctaagatggtctctggtaatcgattacca

SEQ ID NO: 223469 - DNA, 331 bp, Glycine max
  unsure (1)..(331): unsure at all n locations
agcttgaagtgagaaagagtttcttgattttatgccggganctcaaagcacttattagtacttaattagccatgatcatcaataaatgaagatgatcatataacgggcctggttcacaaggcccacagaccataatccacttctttggtaaacagataaccttttcttaccacatagcattgaacaactatacagttctcttacttataagcacatgtattcttagatactgtacatccactccaaatagcatttcttttaatcttatgatctccacattttttcactggctgcttgttccaaaactattccaacgcctcaaatttaacgt

SEQ ID NO: 223470 - DNA, 135 bp, Glycine max
gacagggagaaggatatagaacaagcgcacagaccaacaaagcccacaccaataatattattaacacccataagcgattgactaaactcacacaatctcaagtgccccaaatgacagagagggtgcagagccaca

SEQ ID NO: 223471 - DNA, 458 bp, Glycine max
  unsure (1)..(458): unsure at all n locations
cctgctgcatgcaagcttgtgcatccaataccctgatgaggatgtttctatatgttttaaagctggactgattcatttgcttccaaagtttcatggccctgcaggggaagacccgcacaaacattngaaagaaattcacattgtctgctccaccatgaaacccctagatgtccaagaggatcacactattctgaaggcttttcctcattcattaaagggagtggcaaaggattggctgtattaccttgctccaaggtccatcacgagttgggatgaccttaagagagtattcttagaaanaattttccctgcttccaagaccacagccatcaggaaggatatctcaggtattatacaactcaattggagagagcctgcttgagtactgagagagatttaagatactatgtgtcagttgcccccaccatcagatctaaaacagcttctctccatatttt

SEQ ID NO: 223472 - DNA, 155 bp, Glycine max
aaatcaaaaaacccagcaaaaaaatctgggcaaaagaatgcagaaagcagcaaagaccacaacgggccaccgacaagaaaaaagtcaaagacacatatgaaaaggacagcactcaaaaaaaaccaaaccggcgtcaagccggtggaaaaaaaagg

SEQ ID NO: 223473 - DNA, 440 bp, Glycine max
  unsure (1)..(440): unsure at all n locations
catgcaagcttatctaaatcctaacattagacgaatatttcttttctaagncatctaattcccaatcaaatttcacataacctgtaggaaaaaagaaaagaagtgatatataagtaaacatgtgggaaacctagtatggtactaacctgccttactcatatgtaaacataccatataaaaaacaattccaagcaatccaaaattgggatgtctttgaaaaacttttctcaattataattactggctttagctctactggaaatattatttcaacttcagtgctttgttcaagttcgtcttccttaaatatgtggtagaagtatgctacacaaataacaatttataggataatacaaaagcctatcataacgggagaattataatgctatatctcttctccactaactattctataccaagacacaactattatacatatt

SEQ ID NO: 223474 - DNA, 324 bp, Glycine max
agcttcagcctgatcgctaagcgacaacttattcttttctaagcgtgacctattgtcaccaagctaaattcattacgtccataactgaggtccatgaagttaagcgccagtcatggcagctaagctgaattccttgcgataatgtgagcgctaagtgagtccttatcagctaagcgcatgctcctctgtatttaagatgcatcattttagctaagctagccagagcctgacttagcgagagttgtagcttttcagatctgcaaacctcgttaagcggtcttatcgtcgcgctaagccaagcttgtgtgcaaaagaaaaactgat

SEQ ID NO: 223475 - DNA, 416 bp, Glycine max
  unsure (1)..(416): unsure at all n locations
ctatgatactcagcttatgcgtttatgaaatttactcatgagctaagagcgattgcctttcgcttngcagtngaatatagaaaggcttttttctgcagaatactcgctaagcccaattccataatttttaaagacagagagggattagcgcttagcgcggcaaggcgcacttagcgtgactactctactggacaacacaggcttagcgagcagactcactaagcccaattccaagaagtataaaaacatagaggtaattgtgcttagcgtgacaggcacgcttagcgcacatcaaaacacaaaaattctaagtgtctgatacacaacacttgcttagcgcacagttgtgcttagcgagttcaacagttaacttcaacagataatatgaatgcgcttagcgtgacaggccgaactta

SEQ ID NO: 223476 - DNA, 307 bp, Glycine max
gctttgtcttctttggatgctgacttgtgtttatgtatgccctaatgacgagatggatcctttagaatctaacaagacctgacatatagtacacttgcctcctggttgcacaccaattggttgtaaatgaatcttgaaaaagaaactaaaacctgatggtactgaggataaatacaatgctcgccttgtagccaagggttttacgcaaagagagaatgtggatattctttacaccttttcaccaagtactagaataacatctattcgggtgctaatatttcttgtctctattcacaggctagtagta

SEQ ID NO: 223477 - DNA, 470 bp, Glycine max
  unsure (1)..(470): unsure at all n locations
tactaagcttaacatcagaccacttccagtgtgctggaactacttcatatggttttgttggggcctatgcaagttgaaagccttggaggaaagaggtatgcctatgttgttgtggatgatttctccagatttacctgngtcaactttgtcagagagaaatcagacacctttgaagtattcaaggagttgagtctaagacttcaaagagaaaaggactgtgtcatcaagagaatcaggagtgaccatggcagagagtttgaaaacagcaggttcactgaattctgcacatctgaaggcatcactcatgagttctctgcagccattacaccacaacagaatggcatagttgataggaaaaacaggaccttgctagaggcagctagggtcatgcttcatgcccaagaactttcctataatctctgggctgaagccatgaacacagcatgctacattcacaacagagtcacact

SEQ ID NO: 223478 - DNA, 198 bp, Glycine max
caggaggcgaacaaaagaattgacagggaccaaataacattagaagtgccaggtctaccagattatgaggtttcagaagcgacaagacaaaatccaataaattgaaccactgctttgtgagcaagggaaaaggaaaacaaaacccgaaacattatttaaaacaaaccaacagaggaaaaaaaggacccaaaaaggggg

SEQ ID NO: 223479 - DNA, 54 bp, Glycine max
ctcacccctaattgagcggcacttttttatgacccccccccgcaaccaggctaa

SEQ ID NO: 223480 - DNA, 238 bp, Glycine max
ttctataagcagcaaaccttcatcatactttccacctttattcataaagataagtgtacgcacacccataacttaaaggatacactctatgaccaactccccggaatgcatgaaccaaaacttttgctgagccagacaaggctaaaagtcccttctagagtagccagcatataattatctctatgaagggaatccactgtttgaaaacacaacgtcgagaaacataagcatgacagaa

SEQ ID NO: 223481 - DNA, 206 bp, Glycine max
cagcaaccacatgaattttccatatctctgaaatcctttaaactttgacacacttcgaaccccacccttggttcaaatcttcagaacaccaactctgattacattctacaaccaaaacaccatctttgatacatgagtcaaataaataagattcttcttacataactatcaattgaatctaataatcccataattgcatttttgtc

SEQ ID NO: 223482 - DNA, 444 bp, Glycine max
  unsure (1)..(444): unsure at all n locations
agcttaagcagtgatcgaacttgctctttgttctagctntgcgaacatataagcaggattgtgcagagtgctgatcttatgaactttgattcttctttctgaccgaatgaagtgatatctaacatatatatgcttggttctatcatgatgaactcgatccttggccaagcacatagcactaaggctgtcatagtagatgttagtatattcttggttaattccaagatcatttatcagacctctcagccaaattccttcctttgcagcttcagtaagagccatatattcagcctcagtagttgagagggcaacagaagggtgaagtgtcgcctttcaactcaccaagcagccaccaatggtgtaagcataccctgttaatgaccttttcttgacaagatcacgcagcaaatctgcatcagaataccagtgagggcaccatctgag

SEQ ID NO: 223483 - DNA, 468 bp, Glycine max
  unsure (1)..(468): unsure at all n locations
tcctattagttatgcattctgcagaatcttactccccgtgtacgcatgaggtcttgtggaatggaagttgactttgtatttcgctataatcgtgcatggaagctggtttattttgatgccacaaattgaaactttttgagtgaagactgatagagaaggaactggccgcaagtgtgacccaatgattatcacttttctaccctctattatgtatcttggaacaactattctctctcctcaagtgaaatgacatcctatgtgcctatatactaattataagaggttcattgttcataatagagattcatgacactctccgcatggtggaagagaaacacaccaaatatntttcttgggtgtatgtgactatttggccattaacactctgcaatggatgattaagtgagtctctggtatgatgcccacctatcataatatcagatagctgttagtggttggctaaacatg

SEQ ID NO: 223484 - DNA, 354 bp, Glycine max
gagccaaaatcctgactcaccattatacctgacccagggtgagaatggtaatccttaccctcggaagcgaaaagaatagaagggaaatctccaatccaagaaaaggagagaaggaagatttccaatccaagagaaagcaaaaaagaaaagaagggaaattccccaatcaaagagtgggagaaagcaacaagaaaagaaagaaaattcccaatcaaagaatgggagaaagtaaaaaaggaagaagaagaaggaaagaaagctcctgatcagggatcgaaggaaaacataagaaatgtgcagaaaggtctttggaccggacaatatctgaacaatacagaattttcaccaatgaac

SEQ ID NO: 223485 - DNA, 352 bp, Glycine max
  unsure (1)..(352): unsure at all n locations
tgctcttcttgcagccctctggctcttgctaacggcttttgctgtagcttgaatttcttctcgtaactagacacactcttttcggatgactggagcgaccaacttgaaattttcttgggcagtctcgctttcctattctgttataaagcccggacttttcatcttctttggagcttcaaattccctcgtgaaatctctacttgcgagccatnaaacctgtgtacaatttcagcattctgataccacaagatgccatacaatgctcaagttcttattttcttaactggttccacacttaggacttttgataacctgaaattgccaccaaattttatatgaaagaacagctttt

SEQ ID NO: 223486 - DNA, 332 bp, Glycine max
gcttgtgcaaggaacacttttcttttatttatgtgggaacagatcaatggtgaaaatgatacatatgttggtgagttataattaactaaattaaacaagattgaaacattgagagagaaagaaagttaaagaatttagagaagagggtggagtatgtagcattgaataaccctaaagaattgaataatgtgttgtgtggttcatacagcgaggacggtgtcacaaatgttgcagtgaacataacatatctgttccgaaggagggaggtggtccagtgataatgtggtgaagaggatgacattttgggtagccccctcttttcgttctcttat

SEQ ID NO: 223487 - DNA, 383 bp, Glycine max
  unsure (1)..(383): unsure at all n locations
agctngtcatctgagactcaactctacactcttacggctccaacatacgcagtttttggaagtttcagatttaagcagaacctcgaagtgaataattaaacagaccatatatataccaaaaggaaaaaaataaatgaataaaaataataaaaatgagcatgctctatggtgtcatcatggattattgcatggtgtgatgaagttgtttgctggcttatatattaatattaataaaatgaaaaccgtggtatttacttgaattttccgccatatcacactctactttagtcaaatgatttacttgaacagacatgagaaagaaaattcattccagagttgtatgaatttaatcatagacgaatcctatactactacgatcatat

SEQ ID NO: 223488 - DNA, 472 bp, Glycine max
  unsure (1)..(472): unsure at all n locations
cttggtattgctgtgctctctgcctaagagctactctcatttcatttatactntattcgctggaagagattctgtttctcttgatgaagtgcatgctgctctgaattcaaaggaattgaatgaaagaaaggaaaagaagtcctctgcaagtggtgaagggctgacagcaagaggcaagaccttcaagaaagatagtaaatctgataagaagaagccaaagccagaaaatcagaagaatggtgaaggaaacatcttcaaaatcagatgttatcactgtaaaaagaagggttatacaacgaaagcttgtcttgaaaggcacaaaaatggtggcagtaacaataggaagaatgactcangaaatgctgcaattgttcaagatgatggctatgaatctgcacaggcacttatggtgtctgaatagaatccatacactaaatggataatggattcacggtgttcatggcatatgaca

SEQ ID NO: 223489 - DNA, 421 bp, Glycine max
  unsure (1)..(421): unsure at all n locations
gctcacttcattcagctttcgattatttctggactcaaacggacatccgagtaaaaagttattgtagtttgaatttgctcagggcttccgtattccatttcgagcgtctcgatatattacgggactcaatcggacatcagagtaaaaagttattgttgcttgaatttgctcagagcttcggtattccatttcgagcatctcgatatattacgggactcaatcagacatccgagntaaaaagtattggagtttcaatttgctcagggcttcgggattccatttcgagcgtctcgatgtattacgggactcaatcagacatccgagtaaaaagttattgtcgtttgaatttgctcagagctactacattcaatttcgagcttttcgatatattacgggactcaatcagacatccgaagtaaaa

SEQ ID NO: 223490 - DNA, 263 bp, Glycine max
cagacgctcgaaattgaataccgaagcgccgagcaaattcaaacaacaataactctctactcggatgcccgatagagtcccgcaatatatcgaaaagcccgaaagtgaacgcagaagctcagagcaaagtcaaacgacaataacttttcactcggacggctgagagaggcccgtaatatatcgagaagctcgaaatggaataccgaagctctgagcaaattcaaacaacaataactgtttactcggatggccgagtgaggccc

SEQ ID NO: 223491 - DNA, 281 bp, Glycine max
caaacattacgtggtgtttccttgatattgccatgcatatctttgcaatatcatggttgggggcgtcttttctatgtcattatttgatgacgttaccatgcatgctcggctagtaatgttcttttcatgcttgtccgtgtatgatcgaagccgtacccgaatcaaataaacatgaaaatgcagtaactaggaagtgatcctaggtcgtttcccaacgagcagtgacaaaccaaatgttcataatatactttcaataacaataacgattggggggggggggg

SEQ ID NO: 223492 - DNA, 278 bp, Glycine max
tgatatacatatcttcgaattggacttgaattgttcagaaaagtggggggggggctgttcattggacacatgtttgtgggatgctctgaagtatatggcatactgagccatgctattggaaacgggacagctgagaaacgtgtcttatagcaaagacaatagaaaaaactccgaaaaaaaaaaaaaacaaaagtgaggaaaaaactaatggccagatgagaaacccggctatttcagaaaatttactactattcattgctatttctaaagactatccc

SEQ ID NO: 223493 - DNA, 366 bp, Glycine max
  unsure (1)..(366): unsure at all n locations
acaacatccaagcaattcaacatccaaacatcatgttctatcttaaccaagaaaatagggccgaggcagaaaactctgcccaaaacacattccaataccacagttttcctcactcaaataccccagtaacattctcttcgttttgatttgctaaccgttggatcgactctaaaattttactggaggtccctagtacataagtctacattttgaccgttgggatctgctataaaacgtccataacccaatatgtacaacctttttcacaaccagccatgcataagcattttctgcacaagcacaaaattctgctgcacatttcaacagcaaaattctacataatagtgcagattntcgaaatcactc

SEQ ID NO: 223494 - DNA, 355 bp, Glycine max
acctattgtcgccaagcgcaattccttatagccataactgaggtccatgaagctaagcgccagtcatggcagctaagcgagattcattgcgacagtgtgagcattaagcgagtacttatcaactaagcgcatgctcctctgtacttaagatgcatcattttagctaagccagccagagtttggcttagcgagagttccagcttttcagatctgcaaacctcgctaagcggtctgatccacgcgctaagccaagcctgtgttaaaaaaaactgattttgaatttgaaatgtcggctaagcgcgcatatccgctaagcgagccttgttgagaaaccaaacatctctcttgctcactt

SEQ ID NO: 223495 - DNA, 357 bp, Glycine max
  unsure (1)..(357): unsure at all n locations
acctgaggcatgcaagcttggaatcgattacacacatacagtaatttattaccaaagcacattntcaaaaaatattctcaacagccacatctttttatgtggttcttgaatggctatcaaaggcctatatatatatgtgacttgagacacgaatttaagaagagtttttggagaacaaaaaggtcttatcctattaaaaagcatatcgtgttatcctcttacaaattccttggccaaattacttgtgattcaataaggaattatttgagtgctcaaattgttcagtctatctctttcaagagagaattcttcttttcttcttcctcattctgaaaagggattaagagaccgagggtc

SEQ ID NO: 223496 - DNA, 461 bp, Glycine max
ctgtaggattatggggtacccatcacatgtggtactatgtggtggtcgggcgatggtgcacaacaagttttccacatccacaaattgcgcataaacccaccatcccctgttgcccacctccaactgagctcacgtactcccacgtagcccatatcttcgtttctctcaacaccgggtccccatcaatcctcccaagctgtccccaacatccaggtaattcaacatccaaatcatcacaaactaacaaaccaagcaaaacagggcaaaggcagaaaactctgcccaaaacacaactcataatcacagcttttcacatacaaataccccagtaacattttcttcgttccaattcgttaaccgttggatcgactctaaaactttactggaagtctctagtacataagtctacattctgactggtgggatctgcaagcaaacatccataactcattctgcactac

SEQ ID NO: 223497 - DNA, 384 bp, Glycine max
  unsure (1)..(384): unsure at all n locations
gaccttaagtcaccgcggctgcagcttgaattggctctggcttattattttctttaagagaaaacttgggtgtttgggcaaatccgaggactggtgtagggaggcaccatcttctctcaattgtagccaaatggatgttccattctcttaccttggaattcctgtaggggtgagctctaaaaataggtctgtgtggcagcccattattagcaaatgcgaggcttaacttacaaaatggaagcaaagaaatctatcaatggggggtggaataaccctcattaattcagtcttaacagccttacccatntatttgctatccttcttcaagaatctaagcttgtggtgcaaaagattacatctatacaaaggaattntgtatggggc

SEQ ID NO: 223498 - DNA, 251 bp, Glycine max
  unsure (1)..(251): unsure at all n locations
ccccacccgaacgcttttgcttctattctcggaaagnaacaaaggcgaaacacatgttggctactaatacataacaacctgtgtaggaaatgagaatatgtatagtcgaaacacccttcactctaccataagttgcaaactcgctaaggagccattgcggctctgaagaagtgcccctgaagaccctctcaccattctgaaagccgcaaaccacggttcaactaatgtgcacaaaacgaaccacgaaatcc

SEQ ID NO: 223499 - DNA, 418 bp, Glycine max
  unsure (1)..(418): unsure at all n locations
taacatatttaagctaccacaaccataatctttatcctattcaagcncncttaaacttttagaattagtgatggactataaatggtggagaagaataccatatagagagtaacttgttgtctcctaaacatacaaacataaatactaaggatactaaggtcacaataatccaaaaggaattgagaaatatttgaggaactcttggacaaatgagaccaataagatggtgtagaagttataatttattaatagtcaatagttttgttggattggtaagcaagaattataaatcacaacaaattaagaagactaatacaaacacaagctaagtaattatcaaatttgttcaaatgacaggtacgagatttggtttatcacccttgagacaaaatctaacatagtgtctcatactaatcaa

SEQ ID NO: 223500 - DNA, 397 bp, Glycine max
gatcacacaggcacaatcacacacatggtcattactccaagcaccaaaagaaataacccttaagctcattcgggaccccgagaccctttcactagcctcaattgattatggccacatagttcatgacaacccttttgcaatatttgccccatcttccattagtgacatctcactcttgataaatttctcaaattctctggccatccctatcaccatagctcctagagggcaagcccactccgttcatggacaagccatgaacaatcatggggtttgggtgaacatgaatgagttgaaggctttataaatggtatgggattgtaaaatggtgatacacaactatcgttcatagccgatgggggggtgacaaatttgattgagtgtcgatgcacacttg

SEQ ID NO: 223501 - DNA, 317 bp, Glycine max
ctctccccctttggcaaaataaaaaaggcccaagtgcataaaaataaacatacataaatgattctaaaacatacataaagcataatttgaataacacaaaatttaaatacataccactagtcatatatcatcaaaataaccaagtctaaacacaaaacataaacatctacgtgcaaaataaataaaaaacatcagttcagtcataattaactaagtaccaaatacttaaaacataaccaatgttcagagaataatgtcataaaacatagccaaatacacgacttaaacttaaaatataataataatctaaatctatg

SEQ ID NO: 223502 - DNA, 478 bp, Glycine max
  unsure (1)..(478): unsure at all n locations
caagcctattttgaactatattgaatgcttattatcgacatgcttcttgtatatctttcactaaaccattagtagatatgttcacttgcatagctttcttgcatatgatgttttgctttaataaagttctatgttgtacatggaaagccattgaacgttcttcttataggaatactttaatgagatggcatgacaaacttgtattccaaacattctggtgtgagcctgtgttaaacttttggcaagtgtaccaattatcgctgtaggtttcacatttataaaatagttcgtctccacagggactcgagtttacttaattcattcagataaaggttatcagntcaataattatgtacagatctaatcaaatgtcgttgtttctgtttgactaactaaagacaacttacagtaaaagaatacgtaaaataacggaatcacagaataacagatataatcaaatacgaaaatatggaacaat

SEQ ID NO: 223503 - DNA, 446 bp, Glycine max
  unsure (1)..(446): unsure at all n locations
agcttcacctatgtttctgatatggcaaaattgtattaccagtgaatcgacatgttgtattgtacatgattggtgacattgatcatcactctatctccttccctaacatatatagntggccctgggaacctcccatttactgttacaataggctttgcatggcatagtctactcacattcgtcacttgaatctgtagaaaacacaaaatgctgtcaaaggaactttgcataagcatgttgattatgatatcaatataactcttttaactcacatcaaactggtatctctttatggcagcttcagatgaagaagacattaagccaacaaagatgaagaagagaaacgttaagacagacatggaacaccccaagcttgccattgtgtncttgatgtccaagttctatntgatatcttgggcttgatggatacaagtanggtgcatatg

SEQ ID NO: 223504 - DNA, 374 bp, Glycine max
actctctatggccaagctatgagacataatacccagatctttggggaatatctcgcattggatcttgcaatgaatagcgatgggaagtcgttgcaaaaaacatcttgactacacttaattcgcaatcaattaaactaattaaggcttaacatccattggccttgatgagtaaatctcccatgtacttcacattacttgatacaaactggaattgtgttatctcttccaatgggaattgctttattaaacaagcaatcaatgcgagaaaacaatgtctggcctggctgatgggaaagataactattttccttctatattggatatgtaggcactcgccaaggagagatccgcctgaatatggaggatggaacact

SEQ ID NO: 223505 - DNA, 429 bp, Glycine max
  unsure (1)..(429): unsure at all n locations
gaccctaagcactgcagctcaactgcttggaggactgtcgccaagttatttttgtttagaagaaagagtttcccaattttgagaatctttctgtgtttggtatgcgcttagggttgaaatttaagataaagaataactttgtaatacatgccttcattgaaaacccgtgtctctctaagttgacaccattaataaaacatgcgtcccttgacaccattgtctctttaagttcaaaccatgtgtcactcgaaaatataacctatattataatcctgcagatatgttaagaatgaatagcttactctgatctttgaaacctagagcaaaataatttattgactattgtgtataangttaaccctctaattctttcagtgagattcatcgaagcctaatcatataactcatatctttgcatcttcttgaata

SEQ ID NO: 223506 - DNA, 327 bp, Glycine max
aaccaccggacagaacaagaggaaaaaggcataaacccccggcacaaacgggataagggccaagaaacaacggcaaggcacgaatggcagggcaactgaacgacaagcaagacacaactaacgcccccgacaattgtgagaaccaaacgcaaaacaacacacaaccaaccagggcgcagcacaagaccaaaaccaaaagccccaggagaaaagacaaaacaccgcaggcacaaccaggcaccgcagacaaaaggcccctaaacaaacaaaaacccaaacaagaccagcacacacccgcacaaaaagccaccagaccaaccaccaaac

SEQ ID NO: 223507 - DNA, 413 bp, Glycine max
  unsure (1)..(413): unsure at all n locations
tcttaagcacctgcgggcatgcaagcttngacattatccttcctttaatgttaatattatttaaggttttaggtcaacattaaattattggaaacaaatagtcaacatgttgacaactctacataattaatatgttccaagtttttcacccaaaaaaataatgtacatttactttcttatttgtggagtcaaaataccggttatatactatatcatgcaatagaaaataacataattatagtgatataattgataaataattttattttttaaatatatttaggtaatcaattatagataagtgtctatagaaaaaaatttagttaagatgtattggtccattaaatgaatctatttcaagacatctatcattaacttttaaattttttaatcatcaataaataaaaattctg

SEQ ID NO: 223508 - DNA, 336 bp, Glycine max
ctgcagctaccttgttctaactgaggagatttttttgcgacctttcctataggcttggagtaactgattggaataagtatggagtcctccacaccaataatccttatcaacaatcaaggtttcttatgccttttcctcactgctatatgttcccatgtccttgcatctaccgctgatatgaccaaacaaattatcatcataacgtttcacatgtcagggataactggatgtgaaacactcctgcggattctcattcatgactttatgagctattatatggtccacttgcttcttttacttctagccaaattctttttcttcaaccaatacgttcag

SEQ ID NO: 223509 - DNA, 203 bp, Glycine max
acccacacctgtgaggaccctccttggggcgatttataataaggagagaaacatcacgggcaccggggcagggctgcccccaacagcccaaaggaggcagagagggagagagacccactcaaataaaggggaccactcaataaaaccttattgaaggacgtctctccacttcaacccccgggagctcatcaaataccaaaagc

SEQ ID NO: 223510 - DNA, 442 bp, Glycine max
  unsure (1)..(442): unsure at all n locations
agctttgatctcaattattgtatggattatttctttcatgtctatnaagtaaaactgtcggacatagagcatcggtacaacaaatgtccttgacgcaagggaaaaacattatgttaatcaatttatatgggttatttagcctttcttcctttttatttttttatgagaaatgagaatattatctntatcgtgtccgctatatattattgtacttatttccctcttctttatagtaataaattatcttttattacaataaaagaggctttgcctattctgttgaattaagtacaggctgacatgcatgtctcggcgtataacttattctccaaggtttgtcacgggttattcatctatactgaataaggaatctattctatagtctttataaggaagaaccctaattgttgctcctttctagcctttcgttttcaaactacgt

SEQ ID NO: 223511 - DNA, 454 bp, Glycine max
tctctgagaaaactttcttgagaagctagagcttatctactctcttttctctcataactaagctcaccttcttgagaagcttccttaagaagattcctaaagaagcttgagcttaactacacatacctctctaatagctaagctcacctccttgagatgagaagctagagcttagctacacaccccctataatagctaagctcacccccatgacaaaaaacatgaaaatacaaaaaaaaaagtccttaatacaaagactacttaaaatgccccaaaatacaaggctaaaaccctatactactagaatggccaaaatacaaggcccagacgaaggaaatacctattctaatatttacaaagataagcgggctcatacttagcccatgggctcgaaatctactctaaggcgtcatgagaaccctaggccctttcttggatctctagcccaatctac

SEQ ID NO: 223512 - DNA, 339 bp, Glycine max
  unsure (1)..(339): unsure at all n locations
catgcaagcttagtccaagaggagatggacctttttttgtgtggagaggattaatatcaatgcctataggttggaccttccagaggagtatgaagccagcaccactttcaacatttctgatttaattccttttgcaggtggagctaatattgaggaagaggaaccaacaganttgaggtcaaatcctcttcaaggaggaagggatgatgaaatccttcctaggaatggaccaaacaccagatccatgagcaagaggctccaataggattgggctaaagctgctgaagaaagccttaagggtttatgaacctcanggtataattttgagcccatgtgatg

SEQ ID NO: 223513 - DNA, 476 bp, Glycine max
  unsure (1)..(476): unsure at all n locations
tattagcatgtagcatgtgagatccgaacactataatccttttataaatcaagnggctgtgagtttgttggaggacttaaattccattcgcacacaaaacaaatttagaaaggaatgaagaactttaagtgagactaaactcatagtcgacctaaaaaaaatcaaagatcaagggatcttaatggaaagccaaaagatagttacagaaacctacacacaacacatttttagaaagggataaagaacttgtgagactaaactcatatgaaagattagcctcataagtgacctaaaataccaaagctcttgggatctcacccgagagccaaaagatagttaccaaaaccttcgcgctacaagcttagcacgtaacagtgagatcctaanactataatcccaaagaaaatcaagcagacgtgactcttaatgcaacacattcacccacaatggcattttaagaaaagacgagaaatatg

SEQ ID NO: 223514 - DNA, 409 bp, Glycine max
  unsure (1)..(409): unsure at all n locations
agcttgtggaggacgctacttccgaggccctggacgagcccgaatgggccctcaatctcgatctctgcgacctcgtcaacaccgacaagctcaactgcgtcgaactcgtccgcggaatcaagaagcggatcattctcaagagccctagggttcagtacctcgcccttgtcctcctcgaaaccctagtcaagaactgcgagaaggccttctccgaggtcgccgccgagcgtgtcctcgacgagatggtcaagctcatcgacgacccccagaccgtcgntaataaccgcaacaaggccctcatgatgatcgaagcctggggtgagtccacccgcgagttgcgctatcttccttgctatgaggaaacttacaagggtctctttccaactctctctctctctccttcttttta

SEQ ID NO: 223515 - DNA, 458 bp, Glycine max
tcaacaccaaatcctggacagaatctttggtaagtattatttgatcaatcttattccataaaccacaactctgccaaacctccaagctacaagcacaagtgatgaaagtattgcatgccaacaattcttcaaggcatctgcacatgaaaaagatttgtggatttatttaatcaccatgattacaaatttttgaagaaaacttcgatacacaagccacaggataacgcagtgaaactcatgtaacaataattagggggcatttgttttaagatattgagcaagattctaaaaaatgtgaacctaaaaatatcacattctgatgtttaatacaagttgtaaaaaataattaatttttagaaatatactctaatgaagaatattcttaaaaataacaattcataacgtataacaagcatcctcttaacatatcattttttgtaaatacaataaagaggatc

SEQ ID NO: 223516 - DNA, 379 bp, Glycine max
gctggagagatatttgaataatgtcttgatcttacccattaaggctttgagaataatagggtgaaacttggagagacttttttgaaaaaaaaatacttgaattaagtttgcataacatagagtatattgattgtaggagcttgtggaggtcttaagaaagaaagaatgttgccaagtatttagtcttaatggaacgcctacaggtatatgtactagatacaatattatttcaattgatattttaattttaagaaaataatacaatattattcttgtgtttaatttcattaacattgttattgtcaatttgaacaacaaaaatgattttatataatttaataaaattagaagattcaattaatatttcaaaacactagac

SEQ ID NO: 223517 - DNA, 463 bp, Glycine max
  unsure (1)..(463): unsure at all n locations
tttcagtttgtaagtataagtaaaaacacaacatcatttttttttataaaaaaaccgatgttaacataggctcattaacattggtttttaaaaaactgatgttaacatagaatcgttaacttcggttttgacaaaactgatgttacctacgtcatgttaacatcagttttcacaaaaccgatgttaataaactggtgttaattacaagtatgccaccgcgtttgtgttaacatcggttttgtcgaaaaccgatgttaacctagcgatgttaaatgtatattttttagtagtgatagatagttaaatagatatatcaatagagtggacatatcatataagagataagtatcttatatgagagtgagagaattatacctagaccgtataatcaaacatagacggtaaggatttaatgttgtgtgaccacttaaagagtcatgtgagtntctaataaactcgtgtg

SEQ ID NO: 223518 - DNA, 402 bp, Glycine max
  unsure (1)..(402): unsure at all n locations
tctcatatacatacgaatncttctgcattaataaatgctgggtgcacttcccaactaatatcaaaatctccccacaatgtttggcacaaaaccttatctacttgttcctttttaggttcttgtacgcacaacatttcgattccttcttttcttattaaattatcttaatgctgcccacttgaccctcttccccaatcttctaatattatatgataatatctgctgaatatcttttgggtctctgaataaatttggatgcatcattactaaatatcttttccttgttttagaagtcagcagacataggctagactacgctgtcacatagactaagctangctattcctttcccctttctctctcttaatgcttgtactctattaattgtaagcctgaacatga

SEQ ID NO: 223519 - DNA, 349 bp, Glycine max
  unsure (1)..(349): unsure at all n locations
tatgtgcctgcctagatcatttctttctttactgaaataatttgtgtcttgngccgaaaagtgtgctgcaacaaactctgaatttggtgatcataacatacccaataatctattttgaaaccaggaaaaaccgagtccatggatccaaattcaacaattattggtcctgaagataggcatggactccatgcaattgacattttggaccctgacttggtatgcttgttctaaactgagttcgttgaattgcaatgcatatagccaaacaatttattcatgaattctgtataattcttttgagcagatgtttggaagcgattctgcgtattattccatgacatgatcggtg

SEQ ID NO: 223520 - DNA, 308 bp, Glycine max
  unsure (1)..(308): unsure at all n locations
tcggatgatgccgatcgaacattttcttatcttcttcatccaantggtattcagggattgaatagaataaacaatggccggtgtcggtcgttatatggccccgactgatatttttcagccgacattgggcaattttttttataaaaaaaaacgctcgcttgccggttaatgtttttcttttgggaggggaagttttcttgtatggggttgcataaaaaatttacaatgttggtcggctaggtgttttctggcgagctcaaccgtatgtttgtttccgccagaactggcatgttcccatttattccggc

SEQ ID NO: 223521 - DNA, 389 bp, Glycine max
catgccaagctgaagggtaactagatgccttggtgtatctggtaacccaactggccatgaataaaaaatctgcacctgtcgccagactctgagggttatgctcctctatcgaccaccacacagacctttgcccttctgtgcaacaatctgaagcaattgaacagcctgaagcttatgctgtaaacatctacaacagacctcctcaacctcagtagcaaaatcagccacaacaaaacaattatgacctctccagccacaggtaaaatcccgggtggaggaatcatcccaaccttatatggtcgaatccttcacaatagcagcaacaacaaccttattttaaaatgctgctgcccaagtagacatacatttcttcaccaatccacagaaca

SEQ ID NO: 223522 - DNA, 314 bp, Glycine max
  unsure (1)..(314): unsure at all n locations
tanacgactntgtttgagttaagaatactctattatccatctggacaagttcgaatacgatgtacaagaaaatgaatgtgatcctttttccccttcgaaaggtttaaaaaaaaatgtttgtaaaatacttttaattaatatttgaattgtatttttccttattagcatatatgtgaggggtagagggtgtcacacgtaccgttgtttttttggaaaaaaaaagatgcatggttagctcgcttgtgcgagcacccctgcacctgaaatcataaaaacgaggggaggcttgagttttcttcacccaaaactcccct

SEQ ID NO: 223523 - DNA, 357 bp, Glycine max
  unsure (1)..(357): unsure at all n locations
ttggacgcctttcgagacctcacccagagtggaagctacgcattgggagcttctgccctagtgcatatgtatgacaaattgaatgatgcgtctaagcgcaacggttgacaacttgccggatatatcacactattacagggaattataatcgaatttaaatttatttgttctttgatgttgactattgtactggattaattcttttatgtttgaacatatgtgtagggttggaancatgagtatnttccatctattggtaggcattaccactggttttccacataatttaaacggacacttacatttcctactggcagtatctcttcttacaaatatttctttcttcttacttacact

SEQ ID NO: 223524 - DNA, 470 bp, Glycine max
  unsure (1)..(470): unsure at all n locations
tccttggggccattttctgcgaaacaaacattggaagtttttttacaagatgatgctcatnttaccacaaaaatgacatgctaatccctccggtttagaacgaactcatgcgcacatttaaagtaacacatttatgcacatgcgtacgtgtaaaaatatcctactatttatgtcaacatacaaagacacccaacacattctaattgccatacatctatgtgcatcttgaaaagaacacacattctcatgctcaaggtgttgcgtcaaactttacacctaattatatcctaaatcttttctatttacaaactacttacacatatttgaaatatatatcatacaaattttatttgttcactcacatttatttatatgcatagttgaaaactaattatatcctgcacacacacttgcatctaaaagggaattccacgctatcatatgtctatctaagaagaatatncctcaca

SEQ ID NO: 223525 - DNA, 303 bp, Glycine max
  unsure (1)..(303): unsure at all n locations
agctnaggagctgaggagctgtcttgtttctaaagccttaagacgaaatggagtctttacaatctaacacgaccgtgcactaacttgactcgtctcctggtacgctaaccacttggtttgaaatgaaccttgcacaagaaactataacctgaaggaactgtggatcaatacaaggctctccttgaagacaagggctttatgcacaggagagaatgaggattacttctatcacctgtcacccggtaatagaataacatctattcgggagctaataactcttgtttctatatccaatcaacatta

SEQ ID NO: 223526 - DNA, 438 bp, Glycine max
gtaattgataacataaatgacccatgaccagccttggtgatattttcaagccatgtcatttaggggtagtgtcgcttctgaaattttaaccaaaaatggccaaagtatgtttaaaccaaaaatggttaatactatcccaatcccctagatagacgcgttaaccttccttggattctatgtaatcaaaatggaccttgcacaaagtccactcttacaaagctaaattacattggcactcagcgtatatagtaattctttcaagatgcaattatagctcagatagttgtcatatttgtgccaagctatgctaaacaaaacacatacacctattgattatatctatgttgctcgagatcaagacttataattatacaactcctaaattaaattcataccctcacaacagtaatatacagtgtgaactcacactatctattc

SEQ ID NO: 223527 - DNA, 369 bp, Glycine max
atcgttttggtctgaaaagaggcaaatttaatcatcctgcttgaacgaatgagaaaactggggcaaaatgaagagggttagaatgaaagagaaacccatgctgcgattgtcattcctacatggccaaacttcccaccatcccaacaatgtcattactcagccaataacaacccttctccttacccaccacccagttatccacaaaggccatccctaaatcaaccacaaaacccacctaccacacaaccaatgctaaacaccacctttaacatgaaccaaacaccaaccaaggaacgatatttccagcaaaatagcctatagaattccccccacattcagtgtcatatgcttacttgctcccatatctac

SEQ ID NO: 223528 - DNA, 415 bp, Glycine max
actcaagcttaacactcactttcatagagtatggctgaatgtatatcaatatgagaaaacttacttctgaattaggcagtatattgtgatcacaaatagaccctgatgccttttttccattttaaccatgagccatcctactttgtatcatgtatgtaacatccttattaatttttgcctcattttgcagtatggaatccaaatatgtaaacttcaaaacccgtgggatgatatctctcccatttttatttccacgtcatattcctcatctttttataaaactattatgcatatttgtcttgttcctatgtaagcgacaaccttttcaaagtattgcgccttaactgcttccctgattccttaatcataactatatcatcagcgaaatgcgtgcaatcacacattcaaattcaaa

SEQ ID NO: 223529 - DNA, 437 bp, Glycine max
  unsure (1)..(437): unsure at all n locations
cagcttcatatggagccatgccaatggtatagtgaaattctattgtataagcgacctctatcaacgatagaaaactctcccaacttctctattgctctaaaacacacgccctcnaaaagtcctccagcgactacatggtccattcaatntggccatcagtctgaggatggtaggctaaacttagtctaagctcggtccacaacgctctgttcacgctcccccaaaatctagaggtaaacctaggatctctatcagacactatgctagatggcacaccatgtaatctgacaatctcactaatatacagggaggtcaacttttccaaggaaaatgtgatataatgggaataagtgagcaactacgtagtctataaaatacccaatagaatcacaccttgggggcctatgtagtctacacataatcgcgaatactgccca

SEQ ID NO: 223530 - DNA, 365 bp, Glycine max
catcacatttaaacttgaaccattatcgatgagtaccttatcggcgacatggtccatgcatctgacaaacacatgtagagctttgttgtgccctctcccctcaactggaatcttctccttcacgaacgcgaggtagttattggaagttatgtgattaataatgcccttaaagccctcgacggagatgtcatgtgctacatgggcttctgtgaggaccttgactaatagtgcacgatgaggctcggagctcatgagcagttcgagcaaggagatccttgctggagtttattcaattgctcaaccactttaaactcactttgttggatgagacaaaggaactcgtgagcctcctccaaggtcaccgc

SEQ ID NO: 223531 - DNA, 406 bp, Glycine max
agcttctaaggaggtgagcttagatattataggggtgtgtgtaactaagctctagcttctcaaggaagttctctcaaagaagcttctcaaggaagttttctcaagaaagcttctcaaggaagctacctagtctataaataaaaacatgtgtaacacttgttgtaactttgatgaatgagagtcttgtgagacatacttcaaagttccacttctctccctcttttattccttcaatttcgtgctcccccctttctctttctctccctctttcttttcctccaataaagcatcctcttcaagcttcttatccaaggtaattctttggggtgaagctcctttttgcttggcttattcctaatggatggtgcctcctctctcctcttctcctttgccttctgctgcatct

SEQ ID NO: 223532 - DNA, 432 bp, Glycine max
  unsure (1)..(432): unsure at all n locations
ntcccaacatcaaagcanaacaacattctaacagcacaagctatcacagccaagcaaaacagagcaaaggcagaaaactttgccaaaacaccaaccaaaaccacagcttttctcacttaaagaccccagtaacaattccttcgatccaattcattaaccgttggatcgactccaaaattttactggaagtctatagtacataagcctacattttgaccgttgggatctactagcaaacatccagaactcattctgtactactctttccacagccaaccacacacaagcatttttctgcacaaagccaaaatcctgctgcatctattntgacagcaaaattctgcataagtgcagaattcgaaaatcacactttctctcatccaatcttgcccaaatcaattcctacaaggcccaaatcatgtatcaatcatg

SEQ ID NO: 223533 - DNA, 441 bp, Glycine max
  unsure (1)..(441): unsure at all n locations
cagccttaatgtgttctcccctgtagaactattaactgcagnaacagttgcagcccaactatccggtagtgatgacaatagaatcaatgccttcacctcatcctcaaatttaatctgcactgattccaactgggcaagaatagtattaaattcattaatatgatcaggtacggagataccttctcccatcttgaggttgaaaaatcggcgcatcaagtatactttgttggctgccgacggcttctcgtacatatctgataacgccttcattaagcctgtagtagtcttctcgttcacgatggtgaacgcgacgttcttggctaatgtcaatctgatcacgctaagagcctgtcgatctagcaagatccattcttcntgctttatgtgctttggcctaacccctgataaggctgatacaactttttgaatagataacctcta

SEQ ID NO: 223534 - DNA, 402 bp, Glycine max
tcttggccaaaggaagaagaagaagaagttctaacattactctacaacaatgtggaaaaattgcttgtgttaagaatgaatcggaaaagatagatgtatacaaaaaattaaaaataaatgcaaaccacagccttgcttttatatactcttcatgtctggtcaagacaaccatttaaaagagttataacttttagaaaaacttaaaaccaatttgaaaaagtgaaaaaccttttgaagagttacatcttttgatttattcacaaacaaacactggtaatcgattaccaaattactgtaatcgattacacaaagcttttatgtaaaaggaggtgactctctccatttgaatttgaatttcaacggtcaaagacactggtgatccattaccccaacattgtaatc

SEQ ID NO: 223535 - DNA, 326 bp, Glycine max
  unsure (1)..(326): unsure at all n locations
cacgcagagcaacagaaaacagaacaacaacatttttgtcagcancgaccaacaaatcaaaccaaaatatgcacccgcggcaccaaataagtcagatcggtcttcaatccctatacaaaccaccatgcatgctgcaaacatatttcctcacaacctaaaacacattgcaggaaaggtattcctctttaagcccacccaaacccantaatacaatgcatatggggaagcacactggggatcatgtcccataaatacaaaaccaaccactggcttctcgatctccctaagaaaatcctcggttcttaggaagccaaaagacaaaagac

SEQ ID NO: 223536 - DNA, 372 bp, Glycine max
tggatctcttcccaccactcacaaaccacattggaggtgggaatttgggtggcaagttgcatctggaaaaactttggtgatgaagaataattgcattcatttcaaatcatggactaacaccgaaaactaaacccagtcaaaatattacaattataaagatcaaaataatatttccactatagcacctaaaaagaaaaaaaaaaaaagtcacaattatacctaccaaggtaattaaatcgtatatgtacaacgcatctaaaaaaaaatacatacatttgcttacctcaaatatcatttatcacatctattgttgctgaacctttttttataatattattactccactcccctgagtttaatttaatacattca

SEQ ID NO: 223537 - DNA, 441 bp, Glycine max
  unsure (1)..(441): unsure at all n locations
acacatagaaactcaagcttnnttcgttttatttgaggacatcagctttattttcttacatatataccagcaatccgatatattgcatacccaatcgaaatactgaaaactaaataccgctgcgacgatatttttgttgttgagagatgagagaaatctcttgaattctgttcgggtactttagatggtttctaataaaatataccttatttatatttcttttgttctaatttggctcatttttatgtcctggcatattcttttatttcaaggaagtattttctttaaacgttttatatcatgcaataaaaaaaacttatagattattcaggatccattcttcacaatcgataattattaatatcactctcacctctcaaatataattaaatctgtttaataatgggaaaccaaaacttcattttatcactactgctttat

SEQ ID NO: 223538 - DNA, 459 bp, Glycine max
  unsure (1)..(459): unsure at all n locations
agctntgagccaaaatcttgactcaccatatattttgacccanggtgagaatgccaatccttaccctcggaagcaaaaaaaagaagagaaggaaaatttccaatcaaaggaaaaaggagaaggaaaatttccaatcaaagaggaagcaaaaaaggagagaaggaaaatttccaatcaaaggaaaaaagagaggaaaggaaattcccaatcaaagagtgggagaaagcaaaaagaaaagaaagaaaattcccaatcaaagaatgggagaaagaaaaaagagaagtaaaaaagaagaaagttcctgatcaaagaaactagaagaaatgtgcagaaaggtcttttgaccagacgatatctgaacaatacagaattgtcaccaaatgaacaaaagaaagaaaaggaaaccatgacctanaagtggtcttctctcttttattaccaaccaaaatcatgtgcgct

SEQ ID NO: 223539 - DNA, 490 bp, Glycine max
  unsure (1)..(490): unsure at all n locations
actcagcttctaaggaagctacctagtctataaatagaagcatgtgtatcacttgttgtaacttcgatgaatgagagtcttgtgagacacaactcanagttcaacttctctcccttttgcttccttcaattttgtgctcccccctctctctttctctctgatgtaccattattttctcctatttcttaaccctttttttcaccattttaagtactgattagtcttaattgtcaaattaattaggcagtcttattatttgggccaattcagctaatttgatgtttttaatctaatttcaagaattaatgaagcattgggcttgaatccagaattggatttggacttgaagagggcagactattttattctacaaaattagatcttatcttatcttatcttatcttatctagatattatntagatttgatctcatctagatattatttcatctagatcttatcttatcttgatttgagtttattttatttat

SEQ ID NO: 223540 - DNA, 464 bp, Glycine max
  unsure (1)..(464): unsure at all n locations
gtcacctgcggcatgcagcttctcccttatttctataatagggggagaggttgaatggaaaaatgtttanccctcctggtaattcgagaatcacttgaaattagtgaaaaaaatggttttgtgaagaaaatccaagccgaggcgcttccgtgggtgatttcgtgaagattttcaagctttcttcgacgtttttcattcgttcttcatcgttcttcggtcttcaaccggtaagttcccgaaattgaacttttcaattcattctatgtacccttagtggtcctcatttgtgtcgcgtacttttattttcattccatttactttccgtaacctcttttgacgtactttagtcatttacttatgtcattttctcgactaatcaaagaataaaataaattttcaccgatcatttgaattgaatatccgtaattcctgttanatgatatccgactgttcggcatgtcata

SEQ ID NO: 223541 - DNA, 484 bp, Glycine max
  unsure (1)..(484): unsure at all n locations
tgtagaatggctagacatgatacatgtcagggtttggtttggttcaaggataaaagggatgccccacattatttccatgacacaaatgcaaaaatgatgatttggaaactttatgcaaaactggtcatgcatgcacctatgcggacactcaagtgtcaaatttttatggtcatgtgatgctagggctcangattcatttcctctattttagtcaacccaacgtttccaaaatatgttcttttatcaatttgtgcattcatccgagtccatttcgggcgtctggggaaatttcacagcattcacccttcaggtgtagacacattttccaaaaattggttatgatcaatgaattttttcaaagaaaangtggaagtcatctctttccaaaagcatgtcgntntttagctagacaacattaatttttcttttttccncccttctttttttttcatgagggtatttgctacctaaacatgtgtatatt

SEQ ID NO: 223542 - DNA, 338 bp, Glycine max
  unsure (1)..(338): unsure at all n locations
acagtgaacaatactggcaaccttgatatgctagcggaaacttggtggttgccattcgccaacaactacacataatcttgtggttgagacgaactaatataaactctctgtatgctttcttgtttaaatgacaacgggttgaattcgtttctaaatcttttaaagaaactattantctcattgcctgatattttatattcattagacgataaacatgttttatagtctaaagagaggttttatacttattaaaaacacaatccaacccctcttcttgtgaatttcctctacaacattcttttgctaggcaattgtcgaatgcccagtatccaagtttt

SEQ ID NO: 223543 - DNA, 465 bp, Glycine max
ctgagaagaactctactgcttttctctcatagccatacatggtatatgatattataacggagtttcaacatgataatcatgttgttgtgggtgatgtcctgaacacttgaatactcttacaatagctccacacttgcaggacatgtcatataacgctgagagaacaatgacattcaactcaaaatgacccattcttacataatcatgaacccattccccatgttgaagtgctccttatagagcacaagcacttaacagactcaccattgtaaattcacttggttgaaccctttgtctctgatctgcgggaaaagctcaaatgcctccctgagcctcttattttaatatatccactcatcatataactccacagtactttaggtcttgattggatgttatgacacaccctcctatatatacaaccttctcaacttatcaagcccatgatcaattattgctagcacc

SEQ ID NO: 223544 - DNA, 437 bp, Glycine max
  unsure (1)..(437): unsure at all n locations
agcttgaagaagagcttgaagaaagtttgtcttttacatgcccaactntcttgagtggcatttgtattgaatgttgtattatgagttgcatcttactctctatcattccatgtgtgcattatgtatcatcatgtagaagtaagaagaaaggttctaaagttagataatttcttctatgtttaaaactctttattttaatcgattacaggctaattgtaattgattactcaagtgttagtagcttgcagagaagtctctcatatcagtttaatcgattacaagcttatcgtcatcgattacatggttcttntttagagtgtgtgatttttcacgagtctctacttcaatcgattactagtagatataatcaattacttctctcttaaaagctgtgtagaagtgatcaagaacactttaattgattacctcacgaatct

SEQ ID NO: 223545 - DNA, 488 bp, Glycine max
  unsure (1)..(488): unsure at all n locations
tgccaacccatggaagctcctaatatctcccacactntntgttgtgggccattcttggatggccttgattttctcaaggtccacttggaccccatttctaccaactacaaaccctaagaaaactatattatctacacaaaaagtacacttctctatatttgcatagagggtgcttttcctaaggactgaaagaacttgcctgagatgtcctaagtgatcatctaggctcctactgtacactaaaatatcatcaaaatatacaactacaaatctacctatgaaatcccttaagacatgatgcataagcctcataaaggtgcttggtgcattagtgagcccaaaaggcatcactagccattcatacaaaccaaacttggtcttgaaagcggttttccactcatcaccctctatcatactgatttggtgatactccactttaagatcaatctttgaatagattattgcaccatgcaactcatcaagcaaat

SEQ ID NO: 223546 - DNA, 433 bp, Glycine max
  unsure (1)..(433): unsure at all n locations
agcttctatactttatacaagaatgaagtctctgataccacttgttagacaagtggcctcagatatcttaagaagggggggtgaattaagatattacaggctatttccccaattaaaattctactttgattttaatgcaagttccaagttcccttaaagatagatttctaaaagatgagtcaaaataactaatctgaatgtaaatgtaaagcaacaataaataaaagagtttaagggaagagaaagtgcanactcagttttatactagttcggccttacccttgtgcctacgtccagtccccaagcaacccgcttgagattttactatcttgtaaaaaccctttacaagttctgaaccacacaaggacagtcctttctttgtgtcagatagcttaaacaagagacctcggctctaatcctttcaaagaaaaga

SEQ ID NO: 223547 - DNA, 470 bp, Glycine max
  unsure (1)..(470): unsure at all n locations
agcttgcacttnctgtgttctgagaacctctccttcctcaagtgtacccaaacccaatcacctagttcaagcacgactttctttctgcttttgttggcttgccttgcatagctcgcatttntcttttcaatntgagccttcatttgctcatgcagcttcttctcatacttagctttagcctgtgcgtccttatgcttaaacatagcaatgttaggcataggcaacaaatcaagaggagtcaaaggattaaatccatacattatctcanatggtgaacaattagttgtgctatggacaacccgattataagcaaactcaacatgagacaaacatgcttcccaagatttaagaattttctttaaaacagtcctaagcagtgtgcctaaagtcctattgactacctcagtttgaccatcagtttgtgggtgacaagtagtagaaaccaacaattttagtaccaatttacccca

SEQ ID NO: 223548 - DNA, 486 bp, Glycine max
  unsure (1)..(486): unsure at all n locations
actcagcttataccacagaagtaagganaacattatgttatatgtttcttattatttggtggtaatttttaccatcagctgtattttggtcaaacagaagttgttgaagaagtttacgtggattctgtaacaatggaaattcaactttaccatctccacgacataagttgaaccttgggcttgaactatttttacattntgatattctctcattataccacatatttacattacagtgactacattgcatgagctggtcaccaagatcaaaatactcttaaatggttaaattagatatgagaacatgatggtaaccaatgaatattttgataggaacatgtaaattataccatgacagataaaggtgtattttggattgactatttcaatcttaattctacactaaaggaagtggatcaaacatttaccttctcgtgttagtgtagagtcattaggtgagaattgacaatttcatatccactaaag

SEQ ID NO: 223549 - DNA, 414 bp, Glycine max
  unsure (1)..(414): unsure at all n locations
agctntataagcgcgggtctgggagacaaaggtcaagtgttcgcgatatgcgaagatgatgttccgagtacattggatctggtacgaccatgccctcctgatttccagctgggaaattggcgagtggaggaacaccccggcatttacgcaacgagcataatgtaaacctttacgtttttaaaagctctatagttgggcctaggctttagagtttttttccttttgttaaggctttgtgtcttttgttgttgattntataatacaaggatctttcttcatctgttcctacgtctctacccattctcattcatttgcatgtttacttctttttctgaaacgacagatccgatgacgagtcccccgaaggtactaatacctggggcccgcctatcgacttcgagcaagaaatgaatc

SEQ ID NO: 223550 - DNA, 473 bp, Glycine max
  unsure (1)..(473): unsure at all n locations
tanagtaatcttatagtttactactttagaagctactcataaaagctacaaaatctattaattgacaatntgtatttttttcttttcttgcttagaataggtgttgcttatgaataatgaaacaattttataaaacctatttatcaaagattaagattaagattttcaaaataaggttccttctaaaacaaattttaagcacacaacaacaaataagaagaaataagagaggaaattacacaccaaggatttatattagtacatcctactcaggctatgtccagtatctacacatgtaggtttcccactaagatagagcactctgtgatattctntgtttttttaagcctccacaagctcctataaccagtattgtctaagcttatataggcttcacccaagtattaatttgaaaggcctctccatgcttcacctcagtattctctaggcctctaaaagtactcacccaagtt

SEQ ID NO: 223551 - DNA, 440 bp, Glycine max
  unsure (1)..(440): unsure at all n locations
agctgggtgaattcttgttcatgaagacatcctatattatatataaattaaaaaaaaacatgagcttgctaccaccatgtatagtatatcttagtatgcaacaaagatgtatatactaaaaacaacattnttcagagcatgtccaagtccaagtttgagtgattgaagacacattcttctagaagccatatctcacaaggaagatatttgaacacacatagntttgtcactttntagatatttgatgaacacatattnttcagccatatttcattcctgcattcttcataagtatcattggtttgaattaactctccgatctctcctccttttgttttttcctttcaaaatcatgcattgatattagataggcaggttgtaaaatagcagtgtaacaaanattaaaaatttctcttttctatgtacccataaaaaaccaa

SEQ ID NO: 223552 - DNA, 449 bp, Glycine max
  unsure (1)..(449): unsure at all n locations
taacaagttcttcttatagtatgagcatgaccttnttatctaaaatatgctctttaaaaagcttggacttactcttatagaaacaagccgagccgagtctagccttacataggccgagccaaaggcccttgacaagctgttcggctcatttccacccctaaccatggggatggtgagaaaaaataaattttacaccctagatgggatatatatgttggaaatctgatgttgagatatctaattctgagaatttggcgttgatttgatgatatgaatggatataaatgaaatttaatggttgggaatgtcttatgcatgtctgaattcgttgtggtgatgttcatatagtgtgagatggcattaaatctgagaaaatctcgcgggtttatgtgaaatttgtattcncagcttctttgaataattttagtccattagtattgtctataatc

SEQ ID NO: 223553 - DNA, 370 bp, Glycine max
agcttggcgcgtcaacttacatgaggtattctataggaacctcatgttgtaaaagtgatgcaagccagaatgcatagctccatccccaaatggactgtccctgatttcaagcttctgcagattaggacatccttgtagaacatattggagtccaaggtcagtgtctccagcaaaggcaactgacagcgtcctaatcaacttcccatacgtcccaatgtaactaaaagcccggtcagtcagcaaaccatacacagcaagccgagtgagcttcttgcagttcataacaatggcaccaacaccctcattcatgtggtctagtgtcacagggtccggccgatactgcccaattatacacaaccgatacaccaca

SEQ ID NO: 223554 - DNA, 252 bp, Glycine max
  unsure (1)..(252): unsure at all n locations
gacctataaaaactcaacctattaaattcgatgacaattatctctaacgtccgcttgttttctacatacgcacaactatgggttatctcacacccaatatcaatccataaaccgcctacaaaattgacacataccacaaaaaattgatggtgaatgccttgacctttcttatcaaaccgtaccatcgagctgaattttccatataacacacaaaactganctaaatccaattgaagcactaatatacctaaa

SEQ ID NO: 223555 - DNA, 228 bp, Glycine max
  unsure (1)..(228): unsure at all n locations
ttctaaactatatacatgaatgatactcttataccacttgntagacaagtgacctcatatatcttaagaaaggngggggggggggtctaaataaaatatcacaaactctttcctaactaaaaaattctatcttaatttaacccaaattccanaactcctttcataattaataactaattaattattccaattaatattattcactacaattaatattcaatactaaat

SEQ ID NO: 223556 - DNA, 459 bp, Glycine max
  unsure (1)..(459): unsure at all n locations
cgctggtggagcttctatggaggctggatctttgagttntaatcagggcttttaatggtgattntccactatgaagatgcagcggaagacaaaggagaagaggtaagaggcggcgtcatccactagggaataagccatggaagaaagagcttcatcaccaagatgagtcttggataagaagcttggagaggatgcttcaatggaggaaaagaaagagggagagaaagagagagagggaaacacgaaattaaagaaaggaaaagggagagaagttgaactttgagttgtgtctcacaagactctcattcatcaaagttacaacaagtgttacacatgcttctatttatagactaggtagcttccttgagaagctctcttaagacaacttccttgagaagcttctttgagaaaactctcttgagaagctagagcttagctacacacacccatctaaaacta

SEQ ID NO: 223557 - DNA, 471 bp, Glycine max
  unsure (1)..(471): unsure at all n locations
agcttataagttaacttaatttttataaactgcttaaagtaaattatcaaaatgaggtactcaaatacgaaagttgtataccaaacaaacttatttttctcaaaaaaaaaaaacttataaactaataaaaaaagacttataagctcatcttacctaccataataacctaaaattgtatcatctctaatatagcaatctaaccgatacttttaaacccttaccccacctttttttgcattataaatcttagtacacacaagtttatactatttacccattccagtggaaattaattttcttgaagaacatcacacaaataagaaatttcacacatcacaattcatattaagatcttaagataaccgaataactattgtggcttaaccccaaataattgaagtaaactntaaagaagatctccatcacctaatgcanaaatatatccacacncttcattnggatatcacattc

SEQ ID NO: 223558 - DNA, 461 bp, Glycine max
  unsure (1)..(461): unsure at all n locations
ntggagcctgaagaagttgtctctatacatgcccaactctttgagtggcattngtattgattgctgcatcttagtctctatcttttcatttgtacatcatgcatcatcatgtataggcagaaagattgtttctagttagaaacttcttcaatgcataaaactctttgttttaatcgattgcaaagttgatagtaatcaattgcacaagtgtttgtagcttgcagagagattctagcttcagtttaatcaattactagttaaccataatcgattagatagttcagtttagactgtgtctggtttttcatgagtctctgctttaatcgattactaggtgatcataatcgattactctgttcttaaaggtgttcctagaagtgatcaataacactttaatcaattgcatcaagaatctaattgattacgttattcttgaaagtttccacatgttgggaagaaca

SEQ ID NO: 223559 - DNA, 463 bp, Glycine max
  unsure (1)..(463): unsure at all n locations
gctgggaagcttgcttccacacatgcgtgtgggcattatctctatctctccaagncgccgacacatggaaaaaggcattaaattgatactagctcccaagtctatgaaagctttgcctacagcaacctcaccaatagaacacgatatcgtgacaactccaagatctttgtgcttgggtggaagaatgcattgaatcacaacactacagttaccttccacnaacaatttgtcactatggatgtaccgattcttcttggttaacatatccttcaaaaattttgcatagaggggcatttgttgaagtgcttctccaaatggcaaagtaatttccagtttcttgaagatatcaagaaatctagccaaatgtcactctntatcttttcgggagagtgccaatggataaggtgtctccttgcattcagtaggagtagcctctntattcttttctantttagcctcactc

SEQ ID NO: 223560 - DNA, 493 bp, Glycine max
tcatgatgaatcaagatagattcaaggagttttgatgataacaaagatgatgacaaaaacctcaaaagtcaagaacacttcatgttaacaaagatgatgacttcaagaatcaaagaatgagttcaagattgaatcaagaacacttcaaggttcaaaggaaatttgatttcaagaatcaagaatcaagtttcaagattcaggttcctagaatcaagatcaatattcaagactcaagattcaagaatcaagagaagactcaatcaagataagtattaaaaagttttttcaaaaactgagtagcacatgaatttttctcacaaccttttaccaaagagtttttaccctctggtaatcgattaccagattattgtaatcgattacgagtagcaaaattgttttcaaaaagctttcaactaaatttacaacgttccaattgatttcaaaatgttgtaatcgattacaatgatttggtaatcgattaccagtgtgtttg

SEQ ID NO: 223561 - DNA, 485 bp, Glycine max
  unsure (1)..(485): unsure at all n locations
agctntgccatttggggagagggctaagctgtctattaatccaatgggaaagaggttgtttgagataatggctgagaaggagagtaatctatgtttggctgctgatgttggaactgcagctgaattgcttgaaattgctgagaaggtagttctgatatcttttttaggaacaagtgctattttgttcacttggatcatcagcttgcaatgtattttcctacgtagaactttaattttgttttcttgcttatatacatgaaagaatcctgttttctttggcttattactatgcagtggattctaattagaatatcggncatgatcatatattctcttttaactaatttgaactgttttctctttcaggttggacctgagatatgctngctgaagactcatgtggatatctctccagattttactggctgatttggctctaagcttctctcggtatagggctaaaagaagctctcttttgctatatg

SEQ ID NO: 223562 - DNA, 475 bp, Glycine max
  unsure (1)..(475): unsure at all n locations
ngaactctcatgaagggatggggcctgattcgtcaaactntcaatttttacatcgactacaaaactcgcagcctcataaagacataattcatgactgactttctaacagaattcactggaaacgacacaaccatcccagactagtggaacctttacattgatggtgtgtccaacgtaaaaggaaacggngcaggaatcattctcgaacgccctaacaatgtcactctagagcaagccctcaagctcaatttcagagcctcaaacaactatgtagagtatgaggtgctcattgcaagtttgaagccatcaagagaagtcggagccaagaggttacgatgctacacaaacttgcagcttgtccaaggacaagttgctaacagataccaaactaaggaaacaatgttgctcacgtactatcacatcatgaagaccttcattgaacatattgaattgttcataatgtactacataccca

SEQ ID NO: 223563 - DNA, 420 bp, Glycine max
  unsure (1)..(420): unsure at all n locations
aactcaagcttagagcttgacaaaaaataacattttgagagggcgaagatattttctttttactaaggganatacactcgggttgtttaatatgaggaccgcaacacaatatacctagatattatcttaaaataaaccaataatataacttattaacacacttaaaacacaccaataatatacctagatattttaattaatatataatcagagcgatattagtattattagttaaatactccaatatttctatgataaaagcaaatgcactttgataatgaaaaattacctgtcttataaaatatgattgtgctatgagtctagcatactatgattaatatataaagtttttaattcataaatatcaaactggtcacataagttataacaattcagcgctcacgtgactaaggtacacca

SEQ ID NO: 223564 - DNA, 476 bp, Glycine max
  unsure (1)..(476): unsure at all n locations
ctcagagtcacctgcggcatgcaagctngttactnnggactctatacactacttcaactttttgtttttntnatccccacatcaactttcaaagtgcctgaattccgcaacagtaataccattaacacgtctctcttttgattcaggctttgtttgattgattgccccaatggccgcgtgtggctatatatctgctgccaacttcaatcatcttgttggcgccagaaacttatccaaattcagttcttcggatgccacaatttcgttatcatttggcgggagcgattcaatgggtcttagtttgcgacccgctccaattcgtgctcctaagaggaaccatttctctcccttgcgtgtcgtttgcgtcgattatcctcgaccggagctcgaaaacactgttaatttcgtcgaagctgcttacttgtcttccaccttccgtgcttctncgcgtccactataacccttgaacatcgtta

SEQ ID NO: 223565 - DNA, 484 bp, Glycine max
  unsure (1)..(484): unsure at all n locations
tccaaactccagaaacgaatgacataggatgcgttttaacagtctttatttacaagtttttatttatttatttactacaattgtctgcaagctactctcttcgtcccaaagttacttgttttaagttatttcatgaagatcatttaaaactaataaatagaagaaaaaaataattttacaaaattatccttattaaataaatgaaaaagaataatattaacatttatcagagatattaatgaaaaagaataattaatttatattaaaaaatcaaatgcaatatttgttttgggatgtgagtaaatagtattatgaagtanggagatgtgcgtaacataggtaagaagctaagggataaaaaactgttgctggtggagacatggtaggttaagtagaaattaaagttaaaattgaaatgagcgcagtctggtacaaaatgaatatgtcttgtgaagtttcaagagaacaggtcttacaccattcg

SEQ ID NO: 223566 - DNA, 297 bp, Glycine max
  unsure (1)..(297): unsure at all n locations
tccgagtcacctgaggcatgcaagcgtgacgatctgtcggtataattagcctgttctatttctctctcaangactntagaggatatttcctcgttgatatcttttgtttcgaatggcattgccatgacaggtttattgttactgtctttgacgttcgttactcgatattgtgctgcgggaggtaattccgattggattaactcaccatccttcacttgccacatttgtatgacatttgttgtcggatcacctatgatgtcccgtttccaagggtcatctatatcctttctgacggca

SEQ ID NO: 223567 - DNA, 419 bp, Glycine max
tgatcctcatggtgatctatctgctcttcttgttggacatcttcatctatgcctacaaacccacaaaacgtaaagaactagaacggtcatttgcatgtctctctataagctcaatccatgtcatgccaactttttctttatctgtgttcatgagaaaactgaaatctaagcataatcatgaatatcatgattgacgatactttcaacgtcataatttttgggattcaaatgccttgtttaaattctggaagttgagcttaattgttcatctaaattcgttgttaggattaaataaactattaaattttcatagcctagcatagctaatctaacaatcacacaatgtacaaggactatcgatgataaaataaaaggctatgtctaaatgcatgcgcaatattaaagacggacaactattc

SEQ ID NO: 223568 - DNA, 445 bp, Glycine max
  unsure (1)..(445): unsure at all n locations
agctntagtgcanacaacatctatgaatgttatatatatgtccaaatagagtataatattatgaatacactccaacacatgaccatggtagccacgacttaccaaacatcccatgagtgttcagaggaaacaatcattgatatcttagtggcaggattttccggccaattaaaaggatggtgggataattatctcactaatgatgaaaagtaaaaaatctacggctcagtcaaaacggatcgcaatggaaaagttattactaatgatgataataaggagattcctgacgctgttaatacacttatttntacaatagcctaacactttattggtgactcantcccttggaaagataggtccgcacaattattatcaaatcttaagtgtagaactntagcagaatttaggtggtatagagataccttcctaactagagtctacacca

SEQ ID NO: 223569 - DNA, 476 bp, Glycine max
  unsure (1)..(476): unsure at all n locations
ttctactataccagcctgtacagaagatattaaatgtttgtatattacaccaactgcaacanatttaactgtcatcctcgaccaaaaaataaaataaaacaaaactctagcttctctatgatgtcattccactaactcgggaagtaagttgtccttttacatctcgacctgttccagatttctcattgataaaagccacaaagtcatccaagtctcttccacctccgtactcttcaccagctttgttgccctttgggaagaacttcaaggtaagaaatccactcacatcatacctgcataaatattattctagcagacttcaattatttatcatgatggaatattccatctttatcctcttcgctggatattctgttatcttaaccaccgtactgacattagttatgtaatatcatttattagcagcattaacacattcatctgtgtcagtcctatattattctgacttgtgctat

SEQ ID NO: 223570 - DNA, 487 bp, Glycine max
  unsure (1)..(487): unsure at all n locations
agcttgatgtgagaaagcgtggaagagtcagtcttcctactnttattngntgaccacagagtggtacctggagatatgtcgcgggggtcaagagaccttggggacgtcaggtggggtgctattgcccaaaaccaagcttggccaatcccgacccaacccgggcatagtcagtcagtgagaacctgtgacgtacctaagcaggcgagctcctggcagtcaaccaatgaaagaacaaagtccacaaagcaaggaggcttgtgtggcggctggccanctatttatcttgggtgttatttgaaaaataccctctggtaatcgattaccattcatgggtaatcgattataggggttaaaaattgaaacaggacgttcaatagcttctggtaatcgattaccaatggggtgtaatcgattacgcagtattatatgctactggtaatcgattaccaatggggtgtaatcgactacacaagtgtatatgctactg

SEQ ID NO: 223571 - DNA, 463 bp, Glycine max
  unsure (1)..(463): unsure at all n locations
ngagggagaacttgatgccttggtccacctagtaactccgtttgccatgaatcagaaatttgcatctgcacctgtttcaagagcctgtggtctatgttcttctgcagatcaccatacagatctttgtccttctttgcagcaatctgaagcttatgctgcaaacatttataatagaccccctcagcatcaaaaccaacaacagcagaataattatgacctttcaagcaacagatacaatccaagttggaggaatcatccaaatctgatatggacaagtcctccacaacaacaacagcctgtccctcccttccagaatgttgctagtccaagaaatccatatgttcctccaatgcagcaacagcagcaacaacaacaaagacaacaagcaactgagcccnctcgccccttaaccttccttagaagagttagtgaggcaaatgaccatccagaatatgcaatttca

SEQ ID NO: 223572 - DNA, 466 bp, Glycine max
  unsure (1)..(466): unsure at all n locations
agctggttaatgtcgatgttgttgaaagcatgctaatgattgccatccaagaaatgaacagaaaggttccaagtttcctcaacaccttcacttccaaacaaagacacaattatactgagccacctgctcattntgttgttgttgttgttgtaattgttgcttgcaggacagggaaattgatgggctaaatgaacagctggaggaggattcacggtgtctagagcacttgcaactccagcttgtggatgaaaaaagcaaacgtgctagagtggaaagagaaaatgcaatgcttcaagaacaagtgaacatgcttatgaacatgttacaagaagcagaacaaatgggagatgaaggccctgatgaaccttanagttattattatacccagggtgtgtgcttggtgtgtattaaatctttntgtaggttntgttcgtcatgtctagttggctgcgcatgtcggatgtct

SEQ ID NO: 223573 - DNA, 441 bp, Glycine max
  unsure (1)..(441): unsure at all n locations
nnttgtagatgtccttgtcagtctttccagatngaatnncatcnattattaactgacaaatattgcaagnatttatggtttacaactntatacgatagcataaaggctgactgacttccagaaactactggtagacatggttgtttgttttactttaaagaaattctgagcagaaatggatgaaaaacatgcataaaactaggcaagaaacttcaaaatcttaaaatgtatgtattataaatttatggaaagcggttacttcacacacccataattcccctacaagcctngcatattctgtttaatctttcttagcttcacaaagacagaaattcatatcaatgataatgaagggtacagacaacaaaaggttttaatttaagccaacaaagctttacaaaccatgtatccaattaaaccactgatcagcattcagagatg

SEQ ID NO: 223574 - DNA, 472 bp, Glycine max
  unsure (1)..(472): unsure at all n locations
agcttcatgatgaatcaacaatgattcacaggtgtnttgatgataacaaggatgacaacaaaagatgatgacaaaggtgatgaacaaaaagctcaaaagatcaaagaacaactcaagtgaatcaagaacaagtcaagagttcaagaatcaagaagaattcaagactcaagaagaaagctacaatcaagaatcaagatctcaagaatcaagatcaagattcaagactcaagattcaagaatgaagaaaagactcaatcaagataagtattaaaaagttttttcaaaactttgaatagcacatgagtttttgacaaaacttttaccaaagaagttttactctctggtaatcgattaccatattgttgtaatcgattaccagtagcaaaatgagtttgaaagagttttcaaactgaatttacaacgttccacatattttcaaaaggctgtaatctattacaatggtgtggaatcg

SEQ ID NO: 223575 - DNA, 483 bp, Glycine max
  unsure (1)..(483): unsure at all n locations
ttctctgcgaggtactanggtactagctagctgcctataatttggctttttgttgccaatagttgtgtatgtattggccaggttcagttcccatttcaacttacctaacttgaaacttttcgtttatattggccttattttgtgctacaattataggatacaactactgataaattaattggtacaaggaaaacttcaagtgtgcgcggattctaatagttcccattgcccctcactgtttcggttcgaggtaagtttggtcattttgtgatttctagtttagtatagcatacatgttaaatgttgtctctgctttgtcactgtttgggtatgatatataagtgtctttgttgtctctcttaagttcccttttatgaaactgttgttgcaatacaccttacttgtattgcgtagctatgatagtgaaatttatatataatagacttaaaanattatattctaaaactatggagactatggatg

SEQ ID NO: 223576 - DNA, 403 bp, Glycine max
  unsure (1)..(403): unsure at all n locations
agcttgcccatggtcagcttagcgagtctctttttcttgagatgcaggggtttgagcgcttagcacatgctaaccttgcttagcgaaagaaggagatgcactcagcgtatgatatgtgcttagcgagtggactattttcatgacaatgtttctaagttattttcaatccacttttntaaaaaccatttaatccaaccccaaatatctatgactcattataagttgatatccccctttttcaatgattataaagcaaatttcaacgtatgcaatgcatganaaacaaaatgaaaggaatcaaaactgtggtgccttccaggaagcgctcttttaacgtcattaagcttgacgcatatacctcaatgggtgaataaatatatggtgttgtgagccttttaaaatc

SEQ ID NO: 223577 - DNA, 444 bp, Glycine max
  unsure (1)..(444): unsure at all n locations
tgccaccctggctcgcccagacgagctatgatgctttcttcttacgcaccgccttctggaaaacatcctgtaacgcccaagtgggtctggatgctatttgcacccncctatctactaaatacacccctttcgtaacgatacttgctttctttccgcaatggtacggaaccttacagatcacgtaatcatccctttcttggcttccgggatgttacggagcttacggattgcgcactaacacttccttttgacttccagcatgtcataaaacttcacgggttgtgcaacaatgctttctttcgactttcggcatgccacggaacttcacgaattgcctaacgatgggtgccaagtacctcgaagtagtcaaacgagggtcacatcccaaccacggatggtcctcggaccaaataaggtatgacacgtgcccctcttaattgtctt

SEQ ID NO: 223578 - DNA, 465 bp, Glycine max
  unsure (1)..(465): unsure at all n locations
tctaagcaccgcggctgcagcttttatccaggttcatcttggtggtgattcttcttcttccatggcttattccctagtggatggcgcgtcctctcacctcttctcctttgtattccgctgcatctccatggtggaaaattaccattaaatgacctcattgaaactcaaagatccagccttcatagaagccccacaagcaagcttccattaagtggtaattatagcacaagagcttcaagtaggtgctccttaaacctccattaattttttttctttaccttctcttccattggtggttcttcattnttctccatgtatctcctcacatgtctttttctaaatgttgttaacatgattctttagagtttccaccgattaaacttgctatagaaactagatttgattntctatggttcannattcttgttcttgttcttgaaccatgcaatgtgttgagtttacgtt

SEQ ID NO: 223579 - DNA, 263 bp, Glycine max
  unsure (1)..(263): unsure at all n locations
tctcaaggtggtctctggcatcacatcaagacgggaaccattgtttgtgtgctacctancgacgacatggtgcatgcattcgacagaacaaatatagagctttgttacgccctctcccctcaacgggaatctcttcttccaccaacgcgagatagtcattgggaggtctatgaataccaacttcctcgaaaccctcgactgacatgtcgaccgctcaccgggcttcgctgaagacctttaccaatagtgcacgaagaggctcg

SEQ ID NO: 223580 - DNA, 483 bp, Glycine max
  unsure (1)..(483): unsure at all n locations
cttaagtgacctgaggcatgcaagctttggctgcgcagcagctctgattcgttatttttatataagatgacgcattgnaatcgactacaggtattggtaatcgattacaggcccaataagccttctggtaatcgattacaggatgttgtaatcgattacaggctgtctgttcatgtgtaatcgattacactggatggtaatcgattaccagagcctatcctaggctagtttctaagagaatatctatatttatactcaaatacatcctatatgactaacttttactactaatatactaaattcaatcattcaattactatatacacaagagatcataaattctatcataaaagcaagaattcanacacgatcaaacaaaacaatctacaatcaaaagataaaaagtaaatcaaccaatcaatcaaccaatcaatcaaccaatcaattcctatttttctaaatctcttacatctaagagaccta

SEQ ID NO: 223581 - DNA, 472 bp, Glycine max
tctcaggaagttttctcaagaaagcttctaaggaagctatctattctattaatagaagcatgtgtaacacttggtgtaactttgatgaatgagagtcttgtgagacatacttcaaaggtccacttctatacctcttttattccttcaatttcgcgttccccccctctctctttctctccctctttcttttcctccattgaagcatcctctccaagcttcttatccaaggctcatcttggtggtgaagctccttcttccatggcttattccttaatggatggcgcctcctctcacctattttcctttgtctttcgctgcatctccatggtggaaaatcaccattaaaggacctcattgaagctcaaagatccagccttcatagaagccccacaagctagcttccatctggaagtaaatttaattgaattgggagaagcccaatacaacttaaatttaaagggggggtgagcat

SEQ ID NO: 223582 - DNA, 461 bp, Glycine max
  unsure (1)..(461): unsure at all n locations
agcttatcccgatacttgtaaaatattaaaacatgtttttgataagagaagtgattcctgttttataaaataagtcttgaatatttactttatttaataatttttttctataatataattttcataaatctagtcattgaatcatgaaatatcatgttagtgattatgcatgtcaagtttcatttaagttgacatttagaaatatataattttttaaatatcaattatttaatattttaaaagcatttataagttaaattaaagatggctagctatgacatgagtaataaggtggcatagaaaaaggaactgaatcttcagaatcccgccactgttggaggtcgcaaatntgataaacaatgattattgagatnttatacgacttctgtcactacaatgtcgtccaaggtagaatgacgttgtgagcagttcgtactcttttaaaagtcagtctgcttata

SEQ ID NO: 223583 - DNA, 468 bp, Glycine max
  unsure (1)..(468): unsure at all n locations
ctgtggttctcttgttctgtttgttgattgctgctgctgcaacttccatctctctcgntttgcttgctgcaactgcagtactctagtgggttctttcaaagtggcttctctgtttgctgcaactacaaagcttgtgggttctctgttcgttcctctcatctctgtgattctcttttattttcttataagagtgttttataacttcgttattctttgctctgcttctgttatcctacttgtcagattgctgcacttggactgttttgtacttatgattggtttatgtatgacttagttgctttacttatgattttgaatttaagttntgctctgattgtgtcgtgtccggtgtccgtgtcagtgtcggtgcttcatagcttctaacaacataaaacagtctctctttaaccatgatgagataatcgcaagaaatggttacattatgaattatgaatatttctttttatc

SEQ ID NO: 223584 - DNA, 476 bp, Glycine max
  unsure (1)..(476): unsure at all n locations
agcttaacagcctttagccgatcctcatgcatgtcttctgtcataagtggtacttcctgtagcataaacaagattaaaggcgttatattcttcaaaaattggtgaagtaatactgcatagtgacaatgccaaatggtgcctggatgctggaacaacctgtgtgtatgggacatgcatgctttgatgtgacttgagaagcatcatagaatcaacaataccagcagaacctctcctggtcaagtctgaagattttttttcattcaacagttccaaatcttcaggctttctgttaacattatttttttccagaacagcgtaaatcattagtagttgcactcagcattaacatagaattagacaccatttgtgctagaaaatacttgaaacattttcaaggatattatagtacanaattgtgacttgaggcacaatngtacaaatccattagtacttttaatagcagatatgtgtcatgc

SEQ ID NO: 223585 - DNA, 443 bp, Glycine max
  unsure (1)..(443): unsure at all n locations
ntnnttccttttataaaaagagaagttctaaaactcatcacgttgtctaaaaaggccttgaggtggatctaagtgctctgatcattcattagcatattcatgatttggtggcatgctcaccactgtttgtttctttaggaaactcaccataactaaaaaagcgcaaaggcacccctataatacccaatccaaaagtaagatggataacaaagagggagtgcaagaacagatgaaggccaacatgtcggctttaaaagatcagatggcttctaacacggaagccatgctaaaaattcaaaaatcaatagaagacaatgctacggcggccgcttccaatacagctagggaagcggaaccggtgctacagcccgcaatgaacttgggccaggacagaagcgtgacgggtttcaatcggaggtatagtcctcatgcctacccttatg

SEQ ID NO: 223586 - DNA, 358 bp, Glycine max
  unsure (1)..(358): unsure at all n locations
caagctttaatgatnttcatatccattatgggtggcatatgattngcaatatacacttgacgaaattacttattaatttttaagtggggatgtttgcataagatcctagcgagatatctagagcactcatgaatattgggcacacgcatggcctattagcacaacacaacaataatgtcaagaattgtgtgggtgactgtgattggtaaaatactaccacatgctaagtgtttttttaggttcaatagcttgctacacctactatactgtgtcatgtgttattatcaggcctaaccttggtcaatagcttgctacatcaagtctcatgcattatcacatattgacacaaaaactcttt

SEQ ID NO: 223587 - DNA, 485 bp, Glycine max
  unsure (1)..(485): unsure at all n locations
tccatcaagtggtaatcagagcacaagagcttcaagtaggtgctccttaaaccttcattaatnttttgctttaccttctcttccattgttgtttcttcatttttttctccatgtatctcctcacatgtcttgtgataaatgttgttaacatgattgtttagcgtttccaccgattaaacttgctatagaagctagatttgattttctatggttcanatttcttgttcttgttcttgaaccatgaattgtgttgagtttacgttcctttgagttttgtcttgttattttttgtggctgaaacctaaaccatagaattcttaaaaaaatattgaagtagaagaaaacctcaaaaatctagagtgacttgttcacctattgtagttntgtcatagaagtcatgtctagtcatgaaacttgtcacataagatttcttatgttgtgctcgaatttatctttcttgtttctttgtcttactcatttgttca

SEQ ID NO: 223588 - DNA, 455 bp, Glycine max
  unsure (1)..(455): unsure at all n locations
agcttattcaaatgatagatacattaatatactagcttcatngnngcactgatagggttgcggctaaattcaaattatcggtgactggcatcatgctaaatattgtcttactataaaaaaataaaaatgaaatacaaaatcttgcgcccattttgtgttggcctactagcgtataacgttggtgtcgagcatgatgcaatgcagaggatattattttagtcatcttgctcatngttagtgttggggaaaaaatgtggatcaagagcgtgaaaatctcanattctataaaatatgtaccttttttatgtcagtgacacctaatcttaccttgcaatttgtccccaaaagtggtctttatacatgtgagagtcactggttgatgtgtgcaaaatgctcaaattgacgtggctaaattgaaaatgcgtggatatgattgaacaggagtaactatgatt

SEQ ID NO: 223589 - DNA, 487 bp, Glycine max
  unsure (1)..(487): unsure at all n locations
ctcagcttccatttaattttaacgattaacatgataattctgtatataattatgacgcttctaatttcatctaagaatctattttggttccaataatcggtattctaagaaactcatataagtcacttaaaatataatccactaaatataaatagttaatataattgttattaaaatataagctcacattagattatatatagctgatgatcagacaagcataaagggggaaaacaaccaaatggatgtgggggaaaggttaaaaataagctcaataactgaagttgaaaagtattgcaccaatcacatntagaatgtataaacagaaattgtgtgcatgaattaaatcgatctgtgtcatatcctcagcatggagtggatgaacaaaatggtgcattgaatagattgatcatagtcatggtcagcatgggcatatctcggtgagagtaatggtgggtccgtgtgttgtctaccatgcgctgtgcac

SEQ ID NO: 223590 - DNA, 486 bp, Glycine max
  unsure (1)..(486): unsure at all n locations
agcttgtagagttatatcttggatcggtttattctattcagccttatcataatcaattacatagttgtttttgagacaatgacagatttattcaggagtctctactttaattgattaccatgtgatataatcgattacttctctttctgtaagtgattcagatgtgaacaaagacactntaatcgattactttgagtatctaatcgattacattgttcttgagttgtttccgggtgtttggaaaaacactttaaacgattaaaaagataatctaatcgattacttcattgaattagtcaattacttcttcaattatgcaaggttttgcggaaaggattgatcgggtggtatctatctntactcttgngtttcatgtatgggtttacactnntttttttgttnggcatgaatcgcttanggcatgctagaataggtgtttctagttggggctaagagtanggttctcttaggcctttattcacaaag

SEQ ID NO: 223591 - DNA, 481 bp, Glycine max
  unsure (1)..(481): unsure at all n locations
taatcaaccncatatccaaatgcataacatgttgatgattctttcattcaatcataaataagtaatcctaactatatgcagtgatgaataaaaattataaagggctggattgcctcccagtaagcgctcgtttaacgtcattttcttgacgcatcttacttcatggatctagatcaaatttggttccaacgtttagaaccatctccttccatacttcatttacctctgaacagacattctggctgagcaaatgcttgtcttcatcaaacaaatcaaagctgatcttctgattagctattcccatttccagctttttctttcccatatcaaccatgcaattggatgttagcatgaagtttcctcttcaatatccatcactacaaaatcaacaggtaaagaaaaatgcttcactctaactagaacatcttcaattactccatatggtttggtaatggaacgatctgctaactatagtgtcatt

SEQ ID NO: 223592 - DNA, 451 bp, Glycine max
agcttagtcatgagtccacttaaggttacctccttacatctttaactatatttctttttgtgttgcgggtccatgtaattcttttgttattcatgattctatttgcattcttttcaatataggaaaagaagtgttatcactatgtttaatgtagtttccttttatgctttattatagcctctgttttgtacagtttaatgatatttccaaggtttagatttcaatttacataatttacaaatttgtgcctttgttcatctgaaattctcttttagtgatttattcagaaatgaaatacattcaaactgaagaatctttagtttctgattatatctggacctctgctgtaacagttgatggatatcaatgaaagtccaatttatgttcttctcaatccttctatcaactaccatgttgtagaaaagtattggaggagtgatgttgtggatgt

SEQ ID NO: 223593 - DNA, 343 bp, Glycine max
  unsure (1)..(343): unsure at all n locations
aactcaagctgggagcacacaatccatatgctcaagcttgagggggagtgttatagttgccgnctacacatgtcttacatatctagcttgttgtagaagctcacataacctgtcctgcaatctgactccatacgctacgcctgcaatcttcatcatgaactattctgtcgactattcagttcattctctctccctctctctcttacacaccaccatatatacatgcctcagccaactaaggccgaggatcctttttgtgtgcatattttcatactcaaacatttctagtcgtacttcagcacataactctatatcattgttcggcgacaggggtccagttaaa

SEQ ID NO: 223594 - DNA, 475 bp, Glycine max
  unsure (1)..(475): unsure at all n locations
agctngagaggaagagcactagtggaaattgtctcttcattggtggcaacttggtaaattggatatgtaagaagcaaggtttgactgcattgtccactactaaagcctaatgcatatcaactacaagttgttgtgctctacttctttggataaagaactaggttgaagactacaccatctataatagtaaaaatttctatcttctgtgataataaagttgctaccaatctttcaaaaaacctaaattgcatttgaagaaaaaacatatagaaattaagcaacattttataagagaccatgttcagaaaagaacattaacattcaatttacagttggtaccgattgatgatcagcttgctgacatattcacaaaatcccttactgaagaaaggttgattttgttaagaagtcacattggaataaactctataaaagaataacttaatatctatatgtcgtccactgtcacttagcg

SEQ ID NO: 223595 - DNA, 474 bp, Glycine max
  unsure (1)..(474): unsure at all n locations
cgaaggcgtgtaatccaccgtcttctcatagtagaacactgtttatgtgttactatcatcgtatcatgtctctctccatcattaggggtgctacttgagcttccagatccttccacctttaggtgtattctttgaaagattcatgctccttcttacacatgttctataactgcattatatccggagccatatcagaattgtactgatactgcctatgaagccaactattangtccttccaagaatggacttgggaaggttccagattagtatacaaggtgacgactaccctagtaagactttcttggaagaaatgcatcaacaatatttcatttatcgagtatgcctccatcttcttgttgtacatcttcatgtgattcttggagcaagtagtccccttgtacttatcgaaatctggcaccttatacttcagagggataacgacgtcgagcaccatgcacaattctgccatgtc

SEQ ID NO: 223596 - DNA, 413 bp, Glycine max
  unsure (1)..(413): unsure at all n locations
tacctaccatncaccttgaagaaccgcactcgtttagatatactacacttgagtgacaattcgtggtctggtccaataccatcatggattggacaaacgctacaacacatacaaatcttgagcttgcgtgtaaaccactttaatggaagtgctcctgtacatctctgttatttgaggcaaattcatatcttggatctctcaggaaataacttgtcaaaaggaattccaacttgtctaaggaactntactgcgatgatggaaagcatagtaatcacaagtcaaattgtaaggaggctaagaatatcatctagatcaatctcccctctcatttatgactctaatgtgttattgatgtgaaaggtcaggatcatattgatcggaatccatacaatcttctaaagaacattgatctc

SEQ ID NO: 223597 - DNA, 395 bp, Glycine max
ctctattctccaagcacacatacactgatactccacattatcctggacattgggctaatacttgaaaaggaaaaaacattaagatatttatgacgtcacaaaattaatcaatccatcacattatattcaacccataaaatcttgacaacaccagtaaattgaataaggccacatatgcagatgtcagacaaacatggcacaccaatgaagcccaatatcaatttagtaattaagacaataaaatctaacaaacctaacatgaattcctatctttgcaaggccaaataatcaggtcccttaaggttaacccataaatccattgggaaatcaactccatcaacatggcatcacaataaccccaccaaatacattgcagataattataatcttccacc

SEQ ID NO: 223598 - DNA, 406 bp, Glycine max
agcttcgattgagaatgccgggttctatggggataattaggattggaattctgattattgttgtcgtaaggattcgtctcgctgctttgtatggcttggtgaagcctatttcgaatggatgtattatgacctacatgtacccgacttacattcctatttcatcgtcggagagcatttcgccggtgaagtatggcttgtacttgtaccatgaggggtggaaaaagatagattctaaggagcatcttaagaagcttagtggtgtgcccgtgcttttcatcccgggcaatggtggcagcttcaaacaggcaaggtcctctttcttcttgttcagatttagtcaaagatgctctgtttttatggttagttctttagttctgggttaaattatctcagcatgttaaagaaa

SEQ ID NO: 223599 - DNA, 372 bp, Glycine max
aatctagtgaatcctgccgtccacctgatgtgacctaccctgccaatcacctgatacccaccgtccagcgcttcgttgctccactcgcagggttggcagggaactccattgatgacatccgtcataggtggccctaggtccatactccgcatgtgaagaatcgcgaattttaggcacccttatcttcctaaacgaatctttggccgtatcatatgcgtgcaacaacatcttgtgttgcatcacactgttagaaaagccccaccagtggcatcaattgtatgcgtgtgtgcacacccctcaagaacccgccatgtcaataggaagatggagaatagagggatcatgatttctactgcagtcagaatcgaggct

SEQ ID NO: 223600 - DNA, 498 bp, Glycine max
  unsure (1)..(498): unsure at all n locations
gatcttaagtcacctgcggcatgcaagctngaagaaatngctaaggagaatgtggagaatgttctaagtattcttcaacaattatatgatgagtatgtggctttaagaaatgaagagtcatcctcaaatgaaaggaatgttggtggcataaactcctcaactatccatgtgcctgatacattntctatgactaggtttgatcaattaatgagtcttgtgcatgaaaaggaagcagtcccaccaatgaaatcagaactagatgcttatcttgaggagaaaaatacttatatctctaataatgaaaactccacttttagtgccttggagtggtggaggaataatagtttcaaatataaagaatttatcaaagatggcaagagatatactagttgctctaatgtcaaccgttgtatcagaatctacatttaacgctggaggtagagaaatngatgagtatcgttctagattgaatgaagaatctattgaagctctcatatg

SEQ ID NO: 223601 - DNA, 471 bp, Glycine max
tatatctaattctaacttctggatttgcggaattcatctttttcttggccttcaaacgatagcacttaagctcatttagacagttttgctactatggttgacatctaggaagcagacttcccacttttctttgatgaggataatggagacgcaaacttcatttactgtttagataagatgcatatttatctcctaaatcgtaatacaatataaaaagactatatccctataaaaagttatcaacagctaaaagcaatgtgtgaggttgtgagcattgggttatttatattctattaagtatgcattacgttatgtcatatgatctatattatatatctatctttaacttttggattgcgaagttgagaagatatgaagctgattctacagtagccctaaatatctcaaactcaaataaattgaagcaaacataagaagcaaaacttgttcttttccctctcactcacttgg

SEQ ID NO: 223602 - DNA, 506 bp, Glycine max
  unsure (1)..(506): unsure at all n locations
gtcacctgcggcatgcaagctnttatgtacttgtctaatcacattacaaagttgtcctaattaaacattcaatcacactgcttttttcaaaagaggcgggagtcttgattcactatgctctgaaatttgaatttgaaacccaaacaattttttgcattgggatggatttgaattttcaaaccaaacactttgatttcttaaaatgaatttaaccaccacactaaagcatgcaacatcttctttgtaaaagttacatatttttatatacatttgattcatatggttcaactagtaatcaatgatttaaccaatgactcattgatccactacattgactaagttgataaccggttcattttttataacatcgtaacacaatgattcccaaaagaattagatgattaatactaagaaaggaactatatttcatgaatgtggttcttatactgctccaaagagcatttattagtattcaacggtgagcanaaattatattacatgaatat

SEQ ID NO: 223603 - DNA, 461 bp, Glycine max
  unsure (1)..(461): unsure at all n locations
gccagttgtttaactaataataataataactattattattataataataataataacaactttattttatcaaatcttattttatccagattttattctatctaaatcttattttatccaaattttattttgttcagattttatttcatccaatcttatcttatattgtccagattctattttatttcgtttatgggcttagacttataatagattngagagctttggggctgatgacctatataacagcacaagattttagtttagggagtttttttcgaagaggagaataattctaggattttagaattccaatttttattactattcatgcacactgttcacgtataataaaattcgttttctgcaatttcgtttcggcttcaatctgtttcgtttcgtttctactgattaatggaaggctaagtctccacgcattgtttctcttgaggatcaagcat

SEQ ID NO: 223604 - DNA, 471 bp, Glycine max
agcttgtccaaaataaagaagcaggggcaacttcctctctagtgctcataatcaagtattgtcatttgagagcaaaacttaatgccttggtctaatgagcttcctgacaggttgacacggcatcatcattcttgaagccaaaacttaggttgactaacattaaaaatgttacgaatgttgttcataatccaataacaaatgagaaagaatgcttactaattccatagaaacaagaaaaagaatacacattcgttcatatttcaaaatctcaataaaaaaacttgccttcccataatatccattttcagttgtattttagtatacaagattatacacaatgcaataatttcagaaaatacaaagagaaccccattagtttttacagacctatacaatacccataaagagaacttacattctattagaagcaattgaagcagacaagttaaatattggaactgaacttatgat

SEQ ID NO: 223605 - DNA, 447 bp, Glycine max
ttaggagaaaccattaagactaaagtagttcctaaacagaaatcaattgatggagcttcgccaagtgtccccattgaaatggacaaacctttattcaaacctttcaaagttagtgagaacgctaaacgaaaaattagggaacttagaaaaactaaatccttaactgagggcgtaggtgacaatcatagtgaattactaaacaagattggtagtttacttaaggtcatttcagatactccccaagcctcggaaaatacttccaaaatggtaacaagaagtacctccaaattaattaatgttattaatgaagatagtgaccaaaactcagataacacaactgagataggatcagtgtcagaaaagaatataaatccaattaattccaaacactggaaaacacccttcatagtatattatcgacgtccaactgcccctgaccttctatta

SEQ ID NO: 223606 - DNA, 446 bp, Glycine max
  unsure (1)..(446): unsure at all n locations
agctngccacgcagctcgcccaggcgagcagggttgtttcctccagaagcaacaaccttctggaggaatctcctggagggcccacgtgggcctggttgctatttgcacccccatttttactaagtacaccccctgccttttttggtgattcttttttagtaaagttacggaaacttacgaatttncgaacgatacttgttttctttccgtaatgttacggaaccttgtggattacataatcatccccttttttgacttacggaatgttacagaacctcactaattgtgcaacgatgcttccatttgatttccggtgtgacacggaaccttacggattgtgcatcaatattttcttttgttttccggcatgtcccggaatttcacaaattgcctaatgatgggtgccaagcacctcacaatgaccaaacaatagtttacatgttatc

SEQ ID NO: 223607 - DNA, 474 bp, Glycine max
  unsure (1)..(474): unsure at all n locations
ntagtgaccgtgtgcgaccacaaattttatattgcgtgtcctcgttgatatgtcctacagatggttttgcatgaatttctaattataataacatatgagtcatggatgtgatctaagcattcttttttctttcttttcatttttaagccattggccaaacaactgtcctaatgtatattacttttatcatttgctagccccttagagctagccacatgatatttttattggaacactaacctaggatgaaagtgtcttaccttactttatgttaggagagcaagggtgttttcgatggggatttctatcatttggtggctagtgtgatgtgaatactttatttctgtgggtgttcaaggaaattatgtatttatcacgataaacgagatttctacgaactacgaatacatacaagagagcaaagttcttgtggataaataaatgtccaattttcacagagttgtgaaatatctg

SEQ ID NO: 223608 - DNA, 328 bp, Glycine max
  unsure (1)..(328): unsure at all n locations
agctttaacagtgacaatctcccctattgattaatgatacttctttgctaaatgacgtattgaaataatggctctaagctngatcactgttgttctgctaagaacgacattacatgaggtatgtgcatccacaaaaacatatgcaaccgttaatgactgagaaagtttgcttgactcaaatgtagatagcataattatttttctctctaacataaacatagtttgcctacaacaacctattacaaatttttcatgaggtgtaataagaccatcagatacatctatattttcaaagatagaccactataaaatcttattggaactttcc

SEQ ID NO: 223609 - DNA, 405 bp, Glycine max
tgagactcacagtcgtgctaagccatattctgccgctcttgtgaaatattgtaaccattctggcggacaaaggaccagtggaggacatcacctaccttgtgggagttctcaaccagttaacaaagtgtcttagcctgttggtagaggtggtggtggtactcctgctacacctgctacgccaacccggtgtgctaaatgcggtaggatgggtcattttgctcgtgagtgcccacatagtgacgtgacttatttcaacttgccgacgtaccagttgcccacgtccgatgagggagaaaatgactggaagtttgaataatcagaacagacgaccaaagaccacagggagagtgtttgctcttattggtgccaatgccgcacagtccgatgatctcattcaaggcatgt

SEQ ID NO: 223610 - DNA, 441 bp, Glycine max
  unsure (1)..(441): unsure at all n locations
agctnggcagagaaatagaaactgtttgagttatatttctatttgngcaagaatngcactgtgcactgagtcgtagtgtaacttgtctctgtgtgcatggactntgtgtgaggtttactgagtacacatatccctaggaaggttaggacaataatctaggaagttagcatgccaatctcgatgattaagataagagttatcagtttttgcaaaaatagtttttaccatttttgcttaagtctattttatctatttctggttaaaaattcaaatgccaaaataccaatatatgacaaccttgggcacattgagcatggcctgngcaaaggtcattcatgttgtcaaattgatctcgtcactagccttcattcttatctctntatttncttaaaaaaaatgaaactnggaaccttcattctccatcatttgcatgggttcttc

SEQ ID NO: 223611 - DNA, 497 bp, Glycine max
  unsure (1)..(497): unsure at all n locations
accttagatactcagctattgaattgatacatagttctttgtgagacaatgattttattcttttaggagtctctactttaatcgattaattggtgatataatcaattacttctcttttaaaagtgtttcagaagtgaccatgaacactttaatcgattacatcaagaatctaattgattatattattcttgaaagtttttcagtttttgggacgaacactntaatcgcttgaaatggtaatataatcgattacttcttcaaaataatcgattacattgtatatttaattgattacagacggttataactgttttctctattaatagtcaccttgtgttctcacttctaataacttctgaacgagctagaattaagaagtgatattagtaaaagaaagaagagaagaaaaagtgcttanaaacaatgtgactcacaacttctaatctctgattatgaagatcatattgtgaaaagtgagttgtgattctatcttgagt

SEQ ID NO: 223612 - DNA, 421 bp, Glycine max
  unsure (1)..(421): unsure at all n locations
agctnttcggatttggtcttcaccgacaaaaggatcatagtgggtatggaaagaggcaaatatgatcantcctgcttgatgaatgcgaaaactggggcaaatgaagagggtgagaatgaaggagaaacccatgctgcgattgtcattcctacatggcccaacttcccaccagcccaacaatgtcaataacaaccattctccttacccaccacccagttatccacaaaggtcatccctgaatcaaccacaaagcctatctaccacacttccaatcacgaacaccacctttagcatgaaccaaaacaccaacgaaggaaggaattttgcagcaaanaagcctatagaattcaccctaattccggtgtcctacgatgacttgctcccatatccattcgataattcaatggtagccataccccct

SEQ ID NO: 223613 - DNA, 493 bp, Glycine max
  unsure (1)..(493): unsure at all n locations
gacctataaaactcagcttacaccatccctctntctcatatcaaatatcacccaaatatttatcaattgtttcaatccaattggattcatgccactctttcttttcaaaatgaatcacaaattntatttccttctttttattttcccccttttttttgaaggattgggatttacataaactactagctctaaattaaatttacatgaaagtgacctataactgtttccaaattgattttcccaagtactcccccaaacttattcaacttaacacataattgcttgcatactctatgtaagattatgtctgcttcttaatagatataacattgaaatagttgagtagaacgttagtcatcacataaacctatcagtttgtacccactgaagatcaacttgctaatacaaaaccccatactaaagaaagaatgattctattaaggaatcaacttggaataaactntgtaaaaaagtgttntgttctctatatttg

SEQ ID NO: 223614 - DNA, 474 bp, Glycine max
  unsure (1)..(474): unsure at all n locations
agctttacctttcattgtaacccttagaactttccggccgacaatgtcatagataaagcaatgttgatgttcaaaggacactttaaatccctttttaattaactgacctatacttagcaagttttggtcaatgttaggtacataaagaacatctgatattaatttggtacctgaacacgttgaaattgcaacagttccttttccttttactggaatatagccaccattcccaattttgacctttgagatattagttggcttcaaatccttgaatagagtcttatcatatgtcatgtggtttgtacaaccactatcaatcaaccaactttcacttgattcactactcaagaaccatgtggccacaaacagttggtcctcctcttcttgattagcaatctgagctccctcatcatggtgattnttggtggngcagatcaccgcttcatgtcctatctggtttcacttttgtacatt

SEQ ID NO: 223615 - DNA, 356 bp, Glycine max
  unsure (1)..(356): unsure at all n locations
tgcacaaggctctcaatataagttgactacaccatgggaaccttcagacgtccaagacactgtcnagaacgtatcttctccttcttggacagagtagggcaagctgggggcaaatacagtctgatgacattaaacctaggatgcagctgctatcctatccgcatagcagctgagagcctgagtggtatacaagccattatcttttattggctagaatgttaaagagcgtgcgagtcgcactgccacacacagttttttaacacatgcataagatctatatattgtctaccggcaggatcgctccatggcgaatgataccagaacatggacctcttctttcgtatgcggctctgact

SEQ ID NO: 223616 - DNA, 423 bp, Glycine max
  unsure (1)..(423): unsure at all n locations
agctnttcaaagaagctgttcaagagagtttctcaaggaagctacctaggatataaatagaagcatgtgtaacacttgttggaactttgatcatttgagaattacacttcaaagttcagacctcatttgaggcacaaaattttgtactccttctctccctctactcatcttctcctaccttcaagcttttatccacggcttcctatggtggtgagcttcttcttgactcattcttcttgaagtggcatctccaatcatctttcttccttctccattctgctgccattaattttcaacaagcaaaggactcaattaatgaagaagatctaaggcctataagctccacatggagctacatcacttataaaaaaacctatatagtacacactcaaataccaaattttacaagatcagaatcaatta

SEQ ID NO: 223617 - DNA, 482 bp, Glycine max
catacggaccttaaaactcagctttgatccagaaaagaaatgttgctagacattctttgtttgttaaggattgtatgaaataagcgttcaagattgttgaaatgcaaaacaaagccttgcttttatagactcttcatgtctggtcaagaagaccatttataagagttataacttttagaaaaacttaaaaccaatttgaaaatgtcaaaaaccttctgaggaggtacatcttttgatttattcagaaacagtcactggtaatcgattaccaaataagtgtaatcgattacacaaagcttttgagtgaaaggatgtgactcttcacatttaaatttgaatctcaatgttcaagggcactggtaatcgattaccaaaacattgtaatcgattacagccttttgaaaataattggaacgctgtaaattcagtttgaaaactctctcaaactcattttgctactggtaatccgatacaacaatatg

SEQ ID NO: 223618 - DNA, 454 bp, Glycine max
  unsure (1)..(454): unsure at all n locations
tatacttcgttttccaaactaaagatatgaatattctctcttattttccagngctactacttgttgtttccattggtttccggatgaatgctctcacaaattaaaatatatttcagttcaattagcaagattaactttacagctgtggctcttcactaatgcctaagtgattcggtatatcttgtgttgcaagaaatcaaatgcaattgtcaaaggcaaaagagtgtcaactacccgtgtatgactctcagtgtgcttatgaaggtactccttgcatcatggaatgccgaattcttttatcgtggaaagggaatattgcattcctaacatgaaatgcattngtcattacacatcgtaaactattgtttatgacaaccactcacctttacatggatgtgtggaatgtaaacaataatacacaacaataaactggtacattattccagaaatctat

SEQ ID NO: 223619 - DNA, 419 bp, Glycine max
agcttatgctttagttaaataccatttagatttctatggagagctaactattttcatcccaaagaaataagagggacttctaattgtggttgtagacttgagttgcataatatatgatcaaatttatatttcttgaaagaataatcacttatgcttcccttctctttgatcagaaggagatcgtgctgctattctgttgtgggcactatcggttaccattacaatgagtcaatgacgcattctgatgttggtgatcaatttattctgatgctctccctgcaaaaatggctagaatgcttttttcattgtataattctgccatgcctaatttgagagctttctgacaccttcatactgtgcaagcttttgcatatgcgccattctaatttaatgtatttctatggccaacagcctttata

SEQ ID NO: 223620 - DNA, 459 bp, Glycine max
  unsure (1)..(459): unsure at all n locations
ctatanaaactcaagctcaatggattgaatgtatctagcaacacttagtgctctatatggacgctacatcttctatttatgcatctatagcatatgtggcatattcatgggtagaaacataagaaggtcaattctaaagcatcagtacgtggtggataagaacttggagtcaatgacaaggaattttgggaatgcatacaggcattgaattggaaatggaaatggaaatgcacggaatattacggtgctgctgttttcattataatgcttgtccatatggtatatttacgactttgggaggtgggctacgtggcgttttctttttgttcctatgtgtaatttatcattgcatatgcgtcttagagcatgaattaaataattgatgttttatacaatatataaatcatatatatatgatttctatattcttctattctataaaaatatattttgaattct

SEQ ID NO: 223621 - DNA, 472 bp, Glycine max
  unsure (1)..(472): unsure at all n locations
agcttgtgcattcatatctggatgaggatgttccatatgttctcaagactggactaatacatttgctgcccaagttacatggtcttgcaggtgaagatcctcataagcatcttaaggagttccatattgtctgttccaccatgaagccccctgatgtccaggaagatcatatctttctaaaggcttttccttattctctggagggagtggcgaaagattgactatacccaggtccattaccagttgggatgaccttaagagggtgttcttggagaaattcttccctacatctaggaccactgccatcagaaaagacatttcaggcatcaggcaacttagtggagagagcttgtatgagtactgggaaagattcaagaaattgtgtgcaagctgtcctcaccaccagatttctgagcaactccttttgcaatatttctatgagggacttancaacatggagaggagcatgatt

SEQ ID NO: 223622 - DNA, 389 bp, Glycine max
  unsure (1)..(389): unsure at all n locations
agcttacgagagaagccactctactccaagnttcatgtgngatacgnngacaaggaacatcacgcatattctccaggaaatcattgtagaggaaggaaatagtattgctgtgactcagatcatccttcgccccacacataatgaccccgagggtgcaaccattccttgaccagattggagaagtcgttgtgggaaaagctattattgacctgggagccattattaacttaatgcaactctccatgtgcagaatgttgggagagttggagatcatgcccactgagatgactttacaactttttgatcgctccattaccacaccatgtggagtgaatgaagatgtactgtgcatagcgaaacaatttatcttccgcataactttgtggaat

SEQ ID NO: 223623 - DNA, 62 bp, Glycine max
gatgcatatgactatcgggctaccgtttgctctcctctaatgaccataacatcatggctggc

SEQ ID NO: 223624 - DNA, 480 bp, Glycine max
  unsure (1)..(480): unsure at all n locations
agcttaatgaagaagctgtcaaaaacaaaaaatgtagataaattaaaagctaaagcttggcatcatctaagggggagtgacaaagtctaaagaaaacatcatttcagggggagcttctatggtgaattttgtacataattggtgttctgtactcaaaacacatcttcttgatgtgaaaatctttacatgaataaaaaaagatgttttcttataattgttcaaactttacctcaaagccttatgatgctttgtggtttatttatcttatatatccttgcatttgataagactgactaatgtttttcatgatatatcttataagtccgctctcatcttttacatttgtgtttgttcgacatcataaanaaaggggacattgttgagtcaaaaggacatctntgtcttcaagacgataggcagatggagtcataatctgatacaacatgtgtgatggcatttaagacttcatattataccatg

SEQ ID NO: 223625 - DNA, 476 bp, Glycine max
  unsure (1)..(476): unsure at all n locations
taacaccctaagtctatatttctgaatgattaactgatatataattgttttctattaataaaaactagnttgcaacccgtgcacatgcacaggttgattcgctagcgttttttacttgttcatggacaccaaaacgataaagttgattaatagggacttggttagtaaaattgctatcacagtagtataattgaagattatatagatatgtatttataatgttggtaaaagagagattgttcagacaaaataaacataatataattacatataaaatgaatattattgtcacttcctttctcttctaatgactatttcccaaattctttcgcgtggccggtagtagaatgataccttgtcctcatgatgcgaatctctcttcctaagaaactnataccatggccagacaatacttttatctttaatgtcgtggtcgagcgtatcaacgtcccattgcagaggacgtgcattctttc

SEQ ID NO: 223626 - DNA, 443 bp, Glycine max
  unsure (1)..(443): unsure at all n locations
agcttggagcgctatccgcagactcaacagatgtatttgggaaagaaatcagactatgtgcacgaatcttatacccagtgggttattgataggaccaanagctttggtctaccctaccgcttacctagatacctatcgtccaccatcccaccatcatccttgcctatcccctttgatactaaggaagagtttcatgaacaattaaccaaagaaaggcaagaaaaagaaacttggaagaggagatgccaggagctatagcaagagaatgagactttgaagggaaagatagcccaacagagccgtgagctttttatccagaaccagaggaatgatgagaaggacgacttgcttcgtccgaaagacgttttgctccaccaagatgctagaaggaagaggaagttatggacttgnttcccgtcacattagattccgagaccctctac

SEQ ID NO: 223627 - DNA, 457 bp, Glycine max
  unsure (1)..(457): unsure at all n locations
tattgcacgggcacactccaattgtctcattgtgtgtacagtattctttnntttattctatactacatgtatcacttttatttttcagtaaaattgaattgtctaacatgctttgcacgggaactaatctatttatgtactaagacaaagcaaacacctcctactatgcacaaccaaattgtcatgagcttgaactctaaaaaattgtcagactacaatttttttgagtaaattctcaattaaatctcactactaacaaaaacatgttttaacatcgttgaatctaagtcggctcttgataaatcgatgtaaaaaaaataagcaatgacatttttgacattaaatttaacttttttaagatggttgtacaaaaaccgtatatgaaagcaagtgttcaaggatggctttcaaaagattatctgtgagaatcctccattccgcattattgtctcatgtc

SEQ ID NO: 223628 - DNA, 280 bp, Glycine max
  unsure (1)..(280): unsure at all n locations
agcttgcaactcatttatattcagaaggaggggtcatattactgngcaatgtgggatctccaaaatgaatagtagtttttagagtgaaaaatataaacaaactaagcgcaatttttttttctggattacaaaccacatcgtgaattgtttggtttctcaaagggaaaaatgaaaaaaaaatctcatattcacatttcaaattgaaaacccatctttcaattgttattcattcggatcaaacattcacttcattgacacatcccatgcatattcgcacact

SEQ ID NO: 223629 - DNA, 408 bp, Glycine max
  unsure (1)..(408): unsure at all n locations
tctctctctctcgctcataagagcggcacaactatatttacttgctnctctccatacacatatccttacttgagcgcgggagaactcctgctctgcaagaaccccctcctatacaaagcactactctaagccgacgcgtgaaacgtgacccccctaagccacgcccaccctgacgtgccacagcatcacacattcataagaacaacaggcacccaccgtggggccgcagaagaatataccccgtggccactcggcaatccttatacaaccatccatgggtagcacttgggaacgcctcagatgcaagaccctctacacaaacatctcactcctcgcacggcancttatgacaaacacctctacaacgaacgtccaaatccgcaatgatagacacacacaccacaacga

SEQ ID NO: 223630 - DNA, 455 bp, Glycine max
  unsure (1)..(455): unsure at all n locations
agcttncactccagatccgattcgagtatctatctgttgngannatcacacgttaaaaaccagaatacacaatacccttaagctaaccgataagcaatntttggatgaaatttactaccggcagcctttcacatatgcaggcaatcaatttcgatttcaatgtatgcaactgataaatgatgctgatgttaatacaatgttaatgtgtaatcatcaatttttgtttgttggtccaattgagttattatgtagcattcctagaacaccatatgatattttaaacttacttcaagccactatgacccctactcatgatgccttgctatattacaataagaggtggaacatgtcacgccaaaatgagtntgttggttactcgttcacaggaaaatatcctaaaaattctgacattccttccggatgtaccatggatgaactgaagaaattgatcaagc

SEQ ID NO: 223631 - DNA, 355 bp, Glycine max
gagtgaagatcgcatcaaaaatatatctacgccgaagagtgaagatacaagtctttaacggtataaattactagacagtttagctacgaaaattatacagtcttatgccgtatgaatctttgtttataaatactaagcttgcaccatgtaaaggttgaaacatgtaaacactcacatatcctattaagttcacacatcgttcacatatcatctagttatataagacaatgttcgtaactaccattttgtgatcatcattctactgtttttatcaggtaacttattgacttacatctatcgttatcgcgcatcgtcccatccgcttctcatttctatatacactctttctatcaat

SEQ ID NO: 223632 - DNA, 480 bp, Glycine max
  unsure (1)..(480): unsure at all n locations
gatcttaagtcacctgaggcatgcaagctntanatcaagagctgactaccacttattttacaattctatacagagaaagatgtagtctaacaagagtgctgagtgcatagtttatgaaatcaataaatattagttttttattggaaatcatgatggaggtgcatcgataacattaaatgcaacttcactataaaaactttctacttttgattccttaaccagtgctagtagggcactagttaacattttccaagttcaataatcataaacttcacaaagaggagataacaagtccaacctacctgatgtatagttccattagcctgtctatcttctcacactcattntcaacaaatntacttaataatctttctctcctagaacccctcaagattccacctggcanaaatatagagcactgaagttcaatatcaaatatgatataagtatacacagtagttgaatcgagataaaatcatg

SEQ ID NO: 223633 - DNA, 480 bp, Glycine max
  unsure (1)..(480): unsure at all n locations
ntggagataattntatgaacaaaattacacaatgtgatatgtcatatctccttcatagagntggaacttttgcacttgggaatatgtactatatttgtctagttgacattnggtggaaacacactttcctcaaaccaaactagcatgcttgcgaaatttccacaccacaaatatcccaaaaatgttggatgaacgccagattaagtccactaggccctaatgcttatccgggtgcatactaaaaggatttgcttgaattcaatcatcttgaatgagacagtcaaattgaagttatcagtgtctgatagtattgtttggactgcattaataacccttccatggtcaactatttggctttcaaacaattttgtgaaatattctctagcacgggatttaatggcccttctgattttcaatccaaatccatctttattcattaatctatcaatcttnnttctaagtgtcctatcaataacactt

SEQ ID NO: 223634 - DNA, 438 bp, Glycine max
  unsure (1)..(438): unsure at all n locations
agcttatatttaatgaagatttcttgattaattntttaaagtgaagaaactatttctttccattgaagcaaatttatgtgacaatgagagttnttttaaaaataatatatgtatcttttgtaaaaagtaattttttaacaataaaaaataatatttatttaatccataataacattataattaaataaaaataaaaaagatataaaatattaatttcttgaaatttgttagagtttcttatcgttgtgtaggctattgtttcgttagaggtgccgtgattatggtgtttgatggtggtgggtgggctgcactcattcttgcaattntttttttttaatttataaccatttttaaccctcacaaatcatgattttaaattttacattaaataaacaacacatataatccanatcaaacagtaacattttttaatttaac

SEQ ID NO: 223635 - DNA, 484 bp, Glycine max
  unsure (1)..(484): unsure at all n locations
ntcagaaatatgatttttggatcttctactcttggccagccttttttntattntatatcttccagacctatgctttaagaatgttattatagtcaattggtcaccgtgtgaatagtgatgaagtctaggtgcttcaaatagggaatttatcattgtgaacttgaaacttctgcatctagaatttggcttgtgtaattgcacaatggatatggctatactgcccagatcttctcaataattattgtttaatccaagagatattgccttcttgatcttgttatgtcttaatacttttttaattaaatgaatttaagcatggattagtgcttttgtataaatatagatgaaaattataatcattaattggattcaacacaagatataaaatgtaaaataattctttgtattggattcattaattggtgatattatagttggggttttagtgggttgaatgaattataaaccttataaacctcatcaa

SEQ ID NO: 223636 - DNA, 472 bp, Glycine max
  unsure (1)..(472): unsure at all n locations
agcttgttgctcaataggtgctgtttgcacatattctttcttagaccatactgcaagcagatgttggacagtattcaaaagctcagggcgattatgtcctaataatgaggtaccaggtgggcattcatgcacagcaaattgaaggatccatttcaggcagctaatagggaatactttccatagcaggaatttgtcaacaaacatagacctgagtcgccatggaacatagcaaaacaaaggggcataagcatatataaagtaatagtaatactggaatttcattacaatttctatataaaaaaattaaaataaaagagggcaaaagtgcttatgatggtgatggtgtaacaccccaatatttatcttctattatattatgtaaacaagtagggaaaatggtgtttatataattattnntaataaatatttggtgtaaagcgtgcatagaaagtgcatgcctatataaaccatg

SEQ ID NO: 223637 - DNA, 468 bp, Glycine max
  unsure (1)..(468): unsure at all n locations
ntaacanatatttctttatgagagatcaaccatgtctgttttacatagtcaacaaacattgaccaaggattatcactccataagttttataaggattataaatccgtacaaaactagatcaatgttacagaagaaaatcaacaaacctttgctgttaacagccacaacaaccaccacttgccaacgagctaacgtaaccaatgcgccttgaccaaaatggacacaacaatgaacaatcacctctcatgagaatggatgcaaagaacaatacaatagagtgaatggtgcgtgaataagaaaaaggaagaagttaacatgggatattcttagaattttgaaaaattgcaggatgcaaaagaaaaataatgggtgcacaaaataattcctgccactcgattatgctcaggcccacagtatcttaatgtcaaatattaatcaataatttgtacaagctcaaacaagtctaac

SEQ ID NO: 223638 - DNA, 411 bp, Glycine max
  unsure (1)..(411): unsure at all n locations
agcttattttctagtagtatacccttgtttacttttcttataacttttactttttgaataattataatatttttggttttaattttcaagttttaataagaaatttacatcaaaactatataattcactccatacttccttattttgtgtatcaacaatgaagactttttgaattatatgatagagctatcaaaatggatcaagtctgatgggttgagctctntaatttgcatccaaaaagaaattataccaatttggtctgaactgataagccaaacgagttaggctattgtagttaaatataagcccaaaaattattggtatatatntgtttatgtaaaatacatgtaaattattcanaaattaaaatttggcccaaactttgtctactancagaatgacatttaacat

SEQ ID NO: 223639 - DNA, 473 bp, Glycine max
ctgtgtaatcgatacactgatttggaatcgagtatcattattgtttttgaataaatcaaaagatgtaactcttcatatgggttttgaatttctcaaaatcgggtctaagtttttctaaaagttataactcttctaaatggtcctcttggccatacatgaagagtctataaaagcaaggctgtgttttgcatttcaatcatcttgaacacttactcattctatcctttacaagccttgaatctctctgagcttcttcttcttctatgtaccaaaagctttccaaagttttctggttttctaaaccttgaacacttgtgttattcatcttttcattctcttttccctttgccaaagagaatttgccaaggactaaccgcctaaattctttctgtgtctctcttttcccttcttcaaacgaacaaaggactaactgcctgaatcctttgtgtctccttctccttgtcaagaattca

SEQ ID NO: 223640 - DNA, 434 bp, Glycine max
  unsure (1)..(434): unsure at all n locations
agcttcttagtttcagatgatgcatatgggtttgtanctacctcatgcactcctctaatgactatggcatcatttatggcgctaaactgctgggagttggaagccatcttctcaattaaatttttggcttcagtaggagtcatgtctccaaggactccaccactggcagcatctatcatacttctctccatattactgagtccttcataaaaatattggagaagaagctattctgaaatctgatggtgggggcaactggcacatagtttcttaaatctctcccagtactcatataggctctctccactgagttgtctaatacctgagatatccttcctgatggttgtggtcctagaagcanggaaaaanttttctaagaatactctcttaaggtcatcccagctcgtgatggaccttggagcaaggtaatacaa

SEQ ID NO: 223641 - DNA, 437 bp, Glycine max
  unsure (1)..(437): unsure at all n locations
tgtgagcattctctccatagatcatatccntcttcatttatgtgatcatgaaggtcatcgagtcgttctagctcaatttgtaagtcttctagctggctttccaacctctgaagatcttctaataagtcagatctatttttctttacaaacttcctcatatttaatgtggagctctgcggtctctattttaagagcttcaaaggcatcacacacttgagcggaaaattataaagaactatatactattactccatgtttcctttgaattccttatgatcacttgagatgttttgaaatattntctcgagttcgataagctttggacaacatggatgaattagaaagacgttcatgatatgttgatagaagtgtttcaacgcactgagattacctcttcatgtgaatctactccttagatgtatgctaccatctaaaaa

SEQ ID NO: 223642 - DNA, 430 bp, Glycine max
  unsure (1)..(430): unsure at all n locations
agcttgagaattgcataggagatcatggtgattttgttacttagtacttccattaatggtggcttcatggttgttaattgaaaatgatgtacaatgacaactaattctcagtcattgtgccttatctggcttcagccattcatggtttgcaacaagagatatgtaaagtttgtgagccaataaatgcaactagtaggattcgggtcggacccacttgtcacttaaattaatcttacacgtttcgttcttgggcacctcaaacttcgttgggatttcaattcaatcatgaataatgtatggtcttgagcttctttattgnggaaaattaaacgtaatgcgcaaccaaaatatcntgaaaaaggttgaagcatgtggtctagtcttaattgtaattcagtttcaatctcaatatattattntcatctctata

SEQ ID NO: 223643 - DNA, 408 bp, Glycine max
tattacgtgacactatgatactaagcttgttagagtgggcttgcattatctttcttggtcgacaaggcatcagcccgcacctggttctagtactcagccaactcctccatctgcatatacttagccgctctcgttcacagtttgtcaagatcaaatgccagtttctttcgtagtttgttgacaaaaggtctcagttgtaacattattatcaatttgtgtatagccaatactgggtccaagtttcggatattcaacgcaacctttttgtaatgttccatgaaggtttgcaacaactccctcttctcctactatatgttgacgaaggccacaaatgtcaagtggtgaggccaattagcgacaaactatgttctaaagcgggagactacggtgttgaacgagtccacagtt

SEQ ID NO: 223644 - DNA, 476 bp, Glycine max
  unsure (1)..(476): unsure at all n locations
agcttcctgatataaactaggcattaatcttctactaataacttaagcttctagctgagttggtttggtcctttgatgatttttgtgtatattgaccaactgccctatcttttacttgtttacaaatatatatttgatgttggcatgcacatttatttaatgtaattcttttgatatgtgtagatagagaaaggtgcatgctacatattgtttaaaaattntagaagcccagtaatactgcatgagaaggatgcaggtcttaaaattctaaggaaaggtaatggttaatttttcatgattaacatcttgcaggcaatgtgatattngtctatntttcatgttttatgtatgcattnttacaattntttatgttggtctcaaatgtagttgttcaggagttacaagagcaacatggtgctgattctaagtcacttaatgtagtgagatgtacatctttgaatcaagatgggatcatt

SEQ ID NO: 223645 - DNA, 484 bp, Glycine max
  unsure (1)..(484): unsure at all n locations
ntngaatgaattaccgggtagggttgggtcgggtcagcctatctcttactgcggacaaaaaacaaaaaaaaatcctccattttccgcctcgctgccatatccgccatgaccaccatggctatggcggccaccatggcgctgccatctgcaacccgccacgccaccgctattcagtggctttntttcaaaaaaccgctacgcaattccaccatggccgccatttaacaacactgttcttgaacgtatccccaaaattgtctctattccactccctcaaccttgccttgagtgcttttattttcatttttaatacgtaccctccccatccacttagctggttagatgtccagctttccaccacagctttcttgaaagaagcatctgatagccaacagtccattattctgaaaggcttaggtccncaatcagaacttctggatttgagtaagatcgggcaatggtccgagaagtttctctccagagt

SEQ ID NO: 223646 - DNA, 475 bp, Glycine max
  unsure (1)..(475): unsure at all n locations
agctngtaatgaacaacattatttgagttgttttgtttatcaaaataaaaatacccaggaatcttgcacaaaaattaattgtttggcatcggatgactgaactccgagaagtaaagcggtagctgcaagggtgaaccgctggaaacatgttgaccgtgtgataagaagatcatgcggttgagaagccctatgattctgtaacttagttggcgaatggacatgattatgatgcttccactctgtgcgattctctgtagcaccttcaccaccatgtatgcgctcgttgaatcaagtccatgttgccttgtccaggattagaagggttttgtgaatctacccttctttattcaaccaacccacgcaagcgtccaacctcacaattttgtgatttgatgtagcaacagaagaggggaatntgatgattgtctctcacgtaactgagtaccttcttcaagctttcacgtttggttccatt

SEQ ID NO: 223647 - DNA, 466 bp, Glycine max
  unsure (1)..(466): unsure at all n locations
ttatattttagcatttcatttgctcttcttcacatttgcatgcatcatcggtgtcttccagcagtgatgatataatttttataagataaccaattgcctacttcttccaaaattgaggtgtttgtttgggttgttgaaattttcatatttgatgttacgcttttaccctttatttcaaggttaattgttctttcattgcctcgccagacaagatctaagaggttattggaaattcaacaattgagggagcataacaaagagtatgacttgaagaataatgttgctaaacaacaatgagtgaaaaaggcctactatgcatgtgttggtattctctgaacctttccttttgtttcttgttgtttagcaattggtgaggttgctaaggttcacaacaccaattgggtggctgaacaaaacgatacaatntaaagagacatctttgcaagtggtgcattcattgttgtat

SEQ ID NO: 223648 - DNA, 463 bp, Glycine max
  unsure (1)..(463): unsure at all n locations
agctntntatctggtagtatttgacctaaacattgatcgtttttatcttactagctatatggtactaaacttcttattcaatgtaatcagctgctactaactaattcacttttttaacttaatgattctaccacttaatacagggcagatctttgtatcacaatcacgaagttaatttctttttataaaatataaataacaatactttggaatattgccggattgattttccattttccttgaacgtcatacaatctagaagggaattattttccaaataccagggccgtgcagttgggtccaataaaatcttatcctacgcatatatatagaacctgcgtgccatctggaaagtcgtttcattataataacttttaccattcgcagtcttattttaaacttcgtgttcaaccaatttagtgattataacgttggtagctactggctagagtaatgtaaattt

SEQ ID NO: 223649 - DNA, 490 bp, Glycine max
  unsure (1)..(490): unsure at all n locations
tggcccttaacgaaagatgagccgcactgagtcattcactatatggagattggggcangagccaaaggatccatggagttagatctagacctgagaaccaatgacaacaacggtgcactcagcgcgttgacagctcgcccagcgagtctgttgtcctttctcgcacttagcgagcaaatcgcgctaagcgagccttcagaatctgaaacgccaacgagcctttaaaacactaaagttggccaaaacttgaagagagacagccagagagatgaaaaaaatacagcaagagaggaagctaaaacgacagagcctccgccttcaagaacgtttaggttntacgagtgattttatgattctagaggtggaggagacatcctcaaccatttgtaaccttagtttttccttcacaaatctatcctctgcgctgaaagttactaacatgcaatggaagactaaatctctctgtggggactcttgctgaacttttgtg

SEQ ID NO: 223650 - DNA, 461 bp, Glycine max
  unsure (1)..(461): unsure at all n locations
agcttctcanagaagccacgaggagagctttggaggattcctcttaatgaagcttctagagaaagctacatgaaatttcctcggtaaaaacgctgcccagccttcgttaaacgttagatcttctctaaatttggtctgcaacttcacaagacacttttccatgatctgaccgttgagatctttgagaagttgtctggagtgtgctanaagcctcttaatgaagcttctggaggaagcctcttaatgaagcttctggagaaaactacatgcagctgcctcggtaaaaacgctgcccagactttgttaaccgttggatcttctcgaaattttgtttgcaactttacaagacaattgtccatgatcttaccgttgggatctttgagaagatgtctggagtgtgatagaagcttccgttcccgagagcatctcttattaaagcattttagcctttgctttcgtgt

SEQ ID NO: 223651 - DNA, 451 bp, Glycine max
  unsure (1)..(451): unsure at all n locations
tctaaacttacgaggaatcgaggttntgtattttatgctatagcatagaacacaaaagcatgattgattagagaaatatcttcatatgcatcagcttgtttgttagaaagacccaacgctttttacctattgctgtcaacttttacttacttgcatttactgtttttaccatagaagtagtttatttctatttttaaccatagtttatcaatgttgttccaacaatgccttacttctgaataaaactctgtctaataagcaagttccctgagttcgatactcggatcactctgttttaattttaaatacttgatgacctggtgcactttccggtgtttcatttcccttgaatatatttgttgaaaattggagaaaaagtaaccatatggganaatgaacacatggctcctcctgtgctggtgtgggctcgtctagagatgaagagggagca

SEQ ID NO: 223652 - DNA, 439 bp, Glycine max
  unsure (1)..(439): unsure at all n locations
agcttgtatgaagtgcatatgcttacttccatttgagtgcagtcacaatcaacaaaaagtgtatacaaattcttcacttgttcaatcgacttatttctatcagccactttgagagccaaaccatcaacaacctttgcagcaccttcatcagtaataccttcaaaaacatcaacaggtacctactagaaagaaagagtacatcaggtatatctggcaaagaagactgctcaggtgaaaaaactaaaccatgatgagaaatgccaaggacaacaaacctttataatcatgtccggaaatttctctgcaaggtcttcaatgctggttcctcccttactacaagcaattataatctggcaaagcaaaaacataataagaanagattantataagcaacataaaaaacattaatggttaattaaaaaactgtatgaagaagagg

SEQ ID NO: 223653 - DNA, 476 bp, Glycine max
tcactgtccttgcatgaacattactatctgctttgaaatattctttcctaacctgaaaagcccttaaaaattgaacacatctaatcaatggtttattattagcctacagtattatatatcgaatcaactacttaaccattctcctttgtcctttccacacaaacctgagatgtcactctctgtcagtgttctgtccaccccccacatgatcacccttctactccagtagagagtgcatgcaaatggtgcacaacaactgagacactgatcaagcaaaagaagaacaacaataagaaagatgcagatgaaaactcagtttttcttctacttctgttgcatttgctgtttctcttatggctatgcagctgcagcaaatgatgaagtagctgctttacttcctataaaagaaggactcactgatccactgaatagcctgcatgattggaaattggtgacaaagcacaacggaagaatgc

SEQ ID NO: 223654 - DNA, 445 bp, Glycine max
  unsure (1)..(445): unsure at all n locations
agcttccaaggcctagatctttaagcttctctttngcccagaatgtacagcagaatcttacaagtccaattagtatcaacaagagagcagactcaaagagcagaaacaagactattgccctttcgttacctgcaaaaaacttacaactatatacactcaattgttaaaatgtggctacattttcataatgtacgaagttgtacattacctgtgtagacactgacaagcttggttctttcctgagagcagcttgatgcaagcttctgacctatgaagtgatgaggaataattgttaatcgtttgacataaagatttaaagttgtactatgatatacactaaactaaaaccaagatactgtagtcttgcatgtataaagacaacctaacttgtttgtacatattaaaaaaaaaaactgatttgatgcaaacattagataatatttta

SEQ ID NO: 223655 - DNA, 485 bp, Glycine max
  unsure (1)..(485): unsure at all n locations
gtgtgaacactaagtncctttctatacttattggaccttaattttcatttcacaccaacgtgacatcatggattcaggtttctgcttggtgtcatcgccgaaccaccaagaagtagtccaaagccgtttcttcgacccctcatggctacaaatgcagccccacgtgcccatgagctntgtttggcccaaagagtgcttattgaacgcgaatgaggagttccacgcgccaatggtggaccttggagggttcctaaggggtgatgatgatgacgccacaaaccgtgccgttaggctcgtacgcaaggcgtgctcgagccacgggttcttccaagtgatcaaccacggcgttgatcctctcctcanttgggaagcgtatgatcaaatggacgctttctttaagcttcccattcgtaggagagtgagtgttaaaaagactctgggttccgtgtggggatattctggtgcccatgctgataggttcttct

SEQ ID NO: 223656 - DNA, 440 bp, Glycine max
  unsure (1)..(440): unsure at all n locations
agctnntgagcaaatgaaatgacaatatctttatactctgatgtccggntgagtcccgtaatatatcgagacgctcaaaatttagttccgaagctctgagaaaattgaattgacaataactttatatacggatgtccggttgagtcctgtaatatatcaagacgctccaaattgaaaagggaagctcgtatggaattcaaacgacaataactttntactcggatgtccgattgaatcgggtaatatatcgagacgctcaaaattgagactagaagctctgagcaaatttaaatgacaataactttatacacggatgtccggctgagtcccgtaatatatcgagacgctccanattgagaacggaaactcttagaaaattcagacgacaataactnttttctcggatgcccgacagagtgtcgtaatttatcgagggatgc

SEQ ID NO: 223657 - DNA, 487 bp, Glycine max
  unsure (1)..(487): unsure at all n locations
acacataaaactcagctcttgtntcaatttcgaccatctcgatatattaccagactctttctgacttccgtatataaacttattgtcaattaaattttctcagagctctggatcaaaattttgagcgtctcgatatattacgggattcattcagacatccgagtaaaaaattattgtcgttagaatttgatacgagcttccgttttcaatttggagcatctctcgctaaattgcgataggctatcgggcatccgagacaaaagttattgtcgtttcatatttctaagagttttcgttttcaatttggagtgtctcaatatattacgggactcaaccggacatccgtgtataaagttattgtcatttcaatttgctcagagcttctagtctcaatgttgagcgtctcaatatattacccgattcaatcggacatgcgaggtaaaagtattgtcgttgaattcctacgagcttcgttttaatatggagc

SEQ ID NO: 223658 - DNA, 404 bp, Glycine max
  unsure (1)..(404): unsure at all n locations
agcttagcaagaccaagtgtgaccaaccctcatgtgttatattatgattacagaacttaacttggtcaaaagcattttgaaatgaatcctcggtggcattgccaaaaagcttcatgtctttgtcaattntctctttgtattggtgaactttctcttccaaggcttttttctcttcatctacttgaaaaagactctcttgggtgagcttcactttggttagagctccttccaggaggattttatgcttttttaccttaaaaatatcatgagttgtaactcttcaagttagcacttcagcttcaacagtctttntattnttcgattcatctttcacaagctggttcaaagactactntttatntagccatttagccttttcagatcagaggatttcatgatatttc

SEQ ID NO: 223659 - DNA, 473 bp, Glycine max
  unsure (1)..(473): unsure at all n locations
ctggaggcttggattgcatcgtccaattacaaagaccccacatggtcctttntcaagctcactcagtgagggtccgtcaactatttgtcggagtttgaaacactcgccaacagaatcatcaatctacctccttntttcttgttaagctgcttcatctttgggttgtcaccagagatccatcgagaggttcaggcgttacaacctcttaacttgattcaggtggcagccttagctcatctctaggaggagaagttctgcaactcgtggcggtcatttcgtgccagacctaattctcaagggtcctttgcccctcacataccccaaccaaccccaccttcacccttgctgccacctccacccttgctactccacaccaccgaaaccaccaatatccttcaaacgcctgttgacagaggaattagctgcgcaccatgaaaatggactctgcttcaattgcgatgaagaaattagtc

SEQ ID NO: 223660 - DNA, 383 bp, Glycine max
agcttataatatatcgagatgctcgaaattgaacaacggaagctctagagaaattaaaatggtcattacttttcactcagaggtctgattcaggcgtataatatatatagacgctcgcaattggacaacggaagttctcaagatattcaaatggttatatcttttaacttggaggtccgattcaggcacataaaatatcgagatgcttgaaattaaacaacagaagctctggagaaattcaaatggtcattacttttcactcggaggtccgattcaggcgtattatatatcgagacgctcgaaattgaacaacggaagctctcgagaaattaaaatggccataacttttcactcagaggtccgattcaggtgtataatatatc

SEQ ID NO: 223661 - DNA, 421 bp, Glycine max
tgtaattgagcaacggaagctctcgagagatataaattgtcatcacttttcactcggaagtccgattcaggcgcatcacatatagagacgctcgaaattgaacaacggaagctctcgagaaattcaaatggtcataacttgtcactcggaggtccgattcaggtgcataatatatcgagacgcttgtaattgagcaacagaagctttcgagaaattcaaatggacatcgcttttcactcggaagtccgattcaggcgcatcacatatagagacactcgaaattgaacagtggaagctctcgagatattcaaatggtcataacttttaactcggaggtccgattcaggcacacaatatatcgagacgcccgatattgaacaacggaagctcttgagatattcaaacggtcattacttttcac

SEQ ID NO: 223662 - DNA, 406 bp, Glycine max
  unsure (1)..(406): unsure at all n locations
agcttaaaggagcactcaaacccggtgacccttattgcctatactccgaagagtctgtcagggtctctccctcctgattcaggtccaacccctaaaatcattttagcacacagacactgctcatgaattatacaatacacatgacctcacactcgngtgttaaacatgtacaacatattgcgctataatttaacactggttcctaaatagaaaacctacactttcactttaacactagttcctaaataggaaacctacactttctctttaacactgcgcanttacacttttctcaagataacactggtcgggttattgtacaattcacaagctacaacacaaataatgtcacatcaagagnttntcacacactttattacaaccaanactcattcacacatttaca

SEQ ID NO: 223663 - DNA, 490 bp, Glycine max
  unsure (1)..(490): unsure at all n locations
cattacggaccttnaaactcagcttgccatcatttggatatagcttccctcgcagctctgctgtattcttgtaattnttcttttagttcccaggtttgagatgttgctcttgctgccatcattttttcgttatggtatatatggcatagtagaaacaagattcactttgataatgtgatcatcccccttaggccaattttctctttgatgtaaactgatgatcacatgacaagaaatgtttctaaaggaactatgtcttcatccatagattacttcttcatcctaaagaatttttttgttcctagtcaccttataaagcctcatgttatcaagtataagtgtgaggtgaagtcccacatcaagtaaaagtgaaaatgttgagcaccattataagtgaggagaagacccataaacctgagccttaacgggttgggtaaagtatggtgcaagttcccttatgtagttgtcatggtgattagtgaaatctcct

SEQ ID NO: 223664 - DNA, 460 bp, Glycine max
  unsure (1)..(460): unsure at all n locations
agctgtaaccttccactatacaatgtttccatttatattaaactcagtactctngtctctttatatnttcgttatcttttatttctcattgttatcctaaaaacccaaaatacaattgtgatttccaatgcctttttccttgagagaaaatgggtattgatatcatcaattcattatcatcgctttcttcttgtgagatggctcttagctgtggaccatctgtttggtgactcagtactttatatatttgatgtcatctataggagtcattcaatttttcatctagggaggggttggttaatattttgattgtaaccaattgtaatttagataaaatcgctgcggatctgggattcttatgttctttattcttaacaatcattccttagataggaaatggttctctgtgaactaaggatggtcatacaatggtagcttttgtatgtggacagaacggaat

SEQ ID NO: 223665 - DNA, 422 bp, Glycine max
acctataaaactcaacttatcgacataacataataaaaccaaattcagtatatctaatcgctcacaacaacagaagggacacctgcttactactgcgctctgcagcggatatatttcctctttcaaaagagacaatgtcgtgtttgtactgatcactctgatcacctttgctgaaccatgaaagcttaaatgaagcctatctcgagaataaagaaattaaataaaatcaattcttttaagtaggagtaaatcagagtatatacattgcaattttagcaatagacaagaggaatatgtctctaaagtaaaaatggtagaagatgtcttaccacaggtttctaagttcaaataaatggaatcaataatacaagatgatggaaaaattaatgacgatgtcatgcacaagattcaagcgggatgga

SEQ ID NO: 223666 - DNA, 445 bp, Glycine max
  unsure (1)..(445): unsure at all n locations
agcttaaaggagcactcaaaccatgtgtatttatcctctagacctagactctgaagagttcgttagggcctctccctcctgattcaggtccaacccagaaaaacaatttgcaatcaggctcaatctatgaattgtacaaaacacatcgactcctcaattgttntcaaaataattttatctcatctcgcctcaaagtgattaaactcatcgggttctcatagtggctcccatcataatgtagatgcaaagcttcatgggcatggtgaatcaaaggtgattcaaaggtgttntgatgataacaatgatgacaacaaaagatgatgacaatggtgatgacaaacagctcanaggtcaatcaaaggatgagttcaagatgttcaagaaggaatcaagaacaaggatgagtcgaagatgttcaagaaggaatcatgaacaattgacgatc

SEQ ID NO: 223667 - DNA, 348 bp, Glycine max
  unsure (1)..(348): unsure at all n locations
atagctgtntactccccatcggcacatcttagaccttaaaatcaggacctgcgagaggcttcatcatatctaatattacgcattgctttcatatacttatctctagatagaacaatcgttctctatacataagaaaactgacctatcgaggcggagagatcctactagcgtcagtgtgataactcataagaacactactcttgccaaccccacaacctctattgattaacaacttaaacaactagtcgactacttgatgttctcaactcgaatccatctgatatcgtgactcccacgctttctacccacccagttacttataatgagacttcgattacttatagattg

SEQ ID NO: 223668 - DNA, 255 bp, Glycine max
  unsure (1)..(255): unsure at all n locations
acacatggtgcctaaaacatcccacttatctaggcatggcaacggggcccgtcccggacccgccccgattttgacggagaaaatccgagttgatcgggggcaaggtcggggtcgggttcttcccgaagccaaattcgggttcggtgtcggggatgggattcttaatacctgccacgaatccgtccncagaaccgtcccgctgattattaatatatataacacattgaaatatgaaactattagattgaagtttat

SEQ ID NO: 223669 - DNA, 401 bp, Glycine max
  unsure (1)..(401): unsure at all n locations
ggaagagaccttgactcactttatgcacgtgacaatggcatattatataagcactgagtcagcacttaagaaccttgaggtccaggtgagatagctagcaaagcagatagctgacaagtcatccaacggttntggggtaaatacaggacaaaatcccaaggaggaatgcaaagctgtgatgacaaggagtaaaaggcttgtgaacgctgatgatgaggatagcgttgtgcataagaaaaaaactgttgacaagaaaggtactgatggcaagaaaaatgaggagagaggtgaaagtaatcaagacaaagaggaacatataatggtcaagaaaaaagaattgaaggaccaagaaaaaggaacataagtacaagaagaaatagaacatgaactacatgtaaaag

SEQ ID NO: 223670 - DNA, 354 bp, Glycine max
ctatgacaacgattgcaacgcctgaactttgcgatggagttcgagaatgacttcttatatgaagcaactcacgacaaaaggttgagcgagtgccacaggccgattatatagatgctcaaactctgataggtaatcattcacaattcccttttgtcagagcttgaacaaagcactgtgagctcgaacttcgataggtaatcattgtaaaagcaacgcacaaatcaagactcaatggcctgtaacatggctggccatgaggctaagagcccgtttcgtgacatccactactactagtagagggctacgcctttcatgtaaatcgatgtcactatcacgcgttctttgtctagcaca

SEQ ID NO: 223671 - DNA, 438 bp, Glycine max
  unsure (1)..(438): unsure at all n locations
tattgatancctttttctttgccacaacactatgatacaaattggttacattaaacctgggctatatctcatttatgatgagtaaacacacaaatattctcatgagacataaaaatagtaaaatacttttataagacccaacttaaactacagagtggttatgggattttctaaaattaatctattttggttttattatgtgaccagctgaaagtgaaacgcgcacgtatatttcaacttatgctaattgacattgatatatccatcttttttttgtaataactcttgcatctcttttgagcttccaaatatggaaactatgctcaaaatttataaaacttaaattccctcaaagttcatatacatattatctccacttacttaaaaagatctgaaaactatttatctccctggtactttagaggtgtcatagctaat

SEQ ID NO: 223672 - DNA, 411 bp, Glycine max
  unsure (1)..(411): unsure at all n locations
agcntttaatgattntcatatccattatgggtggcatatgatttgcaatatacacttgacgaaattacttattaatttttaagtggggatgtttgcataagatcctagcgagatatctagagcactcatgaatattgggcacacgcatggcctagtagcacaacacaacaataatgtcaagaattgtgtgggtgactgtgattggtaaattactagcacatgctaagtgtttttttaggttcaatagcttgctacacctactatactgtgtcatgtgttattatcagtctaaacctggttcaatagcttgctacatcaggtctcatgcattatcacatatgaacacaaaaactcttttatgctnttcttttaaaatatcttctcaaaatgggttagtcttttgtaatatgt

SEQ ID NO: 223673 - DNA, 482 bp, Glycine max
  unsure (1)..(482): unsure at all n locations
tccatcaagtggtaatcagagcacaagagcttcaagtaggtgctccttataccttcattaattttttgctgtaccttctcttccattgttgtttcttcatttttttctccatgtatctcctcacatgtcttgtgataaatgttgttaacatgattgtttagcgtttccaccgattaaacttgctatagaagctagatttgattttctatggttcaaatttcttgttcttgttcttgaaccatgaattgtgttgagtttaggttcctttgagttttgtcttgttattttttgtggctgaaacctaaaccatataattcttaanaaaatattgaagtagaagaaaacctcaaaaatctagagtgacttgttcacctattgtagttttgtcatagaagtcatgtctagtcatgacacttgtcacataagaattcttatgtngngctgaatttaattttcttgttctttgcttactcatttgtcat

SEQ ID NO: 223674 - DNA, 351 bp, Glycine max
  unsure (1)..(351): unsure at all n locations
cctctnagtcacctgcggcatgcaagcttcttgagcttggtatgaaaagttaagctcttttttaattgaaaacggctctataagaggaaaggtcaatactatgctatttcagaaagattatggaagtcttatcctactcggcaagatatatgtggatgataccatattcagtgctactaatgacttgttgtgcgaggatctttccaaacttatgcaggcagagtttgagatgagtataatgggagaattgaagttctttcttggacttcaaatcaagcacacaaacaatggcttatacacacatcacaccaagttcatgaaagaacttcttgagaagttgtatatggatga

SEQ ID NO: 223675 - DNA, 395 bp, Glycine max
  unsure (1)..(395): unsure at all n locations
ntgagccanaatcctgactcaccataaaccttgacgccaggtgatattgccaatccttaccctcggaagcaaaaaaaaggagagagagagagagagaacagaaggaaaatttccgatcaaaggataaaggagaaggaaaattttcaatcaaaggaaaaaggaaaggaaattcccaatcaaagagtgggggaaagcaaaaagaacagaaagaaaattcccaatcaaagaatgggagaaagaacaaaagagagaagtctaaaagaagaaatctcctggtcagagaaaccagaagaaatgtgccgagaggtccttggaccacacaatatctgaacaatacagaattgtcaccaaatgaataaaaaagaaggaaaggaaaccacgacctataatggtct

SEQ ID NO: 223676 - DNA, 402 bp, Glycine max
  unsure (1)..(402): unsure at all n locations
acctagggaagaaaaaaaacncaacggctgagngcaacagaaaaagnggcaaccaaaagncacccccaacagccaacaagncagccaccatntggtctcccaaaaggctgatgcctacgttgccaattgggcccttattacaacttgaactaaacctaactaaagcccttttagttgattaacccaaaacatatttttggtcagccaactatacaaggattgggccattatttagacaaactaaacactctaaaattgaaacaaagtggtgtcatttaatccttctccatttgggccatgatacaactcacaaccttggactattctccttgaaactngggcttgtattcaaacagtatggacagcactctgtgaagagcttccttggatntccttgctcta

SEQ ID NO: 223677 - DNA, 453 bp, Glycine max
  unsure (1)..(453): unsure at all n locations
tggggctcatctgctgagtatgtgatgggatcttgtataatgttctatggaacctgtantataagcagcgagtgtgactgttggtccttggttgtatgggctgttataacctctgcaaataattctcggctctgagataatagccagcgagctttaagataatgntagagataaacatttggttatagatcaaaggtagaagataatcgtatcttgtagataatgtgtggctttatagataattaattacctgccaacaaataaagttattcaaatacattcgaatattaataggttaaggataacctacttgttacggagcccgactgctaagggtcgagcattcgcgcttctataacatgatcgcttggaggattgacacgtgccatacagtgccatgttggatgccacgtgtgttttgtgtgtctggacagtacataagcccccaagctc

SEQ ID NO: 223678 - DNA, 367 bp, Glycine max
agcttagagtctactttctcaaagacatatctattatactctattttgcttatcttaaggctctaaataatttccaacactgtgccaagtgcttctcacgttgtgctaatgtccaacattgtaccctctagtgcttccaacaatgttcactatttttttcaactttctatgtgtccacctattaaattctgttactgccatgcatacatcaattaactatttgcagtcatcatacaatgaaaatcacactttagagatcttaaataacatatttctcatttctataatactctggaatttctataagagattaagagaacctacctggatccataatgcactttagaacttcgtggttggtatttct

SEQ ID NO: 223679 - DNA, 411 bp, Glycine max
tgtcaagatgtctctctcctcattgtgtatatatacatgttatttgaacgaaataaagttaagctgtgtgagtgatatttttcctcactacttcaaaatctaagtcggcatcagagtgggttccgttcgccatccgccgtctatgccgccattctctccggcgaaactagggttcgaatcgccctggaaagcgagacccaaccctgcatgtcgcgccgccattggagccgtcacacgccgtcactattcctcgcgaattcctgcgcgtgtagttcacgcaccgccatcctttcgtccgaagcttcgcccaacttcgtgtcggcaacttcttcgttctcttctaagctctgttcaggcgttggtctttggttctggcaagttcttgtgctgcacgtgcttcttctatctttg

SEQ ID NO: 223680 - DNA, 480 bp, Glycine max
  unsure (1)..(480): unsure at all n locations
agcttcatcttcaatccaagaagagagtgattatgaggattcaattgaaatagatgaagatgatgatcttagtctctttgtaaaaagattcaacaaattcctaagagttagaggaaatcaaaggagaccaaactttaaaccaaaaagaagggcagaagattcatcctttactccaaaatgttatgaatgcaaccaacctggacatctgagggttgattgcccgatcttcaagaaaagaatggagaaatctgaaaagaaaaactttaatgaaaagaaggcaaagagggcctacattacatgggatgacaatgatatggactcatctgaagattcggaaaatgaagtggtaaacctaagtctaatggccaagagttatgaaagtgatgaagaggtaacatcttcaaataacaacttatccatttcttttgaagaatacaagatgcatttgctgatttgcatacagaatcaantacacttact

SEQ ID NO: 223681 - DNA, 481 bp, Glycine max
  unsure (1)..(481): unsure at all n locations
ggccgcccagctcgcccaggcgagcaagggtgcttccttcataagcaacagcctaagtgggcctgattgctatttacacccccctttntaccaaatgcacccccttctattttttttgtaattctttttccgtaacgttacgaaactttacgaatttcgtaacgatacttattttccttccgcaaggttacgaatccttacagattatgcttntactctttcttagctttcgaagaagttacggaaactcacagattatgcaaaaacacctctttgtgatttccgccacattatggaattntacggatcgtgcaagcctgcttccttttgatttccgagatgtctcgggacttcatttattgtgcaacaaaggacgccaagtatctcatagcggctaaccaaaggttgcatgttatcaagtaataatccccggacgacatagggtatgacactatgtcctttctttcacagtaaaaacatg

SEQ ID NO: 223682 - DNA, 476 bp, Glycine max
  unsure (1)..(476): unsure at all n locations
agctngaagacaagactatacgaggtatcttccttgggtatagcaatatctcgaagggctaccgtgtctacaacttgcaaactaagaaactcgtcattagtcgagatgttgaagttgatgagtacacttcttggaattgggatgaagaaaaagtggaaaagaatggttttatacccgctcaactacctcaagaagaagttgaggaagaagacccaggtgaaccaccttcacctccaccacaacaacatgatcaagaactatcatcaccagagtctactccaagacgagtaagatctttggtggacatatatgaaacctgtaacttggccatacttgaacctggaagctttgaagaagcatcanagcaggaagtatgggtcaaggcaatggaagaagagatacagatgatcgagaaaaacaacacataggagttagtanatcgtacccatggaaaagatatcatggggggtaagtgg

SEQ ID NO: 223683 - DNA, 462 bp, Glycine max
  unsure (1)..(462): unsure at all n locations
ntgcttgtaatggaaggctaagcctctttgttggtgtgtttatactgaacatcttgatgtaatattctcactatctatttaatgttatctctctgtgttcgttgcttctatctatgcttattttatatgcttgtggcttgctcacccatttgtatatgtagttaggctttttagtattggaaaatgctttaaaaccttacaactggatagagcaagttagaaatttgtatgtctaggaatagagtgcagcgatctagtccattttacactctacgcttagtgcacctcttttagaacaagtttgttgatgaatcaagagcatagtctaaagagagttaggctcattcatgtgaggaatcatggttcgagtagtttcttattgtaagaacattacggtaacgttatatacagaaaaacacgtttaatacatcaagagaaattcagtacgacactccccaatgc

SEQ ID NO: 223684 - DNA, 376 bp, Glycine max
  unsure (1)..(376): unsure at all n locations
gctttcccaattcttaatagggagaattttttaattacggtcaaccccttaagcacttctctctctctcgaatttgcttagcaaaactgtctccgtgaagaaaatctaantcnangtgcttccgtaacgtatcacgaacgtttccgngagtgatttcgcgaaggttttcgaccgttcttcgacgttcttcattcgttcttcatcgttcttcggacttcaacgggtaagtacctccaaccaagcttttccatccattctatgcacccgtggcggtccacattgtgttccgcgtatttcccttctcctcctcattnactttccatacccctcttgacgtgcttaagccatcttatttaagtcatttctcgcttaacct

SEQ ID NO: 223685 - DNA, 473 bp, Glycine max
ttaagtcacctgcggcatgcaagcttctagaaggaagattcttcttgttattgtcctttttttccttttattacatttattattcttattcaataattcatatcacactttcttgattattatagggttcctttgtttgagtttacccactaccaattaagttaaagtttatgtgattgtgagtgtgagtatatagttattgaatggtgccaactctctgtgagttagaaagttatagagacttgttcttatgatatccagtgttgatgcatgtcattagtatttctttattttccttgtgttcgttggtattatttttaacagagattggtacaatttgagaaatccaagcatgtgaaggcattctgatgtggtgaatttgatggatgtattgaaagggcggactccacccagagtatgctattaaagaataaaagagaaatatacacgtagagaagatgtctttcttatgc

SEQ ID NO: 223686 - DNA, 479 bp, Glycine max
  unsure (1)..(479): unsure at all n locations
ctcaaaggaattagtaaactaaaattacgacatttatacgtatatattaataatatatactttggtaataattaatatntatctaacaaacttgatcaaacattctgaatgaaatcttttctctaattatattttttatttataaaatttaaatttgagaccttatataataagtattaaactaaattcaaattcacccgtactaaaaacttgatatgtatattcttattataaaatttatcaatctatatacttatttataatgttcaattgatcaatccaattttaataacattgggccaaatgatacaaaatcaagcaatgttatatcctttctcccaaatttttaactcattactgcatgtaggttaaacttgttcaacaacacatgtaattgagactatggttgtttattcgaactgaaatggttgggcattggctaaccacactcnctcaatntacacgaacacatgcccttg

SEQ ID NO: 223687 - DNA, 473 bp, Glycine max
  unsure (1)..(473): unsure at all n locations
agctaaaataatcttatgattccaatgaatgattgttatattacccgatcacgtgtgttagactgtaatatacaacagaaaaaataatgtgaaaaaagcaacaagaaatgtgatcttacaatttagtaaactgtcactgtaaccacttaatcactttcaattcctatatatgatttcactattaaaaaagttattccacacacattgtttaattcaaaagatatttgactctgttacaatgttatatatgcgactaatatctatcctttgggtaggcataccaacatgtggtcctcaccacgattcatcagtttgagaaattgtagtttaatgcttgctagcctatgttggtgctaaattnttaagccgtgcgtgcactttgttccaaagctttcttcttaatttatattcaaatatatcaacattgagttatatacgtacatttcacgaaacaaaaaatcaacattgagtta

SEQ ID NO: 223688 - DNA, 488 bp, Glycine max
  unsure (1)..(488): unsure at all n locations
gacctatgaaactaagcttanattctccacaggtttcctgtcatgaaatctatcattcttatcatcccatctgcaccagccgtataaatggttgacacatttgctgaagatgcaatggctctcacacctctgcagtcgagttgaacaaacaagaaagagaaatcaggaactaaaacccataaaatccacaaagtaacattgattggagtcaccatgtccaatcatcatggagttacagattttaaaatctacagagcattaggtcctaaattatccattaaaatacagtaataaattaaaccaaacttagatgcagtgctttttagtgtttgttctccaatcaaaattagagtttcgtcttcacaattcgcacagttaatgccagccttaaaaagagaaaaggtagtgcagctaacgttatatctaactaacccaggatgacagtcagtaagtctccaagtcaattgaccagaagcgatgtcaagtgc

SEQ ID NO: 223689 - DNA, 469 bp, Glycine max
  unsure (1)..(469): unsure at all n locations
gtcacctgcggcatgcaagcttctagccaaatggacttaccttgaattattttctttatagcccttttgagccttgtttccctttccttgttttgaagctcactacaagccttaagtgaaaaaccatgatattaccatatccttaaggaattttggagctttggaattgttttgggaataagtgtggggggtttttgtttcattggacaacttgttttgttgactatgcttcatgatgtattntgggccatacttgatgtacattgtatattggttaaatgttggacatgctgaatgaaatgttgtttctcaaaggcaaaaaaaaaaaaaaaaaaaaaaatcgaaaaaaaaaagaaaaaaaaaagcaataaagttgagtgaataagatcttaaatggcacaagaatgatgaaactctcggttctattcttcatgctaaaattttatctttacttctctttaatttctta

SEQ ID NO: 223690 - DNA, 429 bp, Glycine max
tgctggcctcagccaggaagtgtagaaattttcaagaaagaatcattttagcttaattgttggatgtacgtgctatgggtcccaagtttacctagaagggtcctctttatcatggcatagtacaattttcacaagacttgatagagccttgtgcaatgaccattggagatcgatgtatcctaatgcaatcgtcaaagtgctttctaaagttcaattcttagaccactatcctcttctcatatcttgccagaccaatttgggtaatgtggtccctagaccgtttcgtgttaagtgtgcttggctcacccattccaattataaggaagttttttattctaattgggataaagacatttctttcctctataatacaagaaggttactaattctttaacttctgagaggagagatagttttgtgtctattaag

SEQ ID NO: 223691 - DNA, 482 bp, Glycine max
  unsure (1)..(482): unsure at all n locations
agcttcccaatgtcttcaagcatcagatcaattattgatctgcacaaggagtccaataaatatgttttcttttatcctccaacaacttacccgctaaaacataggtgctcccattatcagttacaacttgaacaacattctcttctccaacttcctccacaataacatcaagcaactcataaaacttttcagctgtctgtacaaaatcagaaccatcaacagacttcaaaaacatggtaccagcttgagagttaataaaaaaaattaatgatgcatctttttttccgatcagtccatgcatctaacataatagtacaaccatacttgacccattgctcnccgtggcctttcatcaaagtttcagtgtattcaattcccttcttcaggagtggaactcttatgtcatgatagcttggagagggcaaatgtggctcatattgaccaatgggtgcaaccatattctcacacgctttcatttaatg

SEQ ID NO: 223692 - DNA, 338 bp, Glycine max
gacacaaaaactaagcttaacatcagaccacttccaggtgctggactacttcttatattcttgtatgggcctatgcaagttgaaagccttggaggagagaggtatgcctatgttgttgcggatgatttctccagatttacctgtgtcaactttatcagagaaaaatcagacacctttgaagtattcaaggagttgagtctaatacttcaaagagaaaaggactgtgtgatcaagagaatcacgagtgaccatggcagagagtttgaaaacagcaagtttactgaatactgcacatctgaaggcatcactcatgagttctctgcagtcattacaccaca

SEQ ID NO: 223693 - DNA, 346 bp, Glycine max
agcttctcgaggaagcctcttaatgaattcttctcaggaagctacatgaagctatcacggtaaaaacgctgttccgccttcattaaccgatggatcttctcgaaatatggtctgaagctttaaaaaacacgtatccacgacctgaccgttgcgatctttgataccacatctggcgtgtgaggaatgctctcttttctgcgagcagaaacactagagtgtttcagcctctgcttttcatgtagccttggaaaaatgccattctcttcttcttcttttgtctacaaccatctccaatgtgccaatcttgttctccatcacccagagccaccagtagccaccacaaacc

SEQ ID NO: 223694 - DNA, 469 bp, Glycine max
  unsure (1)..(469): unsure at all n locations
ctgctttgcccattacctaccaaatttataatgttttccatttctctctnttgaagccgcatttgggaccttctcccacttctttttaacacattccccctcaatctcgtgccaatgatcccttagtcactcctttgactattctaaaccttcgcatcgtggaggttaatagtgctctcacccccaaagctttggtccaatggtgtggtctttcccttgatgacacttcttgggggaaattgggatgagttatgtgccatccacaaccttgaggacaagattggttntgatggggaaggtattgataccgacgagccaattatgtagaagtttccaattcataatccaattgaagaagcccaagtttatgctaatagaccatcaagagtcgatgttaggtctaataggaactctgactttatatattgcacataaaggctattatggggaatattgatatagatagttc

SEQ ID NO: 223695 - DNA, 417 bp, Glycine max
  unsure (1)..(417): unsure at all n locations
tcttcgccgtcgacgtcatccgccgccgttaaattcgccagcgagttcaggtgtttgtgcgcctcgaggagcgcgacacaaccccgcaaaccgcgtggccagattcgccgccacgcgccgatctacagcagcgcctcttcccggcgcgtgaagcccacgcgccgacctccggccaccggaatcgcgtcggacttgtctcaaacggagcgtcgtcttcccctgttttcgttccagcctctagtgcagtgtttacatgtcatttagtgcttcctcctctctactccgttagggttattgttcttccatgacaaaaatgcacgctcctggtcctgttcttacattctctggaactcccaccattactactggcacactcaactggaanaactatatgtcctggtctgcttccgtggagta

SEQ ID NO: 223696 - DNA, 477 bp, Glycine max
  unsure (1)..(477): unsure at all n locations
ggacgaaacaacgaggttcctctctgatatctacttttgttctctngaaactgnagagtagaataagcttaacatgaaaacttcatgtttctttcttgtaaagattacctttagaatagcttacaaatccagaagtgctagttctttcgtagagtacactttcttctctcacatttaagatgagtgaaacaagatacatcagaggaaacaactaagttgatccaataactgtaaacagaatttagccaattggcacacacaaatatttggcaagcatgagatgccatacattttcagttcataaatcagaatttcttagtatgacttctaagctaaaaacttattgtagatgatagtgtatgattgattatttactacaatgggaccaccaacaaatgtatgtttcaatcaatctaataataaacgatgtgcttaaaaaaatatcaaaaagtgtgttattagtattctttctcatat

SEQ ID NO: 223697 - DNA, 433 bp, Glycine max
  unsure (1)..(433): unsure at all n locations
agctnttcaccaccaacaaacaacaacgataaattttntttaagtgtgtatcttgaacataaaaggggtcaagataggtcatataaaggggaggtacagggtggggacgaaatttaaacttttgttgtccctcccaccacctttcaaaacaaataaaggcagcactgcacctcctgaaaaagcttctaaaaagcttctaaaacactgcatgcatgcaggctatgcattgaaggagaaaagctcctgaacattgcatgtcggcacgcgtttcgccaatggggttggcggaatccatggcatgcgtttcgccagtgcgatgcatggcatgcgtccatgcataggaggnggggcgtgaaagcatggccgtttttcaactgggctacggcaccatgcatgatgtgtntccccattggtctggaaaaaccacctgcag

SEQ ID NO: 223698 - DNA, 322 bp, Glycine max
acttctgaatgcaccttgttacattctttccatcattcctgtctctttgcaagtgcccccacaccttgcaatacctatgcacctatacctgcaaagggagatatctatagttggtctagtggtgaaggaagaagtttaggggagagaattctcaagttcgaatcctcttgctagtcgaaactaaaaatactctcacctaatatgtgcctgatattaaaaataaaaataagatcgtttcctgctcaagaaccacgtacactaacgaggtgctaagggacgccatggaaggaagccaccacttgtgacaaacacttatgtgggc

SEQ ID NO: 223699 - DNA, 367 bp, Glycine max
  unsure (1)..(367): unsure at all n locations
tgttctccaatgcaatggacattggcaacttgtggttatatgtcctaagaacaatgttgccgccttatttcattccttgcacaataaacatgacaactacttgagaggaatggttaataggttagttctaatttgtaacagatttactttatccttagtattatacataaatattttagtcttgaaatatacatgtatgtttctcttaaccaatactttgaagggattcaatgataaacacagaagtaaatctgaggcaaatgctaaatggatttaagtaatttaaacaatgtttgatctctntcaaatgacaanttattagtttgacactaattttgggataaattgaattagtgtataagcaaga

SEQ ID NO: 223700 - DNA, 477 bp, Glycine max
  unsure (1)..(477): unsure at all n locations
tgtacgattcaccccaaattccggtgtcatatgctatcttgttcccatatctacttgataatgcaatggtatccataacccctgctaggttccctcaaacccccatttttctgaggatacgactcgaacgcaacatgtgcatatcgtggaggagccctgtggcattccgttgagcactgtatgaccctcaagcgtaagatgcaaggtctaattgatgcgggctggctgaaatttgaggagaatcgcgtgtaaaccctgacattgacaagagatgccacacatggggcaatnttgaaagctgttgttagatgtctctaatgactcatcaggatttttaagtacaagccattggtcagtttgctcaagcgacctgtgctcctgagttttccaagaccgttcaatcagagattactcgtcttgcacgttggtggggttgccgtacaacaacatgtaaagttcacaacanataaatttcaa

SEQ ID NO: 223701 - DNA, 433 bp, Glycine max
  unsure (1)..(433): unsure at all n locations
agcttatgcagntaatgaagtattaactttattttctcagtctcattggntaaaaaaacgtattcattcgattatgggtagagttattataactaaccaacactaaaaccaattaactttatgggtattcttggaataaaatgtaaatttatgtcaattttaattagatttaacaattctatttatcttaataaattaaatatttattttttatatataaaatccgaggtagtataaaagtagataacaaaataagctatttatctatcttattttggtataaatcacatatatctttcattgaaaataatattattcgagtcgaataacactaccctaatcatcaaagttctcccttcaagtatttaatntagctacatatctataactttgaacctgaaacttatcgtaaagctggacacatcacaatata

SEQ ID NO: 223702 - DNA, 475 bp, Glycine max
tccatcaaggtagctccttaccatccatgttggaattctcttgcccctccggaaaaagcccttttcacaacgaaaggcccttcgtagtttgtggcccacttccctcgattatctttaacagcgtgggacatcttcttcaacacaaggtccccctcatggaacttgcgcaagcacaccttcttgtcgaacgcgttcttcattctttgttgatacaagcgcccatggctaatggccgtcaagcgcttaccttcaataaggttgagttggtcgtagcgtgtttgagcccactccgattcttctaagcctgattctactagtatcctctgggaggggacctctacctcaaatgggagtactgcttccattccataaaccaaggaatatggtgttgccccaatagaagttcgtaccgaagttccgtatccatgcacggcaaaaggcaacatcttatgccaatctttgtacgacactgtca

SEQ ID NO: 223703 - DNA, 330 bp, Glycine max
  unsure (1)..(330): unsure at all n locations
agctntgtgtggagcttcaatggagaatgaataagaagagaatggcnacgtgagggagagagagggctgtctgaaatttctgttntgctgagtgaggagagagaaaagctttttggtcttaaataaaaggctttcctctttgtctattattttattcaagctctgccacatgtccctanttgattggagcaaaaagggcccactttctctttttgactgtgacccacactcagtcacaaaagtgagaaaaatctgacctttgaaacgctaaaatcctgcctcagtttgcgtgccggttctctgattccagtttctcgcgtttctctgcgt

SEQ ID NO: 223704 - DNA, 479 bp, Glycine max
  unsure (1)..(479): unsure at all n locations
tgcttgtggggcttctatggaggatggatcttgagcttattgaggtcctttaatggtgattttccaccatggagatgcagcggaagacaaaggagaagaggtgagaggagacgccatccactaaggaataagccatggaagaaggagcttcaccactaagatgagccttggataagaagcttggaaggatgcttcaatggaggaaaaaagagagggagagaaagagagaggggggagcacgaaattgaaggaataaaagagggagagaagtggaactttgaagtatgtctcacaagactttcattcatcagttacaacaagtgttacacatgcttctatntatagactaggtagcttccttgacaagttttcttgagaaaacttccttgagaagcttctttgagaaaacttccttgagaagctagagcttagctacacacactcctctcataactaagctcacctccttgagaagcttc

SEQ ID NO: 223705 - DNA, 415 bp, Glycine max
  unsure (1)..(415): unsure at all n locations
agcttaagaaaatatagcatctatgttcctttggatataaaaggctttccttattgcggtgaaggtgaacttatgaagatcataaggcanaggaagtctatggtaatgtacggaactacgtaaggaaatttgtacattttttaggggtccactgtgacaagctctgcctctactgtttcaccgtctggaagccatgcatctaatggcttgtctaataattctctatgacattngcgtctcgaccacatgagtgaaaaaggcatggatattctaagcaagcgaggcttacttggaaatcacaaagtggaacctcttcagttttatgaatattgcatctatgggaagcaacatctgacgaagttctcaaagactatccacactacacaggttatattggactacgtccattctgact

SEQ ID NO: 223706 - DNA, 439 bp, Glycine max
tggacaggtgttaaaccaaatgtcatcacatttagagtatttgggtctggttggtataggcatgtgcctgatcaacttagaacaaagctggatgataaaggagaagtgatgattatggtgggttatcattcaactggtggttacaaactagtgaatcctgtgaacaacaaaattgtgataagtagagacatagtatttgatgagggaaaagcgtggaagtggagtgaaaagggagagagttctactggtgtagaacaaaatctgtttgatgtgcctgctggtgaaactgagtcagacattgagggtgaaacagggccagttgaagataatgatgatgaaggtggtagtcctgagatgccaagaagatcattgagacaaaggcaggttcctgcaaggttaaatgactatgagataatgcctgatggtgcaattgatgatg

SEQ ID NO: 223707 - DNA, 242 bp, Glycine max
  unsure (1)..(242): unsure at all n locations
aaaaccgagcacngaaaaaggaaatgtttccaaaaaccatacaaagcagaatcgaaccgcacagaaacaagggtacaagcgtatatggaagatcacaaacaagaaggaaagactgcaaactgtgctgaaggaaaggacagaaaaaagaaggaaaaatcagacgaaactgcggagcaggatacacacaattagataaaactaacgattcaagaccaagtcttcgcagaaactacagaaggcac

SEQ ID NO: 223708 - DNA, 456 bp, Glycine max
  unsure (1)..(456): unsure at all n locations
tctaactgacattgcaacgttacaaatgattttctaatggtgtaatcgattacaatatattggcaatcatataccagtgcatttgaacgttgaaattcaaattcacatgtgaagagtcatatcttttcattaaaagcattgcgtaatagactacatggttatggccatctactactattgacagttttgaataaatgtcaagagatgacactnttccaatggttctcttgaccaaacatgaagagtctataaaagcatgaccttgacttgcattcataaaactttttgaacaatttcttgaacaacttatgagaaatcatgaaacctttgctactcatctttcttcttcttcttactctcccacaaagctttctaagatttctgtttccaaaccttgatcttcatatttgcacaaaacaaaagtgggctatatctattcaatttcttctctctttg

SEQ ID NO: 223709 - DNA, 522 bp, Glycine max
  unsure (1)..(522): unsure at all n locations
cgtgatccttcaagcaccgcggctgcagctctccctatttcctataatagggngagaggtgaatggaaaatatgcttatccctcctggtaattcgagaatcacttgaaattagtgaaaaagatggttttgtgaagaaaatccaagccgaggcgcttccgtgggtgatttcgtgaagaatttcaagctttcttcgacgttnttcattcgttcttcatcgttcttcggtcttcaaccggtaagttcccgaaatggaacttttcaattcattctatgtacccttagtggtcctcannttgttcgcgtacttttattntcattccatttactntccgtaacctctttggacgtactttagtcatttacttaagtcattttctcgcctaatcaaaaaataaaataacatttcaccgatcatttgaattgtatatccgttaattctgtaanatgaaatcnactgttcgtcatgtcataaccacgtnggaaccanaagaggtaaataatatatataatcaaaatatctt

SEQ ID NO: 223710 - DNA, 336 bp, Glycine max
  unsure (1)..(336): unsure at all n locations
atgccccacattatntccatgacacaaatgcaaaaatgatgatttggaaactttatgcaaaactggtcatgcatgcacctatgcggacactcaagtgtcaaaattttatggtcatgtgatgctagggctcaggattcatttcctctattttagtcaacccaacgtttccaaaatatgttcttttatcaatgtgtgcattcatccgagtccatttcgggcgtctggggaaaattcacagcattcacccttcaggtgtagacacattttccaaaaattgtgtatgatcaatgaattctttcacagaaaagctggacgtcatctctttccanaagcatg

SEQ ID NO: 223711 - DNA, 458 bp, Glycine max
  unsure (1)..(458): unsure at all n locations
agcttagtgcgtcttatgaaattttactcatgagctaagattctttgccattctctttgtaanagaacatagaaagggcttcttctgcaaaatactcgctaagcccacttccataatttttaaagacagagagggattagcgcttagcgcggcaaggcgcacttagcgtgactactctactggacaacacangcttagcgagcagactcactaagcccaattcctagaagtataaaaacatagaggtaattgtgcttaacgtgacaggcacgcttagcgcacatcanaacacaaaaattctaagtgtctgatacacaacacttgcttagcgcacaggtgtgcttagcgagttcaacagttaactttaacatataatatgaatgcgcttagcgtgacaggccgtacttagctgtgtcatttggaaatccagatgttcatcacaaacaatgaactcgctt

SEQ ID NO: 223712 - DNA, 291 bp, Glycine max
  unsure (1)..(291): unsure at all n locations
atcttcagcactgagctgcagcttatcttctattatgaagaagtgaaaagaaactttttgatcttttttttntagaagaagatgatgatttcagtctctttgtacaaagattcaataaatttctaaggaacaaaggaaatcaaaggggatcgaacttcaatccaaagaagagaggagaagatttctcctcagttccaaaaagctatgaatgtgatcaaccaangcacctgagacttgattgttctatctttataaaagaatgacaaatctgacaagaaaactttcaagata

SEQ ID NO: 223713 - DNA, 364 bp, Glycine max
  unsure (1)..(364): unsure at all n locations
atttcaatttctcactatatataatggatcattntcaagggccaacgccttataatgatcacctcttaaagtaaaaaaagaatcacttgataagaaagaactacgtatatctgatttcctcatcgcaattgaggaatacgtaggagcaaagggaaacagccttgtcgaccaccaaaagagaaaaatataaaaagggtataaaggatataatgacttaaaagggaacataaaaaatcaaggtcatgtttgcacattcgattaaaggctgccgtcccttgngacgaacgtgtggngtgctaataccttccccgtgcgtaaatacaactcccgaacctttcacttataagttcgtagatcgcgtctt

SEQ ID NO: 223714 - DNA, 478 bp, Glycine max
  unsure (1)..(478): unsure at all n locations
agctnntctagctttcattggtatatattgatctcctttttgtgctctaaattgtgggagcgcgcccaaatatatggggcaattttgatttgttttcttgcttgattaggttgaattacgggttggtatgagatggccctaggcctataatgcattnttaaacaataagacatgccacgttgtccccgttctcttgctattgatgcctaaacgcgcgcccaccaagtgttcggtgaaatgcctcaatggcattagcgcgtgacttttgtaaggagacaacccattggggtatttggtttgtgcatcatttctattntttttggatatgtatcattcccaaaaaggctgagtaatcgccacatatccctagtctagaactgaatttatgcaaaaaacacaaaggaggtcatattggtaaagtatcctttttgccagcaatagctatggccacgctcaatatttccctatgctagatggt

SEQ ID NO: 223715 - DNA, 446 bp, Glycine max
  unsure (1)..(446): unsure at all n locations
ctaagcttgaggatntggtctttgccagngaaaggatcaatgtgggtctgaattatgtttatttttcatcctgcttggacgaatgagaaaactggggcaaatgaagacggtgagaaagagggagaaacccatgctgtgactgccattcctatacgaccaagttttccaccaacccaacaatgtcattactcagccaataacaaaccttcaccttacccaccgcccagttatccacaaaggccatccctaaatcaaccacaaagcctgtctaccgcactttcaatgacgaagaccacctttagcacataccaaaaaacaccaacaaaaaggaattttgcagcaaaaagcctgtagggttcacccccacattcgttgtcatatgctanaccngatcccatantcactcaataattcaatggtagccataaccctcacctngcattttc

SEQ ID NO: 223716 - DNA, 328 bp, Glycine max
agcttctaccgtttcatactcacttattttttatacattctttctctaaccaaacatataaaatttaagtctgattgttgacgtcatcttctatctcctctttatatacatttccaattcattaaatgaagcaagatgtttaacatggagctttgtcatgaaaattaagttagcacaataatttgtttactgtacaaaaaaatattcgctctaaatggagaatatattacattaacaatacacacgccaatatgctaattaaaacacgtgtaatatgtatcgaaactaatttgataaattatagtattaaaaatatcatctaattaac

SEQ ID NO: 223717 - DNA, 313 bp, Glycine max
  unsure (1)..(313): unsure at all n locations
aacatccccntggcggctccttccctttttaccaccaccaccaccaaacttgtttatgccaaacactcaaaccccttccaccgtaaatcctcaaaggtctcaaacatttccttcaatcccaccaaacaatcccaccatggtttcaaatgacgaagctggttcgcaatctccataattctatacccaaattacgttagaagagaacgccgctgaggaaatatgtaggtcttctacaaaaaggaagcctcaagttgcctttgaatcgaagaagaacaaaccaattagttaaggctacatcaaaccgaccaattgt

SEQ ID NO: 223718 - DNA, 460 bp, Glycine max
  unsure (1)..(460): unsure at all n locations
agcttgatatagaagtatcaatagggtcactatccaacataccaatttcttctcaaatatccaacttatatttcttggtatatggctgtggatgacgtatcccctcaattccagagaaagcttgtctcccccaattctttataatttaattaagtgaaagcaagatgtaaaagtgggcgttttcattnttcacaccttaagcccaanaggatntatgagggttctaaagatataatagcaccattcttgggcctctctacttaacaagttaatctcttgcattggtttggtcttgacattggctntgtcctttnttggtttttggttatcagtttatcacatagccacactcattcacctcanaagtagagtcatgtaaccattcaaatatgtaaaatatactacaaaagaactntcattcaaatatgntaaattccctagtgatattatgtccttttat

SEQ ID NO: 223719 - DNA, 347 bp, Glycine max
  unsure (1)..(347): unsure at all n locations
ggaactcatgatcccncttagtttttgttctatctcaagggtaacgcagccatttgtcagagcatcatggagtctatgaccacaacgagtcgtgatgaagatggatctgtgatagcggcaaaactatgtcagtcgctggagatgttgttgtattgtgaaagatgtangaaagaagaatccgcggaagaaatggtatgacaaagaaatgatcatgataacattttacactttcatagatttatgtataccatacataaattatcatagtagaccaatcttaacttaacctttatgataaataatatcacaattataagagctactactcaatcatatgtaatgactta

SEQ ID NO: 223720 - DNA, 498 bp, Glycine max
  unsure (1)..(498): unsure at all n locations
agcttatacaattaatatagaacctatatcctaatgtcatatcctatcagagcgnngngttcccgtgtcctttagcatgaggttcttcatagtcatccacctattcatctgctccctcgaacacaagtttaagatcatcacaggatccaaacacaacaacacacagagagtgagttatcacattcctagctaatagagaaacaagacaattaaatatacatattatataaatgagataccacttgcttaaacatagctcaacgtacttcaccacttcggcattcaaaattcactttttaatcatcaatcacactacacangaatcccanacttcgatcaagatataataacacatcaattagcaagcatatgcaacagttatgctaagactcaatcctatatgcgatgtggtaccatgtcagtgagaaaccaccctggggcgcttangagtacataacaagacacaccacaccatgggtttgtcaggttactctcact

SEQ ID NO: 223721 - DNA, 446 bp, Glycine max
  unsure (1)..(446): unsure at all n locations
atactaagcttcataaacctgccctctttacaaagaccagtgatcatgacagtttatgtgctcacatctatacaatagcccttatccaagagatgttcgaaaagctcttgtgcatatcttaaatcttacacttttacataatccatcaataagtgccgcgtatgtgtacttatttggctgaattccgcattccttcattttcatgaatagagcagatgccttgccaaagatctcgtctttgcataaaccatctaataaagaagtgtaggtgactacatcagcttcgtgacctctgtgggcatcttcttcataacacccacagcagaagtaattctccctgattacacaaaccatcgataagaaactgtactcaccttatcagaaccatatttnatgcaacattcctcttacgagattatggccttatgcacccttttactcttaca

SEQ ID NO: 223722 - DNA, 263 bp, Glycine max
  unsure (1)..(263): unsure at all n locations
agcttaaagggaaaatttatggtgctaccatatggtcacttatgctntatttngnngantnttaaccgagtatcacagagatgaaaatgcttcaatttgaataatgactgtatcaganggaaagtaagtgtatcatctattcatctattgaggaacacatggtagaatagcatcttatattatttggtcatgtgagaagaccatngaaagcattggtaagaagagttaattagatggaggataacccaatagttagaggtagt

SEQ ID NO: 223723 - DNA, 342 bp, Glycine max
catgaaggtatatttgacagtctgaaggataatcacggaatcttaccttatgtgcacgagctctctgatatttctggatatggcaatatgctaacaagccttgattcttctcagtattgaagttctgtgccaccaacattacctaaatgtaagcgtcttaaagagtcaacaataccatttatcgattccttgtgatatgaaaaaatatgaattatattcatttgatcaaactcgagacaataattctaataagattgcacaatcatttggaatgcaagcaccccttgatcctggtcccttctcgcacagatcaatgtgttacagccattcacctttaaatgg

SEQ ID NO: 223724 - DNA, 384 bp, Glycine max
  unsure (1)..(384): unsure at all n locations
aagaagtattaacaatacaaagataagtgagcgcaaaactaactattggaaccagaaatgtgggcatccttttaaattaaaagggagatttatgagaaccataagatggaaacttattgtagaatgtgattntcataaccataaagtgatggcaacatatcctgggcattcatatggtagtcgtttagcagtgaagaaaaataatggtaaccaattgccaaaacatgtgaaacctgtcaagtttgtaaccatcaacaatgtagcccatcatatcatatacaatgaagtaaaaatatccaaccaagggctaggatggaaaaaacattacaagtgaaaatgcaaaattgttatggttagacgtaacataaatgtgtagaaatatac

SEQ ID NO: 223725 - DNA, 481 bp, Glycine max
  unsure (1)..(481): unsure at all n locations
ngctnttcaacgaagccaggtgatgcacgagacactagtgtatcttctcaggaggtgtgtggatatggtcagagaaatgctcttaatgttggtaataataacaaagtaacttctgttagaagcgagcattctgtgataaatcctcagatggctccatcgtggtttgagcagtatggaacttttaaaaatggtaagatgttgcaaatgtacgatgtagggacaatgactcctcanaaagttatggagcatcctttaattataaggaaccaatctggtagtttgcatcttgctaattcaatggagcaagctaatagtctcagtgaggctgggcaaaatccaatgcttgcttcagttgcaagtgagcatctgccttccaagttattgcttccttctgcagttgaacctgatctgtctagtatgcgaccaaagaagcgtaaaacttccacatctaaactcataccatggcatanagagctgagtc

SEQ ID NO: 223726 - DNA, 515 bp, Glycine max
  unsure (1)..(515): unsure at all n locations
ctaagcttccacaaaacttgtatggccatttcttatataaaatctcactctctttgtttaatttatatatctaatgggtcatagtcgtatacctccccgcggaatggctctgaagacctgtaaatatgactgtgcatttgttttcttttccatgtgtccattcctgagcatcaatcacgggaatggaattagtttattatacatgaacttgaaatgcatatgattttcatttgcatgaaatataaggacgagtggattctttttcctttcttttggtgaggaaaaacaccctcattcatgtgtgtgtgtgcgcgagtgagacacagagatccagaaacaaagtgatgtccacctaccttgaatgcagggcaatctaggattagagaaatggccagtggccacaaccactgcgtcaaagacttgttcaacttcctcctcactcttgntctctntgcttctaacaacccatttcanaatctcactagggacacccataattaatggtcctacataat

SEQ ID NO: 223727 - DNA, 482 bp, Glycine max
  unsure (1)..(482): unsure at all n locations
agcttgctatganagacgagatgaagtcgaagtctttaatctccaatcatacatgggaactagctgagttacccatggggaagaaagcacttcacaataaatgggtgtatcaagtaaaaaatgagcatgatggctctaagagatacaaagtcctcctagttgtcaaaggatttcagcaaaaggaaggagttgactacactgaaatctttgctcctgttgtgaaacttaatactatcaagtttgtcttaagcattattgctagtaaagagctctaccttgagcaattagatgtgaagactgcatttcttcatgaagacttagatgaagagatttacatgcaccaacctgaatgtttctcagaagaaaggaaaaagaatatggtgtgtagatngaagaaaagcttgtatggtctanaacacaccccaagacaatggtacaagaaagttgaaagctttatgcacaacgaaagtttctagaagtgc

SEQ ID NO: 223728 - DNA, 489 bp, Glycine max
  unsure (1)..(489): unsure at all n locations
tactaagcttcctatgataagagcttaccaaataagcgtgattaagctgtttacactttcacttttctntatgcattaaatctaactggtttactttagattaaaaaagaagggaaaaggtttgtcgtgcctcaaataaaactggcttgttcttttacacttgcatcgtgggtgggtacccattctggtaacaaataattacaattgttcctacaaaatagtgagtgatgcagaaatagagaaaacatgtgactcatggccagaagctgtgaggatacacgaaacaagctttaaattagttcacattgagatataggaagcctccgtatccatgaaacatgcaattcaactcattgaanagagatgttccgtataaatttgtataaagcaaaacaaaatattaggttcatattgattattgnatacaatcaaacctacgagactgaacaatatcagcttcgtatcacagtcaagtcatttactttaatc

SEQ ID NO: 223729 - DNA, 490 bp, Glycine max
  unsure (1)..(490): unsure at all n locations
agctntannaattgaattaaaatgttcagaaactgctgattatctattactatatatgtgtaancgattacacagtgcannatttgaattcaaattntaatagctgttgtaaatcagttntggtcactggtaatcgattacatcctctggtaatcgattaccaaagagtaaatntgttgaaaaagactntttaacttanaatttcttggccaaaccttntactacttcaattggaattcccttcctatntcatataccctntctaagactctagagactgtcttgatcatccatcttgaatatctttaatttctttgtcttgaataaagctttgagactntgagacacatgtganactttggcatcatcaaaacattcagcttgatcctttgtctacaatctccccctttttgatgatgacaatccctgaaatcaagacaagtngtatacaagatgatagcacgttcacacaacccttagtcccnctatc

SEQ ID NO: 223730 - DNA, 413 bp, Glycine max
  unsure (1)..(413): unsure at all n locations
gaatgatttcaagaatgagtcaacaagttcaagatcaagtttaatttcaagtttcatgagaagaaatcaagaagattcaagaatcaagagaagattgatttcaagattcaagagaagatgaattcaagattcaagagaagaaatcaagaagacttcacaagggaagtattgaaaatatttttcaaaaaacaacatagcacagtttcgtttttcaaaagagtttttctcacaattttctaagttaccagagtttttactctctggtaaccaattaccagtttcctataatcgattaccagtggcaaagtttgatttcaaaagtntccaactgaatttacaacattccaattgatttcanaatggtgcaatcaattacaagatattggaattgattaccagtgcattcagaacgt

SEQ ID NO: 223731 - DNA, 341 bp, Glycine max
  unsure (1)..(341): unsure at all n locations
agcttcagaccanagcaattcanaatctaggtatccaaaacctctcaatttattggattntcaaggtttgagaagtgaanatgagagtggngtaattttggagcatactctcatttcacacaagtctataacattaatctaaacttgctcaaactggttntacgactaanactccaccaaatcaaaaattgacccctcaacactcaatntaccctagaaatggctcttggtttcactttggtcattcattggtcctcattgctcagcccaagctttcccacatgntctaaatgacattntaaactanggataactcactttaaccttcaataccactaaat

SEQ ID NO: 223732 - DNA, 340 bp, Glycine max
ttatgatatttcaagaaacagatacaatccagattggagaaatcatccaaatctgagatgggcaagtccttcacaacaacaacagcctgtccctcctttccagaatgctgctggtccaagcaagccatatgttcctcctccaaaacattagcagcagtcacaacaaagacaacaagcaactgaggctcctcctcaaccttccttagaagagttagtgaggcaaatcaccatccagaatatgcaatttcagcaagaaataagagcctccattcagagtctgacgaatcagatggggcagatggatactcagttaaaccaagctcagtcccataattatgac

SEQ ID NO: 223733 - DNA, 442 bp, Glycine max
  unsure (1)..(442): unsure at all n locations
agcttctngatctggnttnctcttccctggcatgactatttatagaantatgccatttgtgcaggggaaactcacccagacgagctgcttgctaagggcagaaagtatcagctcgcccaggcgagtgacttgcttagggttgaagttttctcttagcccaggcgagctagactctatcctatgtgaattaagggtcagcaatattcatgaaaagaccattttgccctctcttttagctnntgttctggatctaacaaacaaccatcaaaacctacaaaatcatggatgaacctttcatatttaaacaacaatattagtaaatgtacaatatatagttacaactnagtntaaggatagtttataagaaaatttatacaattaaaggatatgtgctaacaatntaatcccaacaataactgcaatatggcacttatcacgtata

SEQ ID NO: 223734 - DNA, 475 bp, Glycine max
  unsure (1)..(475): unsure at all n locations
tatcacgaactactctncaactctnntattcgtgcaaaagcctacaattgtntgtaaaaagatttcaaaagtttccagagatcatattgagttccaagatacacatgaagctatagtcaatacaatctntggcagtaaccacacaagtatgtgagacttatgaaaattctgagataaagatccaaagaaaatgacattcttttgcaaaaatttcatgatttggaaaaactcaatgatttacaaaaggatttaaaacaaaccactgagctttatgatgatcttaacgagggtagatatgatccttggaaaaacaatgcacatctacacaaaagattatgaggacttaaaaagtacgnatcttgatcttcggatagaatgtgcaactcaaatgactcgcgaatatatacaaagatacagtcttgaaagaagatgccttaactatctaacctaagatgtcgaaaactctatggaaaat

SEQ ID NO: 223735 - DNA, 306 bp, Glycine max
  unsure (1)..(306): unsure at all n locations
gatctctgagcaccgccgctgcaacttggccgtagtaaaaatcatttttggttttctgcacanaccaaacacncgggcgcctaatttacaaactgatgactggggtcatctgtgaaaatattaactgatgcttttgattactacaattattaacgtgaatgaaatctcgagttttttaataattagagaggtttaactaatctactatactatatatatatatatatatatatatatatatatatctgaacagaaagcttgatgctatggagagatatgagatgacaatctcgaatgcgtgttcta

SEQ ID NO: 223736 - DNA, 485 bp, Glycine max
  unsure (1)..(485): unsure at all n locations
ngctntgagaagcatgtgatccgttggcatcatcaaaactctcatcttgatcctttgtctataatctccccccttttgatgatganaatccctgaaatcaagaacagctatatacaagatgatagcacgttcacacagcccttactccccctatcttttggcatgcatgcctaactttaatgattntaattgatttctaacccaagttctaggttctctcccgccttggcaacatcaaaaaagaattaagcagaacaatcaatatctaaacagagccaaacataaaaccaaaattaaatccatacattgtcataaccaaccaaagganagtcgagaaatataatagaagtgcaagaatacgataactagagcaacananagccaaatacacggcgataaaacatagtactaataatacttaatcataataataacaaataagctaagaggatgatggaggcagtggtggtggatcanagcaagta

SEQ ID NO: 223737 - DNA, 297 bp, Glycine max
  unsure (1)..(297): unsure at all n locations
atcctctgagncacctgccgcatgcaagctngtgataatatatgttaactcatctgtttatantattttttgtagatnnaacaaaaagaaagtgttttaaacagataaacatggacttatgattgctgaccgcatcgacgggtgcgaatgcaagtgcaagaaagaattaaaaaaaaaaaggaagaaggatagatccgaatatatcactagggaaagatatggtgtacgcggcatgcttgagtaattaattgaattactatattactatatgtanaaaaagcagggggattttggagt

SEQ ID NO: 223738 - DNA, 472 bp, Glycine max
  unsure (1)..(472): unsure at all n locations
agcttgtaggccttggatcttcttcatcaattccctttgcttcttgaagatcaanggcagaggaatggagaaggaggaaaggtgattggagatgccacttcaacgagaagatgagtcaagaacttataggtagaagaagatgagtggagggaaagggagagaaggggcacaaaatttatgcctcanatgaggtttgaactctgaagtgtaatttctaaaatgatcaaagttgaaaaaatgcacacacaaggcctctatntaagcctaagtgtcacacanatatggaggggaaattgaattcaattcnatttcgcttgaattaaatttgaatggggagccaattagagccaaattcactatatgatagtgatttagtatggtcacccactaatcagacaagtcaagattctcataagttgctangtgtaaaaggatgtnagcatgaagacatgccaaagtgtgactatatgat

SEQ ID NO: 223739 - DNA, 426 bp, Glycine max
  unsure (1)..(426): unsure at all n locations
cgngctanttattctntgcatctcttctacctatgccaaaaagaattctttcttgactaaccgcctgaattcttgtgtgtctcccttctcccttgtcaaacaattcaaaatgacacagtctgagaattcttttgattcttccctttcccttatacaaaagttttcaaaggactaaccgcctgagaattctcttgtatccccattcaccaagtatcaaaggtttaaccacctgagatctttgtctgaacacattggagggtacatcctttgtggacacagagagggtacatctacttaagttgttgactgagaacaagagaaggtacatctcttgtggatcagttctagtggagggtacatncattacgttcaaagagaacaaggaaaggtacattccttgtggatctttgcttgtataggatttta

SEQ ID NO: 223740 - DNA, 280 bp, Glycine max
ttcacaaaccaacacccatacaatgttgtgagacacgccgaatgaacccacccacacgatcccagggcaaggagcaaacaacaaaagcacagctacaacaaagccaaaacaaacaacaacgaaacccacaccaccagaaggaacacaccacccacccaaaaatgaaagacaaaccatcaaacgaacaggagcaaaaaaaacaaacgtgcccataacaaaaatacaaataaaacagaccatataacacaaataaaaagagagcagtacacccggcgagcgc

SEQ ID NO: 223741 - DNA, 496 bp, Glycine max
  unsure (1)..(496): unsure at all n locations
agcttcccagatatggagagctaaatcctctattggttcttccttgtangtacttgatgtaaataccagtatatccatttaatcatgttttatgtgttctctgtgctatcagnatgtcatttcagtgtgcttttgccttgatcacgtagatgcatgctttgntaggatcattcaatagtggaaactggtctgattcttagaacttgataggacagggctagtttatcgtattatcacgagggatcggngtattggaacctaagtgntnggatgtttgtcttactgcggttttcatttgagttagctcaacaagaggaatctgaggatgatgcttgatcanngataggctggactatcataaggaatcggngttagcatttcagggacaccatagaacacatgaacattgntangtanagaaaatatcttatacatcaggcacctaataagaagacaacatgtngtctacttgtctttacacatcattactcacgtg

SEQ ID NO: 223742 - DNA, 375 bp, Glycine max
tgtgcaaagatagagatgatacacaaagagaaaacatttttcattttattatgttggtgaatggaaaggtttgttctctaatcattgatggtggaagttgtaccaatgttgcaagcactagattagtggagaagcttggtttaaaaaccacccctcaccctaagccttataagttgcaatggttgagtgacaatggtgagttggttgtggataagcaagtgttacttacattctccattggaaagtatgttgatgaagtgctctgtgatatggttcccatagaagtcggacatgtgttacttgggagaccttggcaatatgatagagatgttgtccataatggggtcaccaatcgatattctttcttgaataaag

SEQ ID NO: 223743 - DNA, 500 bp, Glycine max
  unsure (1)..(500): unsure at all n locations
agcttgtcagccacgacgcccaagtgctattgtacttctactaatctgtangttaaggattacgtggatcggttggggttatttggccttattaaggcatagtatgctgccaacaacaagggcttgatggatgtcttaatggagaggtgacaccaaacgacgtcttccttccacttgtttcttgaagagatgaccatcacttangatgtgtgtcttgtttgatgcacttgcttgtgatangcagaactcgtgaccatcatgtctcctcactttttgatagagaggtggtgaaggtcctgctgatgactcatcttgacattctgatagagatagaggctacaacaaaacaaacacaggtgacagggtgaggttgacatggctgacagatctttattggagacatgttgagttagactcttatgnttgggctgcatgacttatctagntgcactngattggagtatganattgccgacaaactctataacatcatgttgcta

SEQ ID NO: 223744 - DNA, 324 bp, Glycine max
  unsure (1)..(324): unsure at all n locations
atattatctttgatttataggaaataggataccctttattcatttataattattatcctatataaacattntttgtgtatgtatttattttgatccttatataaggtttttgttaacatcactagtgttttaattntaaaataattaatttaacataatggtaactaaaaatcaccactctatgtaaattaatatttataattaatatttgcattnttttacatttcaattntcctctatgtctttgaatcctagcatcttttagggtttctcactcgctgcaagaccttaattctcgtgtcatatttctcattctcttttacc

SEQ ID NO: 223745 - DNA, 512 bp, Glycine max
  unsure (1)..(512): unsure at all n locations
agcttgcanataaagtcttacataaaaatatagagctagtatttttatgtcttactttgggggaaatccactngattcaaactggacaaagtaacataatttcttggtatacatctttatgctcatttatcaacaaccccatgagagaagaatgagttctttctatctcattttggttgtaactcatttcatctatgtaacgactcgtcgcttctacatgtcaagtagaagaatgatataacaaaaaactttattgtagctgatttaaaactcttcaatgtaatctatatatgataacacatatganagtttcacatttaaaaaaccatcatctataaactcacaacttcaaggtaatgcatctatacactaaaatcaactgaataaagccatgtgttgtcgcactacaacatgttatcataagatacaacatcatagcaactaaccacgcaactatttagaagtatatacaactcttaagatgatagatatccataatcacatgagttggt

SEQ ID NO: 223746 - DNA, 290 bp, Glycine max
tttttttggatctaacgcccatctatcctcaattgaatcaaatgaaccacagtcacccgcacaagatgatcatttatagaattctgcataaactcttctcctaacattaacatgaggaaaatatctcttaggacatctagtcctttggctacaaagagcatcatctctatgaggaggaaccctattcggaacctcatgaagccaaggatcactataggacctagtaaaaagtctccgtatacagttgagtcatactacggttgagaaagagctaagctaagccatacaca

SEQ ID NO: 223747 - DNA, 510 bp, Glycine max
  unsure (1)..(510): unsure at all n locations
agcttgctngngcagcttctatggaggctggatcttngatctttattgttgttctttaanggcgattctccaccatgcagatgaagtggaagacaaaggagaagaggtatgaggcggcgccatccactagagaataagccatggaagaaggagcttcaccaccaagatgagccttagataagaagcttggagaggatgcttcaatggaggaaaagaaagagggagagaaagagagagggtgagcacgaaattgattgaataataagggagagaagttgaaccttgagttgtgtctcacaagactctcattcatcaaagttacaacaagtgttacacatgtttctatttatagactaggtagcttccttgagaagctttctagagaaaacttccttgagaagcttctatgagaacacttccttgagaggctagagcttagctacacacactcctctaataacaaagctcacctccttgagaagcttcttgagaagattctcaagaactaga

SEQ ID NO: 223748 - DNA, 450 bp, Glycine max
  unsure (1)..(450): unsure at all n locations
tagacacaactaacactatatagcattaactaaattcatttcattgctggtaaggctatttgtgtgtacattgcacaccaagaaagaaccatatttcatttcatcattcaagtgttcgggggaaactctcatgttcaattgaacaccgaggtctgcattgtcattttacatcccaagtaactaatgcatggttgaaagatataaggttaattcattggttgaagaaggatgaagggagaacggaggggagagaagtgcacatctgaatccctccaactaatatttctaacaaagactaacacgataattaacatttaccgataaataagaattaatgcatagtgtattctattgaacttaataattacaagcttacatcattattattatctctctggtcctgtttagcaacaacaaatataacgatcttaatcattcctatnctctcac

SEQ ID NO: 223749 - DNA, 482 bp, Glycine max
  unsure (1)..(482): unsure at all n locations
agcttgctngagcagcttctatggaggctggatcttagatcttattgttgttctttaatggngantntccaccatgcagatgaagtggaagacaaatgagaagatgtaagacgcggcgccttccactatagaataagccatggaagaaggagcttcaccaccaagatgagccttatataataagcttggagaggatgcttcaatggacgaaaagaaagatggagataaagagagagggtgagcacgaaattgaatgaataataacggagagaagttgaactctgagttgtgtctcacaagactctcattcatcaaagttacaacaagtgttacacatgtttctatatatagactacgtagcttccttgagaagctctcttgagacgacttccttgagaagctgtttgagaaacttcttgagaactagacttactaccacccccttaataacaactactcttggagcttcttgaaagatctaa

SEQ ID NO: 223750 - DNA, 313 bp, Glycine max
caaaaccacttgggctgctacagacagacaacaaaatttttgaatctaaccacaacctaaacataacaatcatcatgcggaagcattggcgcatgccaccaaaaacaattattcatatcaaggtgggaaactctagtaataacaccagcgatgcattacatcagaaaatgcaggtaaaaataagtatcatggtaaaagtaaggaaaggaggaaaatgcaataaccccaacaaatctacaaacaacaaaaacataccaaaaaaaaagaaggatcatgacaaaaaagtaccatataaccccgcccttacaaaaaa

SEQ ID NO: 223751 - DNA, 480 bp, Glycine max
  unsure (1)..(480): unsure at all n locations
agcttngtaattttcttattggccttgcttgttattacatggttnttatatatttcctaatatggaataatcctaggaatattacnaataaccgtttattgataagaattgctcagcaggatcacaattccaagcaaggcgatctgggaaaggatttgcagaagcttcttgtttggcaggattcttcanacgaagtcgtgaaggtaagtgggcctcttcaccttacgtttgggctttacttcgttatgcacccnctggtttgtaattcccacctncgagctcatctaagagctcatctattgtgggaattgggaacttgtcttggaccatgacagcattgagggccctgantccatacagaaccttcagctcccatcatgtntccttacaaggaggacgagtgaggagaaagggcttgactangtttggatcaatccttttgaagcatganggtgacctggtgttccatctcatttttct

SEQ ID NO: 223752 - DNA, 501 bp, Glycine max
  unsure (1)..(501): unsure at all n locations
ctcagcttaatctataatataaactattattnttcttattgcaatggaaccttaatatataataaaacttctccaaaaattggcttatagaacaaatccatacattatcaatagattttttttaacttacgcaatgcatcggcatcgctttgattgtgcatcagtcatcacatgacaaatgtcgaataaaagctttaagtttaaaaatatctaatagctagcagtacacactaactagtgcattcccaaaactgtatatagaccacgtgtaacaagaattatcccatgtttttaaatgacgtgtgtttataaaatagttatttcaggttttcgactaccattttataaaatatgaattacactcacatctttctcanatcttaataanaatacacttggtattntttttntctttttttaggcattattttgaccaccnttaatacatattcactactaaaaaatggttttctacgaaagtccacaacaacatacaaagat

SEQ ID NO: 223753 - DNA, 360 bp, Glycine max
actatctcgtcatccactgatatatgtagttgagcacattttaaatttcaattctaaatcttaataaaactattgacataagtccgggattcgtttgttgataccatgctggtaatattcattcgatttaactctcactcagaattctggtttcaaatgtgactctaaatgcttgctataaagctgtggaattgactttaaaactatatggtcgttacagctgggtggtgtcaagactatattgtgattgcctgtacttgtttactttcaccatatagctcaaattattggttctttccccacaagaatacattttgtgggactcttttccgcctaattattattgtatgtgcttgattt

SEQ ID NO: 223754 - DNA, 405 bp, Glycine max
gtctcatgtcgtatattctctcactttctaacccgttcttttgttgagtaatgacaaatttatgagccttagcagtcagttactgcagatgtctactaacttctatcattctatgcgctttctcaagaagttggacatctatttattataattataatatgaagaaaatgaagcaacttgcttgatttctaaatcagaatacacaccttaaaggcagagagctgacttggcaatgcagacaaatcctccttaatacgggtctcatcccaagctgaagcagagctttcactggacttacagtgacgttctgattttctattaggtgataactggggaaaatcccaatggtctgttggattggaagaatcataagttgattatgaagccacatattttgcgctatga

SEQ ID NO: 223755 - DNA, 506 bp, Glycine max
  unsure (1)..(506): unsure at all n locations
agcttgttaaagaacttagaananatcaagaacaagcttgttctcacatcgntcgcgtctatgatatccagtcgacaaggtttgaagtaaaggagaccttcaatcctataacgcaacgtggcggacaaaagtgggcagttaacttgaatggccattattgtcaacgcggaaagtattatgcgcttcactatccatgttcacacattattgcaacttgtggttacgtgagcatgaactacttccaatatatagatgttgtttacacaaatgagcacatcttaaaagcttactacgcacaatgatggtcttttgggaatgaagcagcaattccttcttctgatgatgcatggacacttatccctgatccaactacaattcatgcaaaaggtcggccaaaatcaacaaggataaggaatgagatggattgcctcgaaccatctgagcaccgacananatgtaatagatatggagcagaagggcacaacaggcgtcgatgtcaatgcaat

SEQ ID NO: 223756 - DNA, 498 bp, Glycine max
  unsure (1)..(498): unsure at all n locations
ctcagcttctgcgtaccgtcttgggctcaaaatccaaaacttattttcatattactagctattntgaattctttagttcctgaatgtacaaccttcaaattgttgctcgttcccctcntttgtttttgcaaaaaagaaaatcaatatcaaagaaaacatggatgaagtcctaaggatgccatgtacatgtgtatttctaaagatatagtatttatattccatcaagcatacattgactgttgattacatgtaatagactttttataacatggttgccccaaatcacaattaanaagcacaactatcaatctttcgaagtcctttnggtaattngtcttgtctccttctgtggtggcgttctgtttaataatatttatactttgccttccaaaaaaaacttatgactgatcctcttttcattaatcccattttgtatgttattggataaaagatcatgggttctccacctgcctnncactcttcttctcntnnctctct

SEQ ID NO: 223757 - DNA, 461 bp, Glycine max
  unsure (1)..(461): unsure at all n locations
agcttacacaatggttcatttttctgacatatgctcaatatatatttgtcttagctngacttctttntgcctctgggaagaaatagtctaacaacttgctttcaatgtcactccaagtggtaagacagagatagacaagtattgagccacttcaaggcatctcctatgagagaaaaaccaaaaaccctcttatagagattctcctcttcagtctgggtcactcctattgtaccacatatatcataaaatgtggccagatgggtgaatgggtctttattaactaagctagcaaatgcatggtggccaaggagagtgattaggtctgaccgtacctctggtgtgcagttgttggtccttggtctagcaatggtgaagtatacttgcagaccantaatagtgacgcggtccgcaagagttctcctaacanatgatgcttcttccatctcttncttctatgtaca

SEQ ID NO: 223758 - DNA, 506 bp, Glycine max
  unsure (1)..(506): unsure at all n locations
gctgccactcatatttcttcaatatagtaagtcatatactcttttcttgattttcaagaagctcatgttgtagttgtacatccactcaataaagcatcaatttatttcttttctaattttttttatttattttctgagtagaaaacaaataagatactataggagaacagagcttacataataataataataataataataataataataataataataataataaaacaaaacacacaaaaagaaatttgatcgttgaatgtaatcaaatgtaataatgacaaaaatatgatacaatgattcaacaattaattacatgtatattaatatttaatgaattgttatatatagtaatcaattattatatgttaataaatgtaacgaaagccataatttcttgatgctgaatcattgtatgttaagatgatttgattggataacaactaaagtaattaaanaaaatcaattggaataatatgtttactattactattagcatcaacatt

SEQ ID NO: 223759 - DNA, 477 bp, Glycine max
  unsure (1)..(477): unsure at all n locations
agctngccaccctgctcgcctcggtgagctcatctcgcccatttgagctagngtgcttcctctagaaggcaccgccttctggaggaacttcctagaaggcccaagtgggcctggttgctatttgcacccnctgtttactaaatacacccccttccattttgtgctgattctttttccataacgttacggaactataagaatttcgtaatgatacttgttttctttccgtaatgtcacaaaaccttacggattacgtaatcatcccttttttggctttccggaaagtacngaacctcacgaattggcaacaatgcttcctttngacttccggcatgttacaggacttcacggattgtgcaacaatgctttcttttgacttccggcatgttacagaacttcacggattgcctaacgatgggtgccaagtacctcgaagcggtcaagcanaggtngcatgccatcaaacaatggtccctg

SEQ ID NO: 223760 - DNA, 517 bp, Glycine max
  unsure (1)..(517): unsure at all n locations
atccttgagtcacctgccgcatgcaagctttcagaagcttaagcttagtcttatgttgctttgttgttccctatctancaaaccccattttagtgtgattttcgtatttaattggatcagagcatggcctatttaatgagtattcttacaaatatagaggaaagatcctaaagtcaaataaatatggaagaaggatactccataaacaagccacaattattcaaaggcgtcaaatatgactattggaaggaacatatgatagctcatttctagtccattcatatagacctttgggacatcgtagaacttgacaactacgtaccattggatgatcaactgaatgaagtttccataaccttntaggcaaatgctcaaagacaaaggtttatagtgaactntaaagctcanaatgttgtattgtgtgccctttctgaggaagaatattcanaggtccacaactacaaaagtgcanaataaatgtcagacacattagctntgacatatgaacgatcgtcat

SEQ ID NO: 223761 - DNA, 359 bp, Glycine max
tatctatttctccatacccggtccctctaatttaaatcaagtgatgcattattcatgagactattacatattctgaggctattatgtgaagaatagtcataaaagactatatattagttattggtgttaagtaacagactctattgttggatcaaatagcctcataataattaacacagggggttgaaataattgttcctaaacctttactaattaacaattactcttctaaggcttctactaaattgcttaaagaatgaggagtataagagaaacttaatagaaaataatagcctaaattaaatgcaccgcggatagcaacagagttggaagaaggagacacacaagaagttttatac

SEQ ID NO: 223762 - DNA, 534 bp, Glycine max
  unsure (1)..(534): unsure at all n locations
ctctgagtcacctgccgcatgcaagcnttggctctgcagatcttcacacagcataatctctattactttctggaacttggacctttctctctctagaaaccctagacatgcaaagctctgaatcccagtccaaactcccttcacaaaatctgatttcaggcttaaataggtggccttattcttgctcgtgcgcttagcgcacgtatggacgcttagcgcacgttagtgaattttggcttagcgcgcctntctcgcttagcagatgaactgaagcggtgcgcttagagagatgaagtggtgcgcttagagaacctgtacaactcatcttcttctagattcttcctcgcgcttagcccaggagtgttgcgctaagtggatgctcgctaagccagcaaaaatggttagcgagaagggtgaaaacaacctttncaaagcttgcctaatttaacctgaatngagagaaaaatgatattaaacacacanaatgaaaatactaagtatttattacctatacttaacagaaaatactttata

SEQ ID NO: 223763 - DNA, 481 bp, Glycine max
  unsure (1)..(481): unsure at all n locations
atatatgtatttgttaaggacaatatagaaattttggctatttattttatttatatgctgcaatatatttttagttctcataacattaacaatatataaatttcatctttaatgttgttgaatcttttataaattatatgattaaatgaaattttaatctaaatataaaatatttttaatctaggtcttatattctaaactaactataaaatatncttaatcacttttcagtgtcaagaatgtcattgttatattatgtatccactatacacccccataatatttgaaaaaaaaaactaatgaatttatcttgtttctgtaagtttagtttaagaatattataactaattattgttcacatttaaaaaacaatatctcacaccgtcattaatttcttcaaattctctctcctctctcgtctcacaccagcatgtaattggtttaaactctctcttgttatctctcaccttaacatatttta

SEQ ID NO: 223764 - DNA, 444 bp, Glycine max
  unsure (1)..(444): unsure at all n locations
gcttaataatgantttnttcttatgcanttatttaatttatttatatcnnnncncaactcctataataaatttctactaacgcagtttattgtgttatgtggntattgaaatgactaatagtagttaattgtgccttagaagtgattgatgttaaccacatcagtagttgttgtggtgaaagtcccacatggcggaagagctatgaggaanaatgaggcatgttgaagtttcacatcaaatgaagatagtgtcgagatatactatataagtggggagtaatcctcaccttacaaaccggttttgtagggtgagctaagctgatgaaaaacttactttctacatggtatcagagtctatcctagatggatccctatggttctctangcaggtagtcttgagtgtgaagggagatgtggtgaaagtctcacaattcttaccttaca

SEQ ID NO: 223765 - DNA, 500 bp, Glycine max
  unsure (1)..(500): unsure at all n locations
agcttacagagagctagtgtcctgttcaaactgtctatactttccgccagaagattagaaattcgatatggtcagaanaagggtagtaatgcctaatttcatcatgttgatggcttcaataagcattattcttaacttaatgaannattttatttccatctttaaaaatgaagccttgcctcatgtaaaaatctcttaatctgcatttatgaaatccattcttgtttgaaatttctcaatttttacctttctcacgagtntagtctttcatcngaaatttagtaggaagacaagntaaattatgttntgagaataatcacaagtgatggtggtgcttacttgtgttaagagcctaagatgttccataattaaactnttaatagctcanagtgtgttggtgggattctgccgtgagtaatatattattctggcttcactaactntgcatggtttttaactttcacagagcaatgagcanatgaagcaatatgttcacttgg

SEQ ID NO: 223766 - DNA, 488 bp, Glycine max
  unsure (1)..(488): unsure at all n locations
agctnttcaatcaatcttgggctagctacattggtgcaactatccncatctataatcaaaagagcatattntcccatgaccatgcacctagtatgaaaaatgttctccctttgagtttcatctctatccttacacatactacccattaacgtcctaaccatcaaaagatcaccttcaaggggttgtacatcacattcactttaactctcactaggagaactagaagagttagaagaagatgcactagtgatatccctattacccaacacttgcacaccttgagatnatataagttataaatcgatgtttaatcgtacttatggtgttatttgactatattatagacttgaatgagttgaagtatgccttgaactagtcatatgtgaaattcttgacatagatgttgaattatgtggagtcttggtgagctaagttgaaagtatgagaatttagaatttaccanaaccttagtcaatgaaatcatgata

SEQ ID NO: 223767 - DNA, 509 bp, Glycine max
  unsure (1)..(509): unsure at all n locations
actcagcttgaggattatggggtacccgtcacatgtagtactaggtggcggtcggtctatggtgcaagtcgactatccacatccacaaatcacacataaattcaccatcctcagttgctcaccttcaactgagctcacgtactcccacgtagcccttatcctcgttcttctcaacaccgggtccccatcaatccctccaagattccacaacatccaagaaattacatccaaacatcatgcactatcaaaaacaagaaaacagggcagaggcagaaaactctgcccaaaacacaaaccaataccacaactttccttactcacataccccagtaacattctcttcgttccgattcattcaccggtggatcgactcgaaaaatttactggaggtccctagtacaaaagtctacattntgaccgatgggatctgctagaaaatgtctagaaatcaatatgtactattctttccctaactagcaacacacacattntctggacaaacacaattt

SEQ ID NO: 223768 - DNA, 371 bp, Glycine max
tcataagcagagcacccatagaaagtcacataaaaccatatctaactttccactccaaccaagaatacaccagagaactacgaaatctgcccagcaccacaaaatattgccctcctacgacctaacctcttcaaaacgtataaattaaccaataaaaactgctccaaattcaatggaaacactgccttcaaaaacaccaaaaaatgtaatccaaacaaaagtgactgcattatgatgcaaagaccaatgtgaaaagtgcaaataagacggtgatatttccacatggaacctgatcaaaaccaaaaattcgaattcctcttccattctgctaccctctattattagacggagcatacataaagaaatattat

SEQ ID NO: 223769 - DNA, 448 bp, Glycine max
  unsure (1)..(448): unsure at all n locations
nagctngttaccccatgttgagtttgcttactatatgagtttttataacaccactaattgttctcctttatgaagnntgttatggttttaacccactaacttctcttgatcttttgcctatgcataatgtatctgggtttaaacacaaagaatgttaagcaaaggccgactatgtgaaaaaactttatgagagagtcaaacatcatattgagaggagaaataaaagctatgctaaacaggccaacaaagggagaaagaatgttgtcttcgaactcggagattgggtttgggtgcacatgagaaaaganaggttttcggaacataggaaatcatagcttcaaccaatgtgagatggaccatttcaagtgaaagaatcaatgacaatgcttacanagttgagctgcctggtgagtataatgggttgtctaccttcaatgtctctgactta

SEQ ID NO: 223770 - DNA, 428 bp, Glycine max
  unsure (1)..(428): unsure at all n locations
tgatggcccgggctatgttgttgaatgtttacnaacccggaataggtntacgcaaagacaacggcggcataactagcctgataaatgccaaaggaaatcgtgggaagtatggtttaggctataagcccactcatgcagatgtaaagagaagcatcgcgggaacgaacggcggtggtcaaagctcgcggctgagactacaaagtgaaggaagcccgccctgccacataagtagaagctctataagcgcgggtctgggagacgaaagtcaagtgttctcaatatacgaagatgatgttccgagtacattggatctggtacgaccttgccctcctgatttccagctggagaattggcgagtggaggaacgccccgacattaacgcagcgagcataatgtanacctttacgagtttaaaagctctatagttg

SEQ ID NO: 223771 - DNA, 427 bp, Glycine max
  unsure (1)..(427): unsure at all n locations
agcttcagtcactagccttcaattatataaaagtaccaagttagacatagtataaagaaataaatgaaaaataaaaaggattagcatgccatanacaaagaaatatcagcccttaatgtcttgttgtaagaacatacttagctctatcctctntagcaatctcatgacgtctcatcttttcccatagacgtgcaagctcctattcaaaattaaattaaataccacctggtgaattcccaaccatcaaggttacaacactctattcaactgatgaaagaacanacaatanataaaaaataatgtctcacttgctcaagagtngaaattcgctntctcttcttttntctagcatctgctagttcctgatacgaaacaatcataatctcatctaatcaatcaaaacanataatctccanatgcctcaaca

SEQ ID NO: 223772 - DNA, 171 bp, Glycine max
aagacccttatgtgctttgctgaaggcttctttccgttccaagcttcaattggagtcatgtcttttacagacttagttggacatctgttgagtatgtaaacaacattgtagattgcttcagcccacaatgtgttaggtagtcccttctccttgagcatcgatctagccatt

SEQ ID NO: 223773 - DNA, 485 bp, Glycine max
  unsure (1)..(485): unsure at all n locations
agctngaaattcactcanacaaaacctagagaattctctaattaccaagaatatcctgaagaaggaattcaatgagagacttctcagaattgagagaaattatgccagtgcacgttctcttcaattgaggagaaacttccacatcattgtagctcccttagctccctgtactcaaatggtgtgacatcttcttgtagctcatgctgatcaagttttcatctcccattgtggtagtctagtagccagagtggttgccaccaagcctgagaagaagaaggtctaaacctacttcatcaagttcactaagatcttngtgtcccacacgaatgctnggccaaggactcattgtttaatgtttacaacaacatcccttatttcaagcatcaatattgagggttaatgtaatatataagagtgtcaatataattttcaaacattaagtatgtaaacataagaattaaaaaaataacaatattatgtgtaat

SEQ ID NO: 223774 - DNA, 398 bp, Glycine max
  unsure (1)..(398): unsure at all n locations
ctgggacgaaacgctggcgggtccggcaccggaaacgggtctggngaatctcctaaagtacaattcgttctccggcggaatctccgttcggtcaacggtggcggaggcagtttcgataaatcgcagcatcaccattgttcggtcccagtctggtttcggaagcaccaccacctctgcttcttcttctccttctggatctaccacccctcgctcccccttaactcgtaacacttctctctgaatatttctggttcttcttggtatgtattattaggctttgtgtgcatgagaggatagaagacaagaaactaacctttaatttatgatattttaaaccaaacactaacacaatcttcatgtgtatgtttgatatggaaatatgatatttgctattctga

SEQ ID NO: 223775 - DNA, 486 bp, Glycine max
  unsure (1)..(486): unsure at all n locations
agcttatgcgcatacttctttacgaacgttcacttgcacattacattctcataactaagaaaaatgcacccatgtacaataaaggcaccttcgttacctagattatttatatgtacttccaaggtgtatttgttacctacatctcatgcactttctttggctaaattacatacatgcgtactcaaagcatttggggtaccaaaaattgcacatgtgcacattccggtatttctaatacttatgcatatacaaactttgtgatgaatcttggctatctacacaagaaggtgatacatttcatgctttactcaagngttnttgctacctaaagccgcatgcaaattcaagtatattttcttgtgctgactaanattgtattcaaattaaaaggtattcttgcaatgtattttctttacataacatgcaacatatttatacatnttttttgtgagaacatttgactaccaaannatacatgtacataca

SEQ ID NO: 223776 - DNA, 492 bp, Glycine max
  unsure (1)..(492): unsure at all n locations
agcttggttcgggtacttacccgttgaagatcgaataactatgaagaacgaatgaagaacgtcgaagaacggttgatatctttgcgaaattcctcacggaaaacgttacggaaacgtttcggaagcgcctcggcttataatttcttcacggaaacaattnttccaagcaaattcgaaagagagagaagtgcctaaggggctgaaccccttccttcttgccttcctcccctatttatagcanaataggggaggtggttgccgcccagctcgcccaggcgagctcagctcgcccaggcgagcaggggttgcttcctccagaagcaaccgccttctggaggaatattccggagggcccaagtgggcctgggtgctatttgcacccncattattactaagtacaccccctctgctgttntgtggtgattcttttttcgtannagtacggacacttacgaaattcgtaacgatacttggtntctttccgtaatgtac

SEQ ID NO: 223777 - DNA, 299 bp, Glycine max
  unsure (1)..(299): unsure at all n locations
acgaaaagaaggacgaggcagtcgagggtggcctatgttatgctaaagttactaacatcaccggcgtaagcgatgtgacccgtagtgggcgtgtcttcgtggcacctgacccgtgtggcgtccctaaattaatgactggtttaatagtaataatttaaataacaaaaaccatggtaaaatttttttcttctttttctttttcatttctttctcttttcaccataactaggtttagaaagaanatcctcactacagagtcctgaatggccagttcacaactctattccgagtcatttctt

SEQ ID NO: 223778 - DNA, 240 bp, Glycine max
  unsure (1)..(240): unsure at all n locations
tcattttgcagacaacaacccatatatatcacttatctgtatgaaccatacaaattactgatccgtatgaccgatacggatcagcaatccgtatgggttttttttaaagataattggatttttttaattcttctaaaattattaaaatatgtttaaatattggctggcaacacattttntaaaaaaataattatcggtactgccatatggatcagttcatacacgatgtgaatccggatg

SEQ ID NO: 223779 - DNA, 138 bp, Glycine max
  unsure (1)..(138): unsure at all n locations
tggtgttattgatgactctgagaatgagaacatcanaatgacacttcgatgaccaactagaattaagacaagagagattctgagataactacatcaaaatgatgtattgaagtccagatcatgtagtatatatgcatc

SEQ ID NO: 223780 - DNA, 423 bp, Glycine max
  unsure (1)..(423): unsure at all n locations
agctnttcctgagttattnttaagtttggaggttacatatactgtgttaatttaacaataacaaaattacaaattactaactgntttgttaagtcattgaccctctaaatgcactccaactccttatacatttgctagntttggtcttgattgcacaaatggatcctacacagctatcattacctcttttatagtatttctcttacagctttgattctatagaatttagaggtttgtggaatttttttaatagagggagaaagaataagaaaaggtgatgattatagaaaccaatgtcaaatgtccatatgaaaatatgccaatatggctaaaaacctaatgataccatatatctagagaccccttctaaactacaggatccaccttttacaattagaaataaacttaatactcttaacaaat

SEQ ID NO: 223781 - DNA, 397 bp, Glycine max
  unsure (1)..(397): unsure at all n locations
tagagagtgaaaacgtcacgagggcttccgagatgaagggcgcgccttatgagttggttccaccagaaaaccgatgaaggggacggcgggaggcgctccagaagcagaatcgcatacgcagtagaattggaagctatgtatgtgccgatgaggtttgtcgccaaatggaaaagaagaccttgcatgatgctttgctgatgcaacagtttcgcatgggctaaggagttgcattctttcagagctgtgattgggattgtagcacacgacaagaggcgtgtattggtgaatngagactgcaacagcttcgactttattggaaagcagcgtagaagcatgctaatgctacaacggtaacggtggtgcaactgctgcagcacagagacaaaaacaattctga

SEQ ID NO: 223782 - DNA, 488 bp, Glycine max
  unsure (1)..(488): unsure at all n locations
agctttagccaatggactaccttgaataattccttngatatcccttttgagccttggttccctttccttgttttgaagctcactacaagccttaagtgaaaaaccatgatattaccatatccttaagggaatttggagctcttggaattgtttgggaataagtgtnggtggtttttgtttcattggacaacttgttttgttggctatgcttcatgatgtattntgggccatacttgatgtacattgtatattggntaaatgttggacatgctgaatgaaatgttgtttctcaaggccctaaaaaaaatcgaaaaaaaaacaataagttgagtgaatacatcttatatggacaagatgatgaaactctggtctactctcatgttaattttatcttacttcttttatttcttaattttttaatatgcactattccctttgctctctattcttgggaattaccacttattcatattctcctaccttgcctt

SEQ ID NO: 223783 - DNA, 384 bp, Glycine max
  unsure (1)..(384): unsure at all n locations
cttggtaacccagctgaccttttatcataaatctgtacctgtcgcaagggtttgtggtttgtgctcctctgctgaccaccatacagacctttgcccttccatgcagcaacctggagcaattgagcagcctgaagcttatgctgcaaatatttacaatagacctcctcaacctcagcagcaaaatcaaccacagcagaacaattatgacctctccagcaacagatacaaccctggatggaggaatcaccctaacctcagatggtccagccctcagcaacaacaacaacaatctgctccttccttccaaaatggtgctggcccaagcagaccatacattcctncaccaatccaacaacagcaacaaccccagaaacagccaacaat

SEQ ID NO: 223784 - DNA, 505 bp, Glycine max
  unsure (1)..(505): unsure at all n locations
agcttaacagcagttaccaaccaatgaccaggagcatcgttttgtccccttattanctcactngtatccacanttttaagcattntgcaggaaggagttatacaacataagattgtgactttgaatcttacacggtactttagatactctgttgaaagttacgttctcgacctttgagcaaatacaaaagttagcaaccatgaaaatggacagtgaatatcctactgtaagtttccatgatggcaatattattataaaaaatattttaatatgcactanataaagagacttaattatcaattcttgcattaagagattaatagatccttttgagttgcatacaagtacataattacatgttcataatatagacataatggcattcatantaatcttaaataactaaacatatcaactaatttaagctttcgcagtgtgctagttagagggaaccactatcaatagcattgtgaagaagtcataaatgctatgaaacacaatcatt

SEQ ID NO: 223785 - DNA, 456 bp, Glycine max
  unsure (1)..(456): unsure at all n locations
actcaagcctaagctccttcaactgcataaggcncttaatatttgaagaagaancttgtggtatcttcacccgacgaagaacactgacaaaacttatcttctacttcttggacaaagaatggtaggctgggggcaagtaaatcttctttccattagaccttggatgccactgtgatcttatactcatatcagctagatcttgacgggtattcaagccatacttcgtcttgccttgaatgataacgaagcgtccaatcacactgtcacaaacattgttcttcacatgcataacatcaatacaatgtctaacgtcaagatcacaccagtacggaagataatagaaaatgtgacctctttttcatatgcaactctgacttttatgcttcttttgngtctttccagatacactgttcaggtgtcgaacccactgatatacctgctcaccaatcaacggta

SEQ ID NO: 223786 - DNA, 490 bp, Glycine max
  unsure (1)..(490): unsure at all n locations
agcnttgtgccctcaacatgttaaagaatacatgagtatgctttttctgttctggncaaganaagatgttaagcaaaacttaatttgtttccatttgactaaatatttaaattatccttatttcacttaaaataaacctctttacttggtgtactattatataaacctcaaacatgatgcattgttatttgaatatgattgatccagctgataagttcccccattgatggtacagattatatgtcgtattacaacatatgtgttagaggttccctgtaactgcatccncgcactcgttgtcattgacactgagcatctttcgaggtttgtctctattattacaaagtggtatgatttaacatgtcgttgtcaaatatcgatattgtttcatgttactagttagctgcttatgagaaaccttatttcccgtcgagatcgaacatcaataaacggaagttgaataatcatgattgatttgaatgccgttgac

SEQ ID NO: 223787 - DNA, 474 bp, Glycine max
  unsure (1)..(474): unsure at all n locations
agctntttctgaaaatttcanatttcaaatttcaaagtttttattaagcttttaaaataattttgcttctggcaatcgattaccagtggaaaaatatctttttcagaaaatggttaaaatattttaaaacctttttataatcaatttanaaattgttgtgaggccaaacctttgcaatcactaagagactctnttaacaaagatagacttagacttaactttcttctagatctttattttcttggtcttgacttaatcttgaagcaatctttgttgcttaaccttgaatgtgtcttgaaacaatcnttttttattatacttnggcatcatcaaaaacctgtattcatacattcacattctcccctattttgatgatgacaacctatatcaagtaaatnttttgtgcatcataaaacctgataatcacatctccccttttgagatacaccatataataaatgtttgacatataaa

SEQ ID NO: 223788 - DNA, 519 bp, Glycine max
  unsure (1)..(519): unsure at all n locations
acctatanaaactcaagctcatatctacaatatgggtcattagttaaggtttcctattttatcttcatatcccaacaaaatgttttcatttgattaagtttttcctaattaagtttcgagaaatgtttttattcacaccaaaatgggtggaaggttaatttagtgataaatctacatatgtgcagaaaatggaatgcagaatatgcacaaacaattacaggttctaaggaagatgcggaacanaaaggctggttcttattagtattntacttgtctttggaacatatatactaattctttacgataattaactataatctcatgtataactctttctcctcaggagataaaagttttcccttataacttatatatattgattggtgatacaatcaagagctataaataggagattaattctgtaaactaatataggcctaacaaacagggaaataanaatatttctgtaaatccatagcccacaattgaaagaaagaatacaatagattctattacatc

SEQ ID NO: 223789 - DNA, 358 bp, Glycine max
gacctcaagcaccgcagcatgcactgtccaatgggcaagggacagtttgacttctttgtacaccaagcattgacgacattggaataaacttcatgctcagtggacgacaacaccttggatactggtggcgcgcctcggagctccctattgtgacaaaccattcactacaactctggatggacccacaaaacctttcttgtgtggcgtctgacaaagaggaaccctataatctgggagcaagaagattgtgtgggctctcacaaagggtaaccccctgctgacagttagcccatgtggagaactacatgagggtgctagggtccttctgtgtgatagggaacacttatacaacaatatg

SEQ ID NO: 223790 - DNA, 485 bp, Glycine max
  unsure (1)..(485): unsure at all n locations
agctnggaaaattattcttaagataaaaactctcttggtctttcatttgngctatacaaaatcttttcagatagtctatcttagaatctatcttaattcttttcttgagacctttgcctttgctcgagatcttgctctcttcattcttgaatgatctttataattcctctgcatcatcaaaataattcttgaagctttgcttctacacctgtatccatggaataggcgatcaaaggacttagtccactggctgccacaaggccttcaatctctgaagcaagcctcccgaacttagccatctgccttccatgggaagatagcttcagctcatgatgttcctacaaacaataatatcgatcatgtaaaaaaactatgaagtagctaactacgctctttgttgttttttttaaattacatacctctccatatcagactctcagatcaatgtgaatttcanaatctntgagaactgatgtgtcatgggg

SEQ ID NO: 223791 - DNA, 442 bp, Glycine max
  unsure (1)..(442): unsure at all n locations
agctntgaccatccttgtgacacgctattgtctggaatgattcttgtgtgggacttaagaactgngcttaaccggcgtcttacttcttggaaaagctgggatgatccgtcttctggagacattgtctgggaggtagtgataggaaacaatcctgaattggtcatgtggaagagtaaagttgactactttaggactgtgccttatactgggaatatgttcagtggagtatatgcgccgaggaataacccactttataattggaaacttgtgagtaacaaagatgaagtgtatntccaatacaccttgagtaatagttgtgtgggttctataattgttttgaaccaaacccttaatcttcgtcaacgcctcacttggattcccgataccaagacttggacggtntaccaatccttgccactagatagttgtgatgttataacac

SEQ ID NO: 223792 - DNA, 403 bp, Glycine max
  unsure (1)..(403): unsure at all n locations
aaaactaagcttgaatgaggaagtgtanaagggtgaaacttcttgcgtttattcgttgtccacagagcggcacctggagatatgtcgcggcggtcaagagaccttgtggacgtcatgtggggtgctattgcccaaaaccaaacttgagcaatcccgacccaacccgggcatagtcagtcagtgagaacctgtgatgtacctaagcaggcgagctcctggctgtcaacagatgaaaggaactaagaccacaaagcaaggaggcttgtgtggtggctggccacctgtgaactgtgaatgatatatgggatatggcctctggtaatcgattaccaagggtgggtgatccgatactaggcttaacaatgaagacaggaggcttagatggtctctggttatcgattac

SEQ ID NO: 223793 - DNA, 467 bp, Glycine max
  unsure (1)..(467): unsure at all n locations
tgcaagctatccactaatcanacttttgttcctatagaagtgcataaggagacatgaggactctttatgatgagtacaatgcattttgagaaatcgactcaagatgatggangtgtagccagtatcatacgcgatgcaaagcctatgataaatagcaaacaanttttcattcaaattaatatttaatggaaatccacaattatcattactagttaatcactatcgttgatgctatatgagttataagaataacgtgatgatggttgaacgaagaaagagaaaaaaaattgaggtttaaatacatttattaactaaaactatcanattacaactataataatattaaaaaaaatctatatcgatgtatactagcaatgacattacatgatacaatttcatatagcatatatattatatactactatatatagtatgacacctgattcagagggaaaagtatcatacca

SEQ ID NO: 223794 - DNA, 506 bp, Glycine max
  unsure (1)..(506): unsure at all n locations
cgagcaaccgcactaagccaccattgtgtgcaatacctctctgtgtattataaacaaagaanaaaattacctgggccaatctccccaatgcaaaagtaggcatttccctgagctatacatcangagactgaagcatctctatcaaaggttggacaacacctctctgtacaatgtgaacctaaaaagaccaagcgtaacatacagtaaaaactaagggacacaaaatataatatatgatgcatcataacaagagtatcaactatactttccagtactctaacaattggaatctttatttaacaataaataaataatatagaacaatcaaacttggaaatggatatgttattaaacaattgcccccaacgaaagtttagttatggattgtntcctttctacccctcttcactttgcaggtaaacaagcataaaagtggagtaagggtctctttcctatcacccctactctctttctttccccttcagtccaaatcanaaacaaagtat

SEQ ID NO: 223795 - DNA, 438 bp, Glycine max
  unsure (1)..(438): unsure at all n locations
atgtggaacccatcacatgtggtactatgtggcggncgggcgatggtgcacaacatagttttcacatncacaaatcgcacataaacccaccatcctctgttgcccacctncaactgagctcacgtactcccacgtagcccatatcctcgtttctctcaacactgggtctccatcaatcctgccaagcttctccaacatccaggtaattcaacatccaaatcatcacaaactaacanaccaagcaaaacagggcaaaggcagaaaactctggccaaactanaccaaaacacagcttttctcactaagaccccagtacatttcttcgtcaatttgtaaccgtggatcactcaaaattactggagctctaacatagctacattgccgtggactactacaacatcagactatttgatactcttcacagcaccaccacttttt

SEQ ID NO: 223796 - DNA, 400 bp, Glycine max
  unsure (1)..(400): unsure at all n locations
tactaagcttgttaagatctggcatggtaaactcaaaaacaatatcttatgccattgttatgtctggaggggccattgaccactatacgacccatcctgccttggattttgatgattaccaaggtataatttactaatggactaatgagttattgttgagtgaacaagatacactatataaatgagctgaagtgttattcaatcattctctatagcttcaataagtatgcctccacccataagtagaaaactgctttattatgatatattaagcgtccaatgcgttgntaaaatgattgtgtccacttaatgcaaaaaccagtgattacacacttgagttgctttattcatgtgcattggacttaaatcacttatacacttcataatctaatccattaca

SEQ ID NO: 223797 - DNA, 408 bp, Glycine max
  unsure (1)..(408): unsure at all n locations
tgccgcatgcaagcttgannatgcatgtgggtacctatattgaatctcctattctgtctctatatacataacacaggtccaccatcccagatttgcacaaccatattcatatatcgttggggcatttcaccgagcacttggtgggtgcacgtttggacataaattgcaagagaatgggggcaatgtggcatgccccattgcttcagaacacaacataggcctaaggccttctcattcaaatcctcaactcaagaaatcaagcataaaaacaacccaaaacttgcccacatatataagcacgttctcacaatttagagcatcaaaagatgaagaaaatactccaatgggaagcagaacactcaaggattgaatacttacttgctggagtgagtagaaaccaccaaaatg

SEQ ID NO: 223798 - DNA, 495 bp, Glycine max
  unsure (1)..(495): unsure at all n locations
agctcgcctggcgcacantcaaantccaacaccactaatgtgccattattttctcctatttcttaacccttcttacaccattctaaatactgattagtcttaattgtcaaatttatgacgcagatctattatttgggcccattcagctaatttgatgttgttaatctaatcttacgaattaatgaagcattgggcttcaatctagaaatggacttgtgcttgaatctagaattgggcttggacttgaagagggcagactaatttattctacanaattagaccttatctgatcttatcttatctagatattatttagatctgatctcatctagatattatttcagctagatattatcttatcttatcttatctagacttgattcacttatggcttgcatttataacacatttgtaagctttggcgctgaaaaactatataacagcaccaagggtctagctcactctactctcctctctctcctctctctcttatat

SEQ ID NO: 223799 - DNA, 507 bp, Glycine max
  unsure (1)..(507): unsure at all n locations
agtcacctgcngcatgcaagctttaaaaataactcttaactaagattactttatacagtatgctacttttataataacagngcaataagacaataatacctttatgctttcattcttatgatccgcctactcaacaacctttgtcactgaaacttccgatatgacttttttctcttcttccatgttcgcttccttatatngactgctntacaagcaaagaagaaagaagaggctcttagatgtagctactgtgatatagacttggttgttgctgtcgaggtacataattcacaatccttcctttaatgtaccaaatgaaatgaaatacgcataatggagaacatatatatagcataagaaaaggagaggtagggacggggacaagacactcttgtactgcatactaacacaattcttcctaatgggtctgagttcatacgagagagtattgcaacaagtaccaacattcgaatcacacgaatactagtattatatttaattttcaag

SEQ ID NO: 223800 - DNA, 441 bp, Glycine max
  unsure (1)..(441): unsure at all n locations
atccttaagtcacctgcggcatgcaagctngcacttaaggagggtatgatattngcagctaatgatctactttcttaactattttgcctttagatttactggttctttttgctaatatgtaaatataaatagtataaggctatggcttatggacatggtcttttntacccatattcaatcacattatttaacaaaatacttgcaaaatagctttgcaacaagagttgtgggatatttcatatgcttatgaatccttgttgaagcaatcagcaaaaactgcttccaaagctttctggtggggaagaataaagtgcctgctaacattctccaatatacagacgaatactattttntttttgagaagcttctatggaaaatgtcaaatctgtgaacgcaatgcttagatgtnttgagatgatgtntggcctacgaaatcaactt

SEQ ID NO: 223801 - DNA, 430 bp, Glycine max
  unsure (1)..(430): unsure at all n locations
agcttagtttacaaacagaagttattagcctatcttcactggtaatatactttgatgtgtctcataatgctttggcagggtactttgatgtgtctcataatgcnttgtcagggaccctgccagttgaagtgagtaagctacgtaatcttggagagttggtgctgtctgaaaacaactttgctggagtcattccatcttctctataacaaataggaatgcttccatagaaagaaaaatgtcgaaacaattaaatgaccaaataacagcttggctttagtggtgtnatgagtgcagcatatatacaatagtggaaggagagaaaaacagtatagctgaagcagttggtagttataacagaaaactcgatacaacagaaaagctatagctcaacaattgacagagctggctaagagcccctcgcaagctggga

SEQ ID NO: 223802 - DNA, 449 bp, Glycine max
  unsure (1)..(449): unsure at all n locations
agtctcacgattgtcacgtgctcatgcaacaattgtttatcttttgctatacgagacatctgccaaacaaagacaggttaacgataactcgcctgtgctttntcttccatgctatatgtagcaaagtcattgatccagtcatgtttgatgagttggaaaatgacgccgcaattatactgtgtcagttggagatgtattttccccctgctttctttgacatcatgattcacttgattgtgcatctagtcagagaaatcaaatgttgtgcgcctggttatctacggtggatgtacctggttgagcgatacattcttataagggtatacanagaatctatatcgtccagaagcatctattgttgagaggtacattgcagaagaagccattgaattctgtcagaatacttagagaaggctaaacctgtttggcttnctgagtctcgcatgatg

SEQ ID NO: 223803 - DNA, 395 bp, Glycine max
  unsure (1)..(395): unsure at all n locations
agcttcttatcccaggctcatcttggtggtgaagctccttcttccatggtttattccttaatggatggcgcctcctctcacctattttcctttgtcttccgctgcatctccatggtggaaaatcaccattaaaggaccccattgaagctcaaagatccagcctccatagaagccccacaagcaagcttccatcaagtggtaatcagagcacaagagcttcaagtaggtgctccttaacctccatntaatttttttctttaccttctctntccatgggtgttcttcatttntctccatgtatctcctcacatgtcttggtctaaatgttgntaacatgaatctntagaagttcccaccgataaacttgctatagaaagtagaattgattttctatg

SEQ ID NO: 223804 - DNA, 480 bp, Glycine max
  unsure (1)..(480): unsure at all n locations
tgtctcagcgtttatgcgagacggagaccaacatgctagctatcattgtctattccaagaagagttaggtctagccgcggcccacgagcataggattgcggacgaatatgcccaagtatacgctgaataagaggctagaggaagggtgatcgactctttacaccaagaggcaaccatgtggatggatcggtttgctcttaccttgaacgggagtcaagaacttcctcgattgtagccaaggccaaagcgatggcagacacctactccgcccccgaagagattcacgggcttctcggctattgtcagcatatgatagacttaatggcccacataattagaaatcgttaggaaacttgtatggtctctcagaccttgactagatatgacttcctttttgaaataaaatgagttggtcccatgtntctactttcaaaactngcgcanatcanatcactcctacgtttcatctctagcatgcat

SEQ ID NO: 223805 - DNA, 476 bp, Glycine max
  unsure (1)..(476): unsure at all n locations
agcttttcaaatgtntcgccacagcccttgtgggcattgtttaatatgcagccctacaaccataagacaagttttcagacatcacaaccttggtagtaagacctaaacatcatagtaaaacctcatcagacttaaaattctgcataacttaacctcagccatccttcccaaaaaatgatatttttttaagttaaagattagaaatgcttcanaagatacataatgaggtctctggtgtacacaaaatactatatcaaatggcactagacctcccttggaggaatacttcagtatgcttcacgctcttgtgtatntgccttctcaaatttcccatcagcaatatttaagaatggttatatatgatgaatgaataataaaaccgtcaaacttttcaatagttaaactctgagcccacatccacatatttgaggaaaacagtgaaagaatatacctatggttactagactgtccatcag

SEQ ID NO: 223806 - DNA, 456 bp, Glycine max
  unsure (1)..(456): unsure at all n locations
atcttcagatctacgtggatgcttctcatacacttcttcatttatgaatccattcagaaaggaactattgacatccatctaatagagcttgatgtctttatgtgttgcataggctaaaagtattatgatggcttcaagtcttgctattggtgcaaaggtttctttatagtcaattccttcctgttgactatacccttgagtaactagtctagccttgttntttactacttctccttcttcattaagcttgttttggaacacccatttggttccaatcgctaaccgattcttaggagggaaacaagattccaaaccttgttcttagtgagttgacgtattttctcttccatagaagtcacccaagaatattcatgcaatgtgcatcaatattcttagacttaagggttgagagaagagccaccattcctttntctctattcagatagactcttgtct

SEQ ID NO: 223807 - DNA, 501 bp, Glycine max
  unsure (1)..(501): unsure at all n locations
taagcttggtacacgatataagtcagaggaatgtatggatattgtgttatgacggacaaggtctggaaagaaagtgtggtggatgataaaaatcgtagacaaaatcttatccttataaatgatggtggcacaagagactatctatgtcaccaacttataaaagtggaagctcaagatcgcagactgatttctttttggtgagaagtgctgacataagggtctgtaatgattacaaagtgaccccaagatagagtctaactacacaacataagggtttgattcttgatgttatttcacaaagcatatgcggaatagcagacatgttacacattcgaggatgaattgaatgggcataacctctctatggccaatgttgtgtgtattnttgtcaaaatatcataatccaacacatggcgtagaatgtgtcatctttctataagccaacttctatttctagatatgcaagaagccacattaataacagatgaagtcaatattgac

SEQ ID NO: 223808 - DNA, 369 bp, Glycine max
  unsure (1)..(369): unsure at all n locations
gagaaagctcatggggaaagaagagggagattattttgtgggagcaccaaattgaaggaagaaaaagggagagaaagtgaaccttgagttgtgtttcacaagactctcattcatcaaagttacaacaagtgttacacatgcttctatttatagactaagtagcttccctgagaagttttcttaagacaacttccttgagaagcttctttgagaaaacttccttgagaagctagagcttaactacgcacacccatctaaaaactaagctcaccttcttgagaagctagagcttagctacacacacccattntaaaactaagctcacctccttgacaaaatacatgaacataccaaataaagtccctacta

SEQ ID NO: 223809 - DNA, 492 bp, Glycine max
  unsure (1)..(492): unsure at all n locations
agcttcaaaccatagcaactcanaatctaggtatccaaaactcttcttttaatggatnttcaaggtttgagaagtgaaaatgagaatggngtaaatttggagcaaactctcacctcacacaagtctataacatcaatctaaacttgctcaaactggttttacgcctaaaattctgccgaatcaaaanttgactcctcaacacccaattttaccctagaaatggctcttgccttcactttggtcatttgtttttctctcttgcacagcccanactttctcataagttctaaatgacatttcaagctaggaataactccctttaacctccaaataccactaaattcagatttggcctttcaactctcagagcctcactctttntccactcataacaccatattctcactttctaaccctagggtaaccctacccttcatctctaacagttttccataagcaatttcagtacataaacatcacaagcatcatcat

SEQ ID NO: 223810 - DNA, 288 bp, Glycine max
cgtattgtctctcaaatcttgactagctataaacttcctgaataaaatgagtttatcccatattttactccaaagatcggtgcgaatcaaatcactcccgcattttatctctagcatgcattcatttttttacctactcctcacatttggtttttttaggaaaaacaccataactaaacgcgccccaaggcatacctatcacactagatccaaatctataacgatgggtgatcaagaggagacacaggaacagatgaaagccaacatgttggctttgaaagaacaaat

SEQ ID NO: 223811 - DNA, 393 bp, Glycine max
  unsure (1)..(393): unsure at all n locations
agcttgtacaattaaacagctctcattagaatctgatcctttctatatctctaaactngaattgggtagaacaaatcaacagtcatagaaacacaaatgatgagttggcattcggcaaccacatcataacatgagatgagtaatgagttgtttctattggaatgttcacaagaagaaaagcatataatctgagggaattgatgcacaagaaagaaagaagaaagattaaattaaaaataaccttatcatatgcaaggcgtgcaattgggtcatagagaatggaataagctttcgtgagtatgatggccatgtcatggccagcatggccagcaatgtcatggtggcagcgcttctgaagagagcgatacgccactttgacctgtgactgatcac

SEQ ID NO: 223812 - DNA, 346 bp, Glycine max
  unsure (1)..(346): unsure at all n locations
accagccgagaagcaagaanngnagaacagagaacgcgcccttctattttttaatctgggcagcagatcctgcgcccagaaaaagaaagaaccccttctctcaacccttgtgaaaatttaaatgagccactcagcattgtgcggcgcgctaaacccccagaaaaagagctgcaacaaaatattaacactcggcgctcacagaaacttaacagaaggactgaaaataataacagaccacagctgttttttagttttttattacggaccccactgcccacaggctcttcgctatgcgaaagtatggcggagggatgttgtacgcacccctaccctngcatatgcaaag

SEQ ID NO: 223813 - DNA, 412 bp, Glycine max
  unsure (1)..(412): unsure at all n locations
cttgagatataacagaaacacttggtacgtgccaactaaactgcttattggcaacctacacattcttccgttctgcaggctacaggttgtaccatatgtggcgaggctcatgaaacaagccaatgtattcccattgaagaaaacactcatgaacgtcactatatgggaaatcaacagagacaaggatataatcaaggaagattttcaagcttccagcagagatcctataaccaacantgacagtggagatcacaccctcgcaatcaattcatcaaggaccacggtggacctttcaacataccaattcaacaaaggcctaacatctttcagaggactactatgctggangagactttgactcactttatgcaagtaacaatgtccaactatataaagcaccgagtcagcactg

SEQ ID NO: 223814 - DNA, 368 bp, Glycine max
  unsure (1)..(368): unsure at all n locations
attgatcaaaaatgacttctgctggacctactctctctttttctggatactcccgactatcaacaactgctgaaacattaacctggaaagaacctatnttgtcatgtgtcttgctctcaaatgagttagcggttccttggccgacgataccatgatcattttgaaaaaggtattgatactgttccaagtgacaaaaaatctgagtgtgagaagctggattatcaactatgtgctgtcttgtggcaatcagtcgaggcggatgttntgagatcctagatcgatcaaacatgttggtcttttggagaaggcagagaatctttgcaatatattcgagtatgttgatgcaactataaagtacagcctcaaca

SEQ ID NO: 223815 - DNA, 302 bp, Glycine max
gtcattaataaatatagcgaaaacattgaatttcacccaaaaaaagggacttttcttcaacttaaataggctttgtacatattaaagaaggatttatgagaaattgaatctaaccaccccccgaaatataaagtatcaacactgtaattatattctaattacccaaaatagttgaggacctcaattatttgatctgcttaatcttcagcagaaggaataggattctcggcacaattttgaggttgtcccaacttcaagaactcttgtggaagtttcagagggaaaactatatgaataataat

SEQ ID NO: 223816 - DNA, 522 bp, Glycine max
  unsure (1)..(522): unsure at all n locations
agctgggttcgaggtacttacccgntgaagatcgaagaacgacgaanaacttatgattaacgncgaagaacgggtgaaacctttgcgaaattcttcacggacaacgttacggaaacgtttcggaagcgcctcggcttatattttcttcacggaaacaatttttccaagcaaattcgaaagagagagaagtgcctaaggggctggaccccttccttcttcatttcctcccctatttatagcaaaataggggaggtggttgccgcccagctcgcccaggcgagctcagctcgcccaggcgagcagggttgcttcctccagaagcaaccgtcttctggaggaatcttctggatggcccaaatgggcctggtgtgctattgcacccnncattttactaagtacanccccctctactggttnttggtgattctttnttcgtannagtacggaaacttacgaatttcgtaacgatacttggtttctttccngtatggtacggaaccttgccggatacataatcacccc

SEQ ID NO: 223817 - DNA, 413 bp, Glycine max
  unsure (1)..(413): unsure at all n locations
atgatgaccaaggtaatgaacaaaaagctcaaaagatcaaagaacaactcaagtgaatcaaagaacaactcacgtgaatcaaagaacatctcaagtgaatcaagaataagtcaagagttctagactcaagaagaaagtctacaataaagaatcaagattcaagattcaagatctcaagaatcaagatcaagattcaagactcaagattcaagaatgaagaagagactcaatcaagataagtattaataagctttttcagaactttgaatagcacatgagntttcaaactgaatgtacaacgttccaaatattttcacaaggctataatcgattacaatgtgttggtaatcgattaccagtgtccttgaacgtcgaaantcacaattaaatgtgaagagtcacattggttcact

SEQ ID NO: 223818 - DNA, 492 bp, Glycine max
  unsure (1)..(492): unsure at all n locations
gatactccgagtcacctgangctgcaagcttntctcaatttttacaggtaatcgatacaggtttctggtatctattacacaganactatttgaaggatcatgactttngaatntgaatctcaagtgttcgctgctagtaattgattacaaacatctggtaatcaattacaggttcaaaattcaaattcaaaaccctctttaacaactatttttcaaaattatcttctggtaatcgattaccagagccttggatgtcttgaaaacactctgttttgaggcaaggcttgatcttgagttaatcangaggcaagggtttgttcgttgaagcaaccttgtattaatctagaagcaatgcttatcctttgaagcaactcttgttgattcttctttggcatcatcaatattatgtattcatacattcacactttcataatgcaagtgttgctgacttattatttgtgacaataatgacataatctaaatcacctgtct

SEQ ID NO: 223819 - DNA, 452 bp, Glycine max
  unsure (1)..(452): unsure at all n locations
ctttcgggccctttttgtttcccactctaatgcttcaactgccgtcatgtcgatgtctttcagctcatcacactctttcttgaccctaatgactgtcattttcaacttctctttttccattcttgtctttntgagctcttctttcaaagcttgcacttcttcacttttctcaggaatttcagcctttgtcccacttagactttntttctttgggagccaagttatcccttgcgttctagacttcaaccacttgtgatagccgctgatgacatcttctacttcccctaagctccttatcttttcttaccactctattccacgctntatagagtagcctaactgtcttatagagtagcctaactgtcttatggctagcacggnngtataattaatacaacccctcgtccctatcanagggacattngngaatccctcacacgagcataacactc

SEQ ID NO: 223820 - DNA, 470 bp, Glycine max
  unsure (1)..(470): unsure at all n locations
catgaagcttctgaacctgntattattgtgtattctcacacttattctgtcatatttgcagaaccaagccaagatgattggttcagataagcataaacgtgtgttatatataatccccgagaatatgcatccctgcagctatttgtatctcaatctagtttaaaatgtatatcttagcaaacactattgagtgattatgtctaggcaattctggtgcaaatatgtcttcaagcaattcttcgtctatcatctccaatattaatattcgaaactatcatatttgcgctgtgaagaccaacgttttttttaagatctctaanggttacgaaactttaatcttgtaagctgattcaaagttattgagcgaaagtcctatcatttgctcatatgaaagcttatgaggaggataagctggaaaaaagataagtcatcactcgctcgcattcatatcacacttgtaccacaaacat

SEQ ID NO: 223821 - DNA, 406 bp, Glycine max
  unsure (1)..(406): unsure at all n locations
tgaacaatatacttgccccttcattaactgtatctgggcttggcggtctctctcaatatagtacttcgacacctactgtacgttgaattgaccaatgctgtatgggaatgttgtgacaatccttcaaaaccttattgatacattctgagaggttgattgtcatgtggccatatcgacgtccttctctatcataagccatcgtccatttttcctttgaaatgcgatcaatccatgttgctatggctggactcaattcacgaaanttttctaaattttgataaacaactgcgcttgcaaggagtgtacgctgcataaaactagttatgaataaccaatttaagtatatataagagttaaataaacgtcaccatcaaatatgaaatcttacccacattcttcaacattt

SEQ ID NO: 223822 - DNA, 399 bp, Glycine max
  unsure (1)..(399): unsure at all n locations
agctntgtgtcacaaccagattcacatctctacttcaggctggtgtctctgctntggatcggagaggagaatcggctagtgagttgtcggagaggatgagagcaaaggtgagtgtntgacgaanaggagaggagaatctttgtggcgtcaaccaagtctagcaaaaataaaanatcaatacaactacatctctgcttcagaattgtgtcttcacttcggatttgtcagagataatcgttgtagttttgacacttcggaactaatgtttctcatgaagggtaatagaaataattgaatgatttatacctggttgtggtgtgtttctaaaggcatatttattcgccggacgaaacaaatttttcttatgangattatcatgtttcttgacatagcacaata

SEQ ID NO: 223823 - DNA, 470 bp, Glycine max
  unsure (1)..(470): unsure at all n locations
tgacagttctgtgtttgaaaaattttatgattttggagctctcatgatccccacagttccagggccttccccaaaactacaaacaaatacatctgacttggaaatttttcgtgcaagggcttttagcctgctgtccattgctggagtttctggattntgtcaggttgtccctttctttgtgtttttatgaagcacttagattcctctattttccttaatttagtaaacttcagtttaaaattgtcatataccaatgtagtttccctgacattctgtaggtaagcataccactagggatgtataataaccttcccctatcaatttctctggtggccagacatggtgcagatagaattttacttcaccttgttgagagtctntatgacagcattaaagatagaaagcagcatatcacagagcacanactttaatctgactgcnaggatgtagatgtaagtctatattttaac

SEQ ID NO: 223824 - DNA, 487 bp, Glycine max
  unsure (1)..(487): unsure at all n locations
cacttagatactaagctntaagatgtgctcatttgtgtaacaacatctatatattggtagtagttcatgctcacgaagctgcaataatgtgtggacatggatagtgaagcacataataccttccgcattgacaatgatgaccattcaagttaactgcccacttttgtcccaccacgtgcgttatanggttgaaggtctcctctacttcanaccttgtggagtggatatcatatacgtgaacgatgtgcgtacaagcttggtcttgatttttcctaagttctttaacaagcttntgaacaatatacttgtctttcatttaactgtctttgagcttggcggccatgctcaacaaagtactttcgacacctactgtacgtngattngaccaatgctcgtatggggaatgtgcgacaatccttcanaaccttattgatacattctgagagggctggtgtcatgtggccatatcgacgtccttctctatcat

SEQ ID NO: 223825 - DNA, 412 bp, Glycine max
  unsure (1)..(412): unsure at all n locations
agcttgcttctatagtgaatatggggttagcgcgtgtnnntttctctcagcagatggactgaagcggtgcgcttagcangatgacccttcactcagcgagcaagcacagctgatctttcttccagattcttcctcgcgcttagccgangaatgttgcgctcagcggatggctcgctaagccatcagaatggtttagcgagagggtgaaaatcagcacttcacaaacttgcctaattaacctganattaagagaanatggatattaaacacacaaaacagaaatactaagtatttatacctatctttaactaaaagaacttataacactacannaataccataaatgggaggagatngatacaatttacacaagntttatacacaannagtagtcgtattcaccgactaacac

SEQ ID NO: 223826 - DNA, 515 bp, Glycine max
  unsure (1)..(515): unsure at all n locations
acatgcaactacattcaggagctttctaaacactctttatctttctttcttcaangacttagtcattatatcagccaattgaacttttgacttgcaatgccttagtttaattctgtctttacttactcgatctctgaggaaatgaaatttagtgtctatatgcttgcttcttccatgagctactggattcttggccaaatctatagctgatttgttgtctacaattagttcaacggcttcatctgaagatactttcaattcattaatcagggatgaaagccaaagtgcttggcaagcagttgaacaagctgcaatatattntgcctcacaggttgataatgccaccattgattgcttctttgagctccaggatatgggagagccagacaatagaaatacttgtcccgtagtgcttntcctatcaaccaaatctccacaccaatctgagtctgaataggctacaagatgtagattatcatcctttttggtttgatgacggaaaatgattccatatt

SEQ ID NO: 223827 - DNA, 404 bp, Glycine max
  unsure (1)..(404): unsure at all n locations
aaattggggcacaagatggatcgagttacatcgctgcttcatctactgccaaacacatttatgatagtcgatgtccctgttacttccagtttcaccttggcgaagatgtcatggaccatgttgaaaatctaaattgattcaaccccatatcctgcgtaaaaattcgcaattcttcaactgtgcatcattcgcatacatacatgttgttcattgggtgcattgctcatngcattctttccttgaaaanaaagaacttactcattgtataaaaaagaaggaacacgcctactgtgccttaccaactgtgtagactatagtatgggtgagataggaggtgcaaacgatggcgtcacatggggccatgaaaaaaatggccaatgtgaagcatgggacataataaatat

SEQ ID NO: 223828 - DNA, 439 bp, Glycine max
  unsure (1)..(439): unsure at all n locations
agttatatagatcatgatatcaaagaaagatgtgagaactattttataagcttttcaatgatggctaaggattaacctgtagtatggaaggattagaatgcttagaggacaaacaaaatttgacttgttattgtgaattttgagttggagaagtaaaagaagcctgtaagatgaataatggcattgtgttatctgtatattgcaccttccctagtgggataagattattgatattgttgctctttgggtttacccacaaaacaagttctttgtaattgatagatcctagaanatccaatggcgtgggcaattacaacagtgtatagatgtcatagaaattcatgcaagtgtatgtctgccctttttggtcttgagaatgcaaaccctgactnttangcattgagttctcttaatgcgatataagaactatcaacacatg

SEQ ID NO: 223829 - DNA, 421 bp, Glycine max
atctgcgccatattggatttttcctatcagattcagactcaatggtatatccaaatatacaacatcatcattcagatacactaataataataatcattcattacccatctgggttttgttcttcttctttattcaaatccagattcaatgacgaatctagatagacatgcactaacaattataataaccgttacatgtgatgtgatatgagacacttatggacagctggaacatacctgctttctttctttctggggtcagccgcaactacgaactaacaacacatatgtcacagaggtaacctaacaagacctaaccttgtgcctgtgacttgtgtgtgttgcgtggcttggtgtatataaatacaattttattgtacaactgtatagtatagtctagtagcgtcgctatctccttcttc

SEQ ID NO: 223830 - DNA, 480 bp, Glycine max
  unsure (1)..(480): unsure at all n locations
agcttcgtcaaaaggaagatgagtcagacggatctcatgatattgttggtggcagatcctacagctntggtgctgtcttgttagcctcaaagtttgctgcgcacactctacgtggtgtacatcgcaatcgacttgccaagactgccagggagttagtgaaactacagaaaccccctgagcctgacttctctgcggatgatgctgactaaaaattccatgtgttctcttaanatgcttggttcggttgactatgatgattgcaattgcgaagaaaggtcgaaagcaatggtattatacaatatcctggtacagtngtagggtttcaaacttgaatgactctcatctgtgccttgtaattatagtatatacattaagccacttggctgtggccaccgagcatgtaacttatgtctattctaagttatattgagtatatatactggtgacgaatatacggggtttcactggatatttcagata

SEQ ID NO: 223831 - DNA, 349 bp, Glycine max
  unsure (1)..(349): unsure at all n locations
agagagctctatacatttattattcttataaacattatcacaccagacgcaccctttgttgaaaattggttttcttgctctctaagagaaacagtgttagaataaataaattccctcgccagatgatgaaagaaagaactctctccatcaaaattacctaaactctggttgatgattccttctgaagtagatccctcaggttcctcaatgctttcaaaattacgtcttttaattctgcttccattcatgaattacagtatataacacagtgaaatttgaccaanaacaagtgagaataacaaactcatagcattatctctcagaatagaatgacatctgcaacataaat

SEQ ID NO: 223832 - DNA, 461 bp, Glycine max
  unsure (1)..(461): unsure at all n locations
agctntgactacaatacaagtgctttctgataatttgtattattctcaattgtcaatttcaaaagatatatacaaaaagagctatcattattttactggaaaattatgggtgaataatttaccagcaatgttccatcggttgtgtccatgttgtggcagaggctcttcatggttatnttctgcatttgacatctctggaaaacaaaacataagtatcatgtngaattcattcnttgccttcgcttcgtaaaatgtatcactatgaaattctattcaagggacacanaacagaaccctgctataaggccacttaaccaacatttcanaggatactctaaaaaaccaataacagctcttgtgaaggaaatnancanatagcaggtatttcattttaaattacatacagaactactccgtcatantttntttagtgaaatggtagagagaagaaaaaaatatac

SEQ ID NO: 223833 - DNA, 496 bp, Glycine max
  unsure (1)..(496): unsure at all n locations
ngctagtcagtcacggtgctcaggtgttactgtactctacttatttgcaagtatgggcttacgtggaccaatcggggtaaagagtccttattacgacgtggtatcctgccgcaaacaaaggttagatgaatgcccttttggagaggtggtactacgagatgtctttcttacatttgcctgtcagagagatggtcatcactctggatgatgtgtcttatctgctgcactttcctatgacatgtagacccattaatcatgtcctttcatctcttgacaaagaggcagtgaagatcttgctgatgagtcatnttggcattttgatagagacagaggcttctgcagcaacaaacacaggtgtcagggtgagggtgatgtggcaagaagacacttaccactactatgttgagtcagactcgtaccgttggattgtaacgacttatcttttgtatntgctcaacagtacgatatttggtgacaagtctctcactcattgtca

SEQ ID NO: 223834 - DNA, 437 bp, Glycine max
  unsure (1)..(437): unsure at all n locations
attcgtaatctattcgggaacaaaaaacaattgagagaatcgacatttcttatacaataggtttagagtttcataattagttttgcgaggcataaaattattttgtaaaaatataaaagttttggcttttctggttataagagttcattatatatgtagccataaaacatacctatattcaatcttcaagaaacaattatacattactattcaaagaaaaggaattcttctaaactcacttttaagattacacttccaaataaaaattatgttgtaaccttactctgtttcaacatcgattctgtaaagattcgttggactaaaatcaaaataagcacactcttaatgagttcagctatanacaatttgagatcaaacgagaatctgatattacatcgacaaactaatttgagactaatcacatgaatgatctttta

SEQ ID NO: 223835 - DNA, 356 bp, Glycine max
  unsure (1)..(356): unsure at all n locations
ctacgggtagccagcagtttatgggaatcaatggaatttgcttttataccactagtttaggttaaagtctgcatttgaagtctatgatagcatcatagtggttgccacatcaccgattccatataacctatacctcacaaccacacttacccttgaagtatgttcaaaagttgaataaacttcatgaagcagccttaatactacgttcttaatttcaactaaatgactatgtctttgtaaaatctaatgcttgttttctccataccaactggtcatgaaattttctttngcagatggtcatcacaggtcttgtagcagccataatagataaagctggcatgaagcttctacttata

SEQ ID NO: 223836 - DNA, 370 bp, Glycine max
  unsure (1)..(370): unsure at all n locations
cctgcggcatgcaagcttccttgagaaacttncttaagagactttgttaagatgtcttcttgatatgctagagcntagctacacatacccgtctaataactaagctcaactccttgagaagcttccttgagaaacttgcttgagaagattcctagagaagcatgagcttaactacatacacccctctaatagctaagctcacctccttgacatgagaagctagagctntactatacacaccccttataatagctaagctcaccctcatgtcanaatacatgaaaatacagaaaagttcctacttacaacactactcacaataccctgaaatacaggctaaaaccctatactactagaatggcgcaaatac

SEQ ID NO: 223837 - DNA, 295 bp, Glycine max
atagacatcccggacaccttggcataagactatcggctacataaattgtcgacattaactactctacagtcccatatttggcatgagacccaggcaccatcggacctaataagcctatgcattctcaatttctaacattacttgtagggcttaggtacggaacgagaagaaagagagaaaaagcacaagaccgaataatatgattatgatatcgtatatagaaagcgaaacaacatacaaacactaactcaaccctattcatatccaagctagacactcaatcctaaattccaat

SEQ ID NO: 223838 - DNA, 487 bp, Glycine max
  unsure (1)..(487): unsure at all n locations
agcttgntacctctanacagggtcttctagtcacgtggattattgacattatcaactntnngntctctggtaggcatttcaatgttgaaatatatcttgaagcctttcttcttgccttcatcacagatgggtaaccttgagtaggttctgatacgaaccatcttcatgtcaatagctctactgatatgaagaattggtggataagatgtagcttcattaaaaaatgtacatctgttcagaattctagctatcatatccaactcaatctgtgagggaattagatcaacaggtatatngcatagaaatcttgaataggcgtacggatgttacatttttagaccactaacctaaaaaatgagttctcttagatggaccatttgtttcttgggatgaacaatggagacttctcaaaggacatngccattgcatcttcttttcttatatatctcgcttcagagataacgagggcactagtccactgcattaa

SEQ ID NO: 223839 - DNA, 457 bp, Glycine max
  unsure (1)..(457): unsure at all n locations
agcttcagctgacattgggaagcaaaaacccatacctctcatcatagnctttcttgtgtttccgatcgaacttgcaggtctgttgtgatgtggctttgacatgtcacattgacatatcaaacttttcctaataagtaaattcaaaaatttggagccggtgttattgctaaatgttagatgcattaatttcttaaatgatgaacataccaccaaaaaaattatttgaataagtctttcaacactgtgtcatgactacaacattntaaaaaaacagaccccgagtgtatttgttcatcactctcaccgaaattaataaacattcatgcttctagtgtctcttaactggtcagataacgtcngcgacccatggacatagattctgacattgcaaccaagattcaaggtaaaattgttgttattagttacacatatngctagcatcctacttaatttcata

SEQ ID NO: 223840 - DNA, 390 bp, Glycine max
  unsure (1)..(390): unsure at all n locations
actcctttaagctccggtggtctgtcataatgacaaaggagtgcccgagcagatagtggcgccatttacgtaccgcagtggtgatagcatgtagttcgcggacatatgtggatgcgcgttgtagccttgggcacaactgtntactgaagaatgctatagggcatgacttctggatgaggacaacaccaatggtcgtgccaaaagcatcagtttcgaggataaatggcatagtgaaatcaggggagggccaaatgggtgcctgagtcatgagtggtttcaattggtggaacgttgtntgtgctgcaaagttccacacgaagctatccttgataataacgccgttagaggtgcagtggtggcgtcataattacgaatgaacttgcgataaaa

SEQ ID NO: 223841 - DNA, 456 bp, Glycine max
  unsure (1)..(456): unsure at all n locations
acacctagatactaagcttgggtgcaattttctagacctggagtgataacatgcaattctcttgaacctttatcttcgntcacttccggcaagtgcaccggatcgcacaagtagtataaaacggtaagaaccgagtatcgaactctcagggaacttgtgttacttggtaagctatttcagtgaataagtgtctggtgtgaaaatctaagtgtgaatatgaataggtatgtaaaaacaagtagaaagcgcgctggtcttcctaataggtgcctgatgctaaaaggatattttctatctaacaatgctcatgtgttcctatggtgtctcctgagatgccaaaccctgattcctcatgatagtttagcctaatcctgattaagcatcatcctcagatttcctcttgtggactaaactcaaccaggaccgcattaagaacaacatactacaactaaatta

SEQ ID NO: 223842 - DNA, 445 bp, Glycine max
  unsure (1)..(445): unsure at all n locations
agctttaactttaatgagttacgaatatatgagttcatatgtatctcaantnggacaggctgtctcctactgcatattaacgtgctgaatctgctgatatgtntaattaccacaaacgattcttattcatggcagaaaaaccatttcttgtatcatgtacatataatctactagggtgcaattgcaaatatctagctacttgcaagctgtgaatcagtgcatgtattgcggcagctagaataatttgtaggcttatatgttactaacatagaagctactagttaaataacatgtacgtggaccttgtgatatagatggatatacatgcataatcaccaatagaagccgctatagtattagtattacatagcgacaataacaacaataatgaattttatccanagtataactatgtggagcatgatcaatgtatagagccaaaact

SEQ ID NO: 223843 - DNA, 324 bp, Glycine max
  unsure (1)..(324): unsure at all n locations
ataccctaattaaaaaaataaacttcactataacatanataatataatctaatacatacaattaattttaaagcatacataaaaaccaacttaatgcgcgtaatagaatggatggtttcttaattgttattattaaatgtaaaatattgtggcaccctaaggagaactatatgccaccatacccacatgccacgggcctgaaaatctaaactgtgatattgaaatacgactttctcattaaagtagtggcaaacacaaccctgaaatcaaggatcaattcctacacatatcacccttcatctcttttcccttatctttctctct

SEQ ID NO: 223844 - DNA, 466 bp, Glycine max
  unsure (1)..(466): unsure at all n locations
agcttgttagaactatcatcacatgacgctttattggcactttatnagnngnnntctaagcaacttgagattntaacagaaacacttggtgagtcgccaactaaactgtctattggtcaacctacacattcttctgttttgcaggttataggttgtaccatctgtggtgaggctcatgaaacagggccattgaagaaaacacttaagaagttcactatatgggaaatcaacagcgacaagggtatactcaaggaggaatttcatgcttccagcanggtccttataatcaacagggacagtggaggtcacactctancantctattcaacaaagaccagngcagaccttcgaacaagccaatcaaacaagggcctaacatcttttagaggactacaaagatggaggagactttgactcagtttatgtatgtaacaatgtcaaatcataanagcactaagtcagcact

SEQ ID NO: 223845 - DNA, 503 bp, Glycine max
  unsure (1)..(503): unsure at all n locations
gagtgaaacaatgtgactcttcacttttgaaattgaatttcaatgttttacgacactggtaatcgattaccaaaatattgtaatcgattacagccttttgaaaatatttggaacattgtaaattcagtttcaaaacattttcaaactcattttgctactggtaatcgattacaacaatatggtaatcgattaccagagagtaaaaactctttggtaaaggttttgtcaaaactcatgtgctattcaaagttttgaaaaacattntaatacttatcttgattgagtcctttctttattcttgaatcttgagtcttgaatcttgatcttgaatcttgaatcttgattcttggttgtaggcttttttcttgagtcttgaattcttcttgattcttgaactcttgacttgttcttgattcacttgagatgttctntgattcacttgagttgttctttgatcttttgagctntntgtcatcacctttgcatcatccttttgtgcatca

SEQ ID NO: 223846 - DNA, 466 bp, Glycine max
  unsure (1)..(466): unsure at all n locations
agctttaaggatagccctttggtatatggcttctacccttttttttttaacgaggcttctatgatgcatgctacttctcttctttcttcttctaagtctagctcagacctagtgttttccttgtttctcttggtcatagttgagcaccctctgaaaggttcccctatctcgatagggatcattgcataagccaatctgaaaggagattcccttattgtggaatgcagagttgttatgtaagcccacaagatatgagaaagttgtgtggcccaacatcttatagcaatgtccaaccttttcttttattcttgtagaatacctctgaaagtatgctngatcttcagccttctacaactcataaactnttttctatgaatggcccactgtagtgacacgattcttgattccaaccgacaatacttgtagaactgaagcttctacatttctctgtatttgggccatgttt

SEQ ID NO: 223847 - DNA, 430 bp, Glycine max
  unsure (1)..(430): unsure at all n locations
gatgcagcagtaatgatggcccgagttatgttgtggaactgttactaacccggaatgggtttaggcaaagacaacggcggcataactagcctgataaatgccaaaggaaatcgtgggaagtatgggttaggctataagcccactcaagcagatataaagagaagcatcgcgggaaggaagagtggtagtcaaagctcgcggttgagacaagaaggtgaaggaagcccaccctgccacataagtaggagctttataagcgcgggtctggnggatgaaggtcaagtggtcgcgatatacgaagatgatgttccgagtacattggatttggtacgaccatgccctcctgatttccacctgggaaattgccgagtggaagaacgccccggcatttacgcaacgagcataatgtanacctttacgggttaaaagc

SEQ ID NO: 223848 - DNA, 325 bp, Glycine max
catgcacaacatttctcatagccaaatgatctctactcatgtatagccacttcctaatgataatcataatgggagggcgttgaatacaacacatcaggttggtggagctactagtcatggatgttagcatgttgagaaacattcaacaaggtgatgtatgcgatatttacatgccaaacatgtcctatagccaaatgatcgcccttgagactttcacgtcactcaaaggataaaataacatggtggatttactaatcacattgctgttcctctagattcaactcatcatcaacttggcgagtctttggattggctaatcaccatg

SEQ ID NO: 223849 - DNA, 355 bp, Glycine max
  unsure (1)..(355): unsure at all n locations
acctgcggctgcaactattatttaaaatcattatagccacattttggttttatctacttttttctaatcaattacagcctttttttntaatatattattgcaaactatntttccaaactactcccaactaccccatatatatatatatatatatatatatatatatatatataatataaataaaacatcagcggaataagatcaaacggacagctaggaagtaagaatgccatatgataaatgaaaaatataaacttgtaaagcagatatcaagggcacaccgaaacggcttacaaacccaggtttatgaaaacaaagaaaccgaagcgacggcagagccgcacatgatcggtga

SEQ ID NO: 223850 - DNA, 252 bp, Glycine max
  unsure (1)..(252): unsure at all n locations
atggnntatttgtagtgatttttgtaaatttatcttcttttatgggtaacggtgtctcttaaacatttccattggatttaatgatgaaatctgtgcattttcaggtgaaaaagaggctaagttttgaattgtaaaatgtagcagttgggctaagcgcatatccacatctaagcgcagcttcagcgcgtttagcgcaaaggagaatttggcagagcatcaacatcaaagctgcacgctaagcacgagatcagt

SEQ ID NO: 223851 - DNA, 443 bp, Glycine max
  unsure (1)..(443): unsure at all n locations
agcttggagaggatgcctcaatggttgataagaatgtgattttctgataccaatgccagatgtcgtacaggatgtcacgacatcacgcttcagaacatgcagattatatttgagagtatgaacagattatacagggtaataacacatgagaattgttaacccagttcggtgcaacgtcacctacatctggnggctaccaagccagggaggaaatccactaanatagtgttagttcgaagatctaacagccactgtttacaaccttctcacctaaccactagncgtgcaatctctacctaagagccactcttagatatgagaacctctctactccctctcaatcactctcccgtgtttacaaataaatcaaagacacaccagagattgtctctgaacaaagagatcactctaacactcaggtccacacttgaagtaggataaca

SEQ ID NO: 223852 - DNA, 415 bp, Glycine max
  unsure (1)..(415): unsure at all n locations
tagtgtgtaaacgcgtagatacagattatgtgccctttatcattcaggaacaaacaggctgagtgggtaaacgcgtagatacagattccgcgccccttatcattcaggaacaacaacctgagtgggtaaacgcatagatacagattttgcaccctttatcattcaggaacaaacaggctaagtgggtaaacgcgtagaaatagattctgcgccctttatcattcaaatttcacaagttgggtgataaacgcgcagagacaaattctgcgccctttgtcattccgcacaccttttcgccacccagaggcgatcgtgttcagtggcacacagagacaaattatggtcattntgtgtcttgccgcccaggctcgatcgtgtcaacaaaacgcagagaccaaatatggtcattctgcgt

SEQ ID NO: 223853 - DNA, 466 bp, Glycine max
  unsure (1)..(466): unsure at all n locations
agcttaaaagaatactaataaaaacatactaagagagacttagatatacttcggttatactggntcacttaaaccaagctacggccagttgtcctttatgtaactgtanaggggtctactaatcaaaactctgattacaaactagtattgttgcctgtcattcatggctatacaagtattctctttgtcactcctaacagacccttagattcctccttaatctaagaccacctaactattgtttaatattaagtcattcttggctttcacaaatgatagtttgaatgaatataatgattcaacaacactcaaagagtgaataaacaataaagctcagatacataataactntgtttagcaaatgataggcaatgcaagtgtaagtgtatcatccattaatctattgtagagtttcgcttaaagatacttactcgtgttatctaatgaatgtttggagttactcttg

SEQ ID NO: 223854 - DNA, 366 bp, Glycine max
  unsure (1)..(366): unsure at all n locations
ctatatggggacacattatatgtaattctggaattcctcataccatatttatcgatcangaaacctagtttgcaagtgtgggagctataaaattttgcgctgagaagctaattgatcttggtttacaatagttgaaaacccttaaacgaatgggcaagtggaggcagccaatacagtagtggtgatcggattgaagaaaatattcgaggcatcccaatcaagctgggttgacgaactcccgcaagtactatggtcataccatacaacaccacagtcttcaactcacgagatccctctctgtttggcgtatggagcggatgatatgataccatgtgagatcattgagcctatgattagaacgactat

SEQ ID NO: 223855 - DNA, 433 bp, Glycine max
catgcagcttgtagtgggaaattaatcacttcttcttaatataactaacgccacattagtccaacaccatgcaatcgatctattcaattcattcactaacataagaatttcagatcaaatcaaaccactgcataacaatcaaaactgtaaactgttcaacaagctttataaattttctaactaaataaactgaaatataaaactgaaactaaaaacataaattgaacataaaatgtatctaaagcaggaaaataaatgaaaatcttgtcatggctcctcctgtgccagtgggcgctcgtccaaatgtgaagaaagagtatcctgtgctggctgagatgtctcctatgcagttgcaggccatggatccaaggtactctgtgccgcttgtaatatgttgtgtaatctgtgtcctcgaggccttcttcatactcac

SEQ ID NO: 223856 - DNA, 444 bp, Glycine max
  unsure (1)..(444): unsure at all n locations
agcttctcaccaagtcaatgcgctgcntgtgtttatttgaatgcgcgncgcgcgttaggggggaggtatttataaaacgaactctaatctgcagtggcgttggcgataccatccaagcacacattgccagcggtgttggcgattcccactctaaagcatggccaaatcgacaatcaaactggctatacccctttgcatggccaaatcgccaatggcagtggcgagaccactgcaaacgccatgtgtcgtaaccaaagaaaactcgtcaatggggctgacgatctgcatgtctttgcgtggatttacgtagattacaataccatggggtatttgtttcgaaccgcaccagtgtgaaaaatagttctaaaataactcccttagggctatgtgccgatctgcatatattataatatactttgatggaaaattgctgctcttataact

SEQ ID NO: 223857 - DNA, 491 bp, Glycine max
  unsure (1)..(491): unsure at all n locations
tgaactnttctttngctngacaattccaaacatagaagatgtanttctgtaacccatgtgtgagacaaatggtttgcaaggatagctacactatcaacaactcagtataaattggaatatttattcgggagattttgttctactcctattcacaaaatagaggtgggtgagaattacacttgtagttctgagcatccattggcacgttagaatgtgattcttgaactcagaaaattatactttgttcaaacttattaagtattaagcttattttccatcagcatccatatgtggacaaatgtatattgaattatgcttcttttattcttatcaccaaagaaggtatatgaataaccatctgaagcattaatgctgccaaagttgcgtatgtttctttaccacaaccagaacttgaatatttcttttattatcttggttgggtgcatcaatacctcgtcaccaacattacgtatcttatagttcaatgatac

SEQ ID NO: 223858 - DNA, 328 bp, Glycine max
atggatgctacgacacactaacgttttcgatcttcctaaaccaatgtggaagaacaagcggcggccataccgataatataaaatgagaacacgaagacggcgatgtacaaacccatctcagaatcgagaaaacaattcttcgacgatgcaagagctggtgaacaccatggtggcaggcgcgacattatagtcacgagactcgaacaacactccaatgacctcagaagactgagtagtgcgccctaagcacgtgaagacacgaacaagagacaatagaacccatcgatccacaattcgcatcggcactcacctctccctacctcagtca

SEQ ID NO: 223859 - DNA, 326 bp, Glycine max
atccgacttggaagattgttgttttctttttagcaatctcagtacgtttcgtttgggtctcgactccctcacgtgcaaagacgcctagaaggaggcgaaacctttaaagaaacacgctgtggtggagggacctgacagctcaacttggttcttccatggttaagacataaaaattcccatgatgggagacactctgccagtgctttactatgagaagcttttaagatacatgtcggccagctttgcggatctatattctgcggggaaagacccacagttgattaaaagaagaaaggtagtcaccgtcctcacgagtgcgatgccca

SEQ ID NO: 223860 - DNA, 410 bp, Glycine max
  unsure (1)..(410): unsure at all n locations
actctagctacaacctanatgatacgaaccattccaagtgttggagaagtattgcgtttatgcctggcgcagagactcgcgtagtgagtatgatgtaagcgccactatcagtgcgtctgatctatctcgttctagatgccgatggaggagccccggatgttgaggacaaaaccttttctgtgagggagtgatgaggacgtcaccaacgtcaaggaccatgaatcactagaaggacctatgacctgacgcagacgtaaactagcccgtcacatcatatagacctggctgagcatgtgcttacctcacatcgatgatgattgaacgcccacgtggataaagaggaatgcccacaggcagaggcactacctagactactactcgtcgctgtaggcccagtctatgctgtacgc

SEQ ID NO: 223861 - DNA, 418 bp, Glycine max
agcttataaaccccatctaataccctggaatctctatcataggttatgcacagaagacatgttgcggcagggtttgagatgtcaaacaagcaatatatgggagcaatgagtgataatggaataagccgcaccaaatagaagttatcatcaagagggcaccacaggtttgtaggggttcgacaaacgccatcaaggagatgggtggctgagatcaaagactctctacaaaaagttaggctttggcttggaacatatgacactgctgaggatgcagctcgagcatatgataatgctgcacgagccttgagaggttccaatgctagaaccaactttgagttgcccgagtcagcttcttctggtggtgctaataagcgtggagtggccaagtttgtgcctgaatgcactgaaccctttcttt

SEQ ID NO: 223862 - DNA, 394 bp, Glycine max
acactattttgcttagatatacagtccctaaactcccataggggctaatttcaacatacagacagtgcatatactcgtcacttgccacttggcacaacctcatttacatgcataaagtgtaaattaaaaaaaatgtaagaagctacgaagcactgctcattattattgtgaaatcaagtatattattatatataaacacaagatgctgaattaccataaacgattggacataaatattgaaatataacaagtaaaaagtctaaccttatattccatcacataatcgatcccattttgttctgcaaaataaagtttgcaagctctgatagtggagcctctgaacctgaaaaacagtcaattggtaagctaaaactcaagtcctgataatatataa

SEQ ID NO: 223863 - DNA, 466 bp, Glycine max
  unsure (1)..(466): unsure at all n locations
tgagaaagcttcttgccgaatcatatgattcatcttgtagatcttgatgggtatatgcaagggtgcagcactctgtagcntttctgtataacggtttgttcttcctcattctgtgtgttgtgtgaccattcctctaatgtaattgtaatctttttagtatcatgaagaacttatattgttcattaatttggttgctagaaactgttttgatttcgtgtatctctcctgcaggacaggtagtcttagatgtgcccttgcatctcacaagcccacaacattgtacgatttcatgcattaaaccacttgctgttcctgcaagtgctagtgctcaatttattgcgaaaggtttcaaccttttccagtctagcacanggtgaatctctttacgtctagtaatacttaaaattgctgatctgaaaggttctagtatatcatgctgctggatatacaatttcataagaaggga

SEQ ID NO: 223864 - DNA, 396 bp, Glycine max
gcttattcaagacagagaaagcaattatatttctgatggatgatcaagacagcctctagagtcttatgaagagtatatctaataggaagggaattccaattgaagttacaaaaggtttggccaagaaatttaagttaaaaagtctttttcaagaaatttactctcttggaatcgattaccagaggatgtaatcgattaccagtggccaaaactgatttacaacagctattaaaatttgaattcaaaatttgcactgtgtaatcgattacacatatatggtaatcgattaccagcagttattgaacgttttaattcacattttaaatactgtaatcgattaccagagcatattttcaaaaatattttcaacagtcacatcttttatttggtcttgat

SEQ ID NO: 223865 - DNA, 371 bp, Glycine max
  unsure (1)..(371): unsure at all n locations
cagcaccctattactctctcggaaaagtgacaaacgcanactatntcagcaccctagtacctagcagaggagtgtatgtagggttttcttcaagccacagttccaagagcagtgtagggttttcttcgagttctctttgatagggggttctgtgggtttgagcgagcggtttccagcagtattgaaaacaatgtgggacaatgtgggtgtcgagatagcagtttccggcagatttcaggcggaaggagaaagagaagagcgagtgcagggttntcgagtgcgcgggttgtgaaatttcaacgttctaacttataaacataacaacatcggttttttaaagatacccaatgttaatcgaatatacgtaacat

SEQ ID NO: 223866 - DNA, 433 bp, Glycine max
  unsure (1)..(433): unsure at all n locations
gatccttaagacaccgggctgcagcttgtgaatcgagacactgattcggtattcgattaccagcgatggttnctgaataaatcaaaagatgtaactcttcaaatggtttttgactttttcaaattggttctaagtttttctaaaagtcaaaactcttctaagtggttctcttgaccagacatgaagagtctttaaagcaggctttgtttgcattttcaatcaatctttctatcaatccaattaatcttatacaatcctttacaagccttgaatcactttatacttcttcttcttctttgtgccacaagctttccaaagttttctggttttctaaaccttgaaaacttgtgctattcattctttatcatctcttctccctctgcccaaaagaattcgccaaggactaaccgcctgaatttntttgcgtctctct

SEQ ID NO: 223867 - DNA, 257 bp, Glycine max
  unsure (1)..(257): unsure at all n locations
taagtattactgtcatttgaatntgctacgagtattcattnttaatctcgagcatttatatatattataggactcagagggaaatcggagtaaaatattattgcggcttgaattttctcagaggttctcgtttcagtttcaagcgtctcacaatattaaggaactcaatcaaacatctgaatganacgtatcgtcgcttgaattcgctacagctttcgcttcaatttcgagtgctctatatattatgggtctcaatc

SEQ ID NO: 223868 - DNA, 400 bp, Glycine max
agcttcagttcactgcttcagggagtgtcattatatgcttccatacgaaaacacattgccacaaagctactatcaacgaaaaacatactgtgtctgatgggtatgaagcgtcataagattcatgcacaccctaatgattggataatgtatcgacatgagtttgaagaaatgcataaaggccctatgtgtggggtattgcggtctcaagtgaaggatgatgactagtgtaacagtgatgaaaactcaaagaaaggcctccatttgaaggtgttgtggtatcttctgatcataccaaggtttaaacgcctatttgttaatagagacaatgcataatagaccttgcatggcatgcagatgggtgaaactatgatggaatgctcccccatccggttgatttctc

SEQ ID NO: 223869 - DNA, 424 bp, Glycine max
  unsure (1)..(424): unsure at all n locations
actcagcttgcaccatcaatggtgntccacgtatggatgtcatgtagaccatccttgacgctgcgcatcgtgaccatgttagcgtcctcattctcaatgcatctggcacgataaaaaatgcgactgtttgtgactcaccacaaggtgtccctaccttgctcattggacccttctccatgctctccttcactggctactacttatacaataaccagtatgcccttacccaagagccaccactccccctcctttttcctttgggatcaaactatgcacatctcatgggcaggtcttcaacggacttataggcggcagcgtcattgccggagataatgtcagcctcatggtctccaccttcatagaaccaaatattcgctaaattattcccgaacgaaaagaacggaacaacaatgacaacaatgca

SEQ ID NO: 223870 - DNA, 266 bp, Glycine max
ataaaggaagttttaaatttttatgaaatatgtaaaattgatattgggaagaaaagatttttgttgtatgtataagaatattttatagatttaaaataatgtttataataatgagtggttaaagttaattgggatatgaaaaatagtagatagggggaggaattttagtgtaggtgagataagttgtgaaggaagttaaatgttttagatattttgagataaatattatgagaaagtgtttgttattaaaaaatttttttttatta

SEQ ID NO: 223871 - DNA, 276 bp, Glycine max
agcttagggatggaatacttacttgttggtgttgaacaaaagcgcacaacggaatcaaaaaatgtcgaaaaggatgaccctatggcttgcaattcatcaatcccgtgggtatggcttttgaaaggggggaaaataagtttttgaacgtaacaacgccccccctttcgtcatatttatagtttggtgcaggggtggctccgccattcgaaccctactcgcccaagcgagctaaccctcacctttgctttgtaatttttatacttcttcttcgaaggg

SEQ ID NO: 223872 - DNA, 465 bp, Glycine max
  unsure (1)..(465): unsure at all n locations
catgaagcttaaagggccgaagggatgagtcaagtgtgtggattagttgatattagagggaaagttgaaggattgtcaaaggtcgaagaggagtttgaccgaacaactgagtaagactgaagagaatatgttganaattatttgacagtataaagagaagctgaacctagttggtagccataagcaaagactagaggatgagcatgcaatggtattagctctgcaagtggaaagggaagtaagagagagagagtgatannaatattgnatggaaaagctatgaaatggatggataggttcactctcactttgaatgggactccgaacttcaagactgttagctggagccaaagcaatggtgaacgtatacttatnttccaaggaagttcataggctctctgactatcgnagcatatgatcgagttgatctcttcataattaggaaccgttgaggcatttgtattt

SEQ ID NO: 223873 - DNA, 489 bp, Glycine max
  unsure (1)..(489): unsure at all n locations
tcttccatctatagtcttcatcttcaagtatccaatggatgttttcttcactctgctcttcatctgaagtcttgaggctattggagcatttcatgcttgaatttaatgcatgtcccttcttcatgcagagtccatgctgataggttgacatgtcttaaactttagcaggaaagtcactttttccattatagcaggtatgcactaatagagcatgccttgtgatgaagataaacactntcaaactatgtacttcacttattcttcataggactatatcaaatcctacgagaatgttctctataatagagaatctcagacacaaagtattaaatgaaggtcttatatactaatgagaatcaatgagacaggacaaaaggcatcacaattctgaaggaattgttagacacanaatattatcaccacaagagtaagacctcttgatatgatcaaagttggctcaatgaagaaccctagatagacaatcctctc

SEQ ID NO: 223874 - DNA, 306 bp, Glycine max
  unsure (1)..(306): unsure at all n locations
atgagatgaattatantgaaaggaagagaattattttttagtgagaaatggtanttattgagtagtaagaggatccccacggggagcattttttatttatattttttgggtatggattagaatataaaagagatttttttaagaagttggaaaatgaatttacatatagatattaaattggagttaaaaataaagattaatgagtttataataaaaaaagtggattaaattaaaattggaattatttttataagtaaaatttaatttaattaaaaaaatagtgatattataaaggtaagaatttaa

SEQ ID NO: 223875 - DNA, 440 bp, Glycine max
tctcacaagcgaccgatactataggagttggagacgcaaacatctatggatgagttatctgttatatgattaatacaaggcactatgtgttgagtgcccatgggcatatcgtaaaaacttaaattagatcttctttttctaagacgatactatttatttatatcaaaaaatacaaaactccattactacttgttcgtaaaagtaatttatcttcacaacatttatagaggagcgcatgctggctcctgccgttggttggtatacctgatccttttatgatatcttccacctgcaatactgattgacatcttataatccacgctacttttgttgccttgcctcttatctgcattattgtcgtatctgtacctacgtatatgatagtatatattatcaagctatggagcttatatgcataactcatactcacatggttctct

SEQ ID NO: 223876 - DNA, 286 bp, Glycine max
ttaccctcggaagcaaaaaatacaagatcgaaggataatcttcactcaaatagaaagcaccaagacaagaatgataattcccaatcaaagaacgggagaaagaatgaataattagaaaaggatgatgaagaatgaaagatagcttctgatcatcgatcgaaagattacagaagaaatgtgcataaaggtctttggaccagacaatatctgaacaatacagaattgtcaccgaatgaacatatagactgaaaggagaccacgacctacaatggtcttctccctttaa

SEQ ID NO: 223877 - DNA, 387 bp, Glycine max
tttttttctgtgatgcgggcagagacaactgaattaggaaaaaagcccccctgccctcattacagaaacgaattttcatttgagtattaattgcaataaaagatggcaagtatagcacatcttctaagtgaaaaactcagaaatttgactgttccatagtgtgtgactatgacttgttgaccagtaagcatgcgaactactatgggagttatttctctatatgtggaataacaagtcaatgaggatgcaacctgatttgtagcaccatacgccaaaatccatgctgcagctttcaacttgtgaatattacaaacaaaggatagtatattacctatggttgatgtatggcagaacttggtccaatctggttaaccggagagccatgag

SEQ ID NO: 223878 - DNA, 461 bp, Glycine max
  unsure (1)..(461): unsure at all n locations
acctgacaatgatatttattggtattgtgtgaaaactccttcacaaagcatggaccagataggctgcatctgaccattgtggatgaaatgccagaaattggctagaattactgaatattatgatgtcgtttctgaaaacttaaatgtcttattgattgttcatggatactgattgttatgttctctcctgcaacatcttttatgaccctcgacttgaaacctatagaatacaaatattgtgataattagggaaactatctgaaattcagttttgaaatttaacattgtgtctgctggtctattgatgcgtgtatttcttatttctctactcctgttattgtaatgtctctcaagtactactttagtctaaatcatgatcacactatggctcctaagaagtggctctaatatcttntaaatttgaaagggacaccagtggaatagtataacatgttttatgt

SEQ ID NO: 223879 - DNA, 345 bp, Glycine max
ttgcaaagatttccagtcttggatttggacaccatgccctctgattcactgaaattgcatgggaaccccgggttaccacagctatgaaactttacgttaaagctcttagtggcctaggcttaagtttcatcctttagataaggctttgtgtcttttgtttttgaatttataatacaaggatctttcttcatatgagcctggactctactcattctcattcattcgcatgtttacttctttttctgaaacggcagattcgatgacgagttcccagaaggtactaatacctgtgacgcgtctatcgactgttagcaagagatgattatacggaagatgaaagaaatg

SEQ ID NO: 223880 - DNA, 346 bp, Glycine max
  unsure (1)..(346): unsure at all n locations
agcctcanagaggtccaggaaggacactgcagccgaaggatctatttcctctctggagtatgacagccaccgctttaagagcgctgtacaccagcagcgcttcgatgccatcaacggatggtcgtttctccgggagcgacgcgttcagctcatggacgacgagtatactgatttccaggatgaaatacggcgccggcggcgggcatcactggttactcccatggccaagtttgatccacagatagaccttgagttttatgtcaatgcttggtcaacagacgagggcatgcgtgacatgagatcctgggtaaggggtcagtggatcccggttgatgccgactctatc

SEQ ID NO: 223881 - DNA, 172 bp, Glycine max
ctaacagcagcacactctagcttcacattatcaataaacaattttatcatccacatgaatactcttgcatatcatatgcacaggaatgagctaccttaagataccaactaagaatgagggcgaacttaaataatccataccttcttagaaacccactgatgctaatgttgac

SEQ ID NO: 223882 - DNA, 418 bp, Glycine max
  unsure (1)..(418): unsure at all n locations
tttgttttatgntaaatgtgaaaatgggagacaccagtaggtgaatgacataagattacgtcttatatgtgacggaatcattccgaattacacaaaatggataatggtttgaagaaaaataaaaatgatgttttatttattaatttaatagggagtaaaatagagtttctatttataaaatgataaaataaaaaaatagagtaaataataggctaagagtaccgcagatataaatagacatattatgtcaatttttatatttacgatacatctctacactgtctcttcctctcaaattcattttccctcattcctctcccaaaatcctctcttttttccacatacatccaaattngtgccaataaacctatgatcttggactcgttaccattggatcgcataaaattatacaccagat

SEQ ID NO: 223883 - DNA, 491 bp, Glycine max
  unsure (1)..(491): unsure at all n locations
cttaccttgataccatgccaagtagtttttgtacaatgtaactttacacacatgcccaaccacgtgcgtgtttgtctcanaagatgctntaatttggttgtgttaaagtgtcatcatgttgttcattacttcccgtatgtcaccaagggatttttgtaggagtctctttaatgaccaatgagcactctcaaccctacaaatgaaatatacaacaacgtataaacaaccgcaacattttcatttaagtcatcacttaaacaaatcaacacaaacaaaaaataatattcacacttattagtagttgtgtttcctagatgcatcattntgttcgtccatgctttcacanaattttctttgtgtganatcactcatatttgacacacatagtccacanacataggccaaggagagcaagccatttcaaagttnttaaggtactcatcanaagaagggtngagatcaatgaacatctatgtaatataattattata

SEQ ID NO: 223884 - DNA, 422 bp, Glycine max
  unsure (1)..(422): unsure at all n locations
cttaagccacccgcggctgcagcttccattacgaagcggatttgattatcttggatcaanggaaggcagtttcatagcacatcaagatcacgctgcacaaaaaacatgaaaagtgtaccatcttatgagtagaagaagctttctcaaccttaaggtatctatataccttgaggaatacccaagtaatcactttcatctgcagtgtatttatttgctccagtaaccaaaattttgagaatgaatgagcctttgaaataccgataggttcactaatccaactccatcccgagccagaatcattcaaagagccaacctcttcttttaaagattcagttgtgaagcttgaaatcatagatgcagaagtcatctgtcatatcataaataactataggatatgccacttcttgtactagaaaatgaaa

SEQ ID NO: 223885 - DNA, 477 bp, Glycine max
  unsure (1)..(477): unsure at all n locations
ctcagcttctattttactattcgcagtaccaacatggtgtcttttagttatatntccaaatttccncttgaacaggcacaacagagacatgtttccgttacataaatgggtgaaaaaataataatgaaaacacaattttattgtacaactgcgtaacagaattgtgttttcaatattacttaagggtgtaaaaacaaaaaaagcaacagagatacgattccattgtatagcatataacaaaatcatattgttgctgcattaatattttcacccgcccatgtgtgcaatgaaaatgattccattctcttttttttcttcgttnttactaaacaaaagtgtacttctattgcacacccttccctcattcgcattcctcttcccttataaacacaaacaaatcttggngtcattgtgttcaggtctgatgggtgatggccacagtggtggagccacaaccctaactcttccaagccttca

SEQ ID NO: 223886 - DNA, 316 bp, Glycine max
ttggaggtgttagatacatgataggttggagatgaattatgatgctttctggttgtgaccttcggaacttcttaattatgttctggtgatgcataagtctctaatttgtatgccttatgtgattccattatgcagagttttaatgtagagttttatattattatgtaattatttttatctctatcttaattttatttatacggatctcgcatcttcaataagaaataattaaacagaagaacttactaatttatctttttatcgagggacaccatattgtatactcttataaagcaatcactcgactgacacttgc

SEQ ID NO: 223887 - DNA, 351 bp, Glycine max
  unsure (1)..(351): unsure at all n locations
ccatcttacaaaanattggggcaaaagatggatcgagttacatcgctgcttcatctactgccaaacacatttaggattgtcgatgtccctgttactttcagnttcaccttggcgaagatgtcatggaccatgttgaaaatctaaattgattcacccccatatcctgcgtaaaaattcgcaattcttcaactgtgcatcattcgcatacatccatgtngttcattggttgcattgctcattgcattctttccttngaaaataaagaacttaatcattgttataaaatagaaaggaacacgctctacggtgcccttaccgaacctgtgctagagctagagtaatgggtagagt

SEQ ID NO: 223888 - DNA, 416 bp, Glycine max
ctcagctgcatgctcaccttttctctagaagcacttattttctctcctgaacctgttcacacaagaaaatatttgtcttacttttagtttactgattggatacttacagggctcatgacagctgtattaaataccctaaaccaattgatgtgttttctgtgaaagtaaaaagatacttatctacatacttttgataactaataatacataacttataattattaaaattgtgaagggtacattttatgaattgatatgcagaaagaataataaaacctacgaaggacatgaatggcaaacaaatagtatgcacaatataccaacattacatgaaaaaggtgctttctgttacattttccaccctcattcattgaaacactctgcttacattgtcttcagatgattacagatattac

SEQ ID NO: 223889 - DNA, 435 bp, Glycine max
  unsure (1)..(435): unsure at all n locations
actctatcttctctctatcttgctgttataggggtaaaagtgatagagattatatgtgtttttccccttaggcacttctctctctttcgaatgtgctgatgagaaatctgtcgccgataaagagtgtgaggctgagggatacacccatgctgtcactggcattcctgtcagacaatatatccaccatcccagaaatgccattactcagtcgatatcataacttttccttagctgaccgtccattnatccacacttgtcattcctatatataccaccgaggtggtccaccacactgtcaatgactaatactacctttagcacaaaccatattctccaaccattagacgagctttgaccgagaaaacttgtatatttcaccctaattctagagactatgctgacttgctcccatatctacttgattaaccctagcct

SEQ ID NO: 223890 - DNA, 311 bp, Glycine max
gaaattcatggcgggccctatccttgagggaataaagggcctacatgggcatcttctttatcgtcttcttgcacgggattttcaccattaacgtgggacttcgctccttgaaggtatgggcttggctcaaatcgtctggaacggtacggggagtgatgtccggaggcaagccatatgggtatgcttgaggactataccttcgaccgaacaccatcgtgtttctatctcggcccaagttattgcgggctgaacaccggtccgcttcctagctgattggaagcatcaccgtgcattatccttatagtatttga

SEQ ID NO: 223891 - DNA, 425 bp, Glycine max
  unsure (1)..(425): unsure at all n locations
agctntacggaagcgcctcggtcttgatttttcttcttttttcttcttctaactnaatttagtgaaatatgcttactaaggatgctaaaccccttctcactaattttcgcaagccatcggacttgattgtctctggatggcaaagggaactacaaaaatcttgaaaacaaataaaaatggatgaccatcattgtctctgcataccatcggacttgcttgtctctggatgacaagggaggcttcaatagcctttaaaacaatgaaaacggacgaccatgacggtctcctcatgccatcggacttgattgtctctggatgggaaaggtggtggctgaaccataattgtctccgtgtgctatcagacttgattgtctctggatagcaaaggtggcagataccataatttgtctcgcgtgctaatggac

SEQ ID NO: 223892 - DNA, 445 bp, Glycine max
  unsure (1)..(445): unsure at all n locations
tctcccctattctgctataaataggggaagaagtgaagaagattagggttcttccccttaggcacttctctctctttcgaantggctgaggaaaattagttccgtgaagaaaatccgagccgaggcacttccgtaacgtttccgtgagtaattacgcgaagattctcgatcgttcttcaaagattcatcgttcgttcttcgttttctttagtattcaacgggtaagtacctcaaaccaagcttttcaattcactctatgtacccgtggtggtccacattttgttccatgtattattattctcgttttcatttactttttatccccccttctgacgtgcttaagccatatatataagtcatttctcgctcaatctacaaataaaataaatttccaccgatcgctcgaattgatcatccgttaatttggttaaatgaattccgacca

SEQ ID NO: 223893 - DNA, 244 bp, Glycine max
  unsure (1)..(244): unsure at all n locations
ccccacctgacaaatgccgtcacgttgatcttgctagtcgtgagggtagcatgctttcgccctttggtagagttaggtgtatatgtgggaggccctatgttggacaattacccttttcactgtagaacgtactaaaagagagatgttcgtctccttctgtgagaatctacactgccanatcagaacctatactaggagtggacctacagcagtgatccctcaacaatggacatgatctaacagg

SEQ ID NO: 223894 - DNA, 396 bp, Glycine max
  unsure (1)..(396): unsure at all n locations
aagctnnggacagccatacgctaaaatctatccacgatggatctgtgttatctctgtttaaagaggcacccggcgttgaaaactcatcgaatcatacatcttcttctaactatacccttaatgaatatctatgagcgagagaatattgatgtgatcataataatatctttaatatcttctggaatggtaattcactcaaaagaactagtctcgcttataatcgaggctatctaacgacattcttatgtcgtgagcaataacctcaaaatctagataatgaacggaaatcaaatcctggatgattgaagaaattttgtatactgtgataatgcattttgggtgatgtgctttcgttccatgctaccatcatacgtgaatcacagaaacttttgatgg

SEQ ID NO: 223895 - DNA, 469 bp, Glycine max
  unsure (1)..(469): unsure at all n locations
ttaagcaccgcggctgcagctattgatagggaggaaagaatatgtatataatttgagtagggatatatcacggacattcaaccaattaaataatcagtaataataattaatataaaatgacaaccaatatatagaaatgataaaataatagttattaataaagcaaaatagataaagataaaagatactgacaaaaattaggaaacataaaaactactattttacgtatttattttaatgtttgtactcaaaaatttattattacttactcttaatatgtnttgtagtcatatattatggttgctgctcgctataaaaattgttatgatgaagattgacaaagtcctttcttgacatttactctaactaatacaacttaatttaaaattgtattaatatttttagtttcatagaaataatagatgagatttcttattaaaaggtagttgatattgtagtaccctcaaat

SEQ ID NO: 223896 - DNA, 510 bp, Glycine max
  unsure (1)..(510): unsure at all n locations
tactaagcttatagggagtcatgccaatggtagagtgaaaactattgttattagtgatctctaccaacgacaganaactctcccaactcctcttttgctctaagacacacgccctcaaaaggtcctccagcgactgaatggtccgttcagtttggcaaacagtctgaggatggtaggctgaacttagtctaagcttggttccgaacgctctatttaggctctcccaaaatctagaggtaaacctaggatctctatcagacactatgctagatggcacaccatgtaatttgacattctcactaatatacagggaggtaaacttctccaaggaaagtctgatattaatgggaataaagtgagcagacttggtcaatctgtcaacaataacccanatagaatctaaacctctgggttctaggtagtcctacaacanaatccatggatgctccanaatggatgctcggngtactccanaatggtagtcctacaaccaaatcctgatacatctcg

SEQ ID NO: 223897 - DNA, 352 bp, Glycine max
  unsure (1)..(352): unsure at all n locations
agctntgncctcagatccctcttgttggactttacttataccaaacaacattattggaacagcatacttaaaaccaaaacttaatctgcagatccctcttgtaagactaagtttcaattttgcttcattcaagttctaaggcaacaatacatttcccaatgctaaagtcacctaattatgcacacaaatgggtgatcatgccaagagcatacaaaatttaagcactgaaagaagcattgaacacaagaaacacaaccaattagatattaaaataattacatcagttgttctttagaaatccccaacgagggtgtgtagccagccattgcagaagaaacccttacaataatga

SEQ ID NO: 223898 - DNA, 307 bp, Glycine max
  unsure (1)..(307): unsure at all n locations
accacagaattcagacttagccttccaaccctcatagtgtcactctatctccactcataacatcacattctcactatctaatccctaggttagttctacccttcgtctctaacagatttccatcagcaatttcagcatatgaacatcacatacatcatcacagaaaccctaaaacagaatgggtatgtttaactcatccaaacatggaaatttcaacaagctctcaacaagaatcttcacaaataaccatcatgaagcagacaactaacgaaactacccatcatatctcccanaaccccatacccac

SEQ ID NO: 223899 - DNA, 401 bp, Glycine max
  unsure (1)..(401): unsure at all n locations
gagctngcctcaaagaggtgcaggaatgtctttttgcctttggaactacttccgccccggagtacgacagtcaccgctttaggagcgttgtacaccagcagcgctttcaagccatcaagggatggtcgtttcttcgggagcgacgcgtccagctcanggacgacgagtatactgantttcaggatgaaatacggcgccggcggtgggcaccactggttactcccatggccaagtttgatccagaaatagtccttgagttttatgccaatgcttggccaacagaggagggcgtgcgtgacatgagatcctgggttaggggtcaatggatcctcgtcgatgccgacgctattcaccagctcctgtgatatccgatggtattggaagagggccaggaatgcgag

SEQ ID NO: 223900 - DNA, 463 bp, Glycine max
  unsure (1)..(463): unsure at all n locations
ctaagctttggaatgttatcctgattgaactcttgtgtctccttcaaaaaaggtgaagaccaaaagggcttccaaaaagccattgaccaaacaacaaaattcaacaaaacgtgatctgtcttattgggagttgttggatcaagtggcctcggaataattcagaagaggggttgaattaattattagtgaacctttactaattaaaaaaacttatccttcttaatgttactagattcaattaggcttttactacaaagttaagaaagtaaagaacagaaatagaaacttaaccaaaagtaaaagcgataattaaagtgcacaacggacattaaagagtgtagggaagaagaagacaaacacaagaaatttattactggttcgcaacaacctgtgcctacatccagtccccaagcgacctgcggtccttgagaattctttntcaaccttgtaaaatctttacaag

SEQ ID NO: 223901 - DNA, 274 bp, Glycine max
  unsure (1)..(274): unsure at all n locations
ctctaccaacgacaganaactgctccaactcccgtttggctctctgacacacgccctcacaaggtcctccagcgactgaatggaccgatcagttagcagacagtctgacgatggtatgctgaactcattctaacctcgcgtccgaacgctctattgaggcctaccaaagctacaggtaaacctatgacctgtatcagacactatgctaaatgcgacaccatcgagtgcgacattctcactaatatacacgaaggtaaactatcttcaggaaagt

SEQ ID NO: 223902 - DNA, 467 bp, Glycine max
  unsure (1)..(467): unsure at all n locations
ctggtgcagagatacctatagctatatgtgttctctaccaacgacagataactctcctagctccgcgtttgctctaagacacacgctctcaaaaggtgctccagcagactgaatggtcctatcagctcggcaaacagtctgatgatggtaagctagaacttagcctaagcattgttacgaacgctctatntacgctctcccaacatctagaggtaaacatacgatctctatcatacactatgctagatggcacaccatgtaaagggacattctcactaatatacagggaggtaaacttcttcaacgaaagtatgagattaatgggaataaactatcacacttgccaatctgcaacaataactcaatagagtctagcctatgcgtgtatgtaatctacacaaaaccatggtgctactaatggatgctgggtactccaaatggactcctacaccaaatcctgatacatc

SEQ ID NO: 223903 - DNA, 397 bp, Glycine max
gcagagcttgaaagagcccgggtagtctaagagaagttcaagtccatagccatcaaagtctgaaaagagtatgatgaactaagggacgtcaatatggccacagctgatgctttggaacgagaaaccaagaaggcccgaatggaagaacacgaccaaagcataagtttgaggggctttataaggcagcaatagtgagctcaagctccgaagaggtgaaaggaatcatcacgggtcaaaggcatgatcttgaaggacgagctaaaggtttgccttatgtcgaaaagaaatttgtcccaacagttaagcgagactaaagggaatatgtgggccatcatcgataagtgcatagagaagctaaatctagcggcgactcatgagcaaaggctagaggatgagt

SEQ ID NO: 223904 - DNA, 433 bp, Glycine max
  unsure (1)..(433): unsure at all n locations
tataaaactcaagctggcaataagtactcncgatttatctctatttgctattgttgtnggctcgcctttgcacgggaaccggaaggtcatatcaccttctaattgacacatggggcactgccccccaaatgcgcaagaagaagagaaattttccgggctctcgtgtccgtaaaatgcattcatatcatgcatcgcatatgcatctcttcataacatcataatggacatatcctgcatttgtccgttatcatattccagcctcacattntgcatggtcatggcatcatcatgcatatgcgttcaacaaactttttggtctgcaaaattgcataccatttgttntcatgtttgctcatccttgcgttttcctctacaaaacaaanacaaanaaggggggagcgtgaaacttacactacatcttagttcatgtgta

SEQ ID NO: 223905 - DNA, 411 bp, Glycine max
ggaccttaagcgactgagctgcaacttggagtgtgtttttttttgaattattaggacacctgctggctgtgacaccctctacccctcacatatatactaataatgaataaaaatatttaaatttaattgagaggtatttttaaaacattatttttcaaaccagtgcttcgaaggggaaaaaggctcacattcattttcttatacataatattcaaacttggccaaatgaataataaagtattctcgactcaataaggtcgtctaagctacatacaattaatatataacctatatcctaatgtcacatcctaccagagcgttgtgatcccgtgtcctctaacatgatgttttcataggcatcacctatttatttgctcccccgacacaagttcagaatcttcacagattcca

SEQ ID NO: 223906 - DNA, 269 bp, Glycine max
atgctctttgcctactatatgattgttgtatgttcacatggactcatgtatctgctcacatgagagaggcataacgtgcttatacaagacttgccagagtcttctccgattagaataaccttaacatcgtatacattataagtgatcatggaagggaattggacaagaaaaactttgaagtattgagtgatgaatatgggatttaacataatgtctctgcacctagaacccctcaacacaatagagtagttgagaggaacaatagatca

SEQ ID NO: 223907 - DNA, 355 bp, Glycine max
  unsure (1)..(355): unsure at all n locations
agagagagagagagagttagatctttttccacagacgcaacgttgccggacacgtggtccctacaactgacgacggcgggtgaactatgtgctaacactgtcccactaacaaatgttcaccccctttgaatacaatatgataggccgcaaaggcacacgatgatgaagcatacctctcttctaacgcgctgttaaaccgctcagtcacccagccatctaccctcactaaactatgcataccggaggagagaactacacgctcgttttatcctcgtaaaggccacttnccactgcctacgcttatgagctgaagtgacccacttgagagtctccactatctttagccactttctac

SEQ ID NO: 223908 - DNA, 460 bp, Glycine max
  unsure (1)..(460): unsure at all n locations
agctntattatgccctctcccctcggcggtgatttcttcttcggcgaacgcgagatagttgttggtagtgatattattgaccagccctctgaaaccttctaccgagatgtcttgggccacatgggcctcgttcagaacttttattagcagagcccgatgaggttcggagctcatgagtaactccaacagcgagaccctggccggagttttgttgagctgttcgataaccttgaattcgctctgctgaattatacggaggaactcactggcttcctctagcgacaccttctttttaccatcctttttctccggaagacctttaaccggaatatctttattcgaagcgtggggtgcttcaccatcttgttcctccaccacttttcatttccccttgacgttcgcgggttggactggtatgtccggaggcgcatacacactaccgctacgggtcacaccactc

SEQ ID NO: 223909 - DNA, 440 bp, Glycine max
  unsure (1)..(440): unsure at all n locations
tccatcaagtggtaatcagagcacacgagcttcaagtnggtgttccttatacctccattaatttattttttctttaccttctcttccattgttgtttcttcatttttctccatgtatctcatcacatgtcttgttctaaatgtcgttaacatgattctttagagttttcaccgattaaacttgctatagaaactagatctgattatctatggctcaaagggcttgttcttgttcttgaaccatgaattgagttgagaatagggtacttagagttatgtcttgttatctttagcggctgaaacctaaaccataaaattcttacaaaaatgttcatgtagaagataacctcaaaaatctagagtgactcgttcacctatagtaagtttgtcatacgaagcatgtctagtcgtgagactagtcacataagatctcttatgttg

SEQ ID NO: 223910 - DNA, 175 bp, Glycine max
acttatacaagatcgtattgatatattcctgtcggatgatcaccgagcactgggggggctcctgttcggacattggtagaaagcagaatgcaggcattgagcattgcccctttggtactgaaataaacacaagactagagacgtttaacacagatcctcgcttctactcatcgat

SEQ ID NO: 223911 - DNA, 395 bp, Glycine max
  unsure (1)..(395): unsure at all n locations
ctctgccaccatcatcttagttntctattattttaatattattagtactttgatttctagccgtgtatttggctatactattatgacatttgaacaatttagtatttcttttatttgcatggtatgattgaacaattatgaattatgttatatgactatgtagtttttatatatttgatttattcatgtttcttgcttcatgattggtttagatttctcaatgaacgtcttgtgaataattagtaatttatatatgttttatatttgttacacactttgtctttctttttttatgccacagggggagagaaatagggattaaatcaagaactcacataagtaattaacttaatttcaagtgaagcatanactcanaaacaaaggcggagaatatg

SEQ ID NO: 223912 - DNA, 458 bp, Glycine max
tgcggcatgcagcttccagaataagatcaagatcagattcatgactcatgattcaagaatcaagagaagaattaatcaagataagtatgaaaaagttttttcaaaaactgagtagcacatggatttttctcaaaacctgtttaccaaagagtttttactctctggtaatcgattaccaaaatattgtaatcgattaccagtagcaaaatggttttcaaaaaagttttcaactgaatttacaacgttccaattgatttcaaaaggctgtaatcgattacaatgttttggtaatcgattaccagtgtgcttgaacgttgaaattcaaattcaaatgtgaagagtcacattctttcacaaaaaagctttgtgtaatcgattacactgatttggtaatcgattaccaatgataatttttcgaaaagctttttaaaaactgagtaacacatggacttttctca

SEQ ID NO: 223913 - DNA, 479 bp, Glycine max
  unsure (1)..(479): unsure at all n locations
ctcaagcttcaatgcgggaagagaatgaaaganagagagagagagagagttatagagagagttagagagagagaaagttgttggacaagtggcctcaataacttaagagggggggtgaattaagttttaaaattttcccactaacaaattttaacccccttttaaataatatatgataggcttagaatgcagaagaagaagaagcaatcaatttaataatgttcttttaaatgtgcaagacaaagtaaactacaataaaataactaagataagggaagagagaattacaaactcgttttatcctgggttggccacttcccatgcctacgtctagtcctcaagtaacccacttgagatttccactatctntgaaacttttacaacttctaacacaccttgcgatcctctccctgtgtcaggattctacaagtaagagatgaacatctttgacacactatgttctagatgttagataattc

SEQ ID NO: 223914 - DNA, 380 bp, Glycine max
  unsure (1)..(380): unsure at all n locations
aaaataaacattaacgctgcaccatgtgatcttgntttctttaacattacatgccatgcctcatctgcctccagtacaatttactatcactaagttctctagcaattcaattaggttgagttcagtgacatggttttgatcaagctaaacttgcccataatgtggaaattctcaagctaaacaatgactctctttctctctacaaaagggaacgtgtaacaattgcattcatatagtactaaataatttatatagaacagaaataacaactcaaagcaaaaattgatataacaaaatgccctttcatgtacagctcatgctatacacatacaaacataagaccaatctatttcacgttacagataatactgctattatat

SEQ ID NO: 223915 - DNA, 412 bp, Glycine max
agcttgtagacatcactgtgaagcaatgttatttttatctacatcttcagaacagtctgaatcacatatatagaataacactgcacaggttgatggccatttattccaatactctgctaaccacaaacatggtggctattttagctaaagagcggagagagtcccttatactgatgggaaaggttaatgccattatcatactcccccgcatttaataggtcttatttcaattaagaacaggtcgcatcacacttcaaaaacaccaacactcaccttttcacaagacaataataagtataaataaaaaactgaactacagatctcatccagattctctttctaacaaagctagaaagctcagactagtgtctgcctcccatgctaacatccatcaagcaaataaacttatttg

SEQ ID NO: 223916 - DNA, 368 bp, Glycine max
cacactcacatttctctacgcgaacactgttatactatcttcacattcgaacagaatataagctcatctattagattggtaggatacaactgtgaagacttgagttataccaatatgtctcccccttaggcatcgacaaaaagccgaagtgtgtatcaagaaagattaatatatacatccgtacgatgtgcatgaaaataatatcaaccatatgatgaagcatgaggcaagaaccatgataaccatgaagcatacaaccgtgaatagattaattatatactccacatagcctaataacatacttaatattggtccacacataccatgcaaataaggaactagtgaagtgatcatataccatactaata

SEQ ID NO: 223917 - DNA, 171 bp, Glycine max
aactcacctgtggcatgcggacttgagccgagaacctactcttcatattctctgacccacggagagaatggaattccttacactcggacgctaatacaagatcggattgatatctcactgtcgcatgacaaacgagaagtgagggggctcccgttcggacagtgggagaaa

SEQ ID NO: 223918 - DNA, 269 bp, Glycine max
cgcacaaagcccacaaccaagagaacaaaaatacacggaaaacgcaccaagaacctcgagaccacaagagaaaacgcaaaccctgcaaaggaaataaaaaaggaaagaaatactgtcataacacaacaccgtataatgattgaaagcagcagcaacagcaactacagggagatactctaccactataaaagggggaacgccgaaccctgcgctgaaccattcatcttccaaaagcgcaggaaaccagatcctccgcaaaaaccaaccca

SEQ ID NO: 223919 - DNA, 339 bp, Glycine max
tgtacatataaaaacgcttactttatagtctttaacaaaagcatttttttatcctttgatttgaagatgattacgtgtgatcggatatacttcttctttcttgtagaaaataacatatctgcagcaaaaaaaatgctacagctccatgcacacatatctatatgtattcatatacatgtcaacctctactcaaaacttgaacacgacatgttacgctagggctcaagcttaaatctatatctgaacatatgagttgagattacggtccacgtggagtcctgtcactgtgaactcatatttgcacgtgtgtggaactggccgtacgacttacagactaat

SEQ ID NO: 223920 - DNA, 388 bp, Glycine max
  unsure (1)..(388): unsure at all n locations
agcttataatatatcgagacgcccgtatattttattgttaactcccgacaaattcagatgatcatgacttttcacacggatgtccgattcgggtgcataatatgtcgagaggctcgaaaatgaacaacggtagctctcgaaatattctaatggtcattacttttcacacgaatggccgattccatctccatattatgcccagaggctcgaatatgaacaaccgaatctcttgagaaatccaaatggtcataacatttcactcgaatgtccaatttaggcgcattacatatatgggatattccgaattgaacaacggaagctcttgtctaattcaaatggtcataacttttcacactgangtccgattcacggttataaatatctgata

SEQ ID NO: 223921 - DNA, 300 bp, Glycine max
  unsure (1)..(300): unsure at all n locations
agaatagacatccgngagagaagatatgtcgcatttaatttctcaagagcttccgtagcacgatttcgagctgttagacatattatgcgctcgaatcggacatccgtgtgaaaagttatgaccatttgaatatctcgagtgctatcgatgtataatttccagtgtatcgatatattttaaacctgaatcggacctccgtgtgatagctatgactatttgatttcacgagagttaccgatgctcatctcgagcgttcaatttatgataagcctcaatcggacatccgtgtgaaaagttatg

SEQ ID NO: 223922 - DNA, 439 bp, Glycine max
agcttctgtcagcaaggtgacttgtatatattctgactgtactgagaagcagcatgtgtggaaatgttggccagttgccacaaaatattggcttctatcttgttacagtttcattctttttctaaatgaaataatgaattaccacctttgaagtcttaaacctttagtcatgtgtaattgcgtcaagggagatttgaatcaagtgtttaaaatatagaacaaaaggaactacattttggtcacacacctcaaaccttgctgttcttctatgttgttactgttttttgtccttctctactattgagtatattctttcaacagaagaaatgaatttattcaatgacaagttagccgacattgttgggtttatggctgctgactcattctccggccatgcccttgattacatttggatgaagttaccattttctgatgagat

SEQ ID NO: 223923 - DNA, 456 bp, Glycine max
  unsure (1)..(456): unsure at all n locations
tgaatttcactatttatcattttgtttacaatgaaggcatctcttcttcaaacctataagaagcatgtttagttttttttttaccgtaatttctattgtattcgcatgtattttcttttaagaagtcttaactttattgatctttgtgtgtataacctataattccttatatgctcatgtcataagataattatcatgggattaagactgccgttaaatctttcttttaagactggactagactatttattagttgttaacaagactttnttattataatgtactgaaatttaactaatactagtagtaatagtattattaaagtgtatgtaccaacaaaatattaaagtgtgttagtagaattaaggatgtgatagtgactctttaattgagatgaattgcttatgcattccacgtaaaaatacttctgaagtacttcaaatgacaacacactat

SEQ ID NO: 223924 - DNA, 279 bp, Glycine max
cctcggattcaggttatatgttccaagcttggagcatataatttatatggtccagcttgggggggacgttaacataatacgtatcttttgcatatgtttgattatctttgttattatgcactattcctctgctgtactaggggattcagtctgcaccctatcttgtctcatcttgccatgtacttgctttttctttatatatacaatagtctctgctgagtgagacatgttaagtactccaaaatatttagttcattgtcttaactcgaagaaacctga

SEQ ID NO: 223925 - DNA, 376 bp, Glycine max
  unsure (1)..(376): unsure at all n locations
tatctcaggagacaagagtagatgagtctttggatagatgcacaagtcacttatacctaaactgatctgtcaaaactcattagtgggcctaacatattatgtgtaactcagatataagcgcttaacacatacttacgtataatttaattgtagctttatgaaagacatagtttattttcttcttcttctgaaagagcttattatatgtctcaagtttttttttatatgctctagtcccgtaattggagactngagatagtaagagcctgtgtggtgattacgataaaattaaacaattattatatcatgtcataattattcgtgtgtcgcgttaataagatatgatattatcgtgtattctattggggtaatctag

SEQ ID NO: 223926 - DNA, 375 bp, Glycine max
  unsure (1)..(375): unsure at all n locations
ttaacaccatcattcttcgatcataaatagacatggaaatttaacttgatcaatgctagaacttcaaaggtgtctttggagacattgcaagctatgtgagttctaaaagctggtttctgtggattccattatacctggcaaaaaaggaacttaatggacagattacaccgtgttttggctaataaagagtagaggctaatttttcacaatgggatcgtcggtcacctttttgcttttgggtcagacaatagatgcgcattantttctcctatttcttacccttnttgcaccattttattactgattagcttaattgtcaaatattaggcagtctattatttggcccatcagctaattgatgttttatctatttca

SEQ ID NO: 223927 - DNA, 441 bp, Glycine max
  unsure (1)..(441): unsure at all n locations
taatcaaacantttctgacatatatacaaactcacttctatctctctaaantnaatatacaggcaagaggagaaagcttaatcaaacattntctgcctcttgaactatttgtagttagattaattatatttcataaaacaaattatttttttcattacattttgtccaaacagagcattacatttgtagatcctgttaaatggccagagtatgaaacatgaaccacgcactccagcacccctctgggttgtactcatggatgtatctaaatgtcaatggagtaggatgaaataacgaaataaagacactatattgtagtctaccaaaccaattttatgagtgtgtatacttatatgactttatgaactctatataanggccacatatgttccccttgagttacttgccgtggaataaatttgaggttatctcatttcagat

SEQ ID NO: 223928 - DNA, 292 bp, Glycine max
agctgagggaaaacttgatgccttggtgattctttaactcagcttgccataaatcagaaatctgcatctgcacctgttattgttgcaagagtttgtggtctatgttcttttgctgatcaccatacagatctctatcattctttgaacaatctggagtcaatgacaacctggagcctatgctgcaacaattataatggaccccctcagcgccaaacccaccacaccgaatattatgaattttcagcacagatcaatccaagtggggaatcatcaatctgagatgggcaatctt

SEQ ID NO: 223929 - DNA, 371 bp, Glycine max
  unsure (1)..(371): unsure at all n locations
ctcaagcntataccctacanagcctatatcaaggagttggctgattcctttgtgttatctccntccatcatgtnccctgagaggaaaatcaaatggcggatgcgctcgctactctggcgtccatgttccagctaacactgcacggngacctaccatacattgagttctggtgtcatggcagacccgcacattattgttaagtggaagaggaacgagactgtaagccttggtatttcgatatcaagcgattcgttgaaagcaaagaatattcaccgtgggcttccgacaatgataaaaggacattgaggagattggcggccggtctcttcatgagcgagagcatactatataaaagacaccatgacatgacc

SEQ ID NO: 223930 - DNA, 300 bp, Glycine max
attctcaaaaagagctccctacagtcacatctttctgtgtcggcctccaatcgctatcacaggcctatatatatgtgacgtgggacacgaaattgcttagatctctttcccaacaaagagtgtctgtatactctttaacaaagccaaatacgttatcactcctcttacaacatatgcctgcggccacaaacacgttggcattcattaaggcaatatacgagcgctcaaattgttcaatctatctctttacagagagaatgcttcttctcttcttctccattctgacaagggattaagaga

SEQ ID NO: 223931 - DNA, 346 bp, Glycine max
  unsure (1)..(346): unsure at all n locations
ggaaggaacccgngncncgactgccagacctacatggacaaattgtctacctactcaacaatgtcattactcagccaacattatcccttttcattatccaccagccaatcatccacgaacgtcatcactaaattagccacaaggctcgcctgccacataaccaatgccaaacaccacttgtagcacagaccaaacaccaaccatcgaaggagttttgcagcacacactctaatagaattcaccccaatttcggcgttctatgctaacttgctcttatgtctactccataattcaatggtagccataacctgccaagggtccttgacctctatttcttcaccgatac

SEQ ID NO: 223932 - DNA, 226 bp, Glycine max
gcacctagtgcaatggatgtttactcaaggaaaaggaggtgtaaaaaggacgcccatgaatagcgggaaaactgccttatcagaaaaaatacatcttcagacggccaacagctgctaacaccacctatcagtgaccaatgcaccgctaacctggaagaagaggccaaagctaaaagtgaactgacaaaggagtcggggatgactcgcggtactgccctaaaacaat

SEQ ID NO: 223933 - DNA, 334 bp, Glycine max
tattcttcacattaaccaaagatcagtcaactaacaagatcttgtgaatcatattaccatcacgaagatagaaatacaaagactcaccatcttttatagcagataatgcttcttgaacctgaacaaagaagaagccacatagcaaaacaatcagctatacgtcgatcttctcatactgagagccaacatcttcccatcacaacatatagcattctaatcaagatggaaggagactcggttttctcttctttgaatagcgagatggaatgagaacgtccttggacactacagtagaagataaatcataggaaacgtggattctatatgtatatct

SEQ ID NO: 223934 - DNA, 392 bp, Glycine max
  unsure (1)..(392): unsure at all n locations
cagcttacccttangtcgncaccatgnagctcatgtagatcactctatctctaacaacannggcaaggttcatggccctgtcatccaacagagcctatgctctatcaaaattctaatataagacaaaattgttaactggatgaacgaatgtcaaactggttttcataaattaaaaaacattatccactccaccaatattgacaaagctggatctaatacacacattgcacctatacttggtcatacctgacgaagcaactagtctagcactatctaacgatgacaataacgttcacaagtcgatatactgaattgcctcacattaagcggcaatgatggtaacttcgcctatataattgtcaaaacatgcgttgtcatatcagctaatacac

SEQ ID NO: 223935 - DNA, 300 bp, Glycine max
gccataacacagaaatctgtgtttgcacctgttattgttgcaagagttcgagggctatgttcttttgctgatctccatacaaatctctatcattgcttgtagcaatctggagtcaatgagcaacctgaagcctatgctgcaaacatttataatggaccccctcagcagtagagccaactacaacttataattatgatctttatgcaacaaatacaatccaagttgatgaaccatgcccatctgagaagggcaaatactccacaacaacagtactacgagctgtccctccttcctaatgct

SEQ ID NO: 223936 - DNA, 304 bp, Glycine max
  unsure (1)..(304): unsure at all n locations
caatcaaganccaatatatggttagttaaactagtagtagactcaacttagtaagaattgattaagttcaattataacttaataagctatgctaagttgatataaattaatcgtttattcaagtgtaacataatttaagctcattgttttntctagtctatgttcatacaccatgtagtttaacatgcactaataatcaaaaccaaggcccagctcattcacatattaattacttcgcatgtttcacagagaacaatcgaaggagaagatgagaccaaataagcctacctttccaataacctgc

SEQ ID NO: 223937 - DNA, 214 bp, Glycine max
tgctcttctatagcttgtccataaataattttgctgaagttacaaccactggataaagactgctcaatacaatgataatcttcccttagttatatctctggatctgactgaagcttcactcagtgctgtacgcagactcagtcgaacccgctgctggactgcattcagtgcaccacttgctgtacctcattcaactgaacctgcgctgactaaa

SEQ ID NO: 223938 - DNA, 387 bp, Glycine max
  unsure (1)..(387): unsure at all n locations
ntacatntatcatcaaagatgcaccttaagaggatatgtgatatatttgtctcactctacagggatagcattctgaagcactctatagataggccatcaatgatctttgcgaactaaaatcttaagttgatatgtaccaaataccaattctcacccccttaagtgatagattcagcactatcagagatctaaacgtagatattgcttattgtcagaggcataataacaaattatgtagaataagtgcagccaagcaacatatattaacttacaagatcaacattagcagggtttgtgaagccctcatcaacaattgtacgcaactgagggaactcctccatggcatacaatattgnagctagaacaaatccctgaataattcttgga

SEQ ID NO: 223939 - DNA, 445 bp, Glycine max
  unsure (1)..(445): unsure at all n locations
tgtgccccaacatgctcgatcattagttccactgtatatgtgtttttagaaaccgcttttctttcagggaccaaagcggctctcgcttagcatttctatccctgataatgagcagttcaagggagagctccccagattggttgcgttcttttcaggtatcactttatgctaattcaattctcttaccagcttctcccttttacgatattgatttatggttcctcgttttccgcgttcaattgcaaccttgaattttaacatcagttcgcttaagcttcttacatgtgtgcntgttaaacaaaaataattgtattgttgttgactaggcgccatctcattcgctgttgacactgtcctctgattctgggtcttcacgtggtggtggatcctggaatgaggatataactgatgatgaagggtcttctccatagtcattcagatttct

SEQ ID NO: 223940 - DNA, 290 bp, Glycine max
ctatggccgagatccaagcttcatacagccacccaaatgacacctatccaggccttatcagggcatggactaacagagttctattagatagcacaatatacactgtgaatacaagagagcaaattggaagaatgctgcaagataatttcagtaaaactcaagagagaatgaagatgcttgcttacagcatatggataaaccgagagtataattatgaagatcttgtgtacttgaagattctaacatactagaccgactacataggagatacatactctacctatccatag

SEQ ID NO: 223941 - DNA, 330 bp, Glycine max
aagtgccaactccagcgctgatctttttggcgactcaagagacaccaatatctatctcactgatagcgactctagtcatcgattatctttccaaggatccattaccttttactggagtcgggaatctcattatccatgtcattcgtattctgaacaacataatgataattcgaataagtgacattagttcctgtattcatgctggatgggttgatgtacgcactcctcccatctgtgttgcaggcacaacatgatctctcttcccttaagaacattgcatgagacactggatagaaactcagctcactggccctcacattgatgacagat

SEQ ID NO: 223942 - DNA, 434 bp, Glycine max
  unsure (1)..(434): unsure at all n locations
agcttctccctattttgctataaatagggtgttatgtgaagaataaaagggttcagccccttaggcacttctctctctctcgaatttgctgagggaaaattatttcgtgaagaaaatcaaagctgagacgcttccgtaatgtttccgtaacgtttccgtgagtaattacgcgaagattctcgaccgttcttcaagattcatcgttcgttcttcgttttcttcagtcttcaacgggtaagtacctcaaaccaagcttttcaattcattttatgtacccgtggtggtccacattntggttcatgtatttttattctcgttctcatttactttntatacccccttttgacgtgcttaagccatttatttaagtccattctcgcttaatctaaaataaaataacttccactgatcgttggactgtttcatccgtaatt

SEQ ID NO: 223943 - DNA, 277 bp, Glycine max
aattatggtataataccaagtttcatacagccacccatatgacacctttcgaggccttatatgggtatgtgcttacaagtcctaatttgaggcagtagattacactgtgaagacaagagagcatattggaagaatgctgcaagataatctcagtatagctcaagagagaatgaagatgtatgcatacaagataatgatagacagagagtttaattgtggagatcttgtgtacttgaagattcaaccatacatgcaacacttctttgaaaatacatac

SEQ ID NO: 223944 - DNA, 439 bp, Glycine max
ttaagtcacctgccgctcaagctttaatacacttctttcaagatagcttttctgtttccgctgtagtttggaacactaatttggaagcttcccgtatccgtacttggaaggatctgatactgccttcctaaggcaatatcaatataactccgatatggctcccgatcgcactcaactgcagaatatgttcaagaaagagggcgaaacctttaaagaatacgcccagcgattggagagatttggcggcacaagtatctcctcccatggttgagagagagatgatcaccatgatggtagacactctgccagtgttctactatgagaagctagtaggttatattgccgtccagcttcgcggacctagtgttcgccggggaaagaatcgaggtagggttgaaaagaggaaagttctattacgtttcctccacgagtgcgaatg

SEQ ID NO: 223945 - DNA, 417 bp, Glycine max
  unsure (1)..(417): unsure at all n locations
actaagctggccttggttacacatgattgaacatgattgagactatatgattctattcgcgcaaaataggatgaaggcatgagtggttttcgaaatctgcactttatgcagaattttgctgttgaaatgtgcagcagaattttgtataagtgcagataaatgcttgtgtatggctgattgtgaaaagggtagtacatatggggttttggacattctctagcagatcccaacggtcaaaatatagacttatgtactagagacttccagtacaaatttcgagtcgatccatcggttaacggactgtaatgaagagaatgttactggggtatctgaatgagaaaagttgtgatattggtttgtgttctaagtagagttatctgtctttgccctatnttcttggctgtgataggtcgtgat

SEQ ID NO: 223946 - DNA, 375 bp, Glycine max
actaacatccttcgaccttcgtttatacgacttcacaactcgaaaaaggtatgctttgatgctacagttcaacatcattcagcgcccattacaccggctaatcagaatccaacaaaactttatggtcgtttgaatggcttaaagggtcaacactcaatttccagcgtctcgagattgtacgggactcaatcaagacatcccaaaaaaaacgtattgccgactgaattggctcagagcttcaacattcaatttcgagcgtctcgatatatgacgggacaaaataagacatccgagcaaaaacttattgacggtcgaatatgctaacagcttcaacattcaatttcgaagcgctcgtaatagaccggactcaatcag

SEQ ID NO: 223947 - DNA, 369 bp, Glycine max
  unsure (1)..(369): unsure at all n locations
tatatcgagaccgncgaaattgaatgttgaagctctaatccaatncaaacggcaataacgtgttactcgaatgtctgattgagtcacgtcatataccgagacgttcgaaattgaatgttgaagctccgagcaaattcaaatgacaataactttctacttggatgtctgattgagtcccacaatatatcgagaccctcgaaattgaatgttgaagctctgagccaattcaaatgacaataactttttactcggatgtctgattgagtcccgtaatataacgagacgctcgaaattgaatgtngaacctctgagccaattcacacaacaataactgtttactcggatgtctgattgagtccggtaatatat

SEQ ID NO: 223948 - DNA, 450 bp, Glycine max
gcttgccacctattgaattatgaatcaacattgtctctttacctaagaggacagaggaatcacccaagtgctagaggttctcaaccaattaaatgtcaacaagacgatgagcacattacaatagaacagaatcacaatatctggcctcgaatggaaaacaaccttttattcttcccacttttctcatttagtttgctatgtaaattcatccttgaaatgaaattcagaactacatcctcaacaagaacatattatttaattacattgtgaaccaaaagttacattgcaaagtaaataaataaaacttggaagaaaccaccatttgggaacaaacccgtagagcgccattttttcttggcttagtattattattcactcacccatgtacacatgatctcaactcaagtctaaacacgtgaacctgagagtaaagggtgagaatattgtata

SEQ ID NO: 223949 - DNA, 493 bp, Glycine max
  unsure (1)..(493): unsure at all n locations
ggcttctagctagacccaaacgagtgcactgtaatgataaattgttgtttttaatnatatctatagncgcatgaccaatgaaaatggcaaaatactaatattgtaattataattatcattgaaaaatctaacctcttccttattggtcagggaagaagcatttggcccaacctccaccgtggatctttctgtagtagacaggggtggctcctgtaaatatcccaaaaaagcattaaaaagttaatatgtatatcaaatgtaatattctcgttactcttccttttcttttcccgctgtatgcaagtatcttacgagggttctaccaacggcttatagttccttattcttcatattgaaagaaatttgcgagtacttgctttctgatggcgtgggaaactagaattcaactatcgcggaatgaaataatgacgaaagtgtgtatgcaatgaagatgcatatgtactaacaacctgagaattttgccatctttatg

SEQ ID NO: 223950 - DNA, 292 bp, Glycine max
ttctgacgaccccgtatatatgcacacttaatagagtggtgaacctctgaccaaatgcagacgacgactacctattgactccgctgtctgatcgaggccagctaaaccttctaaccctggacattgatcgtagaagctcttaccaaattaaacgacattaacattttactcggatgtttgaaggagtcccgtaatacatcgacaactcagaattgaatgtggagacttcagctaacccaacgacatgacttttttactcagagcctgatgaggccgtatatttcggacctct

SEQ ID NO: 223951 - DNA, 385 bp, Glycine max
ccgtcatatatcgagacgctcgaaatttaatggtgaagcttttatccatttctaacgacaataactctttactcgaatggctgattgagtcctgtaatataacgagttgctcgaaaatgaatgtcgaaactctgagacaattcaaacgacaataactttatacacggatgactgattgagtcccgacatatattgagacgcttcaaattgaaaggtgaatctctgagccaattcaaacgacaataactttttactcgaatgtctgatcgagtcacgtcacataacgagacgctcaaaattgaatgttgaactttgaccatttaaacacaataacttttacacgatgtctgatgactccgtatattctagacgccaaaattaatgt

SEQ ID NO: 223952 - DNA, 448 bp, Glycine max
agctttttatttgcagagatgaagatgaattttggctccctcatggactcttctaaggacaatagcatcatttcttgcactaaattggtgggagttggaagccatcttctcaatcaaattcctagcctcagcaggggtcatatcaccaagagctccaccactggcagtatcaatcatactcctctccatgttgctatgttcctcatagaaatattgaagaaggagttgctcaaaaatttggtggtgagggcagctcgcacacaatttcttgaatctttcccagtactcatacaagctctctccactaagttgtctgatgcctgaaatgtcttttctgatggtagtggtcctagatgcagggaagaattttccaagaacaccctcttaaggtcatcccaactgaaaatggatctgggagcaaggtagtataaccaatctttgccactcc

SEQ ID NO: 223953 - DNA, 406 bp, Glycine max
  unsure (1)..(406): unsure at all n locations
gtaacctcatcgactctcacagtctntagatgtgtgttccattccattccttgtgntcggactctcagccacttatgatagctgccgatgatcccattactgcttcccctaagctctatgtcctttcttcacgccgcatcccatgccttgcgaactccttggagtaccctcgcgatgtggtcactaaaaccccgtgcgatgaaaggcgtgatgctttcgtctaatggcgctcctctcatggggtagccaagctgtcttatggtgagaacgggattataattaatacaaccgctttgtcccatcaagggaacatttggacatccttcgcatgaagatagaatcttgattcttccttccttctagcgagggaaccaattaacagacgcctccccatgctagccaagag

SEQ ID NO: 223954 - DNA, 290 bp, Glycine max
  unsure (1)..(290): unsure at all n locations
agagcccatttgaccaatggatgagggaattgactcttattgcnattatcataatcaatgaacataattacgatgtgcgtccagattaatctgtaataaattgacattggcacatgtgtgtatcattgaatagtgcacgagttgagtcttcagcacaaatcaagtgtgcctcatgaaacgcaaaatgtctactacgcgattcatcatcgctcactcaaagttggacttaaccaagatagtaaatcaattactacggacattccactctgataatacttgggcacaacatg

SEQ ID NO: 223955 - DNA, 467 bp, Glycine max
  unsure (1)..(467): unsure at all n locations
acacttaaatactcagcttacgagcttcgagctgcagaatatagtttatctttttttgccgccctatataagagtaagacgcatggtaattgacacaagtacaatgatataataggaacaatcgggactaacaagctnttagagaatcagcatgagagcagcttttttctgctccaactgatcagcataggccatatgagctagaggagtcactgcatcacgcacatttcatagctttgccaagttatcattatttgtttcaccatccaaagtcccacttgaagcaacatcaaccccctcatctaattcttgatgggatcaacactggcattacttatctcttcaaatgaccgatgaagaacatctaccacctttaccgttttgttgccaattgatatttcttctaattcctattagatgggtaattagatcatcaatcgcaattctaatgcactacaagagatgat

SEQ ID NO: 223956 - DNA, 362 bp, Glycine max
agcttcggaagagagagatgagggacttttcttatgtgttgagcttgaaagagcccgggtggtctataagaagttcaagtccatatccatcaaagtctgaaaagagtatgatgaactaagggacgtcaatatggccacagctgaagctctggaacgagaaacctataaggcccgaaaggaagaacacgaccaaagctcagttttgaggggctttataaggcaactatagtgagctcaacctccgaagaggtgaaaggaatcttcacgggttaaaggcatgatcttgaaggacgagctaatggtttgccttatgtcgaaaagaaatttgtcccaacagttaagcgagactaaagggaatatgt

SEQ ID NO: 223957 - DNA, 292 bp, Glycine max
aagcgaacattctacatatagcttataagtgccatcctaaactatacatcataagacgattcaatcttctaagagcttcacacaacttcctttggattagggaaatcgaatactaatgaacctgaattccatttcattgatgaacccattcattctatatcccttagacataacatcaatatatttataagctaacttcacgggagatataaggttgactcattggtgaacgaagagaggaggttgtgggtttgaatcccacaactaactaatgttaacaactaacatctaa

SEQ ID NO: 223958 - DNA, 353 bp, Glycine max
tcctataaaaatatcgaatgactattcctgatgagtaaaatgtaatatcctcttataacttctgaactccaggagaattctcatgctctaccagccttcctttataaagcagcccttcccgattataaaagaaaccagtatgggccttttttttctgttgcaaatcagaaataacctttatccagtgggtatcttgctgcacctcatgagtcaactgcgcccatctacaccctcaggataatagatcatattattcaattgtgctttcctcaaacctcttgacggacatcagttccttattatcgtcccagtcttttaatatctacattaatcccatcaactggccacctatt

SEQ ID NO: 223959 - DNA, 75 bp, Glycine max
tctcttttgaccaaacccgccgggccggccttcgacacctactctcgtactctcgacgaagaccccgccgctcgc

SEQ ID NO: 223960 - DNA, 493 bp, Glycine max
  unsure (1)..(493): unsure at all n locations
ctataccaaacncaagctaggagaggacgcttcaatggaggacaagagagagggagagtatgagacattgttgaggacgaaactgaacgaatacaaagggagagaacgtgaactctgatttgtgtctcacatgactctcattcatcacaagtacaacaagtgtctacacatgcttctatttatagactaggtggcttccttgagaagctgtcttgagaaaacttccttgagaagcttctttgagacaacttccttgagaagctagagcttagctacacacacccctctcataactaagctcacctccttgagaagcttccttaagaagattcctatagaagctagagcttagctacacacacctctctaatagctaagctcactcccatgacaaagaaacatgaatatacataaatagtccttactacatagactactgaaaatgcccngaaatacaaggcttagactctatactactagattggcaatatac

SEQ ID NO: 223961 - DNA, 436 bp, Glycine max
  unsure (1)..(436): unsure at all n locations
gctancgcatatcttgtgcggcgttgattatgcttatgcgcacgctgtttcgctaagccgatgtgttaagtttctgagggtgtgctgaccaaactatatttcgctaagcacctatcattaatttcagtctttatttttgcttttaaacttgaataaatttggtctaagaaaatttgagttcttattaattacagatggcatcgagaaaaagggccagagcagatgacatcccttcatcatccactcccgctcctccatcaatagcaataggaccgaatgtctaaagctcccaaaccttagtccctatgctatagagcttattcaaaggacaggttattatcatgcacagcttgcaagaattgactcaccanaggccaattatgactatggagcagttccttgagcaagtagcatggcctggagctctaccttcaat

SEQ ID NO: 223962 - DNA, 337 bp, Glycine max
tataacattcatgcaatcttctatagtagactggactatagctctattataaacccctgacaataatacttcataagcaactgcgtcactggtatatgacttacaaataaaccgaatgtcatactctatgatgggacacttttagcctcccaatgcacaagatgataatgtgatcagcttctattgtcctagatagcttaaagcctcgattgattatgcgattggtagaatttggtgtaaatatgcaccctatattcgctcggtcagcttagtctttgctatagcttctacccctctgaatgttggaaatatccaccttaattgttgcctcttcggg

SEQ ID NO: 223963 - DNA, 407 bp, Glycine max
ttaaaagaattgcgcaatgtcggcagaaaaatatcagtcgtggctatataacgaccgatgtcaggtatttttgtttcaatccaatccctgaataatctttggatattggccaataggaaatgttcgatcggcgtcatcaggtgatgcttgctttttattttagacctgctggatcggtcatctttcctggccgacatcgactatcattttttttatcagtgtcagtgaataatgttttttggccgaggtgggctgatgtttctctagccgagtaaatgagaacacgccagtgtcggccgaaacacagtcttggttgagctcgcacgataaaacaaagccgacctacattgtaagttttgtaggcgacaccgaacaacataaccaacctctctaccggaaaaactatt

SEQ ID NO: 223964 - DNA, 471 bp, Glycine max
  unsure (1)..(471): unsure at all n locations
gattcaagatattgtgtgcaagctgtcctcaccaccagatttctgagcaacttcttcttcaatatttctatgagggacttagcaacatggagaggagtatgattgatgctgacagtggtggagctcttggtgatatgacccctgctgaggctaggaatttgattgagaagatggcttccaactccctacaattcagtgcatgaaatgatgttattgtccttagaggagtctatgaggtggccacaaattcatcttcatctacagaaaataaaaagctcgaagganaacttgatgccttggtcaacctagtaactcagtttgccatgaatcagaaatctacacctgttgcaagagtctgtggtctatgttcttctgcagatcaccatacagatctttgtccttctttgcagcaatctggagtcaatgagcaacctgaagcttatgttgcatatatttataatagactccctc

SEQ ID NO: 223965 - DNA, 445 bp, Glycine max
  unsure (1)..(445): unsure at all n locations
tgtgtggacaataaatgtatcatgagcattgctcataactctttctagngtgacaagacaaagctcatacagatcaactagcacatactgtagcagtgctgatgacaatctatccatcaaatatattaactaaaggatgtgtcaaagaacacatgtgagatcttaggaatgatatatatgcattcctcaacttcacggaagctatgaacacacgacttttttctccttagttctatttcgtaaattatatatttccatgagtctaatgttctgtcttaactataactatctgtcagattatacacctgatatactaagattagtcttcttatatacgagtaatattgtactcattatcaacagcaactattcagatttctccatatattcaagattctttacgtatctacaagtctcaacactgtcgatcacgaagatatctatc

SEQ ID NO: 223966 - DNA, 438 bp, Glycine max
agcttagtgagagacatttttttctcactctatatttaagcttcaacttggcatcagagctgaatttatacacgccgccgtccgctgccatcggccaccatgccgccaccgtcatcgccatttttccggtgacaagcaggatttggtgcgcctcgagaagcacaacccaaccccacaagtcgcatgaccaacaggtcacccacgcgtcaccacacaccctcaccgtccgtcacccacatcggcgcgtggtcgccacacgctgtcttcttagcgccggaatccggccagaccaacgccagtcgtctcgtcggcgcgtcctgaggccattccagccttaagtctttggtttcgacactcagaacgtgtcgaccttgctcatctctccgttactcttaggatttgggtcttgagagaaatggctcatctggtcaagtctct

SEQ ID NO: 223967 - DNA, 298 bp, Glycine max
atgcctaatatactttatgtttcaaatcaacaagtctgtgatatgaatttccattaatcaaccggaaaagagtaagtcttgtacgggctctgtatgctgttatttatgcccctaaagcttcatcaaacgtttgggaccaatccttccttgagtgagcaactattgtttctaaaatactcttaacttccctattagaaacctcatcttgcccattggtctgagggtgggaaagtgaggctatcttatttttgacattgtacagtgggaagacgattttgagttggacattacaaaaatg

SEQ ID NO: 223968 - DNA, 437 bp, Glycine max
  unsure (1)..(437): unsure at all n locations
nagctntgatgacctaatatttactcaaagatgatctcatacagcttggagttagataaccggcccacaagcaaaatatgagcaaacataaggatcattgcttgctgctatgagacaaaaagattatgaaagcagacttgattgtggcaacttaagatcgcccaaaccacaaagataaaactagcaagaacaacatctttagcttgcaggtgaacaactaatttgccaacaaccaggataagatccataggagaagcaagattaaaaccctgaccagttaagttatagatgataaccaagaccaaatctaatctccaacccaacttcttctataagagagcatactttgtgcatagcaagaatggccaaaattctttgtacatttcctagagatggaaagacattanaaatatatatgacaaattctgtgtgtatac

SEQ ID NO: 223969 - DNA, 151 bp, Glycine max
gcgctcgtcatgccatgtcttcatcctaggagacgataagaaccaatgtctgttgcacctaagtgattcacactatatggaaacctgtcacggcttagaccaaatgctgtaacagctcatggacttgaggcatctcatattgttcacggga

SEQ ID NO: 223970 - DNA, 340 bp, Glycine max
ccggaccttaagcacctgagctgcactgtctgaaattttttatgattttgtttagactggcgaccaattggctatcgtaaagaacatgattcaatctgccttatgcaaagttgctggaacgccgactaatgtgatattgccaaaaagccggttggctgctgggaagggaggaaccatgggagtttggacatttgaaacagatccctacggataaaaagtagacttttgcgctgagacttccagacaaattatctagctcgtccaacggcgaactaattggaacaaagacaatggtcctggggcatttgtctgtgaaaagctgcgattatggtatgcgcta

SEQ ID NO: 223971 - DNA, 412 bp, Glycine max
  unsure (1)..(412): unsure at all n locations
agctnngggggctttagattctcatgcattttgatatgtcaatctttgatatggcaactacatatgcttcanagactagtaaagcttcttgtgtagatctgtttttaattaattattctgtgcgaagaactgtatctttatttcttctttaatttcataagaacatctatatctataaggagttacttattgtgttgtttaacaaaaaattattattttaatgtgttacatataattttgagttatttatataaataattattagtgatgagttgtttaactttatattaaatataaaagagattgaaaataaaatatttatgaattacataatttattaataaaaatatctatcggagacaaaataattaagatgcttagattgagatgagatgcctaatatgagttgtca

SEQ ID NO: 223972 - DNA, 482 bp, Glycine max
  unsure (1)..(482): unsure at all n locations
atccactgtttgattatagaatatggcgtgctactcattacataagttcatcctagaggtgtttaaaatcaaacaaaattgtttgtaaatcatacaattaattaaaaaattgaaaattgcttagaccgaaaaatgtaaaataaaaaaaattaaaaaaatcacatattgtttacggtttggttggttttccgatcttactatcaaaattgaaccaaaccaaatcgcatattataattatatttttatttaataaatgcttaatattatgtagctagtattaatttaaatttaaaatgattataatatttgatctatagtatacttctttctataataaggctgcaatatatgacttntgttgcaacaattaataatatgtattgaacaatgtattatatttctattatattgatggacaaattaatattatatcaaacaagacgtggctatataattctatactaattctacatatatgtaaa

SEQ ID NO: 223973 - DNA, 431 bp, Glycine max
  unsure (1)..(431): unsure at all n locations
agcttgcttgtanggcttctatggaggctggtatttttagcttcaatgacgtcctttaatggtgatattccaccgtggagacgcagcggaagacataggagaataggtgagaggaggcaccatccactcaggaataagccatggaagaaggagctctaccaccaacatgagccttggatcaaaagcttggagaggatgcttcaatggaggaaaagaaagagggagagaacgagagagaggggagctctatattgactgaagaaaaagggagagaagttgaactttgagttgtgtctcacaagactctcattcatcacagttccaaccagtggtacacatgcttctatatatagactatgtagcttccttgacaagcattctttaaaaaaccttcttcgaaagctcccttgacataactctcttgagaagct

SEQ ID NO: 223974 - DNA, 345 bp, Glycine max
aaagtctcacaattgtcacgtgctcatgcaactattgatatccgtggctatacgagacatctcgtcaaacaaagtcaggttagcgataactcgcctgtgcttattcgtctatgctatatgtagcatagtcattgatcctgtcaagtgtgatgagatggaaaatgaagccacaattatactgtgccagttggagatgtattgtccccctgctttctttgacatcatgattcacttgattatgcatctggtcagagaaatcaaatgttgtggtcctgtttatctacggaggatgtacccggttgagcgatacatgaagatcttaaaaggggatacatataatctata

SEQ ID NO: 223975 - DNA, 455 bp, Glycine max
  unsure (1)..(455): unsure at all n locations
agctngaagatgatgctttaatggaggaaatttttatagaaggtggagcacaaaattgaaggaataaaagagggagagaagtggaactttgaagtgtgtctcataagacttttattcatcaaagttacaacaagtggtacacatgcttctatttatagactaggtaacttccttgagaagctttctaaagaaaacttccttgagaagcttctttgagaaaacttccttgagaagctatatcttagctacacacacccctctaataactaagctcacctccttgagaagcttccttgagaagattcctaaagaagctagagcttagctacacacacctctctaatagctaagttcacctccttgagatgagaaactagagcttagctacacaccccttataatagctaagctcaccccattccaaaaatacaaaanaagtccctactacaaagact

SEQ ID NO: 223976 - DNA, 466 bp, Glycine max
  unsure (1)..(466): unsure at all n locations
tcatgatgaatcaagaatgattcanagaatctttgatgattatctaggtgatgacaaaaagctcaaaggtcaagaacacttcatgataacaaagatgatctcaagaatcatagaatgagttcaatattgaatcaagaacacttcaagttgatttcaagaatcaagtttcaagattcaagcttccaagaatcaagatcaagatccaagactcaagattcaagaatcaagagaagacttaatcaagataagtatgaaaaagttttttcagaaactgagtagcacatggatttttctcacaacctttntaccaaagagtttttactctctggtaatcaattaccagattattgttatcgattaccagtagcaaaatggttntcacaaagctttcaactggaattataacgttccaattgatntcaaaatggtgtaatcgattacaatggttngggaatcgattaccaat

SEQ ID NO: 223977 - DNA, 451 bp, Glycine max
  unsure (1)..(451): unsure at all n locations
ngctntagagagacgagcagaggcagacaaatttttattgtaccctntaattaaatcctctctagattcaaatattacctcttcaccatcaaagttgacaatgtcatcaagctaaggatcctcatcatctaaacttgcgtccaatgctggttcaactttactagtggatgcatcaaccatcaaatactggttgtcttcttcctcattgtcctcatcaaacgatgaatcatccaagtcctcgcaagtgctcatgaggcttttcttttggacttgaagaatttcttattcttatcctttgactcttcaaggttaggacattatgacttaaagtgtcctagcttcttgcactcatanaaaataactttactctttacttttttacagaaggatcttttggacgaactgttgaacctggaagaattcttantttccacatctttctaatcttatg

SEQ ID NO: 223978 - DNA, 376 bp, Glycine max
  unsure (1)..(376): unsure at all n locations
ggagcacanaatcgaagggaaaaaagggagagaagctgaactntgagttatgtctcacaagactctcattcatcaaagctacaacaagtgttacacatgcttctatntatagactacgtagcttccttgagaagctctcttgagataacttcctagagaaacttctttgagaaaacttccttganaagctagagcttagctacacacacccatctaaaaactaagctcacctccttgagaagctagagcttagctacacacccctataatagctaagcttaccctcatgacanaatacatgataatacaaaagagaatcctgctacaaagactactcataatgccctggnatacacggctaanaccctatactact

SEQ ID NO: 223979 - DNA, 409 bp, Glycine max
agcttcacacatgttagagaggtatcttaatttctaatcactgatatgtcataaatcgattttgcaagtcacttcccatcaaattacgataatgtgcataatcatcatggatcaataggacattttaagatcggacttggaggaaatattgtctcgggtctctatggtcttccccccctttttttgtgtgagtttgagagcacacacaaatatttagtcagtaacttaaacaaacgaatcatatcctatcccttcatgtcttgaccaagttactatagttcccctttctttttactctttacaacaactctgtatatggatcagacattgcttgttccagagaacttgtttatctttcctattatcctttaacttgttttatatctgtgatagagggattcttttcttc

SEQ ID NO: 223980 - DNA, 369 bp, Glycine max
  unsure (1)..(369): unsure at all n locations
tgattttcagccttgtattttggctatattattatgatatttgaacaatttgttatctccttatttgcatggtatgttcgaacaaatatttagtatcgtatttgactatgtggagtttataattaatctattcatgattgttgcttcatggttcttggttcatgatttggttgatattnttccatgaatgttgtatggatgtttagttatatttgaatacttcanatttgatacgcactttggctctttgtcatgccaaaggcggagagaaatagggattatatcaagaactcacatgagtaatcaacttaattttaagagaagcatanattcaaaaactacggagagaatggaaattatgggagtgat

SEQ ID NO: 223981 - DNA, 372 bp, Glycine max
agcttagggatggaatacttagctgttggtgtttaacataagcgcaaaacgtgaatcaaaaatgcgaataaggatgaccctacggccacaaattcatcaatcccgtgggtatggcttatgaaaggggggaaaagaagtttttgaacgtaaaaacgccctccctttcgtcatttttataatttggtgcaggggtggctcgcccaggcaagctaacctgcacttttttttttttttttttttttttgaggggaacattaaccatgtcccctcccttctcatggattagcattttgcctaacttgaacttacttaggttagaattatgcgtcgaatacttatattattattaccctttttcttttgaaaacaaac

SEQ ID NO: 223982 - DNA, 390 bp, Glycine max
  unsure (1)..(390): unsure at all n locations
ctatcaatagaccttcaatctttaatggagagggataccactactggaaaaccctgatgcagattctcatcgaggcgatagagctaaatatctgggaagccattgaaatatggccttatatacccaccacagtcgaaagagtttctgtagatggttgttcatcaagtgaaagcataaccatagaaaaacctatagatagatggtctgaagaggatagatgacgagtacagtgctacctacaagccataaacataataacatctgccctacgaatggatgaatgtttcagagtatcatattgcatgagtgctaacgacatgtgggacactcttcgattaacacatgaccgaactacagatgttagaagagctangatatgtgcactaactc

SEQ ID NO: 223983 - DNA, 401 bp, Glycine max
aagacagcctccatagtcttaggaagggtatattaaataggaagggaattcctaattgaagtagcaaaaggtttgaccaaaaaatttaagttaaaaagtctttttcaagagatttactctttggtaatcgattaccagaggatgtaatcgattaccagtggccaaaaatgatttacaacaactattaaaatttgaattcaaaatttgcactgtgtaatcgattacacatatatggtaatcgattaccagcagttattgaacgttttaatttaaattttaaagcttgttatcgattacacacatactgtaattgattaccagaggagaatttcagaatatattctcaactgtcacatcttttcatttgtgtcttgaatggccatcacacgcctatatatatg

SEQ ID NO: 223984 - DNA, 391 bp, Glycine max
  unsure (1)..(391): unsure at all n locations
actgtggaagtgaaaattcctctcattcatagaatatatacgttggcatactagaatctgtatatatttaaaaagagatgagaatctgtatatatttaaaaagagatgaggacaaaattttcagatggcatactatatgagaaaccattcccgtaccgcacaataaaagtcatcatatgtcaagaaatataaacttcaacactgcttaacaccctttactttggagatatcactcaagcaccatagcattgaagatttacgttacatattaattctacgattaatactgttaaaaattggattctttaatgtggggatctttcattgctatatttgaattacgtcttcgatgctagctttaattctgatnttatattattctttctcgctt

SEQ ID NO: 223985 - DNA, 441 bp, Glycine max
  unsure (1)..(441): unsure at all n locations
agcttctagccaaaaggtcttatcttgaatttattcctttgatatccgctttgagcctatagtcccctttctttgtattgaagctcattacaagccttaagtgaaaaaccatgataacaccttacccttaaagaattnttgagctttgaaattggtttgggaataagtggggcggggtatgtttcattggaagatattgattttggccatgcttaatgtttttattttggccatgcttgatgtatatatatattgcctagttcatgctttaatcttcaaattcgtactgtctaaaaataaaaagaggaaaaaaatgaaaaaaattcaattgctgcaaattatgcaaactcgtactggttaaaanatgaaaaaaaagaagacgtaaagctgaataaatgatgtcatggtatgaggacttgattacgagccttggttgatttg

SEQ ID NO: 223986 - DNA, 442 bp, Glycine max
gcttatgaaatattctctgtctattgagctctccacatcctcggtaggatttgctgttgtggcaacaagtaccctcactgagtttggaccacttacctctgctgtgtaaccatcctatagaacatgttgcagtagataacaacgtaacatttactatatgtaggtgagaatgtgtacgcaacacattgaagttgggaaagtagcaattacctgacatttccctttcccattattcacaaagcagagtggatctctaaatccttgttgaacatggccactatgcaccccacctttttctaaattgaatttaagaactcttcggccatcaaagaaagggttggagccatcacataccccatatggtttgtttgaaagattacagttatgttcatatacctcatttcagcaaattcatcttctccttatgggtattgggattact

SEQ ID NO: 223987 - DNA, 91 bp, Glycine max
atctcaaggcaattcgcaggctgagaagtccaatatggggccttatgatacataaagacctatgtatgtctctggaaaaccaaatggaaag

SEQ ID NO: 223988 - DNA, 430 bp, Glycine max
  unsure (1)..(430): unsure at all n locations
agctnntgaattgaaaactaacctgttgattctcgatgaatgatgaagaacgaacaaagaacgacatagaacgacgaagaacgtccacgaaattgatcatgagaacgtctcagaagttttacggaagcgtctcgacttggattttttctttctttcttcttctcctcacttaatttaagtgattcctgagcttccagggtgctggggaccttccctcagcctcccacgccccttttatagccaaaataggggaggtggttgtcgcccagacgagctggttgcttcttgacaaattttcctgagtgcacccccaaattgattagttcaccccatccagaatgttcctcatcacatagggtgatgtcaaaagatattataaaaatacatacatttcatacacaaacaanattgtacaagatgatgtggtatt

SEQ ID NO: 223989 - DNA, 352 bp, Glycine max
  unsure (1)..(352): unsure at all n locations
tcacaaatcatgaacactcatacttattgtatanatgctcatctatacgtcattgaacatcacacaaaacgataagtaaaacctcatccgacaatacactacaacctataataaactataacctcttagcaagcctacaataatggagcagctcattatacaaaatatctntacaaagctatcgttctatttcacggtcaatcatgcattttataacgctatgctcaataatggagtttggtcttcccccttcccccgataaatcaataattcctatattatttgagcaaatatttcctatattattaagagtacaaataaataaaaaaaacttaccgaagtcgatccggca

SEQ ID NO: 223990 - DNA, 247 bp, Glycine max
gaaaaagagggggggagggagaagagaaaaagaaagagagggagaaataaggaaagaaagaaaagaagaagaaggaggaagaaaagaaaggagagaagaaggaaaagagagaagaaagagaagaatagagaaagaaagaagaaaaaaaaaaaaatagaaagataaaggaagagaaaaagaaaaaaagaggaaagggagagaaaagattgaaagaagggagagagaaaaaagaaaataagaaagggat

SEQ ID NO: 223991 - DNA, 414 bp, Glycine max
  unsure (1)..(414): unsure at all n locations
ctgcagcttagcttcttaggaatcttctaagtatcttctcaggaggngagcttagttatgagaggggtgtgtgtagctaagctctagctcctcaaggaagttttctcaaagaagcttctcaaggaagttttctcaagaaagcttcctcaggaagctacctattctataaatagaagcatgtgtaacactttgtgtaactttgatgaatgaaagtcttatgagacacacttcaaagttctacttctccccctcttttattccttcaatttcgtgctcccccctctctctttctctccctctttcttttcctccattgaagcatccttccaagcttcttattccaggctcatcttggtggtgaagctccttctttcatggcttattccctagaggatggcgcctcccttctcctct

SEQ ID NO: 223992 - DNA, 453 bp, Glycine max
  unsure (1)..(453): unsure at all n locations
ggacacttaaatactaagcttacgataaactctnttctctnnttttctctcaactgttcttcattcttctttctctnttcacttatgttcttcctttatcttgcacaaattttgtggctcttccattggtgatgatcatggaaggctaaacacttaattaatccatggatccactccaagcaaggctgaatttgagttctgatttagtattctaattctgtgtgaatgttcatctttttcttcaatcctatttttgattttcgtgattatgaatatacttaggattgaaaatagattaggttatggattcacttcctaatttcaaaatttaatcacanattgtttggatgatattctaacctaattcgtgatcacaatgaatgtatgaattaattccattgaactatctctaatgacattgactgaactttcacaatcagaacatcattcgta

SEQ ID NO: 223993 - DNA, 325 bp, Glycine max
taccccaccatattgtcatagtaaaacactgtttatgtgtctattattattgcgatcatctctatctccatcattggaggagacacttgagctgccaggtctcttcacctttgggcatattctttgaaagactcgcgctcctttttgcatatgtactgtaattgcatcctatcttgagccatatcataattgtactgacactgcctaacgaaagcaaccattaggtccttccaagaatggacttgggaaggttccaagttagtgtactatgtaacagctaccccagtaagactttcttggaagaaatgtatcagcagatcctcat

SEQ ID NO: 223994 - DNA, 470 bp, Glycine max
  unsure (1)..(470): unsure at all n locations
tcatgatgatgaatcaagtagttntgatgatgacaaanagttcaatgattgatgtcaagattgagtcaacaagttcaagatcaagattaaagactaaacatcaagaagaatcaagattcaagagaagatgaattcaagattcaagagaagaaaccaaatagcaacaagtcaagacttcacaagggatgtattgaaaaaaaataattcaaaaaccaaacatagcacaatcttgttttacaagaaacgttcttccaaatatttctaagttaccagagtatttactctctggtaatcgattaccaattacctgtaatcgattaccagtggtaaagtttgatttcaaaagctcttaactgaatttgcaacattccacatggtttttaaatggtgtaatcgatacaatatattggaatcgacactagtgatctaaaagtgaaattaaatcaattgtgagagcacatctttataaa

SEQ ID NO: 223995 - DNA, 485 bp, Glycine max
  unsure (1)..(485): unsure at all n locations
nttaagtatactgatatgaaccataactaacacattcgactgcngtttgcttataagaaaaataattctcagaggtatatatttctggccattgctatcaacctttttaatcttcacagttttagctttagagatcctcactcactcaaactccatggtatgttatatctgaatagagaagtggatttgataacactctttctatttatatgactctatcggtcacataactcaacatgggtattatttttaagatcatgggttgttgcgcgccaagatgcacaagttacacgttcccaagggtgcttgtagacgtgttcctgtgtatatgcctccactatacgctatttcttcactcaattaagtcaacctatcacacataagctctgatttagggtttagtcactaataaaggaggaatttcactcaatcaattgaatctgatacgggaaacgaacgatgtgtcttgttcgattttcactttt

SEQ ID NO: 223996 - DNA, 431 bp, Glycine max
tcggaataaagtgatgaggtacaagctctataggcagatcttgtattagtcttagtagacgaagagaagttcaagtccatagccatcaaagtctgaaaagagtatgatgaactaacggacgtcaatatggccaccgctgatgccttggaacgagaaaccaataaggcccacaaggaagaacacatgccatcaaagtatttacgggccttatagggcagcaatagtgagctcaagctccgaagaggtgaaaggaatcatcacgggtcaaaggcatgatcttgaaggatgagctaaaggtttgccttatgtcgaaaagagatttgtcccaacagttaagcgagactgtagggaatattgtgggccgccatcgataagtgcacagagaagctaaatctagcggcgactcacgagcaaaggctagaggatgagta

SEQ ID NO: 223997 - DNA, 354 bp, Glycine max
tccgctcccgaatatgacagccaccgttttatgagcgctgagcaccagcagcgcttcgaggtcatcacaggatggtcatttctcctggagcgacgcgtgcatctcagggatgacgagtataccgacttccatgaggagataattcgccggcggtgggcatcactggttaccctcatggctaagttcgacccacacatagtcctcgaattctatgctaatgcttggccctcagaagagggcgtgcgagatatgcgatcctgggtgaggggacagtggataccgatcatgccgctgctctcagacactcttgagatacccttaatgctataaacggtcttaatgcattactgcata

SEQ ID NO: 223998 - DNA, 469 bp, Glycine max
  unsure (1)..(469): unsure at all n locations
gggagaggatgcttcaatggagganaagaaagagggtgatttagagataggngggagcacgaaattgaaggaagaaaaagggagagaagttgaactttgagttgtgtctcacaagactctcattcatcaaagttacaacaagtgttacacatgcttctatttatagactaggtagcttccttgagaagctctcttgagagaacttccttgagaagcttctttgagataacttccttgagaagctagagcttagctacacacaaccctctcataactaagcccacctccttgagaaacttccttaagaagattcctaaagaagctagagcttagctacacacacctctctaatagctaagctcacctccttgagatgagaagctagagcttagctatacacacnctataatagctaagctcacccccatgaaaaagaacatgaaaatgcaataaaaaagtcctactacaa

SEQ ID NO: 223999 - DNA, 232 bp, Glycine max
gaaaagaaaaagggaaggaagagaaagggggaaaaaaagaagagagaaagagaagggaaaaagggggaaggggagaaaagggaaaaaaggggagagaaaagaggagggagaaaggggaagagagaagagaaaaaaggaggaaaagaaaaaaagggggggaagagaagggagaaaagagaagggaaggggaaaagagaaaagaagagaaagaagaagggaggggaaaaagaca

SEQ ID NO: 224000 - DNA, 360 bp, Glycine max
cctgttaatgtatgcatgatttaccaagtagcaaatgtgaaatctgaatggaactgtatcaaaaccttccctgatttatctggaacaggttgtatacctttttcccattgctcattattccttgagggttagatgatttcatgtttgttcagttactaatacacaactcgaacttttatttctcatggaagaacacgtgtgtaaaatgtggtccagattctaaatacatagctgcgggatcaatggaccgaaatcttcggatattcggcttgccctgcgaagatgctcctactgagtcataaaacgcctcacatgtacaagccgatatcttgctctggaataacaaatgctactgctatt

SEQ ID NO: 224001 - DNA, 432 bp, Glycine max
  unsure (1)..(432): unsure at all n locations
ctgcaactattcgtccctggcacaattgtcaggattcanattattctctgcattggacaagtccaaccaaccaatctcaaacaaggtcatattccatcgacttttttggtcatttaaggcatgcattgatgtgtntgcattttgtaaacccattgtgcaaatcgatagaacatggctatacggaagatacaaagggatgttgttaattgcagttgaacaagatggcactaacaacatatttcaattggcatttgccattgtcgagggtcagacagcagatgggtaacactttatattttttgctaaactttataacacatgtgacaccataacatggtatatgcttaatctctgacaggcacaaatccatctaaagtgcatacagactacctgattgtggatggaatagataacttatcacatgtgttatgt

SEQ ID NO: 224002 - DNA, 294 bp, Glycine max
ttttttttttttacgaaaaagggatgaaagttataacccaccccccccccggtgctttttaagattatatgaattttacctttgtatgttggatatggaatggtttaataatatcagattgattcgcttgtccttattggttttgtttaaattagtatgtactctttgagaacattctttttacaaatgcttaatatatctactgttctattttgtattatttgttactggttatattttattaactaattgatttatctatacttattgtttatttagttatcggctttaata

SEQ ID NO: 224003 - DNA, 489 bp, Glycine max
  unsure (1)..(489): unsure at all n locations
ggaacatagaaactaagcttctcgggccattcctgcaatgcaacattttttttttttntaccaagaaatgcttctcgtaaaacaaaaatggcatacaacctcctttaataaacacaaacatcaatgtaaatttagagtaaactcatgcacatacttctttacgaacattcactcgcacaagatattcttctaactaagaaaaatgcacaatcaaggcaccttcgttacctagattatttatatgtacttccaaggtgtatttgctatctacatcacatgcacttcctttgtaaattacatacatgcatactcaaagcattttggctacccaaatatgcacacgtgcacattctggtatttctaatacctatgcatatacaaacttttgtgatgaatcttggctatctacacaataatgtgctacacttcatgctatattcaagtgtttttctacctaaagcccatgcacattcaagatatattctttgc

SEQ ID NO: 224004 - DNA, 330 bp, Glycine max
  unsure (1)..(330): unsure at all n locations
atcagtcgcggaggggcgagaccactcctgtggacggacgagagagagcgctctcggagtgcatgaaacgtgagaaacacatattcacacttagatggacctgtgagagtgagagatgagacacacactcaacagagcatgatcctagagaaacaagttttcccattatcgnctccctcgaagcttgagagactgaggggtggcataccatttgtcttgctaatactagaaagattttacatgctaaagaaatcatgctcattatgctacatatcttcttagcggccattatgacttcacatggagcagagacgnaaacgggtcatggac

SEQ ID NO: 224005 - DNA, 397 bp, Glycine max
agcttgtgcctcttcacgtctggaatatgtttgtaacttatagatccaaagaccctgaggtgctttgctgatggcttcttcccgttccaagcttcaattggaatcttgtcttttacagacttagtcggacatttgttgagtatgtaaatagtactgtagagtgcttcaccccagaatgtgttaggtagtcctttctccttgagcattgatctagccatttccataactgcacgattctttctctcggacactccattttgttgaggagaatatgcgactgtaagttgtcactcaatgccttcatcctcacaaaatctttcaaactcgcgagaggtgtactctgtgccgcgatcacttcttagtacttttatccattgtccactttgattttcagcac

SEQ ID NO: 224006 - DNA, 396 bp, Glycine max
tgagatgaggaagtgtagaagggtgagactacctgcatttattctttgaccacagagtggtacctggagatatgtcacggtggtcatgagaccttgtggacgtcaggtggggtgctattgcccaaaaccaagcttgaccaatcccgacccaacccgggcatagccagtcagtgagaacctgtgatgtacctaagcaagcgagctcctggcagtcaacagataaaaggaacaaagaccacaaagcaaggaggcttgtgtggtggctggccagctgtgaatcttgtgtgatatatgggttatggcctctagtaatcgattaccaagggtgggtaatcaattacaaggcttataaatgaagacaggaggctaagatgttctctggtaatcgattaccac

SEQ ID NO: 224007 - DNA, 496 bp, Glycine max
  unsure (1)..(496): unsure at all n locations
ctggttgctgttccaganaatgggagagtatcggtgtgtactcttctcttggacgtataacatcctcatttatcttaatattaagaataataacgtcaaattggcagctaaataatttgcaaggatgaaagaggcctccttgaggcagacgttgtgagttaccaaaccctgttgtatgcatactctactacgaaaatggttcgagaagcagaagagctcatatatgagatggacgaaagggatcttgagattgatgaattcacccaatttgcgttgactagaatgtatgtagaatcacgtatgcttgagcagtcgtggttgtggttcaagaggtttcacctaactggatatatcagttctgattggtattctgccaatatcagttcacgaggtatactttatcagccaagaaagtctttattntcttgcaagaattgacaaagctcactggccttgagtttaatgtgatgattacggctatgggatacgaaatgct

SEQ ID NO: 224008 - DNA, 324 bp, Glycine max
agccttaatggagaacaatggcggatattacggaagaagacaaagctacgtggaaagagggagataagctcttgaattttgctgaatgaaaagagacaatagttgtgctattataaaaagaaacgagttgccttatccctatgttctttctaaaaggctctcgccacatgtcctctgttaagaggaacgatagggtccacctttttctcttgatgcgacttcatactcagcccaatgagaggaaaactggacctttaaagctaaaacctacctgggttgcgacccgcttctggtctattcctccgttttctgccacgtcgggcc

SEQ ID NO: 224009 - DNA, 446 bp, Glycine max
  unsure (1)..(446): unsure at all n locations
ntcataagtgacataaggtgcacacatatcccatacagtcttatgttggtgtgtaggtcgngccacgtgctcagaacgtacctaatgacaatgatcataacaataatgctcaaaatcaccaataacaacatgctcaggatgctcaaaaggtactaaatgacgtctaactaatatatgaaatgtcctatctatctcatgatcaaagggtgataggtcatacggattgactctattcatacactatattcagcatgcgcagctaggagccgttctaagcatgtaacagtgtaagctcgaactacagctaccatcaaatgatatccagctgacttgtaatttcgtgagcaaccttatactaagatgagaagatagctcagattatttaaacaaaaattcatagtctaactatattacctcgaaatggtatttacgaagacaagagaaaa

SEQ ID NO: 224010 - DNA, 409 bp, Glycine max
  unsure (1)..(409): unsure at all n locations
ntgagcaaattcaaacgacaataactttgtactcggatgtttgattttgtttccgtaatatatcgagacgctcgaaatggaattccgaagctctgagcaaattcaaacgacaataactttntactcggatgtctgattcagtcccgcaatatatcgagacgctcggacttgaatgccgaagctctgagcaaattcaaacgacaataactttttactcggaggtctgattgagtcccgtagtatatcgagaggctcggacttgaatgccgaagctctgagcaaattcaaacgccaataactttttactcagatgtccgattgaatcccgtcatatatcagaacgctcaaaattgaatgttgaagccttgagcatattcatacgacaataactatttactcggatgtctga

SEQ ID NO: 224011 - DNA, 502 bp, Glycine max
  unsure (1)..(502): unsure at all n locations
tgaaattaacaactagaaattttttgcaggctatttcgtttaatcaagaataactatcggcttaagcgaaacaagattgtaaaacttcacaactattgaacaagaacctcaatggcttcttaaatcaattccaatgcaaattgcactccataaataacaaataaactatgatgttacaatattaccttaaactcttgaaaggataaagaaataaagatctaatatttaaataagacacacctaagatatagcagcttactagtcattatgaatttaaatgaaattcagtaatacataaatattttccaaagcactattcttgacgctatatagttttgagttcttcattcgttggactaagaaatatgnggaaacaaaanactattcttttcatactaacactactataaaagagtgcttttacgacaaccattctactacggttcttttagaaccgccttatagaatgaaccgatgacatttntgtaattatttacttaaa

SEQ ID NO: 224012 - DNA, 383 bp, Glycine max
  unsure (1)..(383): unsure at all n locations
ntgcatgcaactatcgcacgaacgaggacatatcatatggttntctatgtgaacatgattctcgtcatgctgctattgtgttacttatgtgaaagttcttgcattctatgtgttcatccatgtccgagtagtaaccataatctatgaggtcgtaggattggttttacctatcaaaggcaacaaggtaattttcctttgaatgtctcttaagctntaaagccttctctcgaagtatctgaatgctaagtaatccaagggtgaggtaacaaaagcactatgatgctcaagttagggctcgacgatgagtaataaatgaaaatcaacagtgtcctttacctcaagaatctcacttctgtttatacatatcgtgatagagcttggat

SEQ ID NO: 224013 - DNA, 462 bp, Glycine max
  unsure (1)..(462): unsure at all n locations
tgctctgccttggttttcaagcgttttagtatntgtaanggatagaacgccncgatctcaatgtttctgtgcgagggaaatttctctctctgcagactttatttcacaaatttcaaccgtgaaaatgttcgaaaatgagtttcaaagatggtgtccatatattaggacgatccaacggctaataagactgagatcatagttttaatggaacaaatgttggtctatgcagaataatagaggatctaagaagggagaacgaatttaagagaaataaatgacgtataaacacatcgtaattgtaaaaactgacagaatatatctctgtgtataactactgtactctaagcctattaactactcctattttatttatcttattatgttataagagaaaccttattttactctttcattaaataaataatcaatgaaacatccattatttctacacttattttctct

SEQ ID NO: 224014 - DNA, 475 bp, Glycine max
  unsure (1)..(475): unsure at all n locations
ctagcatattgcanattgaccataccattctatcaaagtttgcttgctgaacttggatccttagtaaatgacaccataatgagattccaatgcattgatcttttcagtagtttcagacagtttggagtaccgctgatagccatcattaattttcatggaaatcttgaatccctttgatttaagcaatcagcaatgactataagttgntacttcattgcaggagtgtatccagctgttcaccctctgcttggcttgcaatattatacttgtggaaaactagaatggtaagcatctgtcaactgaagcttttatctgttgagtcttataatggacgcaggtttttgtaaattcttttactcagtgaaagcatttgtggaggcatacagaatttctctctcgcaaacaacgcgtaagcaagttgacgtagcttataacttacaagctagcgaattaataaagcttattacccgacttt

SEQ ID NO: 224015 - DNA, 414 bp, Glycine max
  unsure (1)..(414): unsure at all n locations
taacanaagtgtcctccacaaggttggttcanaaatttctctctctgatttacataagtttgtactattccatcttatggaaaaccttccatttgatctaccaaataccatttacatcaacattctttgcaattcaaggaacttgggaggaatggacaacatctactatgctactctcatgaataagctcttatgagatcaaggtgtataccacttatatgataagatggacgataactcatagcccaacatcatgctgaaaggatctattattgccaagcaacaaagatttaacacaacaaatcttatagcaacgaagctagcaatgaaagaacaaaaagaaattcccctggggtggacgatggagccatcataataagaaaatagaagaggcttgctagagcaataattgat

SEQ ID NO: 224016 - DNA, 261 bp, Glycine max
aaaaagcataacagaccttttgtgactggcccaaagatacaatctttgcagatgagaatgcttcagaaacatttagaaagctagcagatgggcctaaaagaaatgtgataacccgtctaggatacgacataaataggtattcattttacacaaaagcacaagatgacaagagtacaatgcagaacagctgggtcaccctaagggttgaatctcaacacttgcaagtgttaatgacgccaatccctgggtagcttccatccc

SEQ ID NO: 224017 - DNA, 468 bp, Glycine max
tctacttatgtggcagggcgggcttccttcttcttcttgtctccaacgagaactctgaccactgttcttccttcccgcgatgcttcttttcatgtccgcctgagtgggcttatagcctaaaccatacttcccacgatttccttgggtatttatcaggctagttatgccgcctttgtttttgcctaaacccatcccgggttcataaccgttccccaacataactcgggccatcattaccgttgcatcggacagacaaggctgcccaaagagggagtccacggaggaaatgctgaccacctcataagactggaaagcagtttctaacgattcttctgcggcttccacataaggcatggaggatgggcagcttaccaagatatcttcctcgcctgacacgatgaccaagtgcccctccactacgaatttcagctttgggtggagtgtagaaggcacaactcccaccgagtg

SEQ ID NO: 224018 - DNA, 344 bp, Glycine max
  unsure (1)..(344): unsure at all n locations
caagctngaagggacaccaacagagaggacgttttaaagttcatgttatatagagcncncgccgagatcagacacaccagtcattgcacaccccccccacacacacgaaggacatactttaataccagtgtgggtgtcaaacctcataatcaccgtcacaaatacggttccatgagcaaatgattgagctcactgaaaacaatatctcaggtagcaaacacctacaacgcaaccgagacaaatttagtcttcaaaggggacattcattgtatcaatttaataacaatatatgacattattacctgagatgtattgaacgcattcgaacaatcaacataacatgt

SEQ ID NO: 224019 - DNA, 380 bp, Glycine max
tgtactcatgtggcagggcgcggttacttcactgtcacgttttcttcgcgagctctgaccactgggcttccttcccgcgatgcttcattgcatgtccgcctgagtgggcttatagcctaaaccatacttcccacgattcccttgcgttattatcagactagttatgccgccattggctttgtctagacccatcccgggttcataaccgtgctccaacataactcgggccatcattaccgccgcatcggacagacatggatgcccttagagggagtacacggaggaaatgctgaccacctcacaagactggaaagcggattctaacgaatcttctgcggcttcacataatgcatggaggatgggcagtttaccaagatatc

SEQ ID NO: 224020 - DNA, 195 bp, Glycine max
accacgacacagcctatacatgagcgtatcgatgatcacatcatgctcaacgtgatgagaccctcagtgcactcacgatgtatagatcgatctatatacatgtataagcgaatgactagagataggacatcgtgccgaactaacagataatagacgacgagtaccaagggaggtcgagttgtgtctcattccaat

SEQ ID NO: 224021 - DNA, 449 bp, Glycine max
  unsure (1)..(449): unsure at all n locations
cgcttgtggggcttctatggaggctggatctttgagcttcattattgttcttcaaatttgattnttcaccatggagatgcagcggaaggcaaaggagaagaggagaggggaggcaccatccactatggaataagccaaggaagaaggagtttcaccaccaagaattgccttggataagaagcttgaagaggatgctttaatggaggaaaagaaagagagatagggggagcacgaaattgaaggaataaaagagggaaagaagtggaactttgaagtgtatctcataagactttcattcatcaaagttacaacaagtgttacacatgcttctatatatagactaggtagcttccttgagaagctntcttaagaaaacttccttgagaagctntcttaagaaaacttccttgagaagctagagtttagctacacacacccatctaataact

SEQ ID NO: 224022 - DNA, 425 bp, Glycine max
  unsure (1)..(425): unsure at all n locations
tgtatgggtccccaatntatggttactctgtagtgaattttttttatnaatcttattctatgggtaacgctgtctctagaacatttccataggatttaatgatgaaagctatgcattttcaagtgaaaaaaaggctaagttttgaattgcaaaaagtatcagttgggctaagctcagcaattgggctaagcgcatattcaccgcttagcgcagcttcagcgcgcttatcgcaaaggagaatctggcagagcatcagcatcaaagtcatgcgctaagcgcgagatcagtgcgctaagcgcagcaggtgccttcagccaggctaagctcgagactggcgctaagcccaatttcacttactcatgctaagtgcgagggtggcgctaagcacaacatcacaatttcagagcctatttaaagcctgtctt

SEQ ID NO: 224023 - DNA, 404 bp, Glycine max
taagctgctacagtccaatgttcggctcacattactattatatatctctcgtagccacgataggcgtacatatgccctatgacattgtactgtctcaactctagcttcatctctaccgacttcaagtaactcgactaacatcaacaccgcttcgtcgacatgaagagtctcgaagttgtggaatgcacctatgatgggaagatgaagcaaagaggccacattatcgagggtgatggtgacctcttctactggaagaatggaaatgctcgtttccttataccacctctcgacaaaagccaatataagtccctgatcgtcagtgtccaatgaacatgcgatcaaaggatttaatcatgtgccaacgactagtccttcaatttcagtagccaacctcccaaatttct

SEQ ID NO: 224024 - DNA, 350 bp, Glycine max
  unsure (1)..(350): unsure at all n locations
tccattgttgagattttgcttgcctattgacgctctgntttactccctacaagtcagtgcactctccctggattatttggctcttcattcatgtgttctggagctttagttgctcattatttgcgacattcgtgaagcaattcacatgtgaatccttgcttgccttcgctaaaacaatgggttgctaaggatggccttaggcctatgtagcattttggagtaatggggcatgccacattgtccccattctcttgctattaatgccaaaacgtgcgcccaccaagtgctcggtgaaatgcctcaccgacatatgggcatggttatgtaacatgggattgtgggactgtttt

SEQ ID NO: 224025 - DNA, 388 bp, Glycine max
  unsure (1)..(388): unsure at all n locations
atcctatgtattcttcctgcagagagatagagatcatattttttaagaaanaaaacccgccatgtttggataaaaataaccttatctttttttgtgtgttctcatccttatctctctagctagcagcgattnttaacaactttcacacacaatgatattgatattgacagttaattgaacatcttggccataattatcatgaactactccaaatggaaggagaaatgatcttcaacctacatttaatgaatattctctttaagtcacatacttaagtataaaagaacggataaattaatcggtgacaaaacgtgtttcatatgccagactaacctattttaacataatatttacgtgcgttagggtccctaacccacttaatttcttt

SEQ ID NO: 224026 - DNA, 303 bp, Glycine max
ggttttgcagctcagacaaatgcttcgcttgttacccggctaagtgtgggttttgcgtgaactgctcttaccaccttctttacctgctttagatgcgcgctgcgggtcattcttgaaattacccccgctgtgcttgccaccttttttacctgcttctgatgctctttcgcgggcttctgcaaaattgccggaaccgcctcgatggtttgccattactgacctacgtctgggtatagacatcatattgcatagaattaacgcggcgtatggcggctggcatatattcgttacgtgggacttagc

SEQ ID NO: 224027 - DNA, 426 bp, Glycine max
  unsure (1)..(426): unsure at all n locations
agcttaaagaacaaatatcaaacatttccaatttcatgtgactnacgaagcatcaacaagaatcaagccattgctattgtgcacccaatcaatggggcaaaacacaccaaaagattatgatgatggatggctcaaattctcacaaaggtaaacttatcactttcaaattgagctttcaaaactatcatgacatgtagaggaaaaacaaggatttcaaatcacaaaatgtcaagagacttttattttcagaacaattacccatttcttgaacacatcctataattcaaagaagaatatgcaaagttgtacatgcaaacagaattgacctaaaatattaaactagaaacccaacaaaactaacaaaactagcaaaaccaaaaccaaagaacactcccccccatacttaaacaacacattgtcctcaat

SEQ ID NO: 224028 - DNA, 378 bp, Glycine max
ttccggatgttatctcaaactcaaggaggttctctcattatagcttctcatggaagctacctagactataaatagaagcatgtgtaacacttgttggaactttgatgaatgaaaatcttatgagatacacttcaaaggtccacttctctccctcttttattccttcaattacgtgctccccccttctctctttctttgcctccattaaagcatccttttcgagcatcttatccaaggcaattcttggtggcgaagctccttcttacttggcttattccctagcagatggtgcctctcctctactcttctcctttgacttccgctggatctccgtggtgtaaaatcaccattgacggacctcattgaagcttaaagatc

SEQ ID NO: 224029 - DNA, 452 bp, Glycine max
  unsure (1)..(452): unsure at all n locations
gcaagcttcttatccaaggctcatcttgagggataagnctctttcttccaangcanataccctagaggatggcgcctcctctctcctcttctccttcgtcttccgctgcatctccatggtggaaaatcaccattaaaggacctcattgaagctcaaagatccagcctccatagaagccccacaagcaagcttccatcagttgctctgctttattttactgaaattgaaaatgcttacaaactgaatatacaacatcgaagtacaacaaattccttgtggacacaatactcggacttactgttttaattactacttgtgcaaattcgtatactngccaatcaagttaacaagtttttggcgccgttgcccgggaaattcttttacttggattgatattaccatttggaagaattattctttatcattgantnttttcctatatcaatatttta

SEQ ID NO: 224030 - DNA, 444 bp, Glycine max
  unsure (1)..(444): unsure at all n locations
nttctaaagtggtcttcggcattacatttaaacttgatctattgtctataagtaccttcgcgaaaacgtggtccatacatctcaccgacacatgtaaagctttgttgtgtcctctcccctcaacgggaatctcttcttccgcaaacgcgatgtaattgttggtggttatatgatttacgatgcctttgaaaccctccactgagatatcatgtgctacatgggcatcgttaaggaccttcatcaacagcgcacgatgaggctcggagtttatgagtagttcaagcaaagaaatccttgctggagttttattcagtttctcgactacacttaaactcgcttgttggatgaggcggaggaactcatgtgcctcttccanagtcactggttttccttcaagtccttctttcttttcngcccgtcttaccactggaggatctacttctt

SEQ ID NO: 224031 - DNA, 469 bp, Glycine max
  unsure (1)..(469): unsure at all n locations
ggacctatgaaactaagctttatttcataatggagataatagtggcccctttggtctcctctaaggacaatagcatcatttcttgcactgaattgttgggagttggaagccatcttctcaatcaaattcctagcctcaataggagtcatatcaccaagggctccaccactggcagcatcaatcatactcctctccatgttgctaagtccctcatataaatattgcagaaggagttgctcagaaatctggtggtgaggacagcttgcacacaatttcttgaatctttcccagtactcatacaacctctttccactaagttgcctgatgcctgaaatgtcttttctgatggcattggtcctagatgcagggaagaatttctccaagaacaccctcttatggtcatcctagctgaanatggacctgngagaaaggtagtacaaccaattnttgccactcccttcatagaatg

SEQ ID NO: 224032 - DNA, 351 bp, Glycine max
  unsure (1)..(351): unsure at all n locations
attttcaatagatggagatgaatcagtggccaccttatggactcctctaaggacaatagcatcatttcttgcactgaattgttgggagttggaagccatcttctcaatcaaattcctagcctcaataggagtcatatcaccaagggctccaccactggcagcatcaatcatactcctctccatgttgctaagtccctcatataaatattgcagaaagaagtgctcagaaatctggtggtgaggacagcttgcacancaattcttgaatctttcccagtactcatacaacctctatccactaagttgcctgatgcctgaaatgtctttctgatggcattggtcctagatgca

SEQ ID NO: 224033 - DNA, 349 bp, Glycine max
gcgacacaatacaacactctagcttagaggtgatggcactatcaatgaacatatcgcaatatttgttgtgaagggatatgcttaagctattggagtacattactcagacacatttgcaccaattgctcgattagacaccattaagatgcagtttgctgttgctacacaaaagaattggaaagtctatcaactcgatgtcaaatcgaccttcttaaatggtttcttacaagaagatatttacgctgagaaacacttaggcttttgatggaggaagaagaacattaaagctagttcctcaacatagctatttatgggctgaaacaagccccatcattctgcttcagctgaa

SEQ ID NO: 224034 - DNA, 433 bp, Glycine max
tttaggagaattagttattaacagtatgtaaggcttctatgtttttctatttgaaagaaaaccttgtgctctttattgtagatatcaaaacatgcaagttggtctggatgcttttatttccggatcatccaatcagcccttgctgccataggagctgcagaggacctcgttgaggtgataacagggtacggccatttgtcttaccattccttattccttattgttctatggctgcgtttatcatctatggcattgattgagccttcttccacgtttgctgaaacaggagaagcattggtatcttctgttgataaagacatatttgttggatcgcctggtgatgagaagatggtatgattcttctatccaatagaatgagatcactcggctctcacctggaatcgatcacaaatcattacttgcaatcattgca

SEQ ID NO: 224035 - DNA, 341 bp, Glycine max
  unsure (1)..(341): unsure at all n locations
cttccttcccgcgatgcttcttttcatgtccgcctgagtgggctttgtacctaaaccatactttccacgatttccttgggtatttatcaggctagttatgccgccgttgtttttttctaaacccatcccgggttcataaccgttccccaacataactcgggccatcattaccgctgcatcggatagacaaggcttgccaaagagggagtccacgaatgaaatgctgaccacctcaaaagattnggaaagcagttctaacgattcttctgcggcttccacataaggcatggaggatgggcagcttaccaagatatcttcctcgcctgacacgatgaccaagt

SEQ ID NO: 224036 - DNA, 402 bp, Glycine max
tctactttgtgagttatgcagagaggaggtccgacttatcttttatatagaagcaagtagaacattcactcttcaacaatcaacatatttagtctcaaatgatcgaatgagtactaatggacaaatgagttggagggactgatcatatggatttgttaaatcaaatttacatgaaggtaattaagcagtgaacttttggtctcttaccatcaaagtatttatgtttcaaatgcgacaaattaagaagaaaactcactagtatgaaacaagacagtatgttaccaaaaaatatatataactaagttcagaatacaagtcagtgcttataattaatcagtcagccaacccacatagcacttttaatttgctagtgcacatatgaagctcggttgatcactgcaa

SEQ ID NO: 224037 - DNA, 471 bp, Glycine max
  unsure (1)..(471): unsure at all n locations
tagtgactnggatatgtaagaagcaaggttcaactgttctatctactacgaaagcagaatacatatcaactacaagttgctgtgctcaactcctttggataaanaaccagctagaggactactacatctacgagagtaacattcccatcttttgtgatgataaagctgccataagcctttcaaaaaatcccacattgcattgaagggcaaaccatatagaaattaagcatcattttatacgagaccttattcagaaagggacaatggatctnacagttgtacccactactgattagcttgctgatatttttacgaaaccccttactaaggaaaaggtgattctactaaggaatcaactcagaatggacactacaaaagaatgattaactctctatatgtcgttcaatctggcttaacgtctagaggacccatcatccaatgactctaagctactaaattctgcattttgat

SEQ ID NO: 224038 - DNA, 411 bp, Glycine max
tagcatgagaaatacatagagtagatgctttatatacaattcattcccatatataaatcatgcatctcattaacaaagacactaatgcttatgtgatgcaacaaccccttgactctactttgtatgccatgtggtatcaaatctgactcatgaaatagtctaagagcacatgtctatccataagaagtgtcattggcatcgatgcttttgatataactagactacactacctagaatgatatacacacagtgactagtcagagttacctaactctgcaagtaggatttgacttatatgatcattatgagccaatggaactttcacactatgtctcgaaaacccctaagattacgctaaactcgttgggaatgaccatctggtcatgtctatttactctacaaaacttaaat

SEQ ID NO: 224039 - DNA, 387 bp, Glycine max
ctataaaactcagctgaccatgtcacttgcagttgacgaattgatatttttatagttgaaagattgacacgtgtacactttttttttcccccacaatcattatctttccatctaaactcactttctctttctcactctccccgatcacattcctattttctttatctctgtgttctcacttcatctccttttttccttttttgctttcagaaagtgtcatttccccaccaatttggttcctctgtttccattctttcttcttcattttggtggcttcttcaattccactttttcctttagtttttggctgagttatagagctgctgagggctttcatattcattctattttttgcgattatggtttgggttctttttctttaaatgg

SEQ ID NO: 224040 - DNA, 403 bp, Glycine max
cctgaggcatgcaagccttttggctagagggggaacaaacattcatgttcttattatcttcaaactcatgcattcattccacaatcagagattcatgcaaaaatcattactcaatgctagtcgttctctcacaattaaagatcacacactcaccaggttgtggctaatgattaccttcatgatcaagagagctcgaaggtcaaagaatctgagacgactccccgggctatgcataaggttgtgataagagctggaaatccaagccttaaggagttgtgtcgagccatctaagagatctggcttgagataagggagcccacatccatgtccatcttcatgattaagctgtacaccaaattcgccctatcacatattaaatctgatgtgtaagaagtaggcgcga

SEQ ID NO: 224041 - DNA, 342 bp, Glycine max
  unsure (1)..(342): unsure at all n locations
ngcatgatttacattctccccctttctcaagcaaatgcttttattttctttcatcatcaaaatcttcatgatttacattctcccccttcttgatgatgacaaccacctgctggttatgagcaacaacaaagaaaaaatatctatttgcatatagcttactcccccttggttttgcaatgatcgtttatatgagacagtcgaagatttcatatttttcatatgtaaacaaattgtctcattaacaatagatactatctcttactattttatctattattcttctctccccctgtgtcaacatcaaaaataaatcatgaatagagaggagatagatgttaccac

SEQ ID NO: 224042 - DNA, 421 bp, Glycine max
  unsure (1)..(421): unsure at all n locations
tagccctagaagggatggaccttntcatgtctcggagaggttcattatctttgcttatacngcgaactttccagaagagtatggagtcaacaccacttttaacatttctgatataattccttttgtacgtgtcataccctaattgtatatggggactattgaccattgatcttttgatccctgctagttgacttacggtgtccaacgctagttattgtgcgaaacacatgatcattaagtgttttgatcaagaatgcacacaataccaataaatggggcacaagggtccttttcatggctctcctgtaccctagctcacctaggctaacctctgtctcgcctgtgccaccaaatagcctcatgataaagaaaccacgatcgctgtgcaagcgttntgcttcaacactaagtattagctcgc

SEQ ID NO: 224043 - DNA, 462 bp, Glycine max
ggacctatgatactaagctttttggaaaatcttttacttccgaagaagggctttctttagttagttttttttaaaaaaatgatttattttgtaataatttacttttaatgaataaactaaattataaaataattaatattattatacataaataattaaataattagtgaacgtaattatgactaatatttataatttgttttttacgcgcatgtaaaatattaatttgtgtgacaatttagtataatttaaaccataaaaattaattaatttgtaaattttattaaaaatataaaatttttattatgataacatttaatttctattacaaaagttaatatataataaacaattattattattttataacaaagtgaagaaaaaataattttcattttataataatacgtaaaaataaaataatatctaatgcatatgtaatgacgaatttgtccctgtgta

SEQ ID NO: 224044 - DNA, 485 bp, Glycine max
  unsure (1)..(485): unsure at all n locations
ggccaatacaccactagaccattcaactaggctgcatcattttgtttgtgaaccatatgaagatgtagcatcctacagaagattgattgggaacctctctgactatgacaacactaagcctgacttcacatgtgccactcaacaacttagtcaattctcaagtaaacctacaaagacacactacaatgctgcctgtagggtcgctaagtacctcataggcagtcctggccgaggcctgttctttccaagaaagccagaaatccagctactaggatattctgatgttgattggggtggttgcttagatacaaggagggccatttcaggatatagcttcttcttgggagcatctctgatctcttggagagctaagaagcagcaaacagtctcaagaactttcttcgaggcagaatacacggcactctctattgctgctatgaactacaatggntactattattcgtgcatgatcgatttacacatta

SEQ ID NO: 224045 - DNA, 449 bp, Glycine max
tggcaactagtagatgattccttgtcccgcagatcagccttttttttcaacaatcacattagaaggggttgaatagtatattaatgactctataaaaaatatttatcacacatttagagaaatatatatatatatatatatatatatatatatgaaagagagttttaaaatagttttcaagcaaaaactggtatgcaaagaatgacagagaatgcttaataaaatcgttaaggagagacataaaaacactcgatttatactagttcactcaaaccgagctacgtccagtactcctttacgcaacaataaagggttctactaatcaaaaacttgattacaaaacaagtattatgtcctacaactcctgactatacaagtattcttctaactatttctaatattatcttagactctccctaaatgtaagagaaaccatagatcttttaaca

SEQ ID NO: 224046 - DNA, 485 bp, Glycine max
  unsure (1)..(485): unsure at all n locations
taggatagagcttgcaagtgtaagagttagaagtggtagtgttcaatacttgtaattntgataaccagaagtggtagtgaaaaattcttgtaattttgataagttagtggaaccttagtggttatcaagaactggaagtagtctctggtttgagacaaaccaatataattctttgtgtacttctctctttntctttaatcaacaaaggatttgaatttatttttatattttatatctttttttgttttacaaagaaattngtttgtatcaatgttggatatagtctggtgtctaactattcttaggtcaatctacattagacgataaatgtgctatcaatcttataaaaagtttttaaatttctaaaaatgcaattcaatccctcatattgttntgtttacttctacaaatggtaatgttgtggctaattggatanggtcgtgaggatctatcatcttaacaatgagatcttttggaacattttc

SEQ ID NO: 224047 - DNA, 392 bp, Glycine max
tcttcttgtttctctacccattagaaaccttacatttttctttagcactacatagagaggagctgccaatgtgctataatccttcacaaatcatctacagaaactcgctaagccatgaaaactcctcaccttggtcacgaacttatgtgtaagacattcttgaatagccctaaccttttcctcatcaacttgcactccttttgagcttacaacaaatgcaagaaacacatcatggttaggacaaaagatgcattcctcaagattggcatactattgttcttctctattcacacacaagacagagtttatatgatcaatatgcagattaagtgaagtgctattaataagaatatcatcaatgtacaccactatgaactttcctaagaactctc

SEQ ID NO: 224048 - DNA, 200 bp, Glycine max
tatgtgcggccaacatattacttactagcatttactgtgttgaccatagaattagattatttccattattaaccatcagttatcaatgttggtgccaactatgccttacttctaattataactctgtctaataagcaagattcctgagatagatactcggatcaatccgagcaaattttaaatactatatgacccaatgc

SEQ ID NO: 224049 - DNA, 358 bp, Glycine max
  unsure (1)..(358): unsure at all n locations
agcttgatagctgtagcataagcaggcactttattatttgttgtttaacnngaancacgcaccatattcataccaagtagaatggcccaaagctcagcctccagaataatacactgtctaagtctacttgataacactttgacacaatcacctttatcattgtggagctcaacaccacaagcggatagagccgatgaggcaacgtatctgccatcacaattaattttccgaataccctaaacatgcttctatcaccttacaaaagcatcgcggttgctattatcatcatttggtgctaatatcatatgagcgagcttgcttctacttatatcacgcacaccactccaaacactcaaca

SEQ ID NO: 224050 - DNA, 403 bp, Glycine max
gctgagaggatgtgcgcacattcgtcagagttacgatcttatcttctcgtcaccaccttcttacaatctaatttataattgtgtgtctcttataagccgcgtatgtcggctttgctactaatatgaacacgatcaatactttatatatcttgtactatttggatttaagacttttatgctctgatactatgtggccctgacatatgaactgcttggacactggtgaggttatgacgtatttatgaagtgggcaggttgtgcctcatactttgtaaagactaagtgtccacttcattattatagctgcgtacattctcactcactacaggcttgtgaccgcgcgtacgcggtgtggatcggcttacagaatcttataaattatagaactgcggaaaaaggttgc

SEQ ID NO: 224051 - DNA, 456 bp, Glycine max
  unsure (1)..(456): unsure at all n locations
agcttgatctaccaccaccaccgccaccattatcttttttttctatgacgnnnaacattattagtactttgatttctagccatgtattcggctatattattatgacatttgaacaatttagtatttcatttatttgcatagtatgattgaacaattatgaattatgttaaatgactatgtggtttttatatatttgatctattcatgttacttgcttcatgattggtttatatttttcaatgaatatcttgtgaatgattagtaatgtatgtatgttttatatttgttacgcactttggcttttcgtgatgccaaagggggagagaaatggggattaaatcaagaactcacataagtcattaacttaatctcaagtgaagcataaactcaataacagagggggagaatattgagaattaagtgagtgatcgactaagaaaaagaatgtgtatgtgt

SEQ ID NO: 224052 - DNA, 485 bp, Glycine max
  unsure (1)..(485): unsure at all n locations
tacaggaagtgaatgaattagcatgggcagagatgtctcatctctgtttggtaaattcgttccccaaattcctggaaaatgtaaagatccaggtacattcagcataccttgtattatagggaatagtaagtttgacaatgccatgctagatttaggagcttctgttagtgttatgcctctgtctatttttaattctctatctctaggtcccttgcagtcaactgatgtggtaattcatttagctaatagaagtgttgcctaccctgttggtttcatagaagatgtcttagttagagttggtgaactgactttccctgttgattnttatattttgaatatggaatatggatcttctcaaggatcagttcccatcattctaggcagaccctttatgataactgctagaactaacatagatgtttatgcaggcacacaatccatggagtgtggaatataactggtcattataatattctggatgctat

SEQ ID NO: 224053 - DNA, 206 bp, Glycine max
aacccagggagggcctcttaccttctgtatgcctcacgcacacaggggaaataccctaaggacccttgagctaaaatccacccataaagcccccaactacttcatcagtggaacacacacagacttagcggcctcctaacgccataattttgataccctactccatgggtctcattctctcagatcacacagtctggctaagtgaa

SEQ ID NO: 224054 - DNA, 391 bp, Glycine max
tctatagaaggttcgttcctaatttctctacaattgcatcatctctcaatgagctggagaagaagaatgtggcatttacctgtggtgaaaaacaagagcaagcctttgctttgctcaaagaaaaacttactaaggcatctgttctagctgttcctgacatttctaatacttttgagctacaatgcgacgcctctggagtgggagtcggagctgtattgtacaaggtggtcaccttattgcttattttagtgaaaaacttcatagtgccacgctcaactaccccacctatgataaagagctttatgccttaataagagccctccaaacttgggaacattaccttgtttcaaaagacattgtcattcatagtgatctcaatcacttaaatact

SEQ ID NO: 224055 - DNA, 483 bp, Glycine max
  unsure (1)..(483): unsure at all n locations
ntacaacagaatttagtaatgacccactagcctagaatttttatttcttaatgccattaacctacggaataataaaaaaaacttaatggctgagtgtaactgaaatcgtggaaaccaaaagtcacccccccaacagtcaccatgtcagccaccatttggtcttccaaaaggctgatgggcccttattacaacttgaactaaacctaactaaagcccttttagttgattaacccaaaacatatttttggtcagccacctttacaaggattgggccattatttagacaaactaaacactctaaaattgagacaaagtggtgccatttagtcctccaccatttgggccatgatacaactcacaaccttggacttttctccttgaaacttgcgcttgtattcaaatagtatggacaacacttggtgaagaacttccttggctgtccttgctctagcctttgtatatgccctccagtccttcaagtgg

SEQ ID NO: 224056 - DNA, 412 bp, Glycine max
ccagaacaggagattgcgaggatttctagataatgctccccacaagaatggttatataaaacttaacaagaatgcaacttcaagcatgagaacatgaaataatgatgctcgggcacatccacatccgcatacaccctccattcctcctacacatacaaaggctggtaccatctggatatctatatattgtgcaagacacacttatgagtatctcaggacatatttgaatcaaacccttgtatgtcccaatatgtaacagactttcgtggctatacagaaaggtgcgcctcccaatgataacaagtatttaattggtataatcggattcaatccctcattctgctcggcacactccaatgttggaagagacactctgtgaatccatgaaaactggtgctgttctcaaaattac

SEQ ID NO: 224057 - DNA, 339 bp, Glycine max
aacccggaaataataatatcactatatgcacacactccattgctgggtgcgcaatgcaagaccctcatggctacggtgggaaatattacgcttgatgcctaggctctcccatccttgaaattcacaaatattaccaacgattagcccacagagttgcatcatcgtgggatctcctgcttctaattaacaggacaccactcctgaagacccgtacccagagtacctcttctggtgaagtataacgcatgtcccttggcaatgtaaagcactgtctttgcagaatgaacaggcatgcataaatcaaactaaccaatttatctcagcatttcggcagccgtc

SEQ ID NO: 224058 - DNA, 470 bp, Glycine max
  unsure (1)..(470): unsure at all n locations
tcagaagtcatgaatcgatcaataggaagccctgtttcattcttgcacaagctcctaaggggcagaaattcatcctagccctacaatctaccaaacgaccagcatcacgttcaatctgcataataaataatgtctacagtcaataaaccagatgagtgcaaaaactattcccaaaatccaggttgcttccttccaaagtgaatgaataaattggatagtgcatactttntaacagcaacagcaaacaacaataatgttaaacgtgttctccagcaatgtttgactagaaaatataatgcctaatgactggtaatcaaagttttaaaaaatcaatagaacagaacacttcatgtacgccaatataagaacggccccgctcagctgttgaactcctctcctctcctctcctaatagtgttaacatgagatacnttgaagttggcaagacacataaatttgatgaacaacact

SEQ ID NO: 224059 - DNA, 309 bp, Glycine max
  unsure (1)..(309): unsure at all n locations
ntanactgagctntactcgacatgactaagctgtctttatatgttgatgatacattcaataaaaaatccaatgcaatgaccatggttatcagaatacaaagttgacttcttacgtaagagttgcccagattcctttctcacttctcacttattacagctagaacctagggctaggtgctggttctatcgggtttgatgctaaaattcactaccaccctgtgtttaatataaaagctgacatagtctgaatcctattttaaaccacgtgcagaataatatgcatatatgaccattaagaccgagagaaac

SEQ ID NO: 224060 - DNA, 393 bp, Glycine max
atgatgcaacatatggagaggttaatgaaataacatgattatgcgctccatgagaggttggaacaaacggagaatagagatcataatgatgaagaaaggaggagaagagggaatgatcgtgttcctacacaaaaccgaattgatggtgttaaactcaacattcctccatttataggaaagaatgatccggaagcctacttggagtgggagatgaaaatagagcatgttttctcatgcaacaactatgaggaggaccagatcgagaagcttgccgccacggagttttccgactatgctcttgtgtggtggaacaagctacaaaacgagagagcctgacatgaagagccaatggttgatacatggactgagatgaataaatcatgatgaagcggt

SEQ ID NO: 224061 - DNA, 463 bp, Glycine max
  unsure (1)..(463): unsure at all n locations
tcatagatacaatttataatgtagagttcttagtttcaattctcatgcttctgttaatatttgctatttagtaaaagtntcacttgccatttacattcaatttgacagatttcttttccatctagttactcagctatcaataaaacttctcgattgccatttaacgattcattaaacttttaaaccgtttaatataaaccaataatgtgcctgcatttgatgtgcaattagaaattcagcacatggccattggtggtgataatagggattgactatgtcaattcagatcttcgtttctctgttaaactggaattggatttttcactattcccatcatattgcacgatgttcacacacactatactttccatttgtttgctggtaagcggcgctctgtntaatatcagattgtacgattgtattgtggctcttgattagaatagatgtttctctcgtatattat

SEQ ID NO: 224062 - DNA, 448 bp, Glycine max
  unsure (1)..(448): unsure at all n locations
ntgacttaagtcatcaagagagtataatatgtgaccatgtcatgaatttcaaatcatctttnttcaacatctctttcaacaatcaagaaatctatctttcaatcttctctctcaacatcattcaactttttcaacaaaattttttccgattcatcttctcttcatctttctaaaagtttttgttcaaaactttttctttcaagacaagttttttgatcaaaaacttgggggattcatctttttcattctcttctccctttgccaaaagaacgaaggactaaccgcctgaattcttttgtgtttctcttctccctttccaagagaattcaaaggaccccgcctgagaattctttgattcttccctccccttaacaaaagactcaaggactaccgctgagaatctttggttctctttacaagattcacggactaaccgctgaaaatcttt

SEQ ID NO: 224063 - DNA, 377 bp, Glycine max
acctgcggctgcagctacctaggtcgaaaaaattgtctatcagttaagctatactgaagggaatatgtgggccgtcatcgatgagtgcaaagagaagctaaatctagcggcgactcacgagcaaaggctagaggatgagtacgccaagatatcagcagaaagcgaagcaagggagagggtaattgattcatggcaccaagaggcaacaatgtggatggaccgatttgctcttactttgaacaggagtcaagaacttccccgattgctagccaaggccaaagcaatggcggacacctactccgcccccaagaagatccacggacttctcagctattgtcaacatatgatagacttaatggaccatatgattagaaacc

SEQ ID NO: 224064 - DNA, 489 bp, Glycine max
  unsure (1)..(489): unsure at all n locations
taaacattcactttcgagcctctcgatatgttacgggacttcttctttcatccgagaaaaaagttattgtcggttgaattngctcagaggttcaacattcaatttcgagcgtctcgatatattacgggactcaatcagatatccgagtaaaacgatattgtgcgttgaattggctcagaggttcaacattcattttcgagcgtctcgatatgttacgggactcaatcagacatcccagtaaaaagctattgtcgtttgaatttggtcagagattcaacattcaatttcgaacgtctcgatatattacgggactcaatcagacatccgagtaaaaagttattgtcgttcgaattggctctcaggttcaacattcaatttctagcgtctcgatatgttacaggactcaatcatacatcctcgctaaaagtaattgtctgttgaattggctcagaagatcaacatccaatntcgagcgtctcgatatattac

SEQ ID NO: 224065 - DNA, 358 bp, Glycine max
ccaagaaaaagagatattttttaatacatgattcaccccccgaacaatgaattttgtactgttaaagaattattctgctctaaatggttttgccacaagttataagaaaaatcaaagcttaccatccatccatacgtatcaatacgcacaattaaatgctggatataaataattcaaaactgaatcaatgaattccccttgcgccccctcgatcaagaaccaataaatagtaactagataggtgtgcgctaaccaatatttcatatatgatagtattattagcatgcaatgttgttttgaaccatgccaagtataaatctattaactatcgcgacctattctttcgtgccttcttatg

SEQ ID NO: 224066 - DNA, 453 bp, Glycine max
  unsure (1)..(453): unsure at all n locations
ntctctaataaggatagtgatgccatagctagagctaccatggccatctcatgctcaactgcctctatcttaaaacaggccctgtggtcatttggatgcttaattgtgtaaaatagattgaaggtaacctcttgatcatctacactcatttataggttaccatttccaatgtccactacatacttagcctcaacgtgaaaggatggcctaagatcaatggaatttcaacatcttcctctatattcatgatcacaaaatccacaaggaatgtgaattgacgaaccttgaccaacacatcctccaccacatctgaagatcttgtaattgaatgattatcaagctgcaatgtcattctggttggtgcaatctctaagttcctgatccttctacacataaataggggcattagatcgatgctagccctctcaatcattatgttttttcaactgatac

SEQ ID NO: 224067 - DNA, 346 bp, Glycine max
tactaagcttctaaactttacaagaataagctctgatccacttgttaacttgtggcctcagatatcttaagaaggagtggttgaattaagatattacaaactatcttcccaattaaaattctactttgattttaatgcaagttccaagttctcttaatgacgaatttctaaatgatgattcaaattaaacaatttgagtgtacattctaaacaactatagattaaagagtttatgggaagagaaagtgcacacttagttttatactgattccgccatacccttgtgctacgtacagtcccaagcagctcgcttgaaagtcactaactgcaaaaatcttacaagttc

SEQ ID NO: 224068 - DNA, 372 bp, Glycine max
actcagctcttgattcatgagcatttcattatgttttttttgcaaactgaggccaatcaaatcgtggatatatctttcagagataaagcataatattatacaccatgttatatatattttaaaaaaaacttattcaataattttagttttacactcctaaaataagttagaatatgctagagtcagggatcattgtgcgtgacttatgaggagacatctcctttgctatttactatcctgatcaaatgaatagaagactaaatgcctcgaagttatgcaagaagtctcatcttctctctatataattcatacccaaaaacaagtggaattaaaaaatttttgatcattgactcatgtgtactgtcgtcttaa

SEQ ID NO: 224069 - DNA, 430 bp, Glycine max
  unsure (1)..(430): unsure at all n locations
tcanacttgcaacanaggagttaagcaggtaaaaaagattcttcttctaactcttagaggtgactntgagcgtttgtttatggaggagtccgagtcaatttctgattatttttctcgagtattggtcgtagtcaatcaacttaagaaatggtgaagatgttgatgaggtgaaggtcatggaaaaaatacttcgaactttaaatccaagtttngacttcattgttaccaacattgaagaaaacaaggatttaaagaccatgactattgagcaactcatgggttccttacaagcatacgaagaaaaaaaaagagaaaaattaaacaaaaggaggctacggagcaactactacaactcaacgtaaaggaagcaaactatgcaaattacaagagccaaaaaggacgaggtcgcggccaagatcgtggacgtgga

SEQ ID NO: 224070 - DNA, 291 bp, Glycine max
attcaacgaagcaaaagaaaaaagaaatcccccacaagaggggaaaacaaaagaaagaatgaattccctcaacaagggagaagcaaaaaggaagaaaaagtcttgaagaaaacaacagaatgccagaggtttgaccaacaattctgaacaatacaattgtacctatgacaataacaagaaaggacccgactaaaagatttccttgattacaccaaaccgtcgctacactttttctccctcctaacaaacgaaaagaaatccccaaattagccaacctccagctagagaacc

SEQ ID NO: 224071 - DNA, 371 bp, Glycine max
  unsure (1)..(371): unsure at all n locations
tanggatggaatacttacttgttggtgatgaacaatagctcttaactgaatcaaacaatgcgaaanaggatgaccctangactgcaaattcatcaatcccgtgggtatggcttttgaaagggggaaaagatacttttgaacgtataaacgccccccctttcgtcatttttataatttggtgcaggggtggctcgcccaggcgagctaacctgcactantttatgtgttctttttttatttttttttctctgaggggaacactaaccatgtcccccttcttcttattggataacattttgccctacttgaaattatttattgtataattaagcgatgtttacctatattaataataccctcttcctttttaa

SEQ ID NO: 224072 - DNA, 376 bp, Glycine max
  unsure (1)..(376): unsure at all n locations
tgttaaagaactgaggagagatcaagatctatcttgcatgttcatcgntcgcgtgtatgatatccactccacaaggtttgaagtagaggagagcttcaaccctataacgcaacatggcggacaaaagtgggcagtaaactcgaatggttgtcattgacaatgcgaaaggtattctgcgcttcactatccatgttcacacattattgcagcttgtggttacgtgagcatgaactactaccaatatatagatgttgtcatacaaacgagcacatcttaaaagcttactccgcacaatggtggcctcttgcgaatgaagcagctattcctccttctgatgacacatggacacttatacctgacgcaactacaattcttg

SEQ ID NO: 224073 - DNA, 408 bp, Glycine max
  unsure (1)..(408): unsure at all n locations
agctntgtgtaatcgattacactgattnggttatcgatttccatttatcgnnnctgaataaatcaaaagatgtaactcttcaaatggtttttgattttttcaaattggttttaagtttttctaaaagttataactcttctaaatggtcctcttgaccagacatgaagagtctataaaagcaaggctttgatttgtttttcaatgcatctttccaattcattctttagacaacaaaattttgccaattgatttctgagtctctttgaacttcttcttcttccttttgccaaaagcatttcaaagttttctggttttccaaaccttgaaaagngtgttattcatctttttcattcccttctccctttgccaanaagaatacgccaaggactaaccgcctgaaatcttttt

SEQ ID NO: 224074 - DNA, 463 bp, Glycine max
  unsure (1)..(463): unsure at all n locations
taaggtaaagacactaccttcttataaaagattctaaatgttcatctctacaagtcccgtgagaaaaaaatcaatataataatgaaaaaatggatatatatttttaataaattgtttagaaagagtttttattttgtcctttaattcaattaatatacatgtgtgtgtgaaactaaaatttatatttgattagacaaaactcattagacaagacttaaatttattaacatactaattactagtagacgagaaagaaaaagaagtatatgacttaccaaatcagaaacatattggaaactcctagtctgcttcccatccccataaatggtcaaaggctccttccttagtggttgcattaatgccaccagactaagaaagccaccatatgcattacaaacttganaacttaattacctgagcgacaaagttactaacgacacaaccatcatctaagcacatttgt

SEQ ID NO: 224075 - DNA, 451 bp, Glycine max
  unsure (1)..(451): unsure at all n locations
agcttgtccaaattgagctaagagaatncttcttgtttttgcaccttncgacccccaccaaattcaattcaacatcctttgaatctcatcctccagagttgttggaagcaagtagatactcatggtgtatgaaggcattgcttgagcacaagatttaattagaacttccttaccagctttggaaagatacttccccgatcggtgattgatgcatttccaaattcgatcatctacataattgaaaattgctttctttgttctggcattgatagatgagaggcccaagtattttccagaccctatgattgtagagacacccaaaccaaacatgattgtttgcctcaaagaatgttgagtgttggtgctgaaaaaaatatatgacttgtctaaattgatcatttggccacaagccctttataggtatcaatgattgagtgggctagtttgtttt

SEQ ID NO: 224076 - DNA, 487 bp, Glycine max
  unsure (1)..(487): unsure at all n locations
ntattatgccctctccactcggcggagatctcttcttctgttaatgcaagacagatgttggcagtgatattattgaccagccctccgaaaccttctaccgagatgtcttgagccacatgggcctcgttcaaaaccttcactagcagagcccgatgaggcttaaagctcatgagtaactccaacagcgagaccctggccggtgttttgttgagctgttcgataaccttgaattcgctctgctgaattatacggaggaactcactggcttcctctagtgacacctcctttttaccatccttnttctccgggaggccttttgccggaatatctatattcgaagcgtggggtgcttcgccatcttggtcctccaccatatttccttttnccttgacgttcgcgggttggactggtaggtccggaggcgcgaacacacgaccactgcgggcacaccactcgttccgtgatatttgttacctatccgacaacg

SEQ ID NO: 224077 - DNA, 446 bp, Glycine max
  unsure (1)..(446): unsure at all n locations
agctttagaagctattatctattntntttattaatntcatcaatttgttcttactcatattgattgtgacaatgtgaaagaaaaacataataaaattgaacaaaaataattgaaaaaagaatttacaataaaagttcataggtgctacttattgaataaaatttatttagtacaataatacatgaatactcacctaacaaccttttcttgaacattggtataacaagttatttcttcttccgacactcttgcaagcaagaattcatcacatgtgtcgcaagaccacgaacacctaataagtaaagatagttataagacacatgtaaaaaatataattaactcaattataaaaaataattataaatactaatgttgatgtcaatgaactttattaagtcgcactcagccacgcaattgtcggtcgaagcagaaaacacgggagaaca

SEQ ID NO: 224078 - DNA, 484 bp, Glycine max
  unsure (1)..(484): unsure at all n locations
ttcatactaagcttgatgaggggcagttcaggtgaatcagaaaatggagttgatactgacatagggttggatctttagcggtagacctagtggaatcagcgagggtcagtggagaaagttgacgattcctttgatgaaagctccctgaatgatntattatggaaatttgtgcattctgattcagtgattctatagaaattgcaaaaatagaaatttgttttgatcggtacatattgttagaagacgagcaaaatattttaagggagggaatggtgtatgatagattacgataccttttgttagtttagggattattatgtcatgcaccattctacccctagttcttagatattctaaaacatattattgtcattataatgataactctcaatgtataataacatgatttcaaattacacacaagttatcattctgcccctaccaaacgaatgataagttatcattggcaaattctgtaattata

SEQ ID NO: 224079 - DNA, 412 bp, Glycine max
  unsure (1)..(412): unsure at all n locations
catgcaagctggctctaaattacatngangtncgtttttatgttatgatgttgcacgccacnaccgctataagaataatatcccactggtacaactacctttccaaatgtttgccttcgcaggaaatggccccgagaaagcttgcctcaaagaggtccaggaaggacaaggcagcagaaagaactagttccgcttcggagtatgatagtcaccgctttaggagcgcggtacaccagcagcgcttctaagccatcaaggggtggtcgtttctccgggagcgacgcgtccagctcagggacgactagtatactgatttccaggaggaaatagggcgccggcggtgggcaccactggttactcccatggccaagtntgatccagaaatagtccttgangtttatgccaatgcttg

SEQ ID NO: 224080 - DNA, 493 bp, Glycine max
  unsure (1)..(493): unsure at all n locations
tcttntggaccttgaacaagcaattaactcctctntcagatccatgctatgtgctcgcgactggtctctttcttcccttcgcaactngagttcactattgctaccccatagagctccgcgaaatntgttccggccatacttttccttgcgagccctcttggtctcttgttcaagggctcttgcggtaattgcattctcttcccgtaacccggcacactccttccgaacgtgtgtagcagccaacttgaacttctccttggcgagttttgcctttcctaactcgctnttgagagcttggacttcttcgtcctcttccggtgcttcaaaattctcttcgctgacgactnttaacttggcgagccaatctatacctcgtatgcgaactttcagccattcgtggtacccaccaatgatgccattacgaatgcctctaagctcttgatctttccttaacggnngttcccatgccttatggattctttgatagtcttgg

SEQ ID NO: 224081 - DNA, 421 bp, Glycine max
  unsure (1)..(421): unsure at all n locations
tccactatcggcacacatgttctatgcttttgaatatgttttttcttaataagaacactcacaacaacaaatagtatcttagttcaatcactctgattntgcttcataatggcttgtcatcattaaaacattcagttcctggagggactttgtttcaacaagtgcacatccacattttatcctcaatgggttgaaatttcaattntataataagtgctgatttgatgtaattagatttagtaaacttaaatgatttaatgaataattaaataactcatagtaatgttattgattactacataagtttgatattaagtaattaaatgctctttatcactttcatttgataatcacatattaatttcgataatttttttattaagtagtaacatgccaaccatgtnttagtatacaaatttga

SEQ ID NO: 224082 - DNA, 301 bp, Glycine max
cttcaaacggcccccgccttcgtcaaataggtattaagtatctcctaacgttataactcttctaaatggtcctcttgaccagacctgaagagtctataaaagctacgctttgatttgttatccaatgcatctcttcaatacattccttagacaacaaaatcttgccaactgacttctgagactctctgaacttcttctcctttctttcgccaaaagcattacaaaggtctctggttcaacaaaccttgaaaagagtgcgcagtaaacttttcaatcacacctccctttgtccaaaaaaata

SEQ ID NO: 224083 - DNA, 471 bp, Glycine max
  unsure (1)..(471): unsure at all n locations
tgcttctcctgaatatcanatatcatttgganaaattaaatggacaaattangattagttagtagggcactaattgaaattaaattgaattttaatttaggaatgtaagcaacattatgcaagactaaggtgttggttaagtaaactgaaccaatggcaagaatgggtataatgtcactattaggcagagttacagttttatcaaaaacaagctgataagatcaaaaattatgaacatagcaagtaatatgaatgcttgcaccagaatctaaaatccaacaatcatgaagaaaattggaagtggaagtagaaagaatcataccactggaggaagaaacaccctgaggaatgaaagcattntagcatgactttgtaaaagattcatcattcggctatattgttgagcangaagttgaaactatgaacccaagtcaacagaagaagggtgtggtngaagcatatcaacaaaca

SEQ ID NO: 224084 - DNA, 440 bp, Glycine max
  unsure (1)..(440): unsure at all n locations
ntaaccgatcgtttaagctgttatctcgcctaatatatgattaaatgaatttcaaccgatcatttgtgttgtaatgtcgttttatcactgttaaagcaaaatctaaccgattgttcacattgtatcctcggttaaataaaaaaaggagaataataataaaataatcaaaatatcttgaaaaaaataataataaaataatcaaaatatcttgaaaaaaataataataaaataatcaaaaaaatcaatcggacgtttttctttgaaaatttccttgaatgaattgactaataatcaaagtgaaactaaagctaaaatcaactcacaaaccaagctntgtccgcaaaagtcactcaaaactgttttatggccaatgccttataacggtcctctttgcttttattggntaaaataaatcattcaaagcaaataatcaacacata

SEQ ID NO: 224085 - DNA, 288 bp, Glycine max
  unsure (1)..(288): unsure at all n locations
gaaaaaaaaggagggagaagaaagaaaanaaacaaagagaaaaggaggaaaagagagaaaaaagaagaaggggaagagaaaaaaaaaaagaaaaaagagaaaaaaaaaagagtaaagaaaaggaaaaagaaaaggaaacgaacgagaagagaaacacaaaggaaaagaaaaaaaagaaaaaagaggagaaaagagaaaaaaagaagaaaggggagagagggagaagggagaaaagaaaaagggaaagacagagaaagggaagaagaaaaaaaagagaaaatgaaaaaa

SEQ ID NO: 224086 - DNA, 285 bp, Glycine max
  unsure (1)..(285): unsure at all n locations
caaccaactgctccaagtgaagattctctgcagccactatgctcagaacaactccgatggtagtcatctttacaaccggagagaagagctctgtgaaatcnactcctcgcttctgctgaaaccctatcatcacangactcgccttgtatacttctctaccgtcagaatcttccttaagcctatagacccacctattctggaatgccctctctccttccgggcatttaaataaagaccacgtctaatcttccgagggatgcatctatcttcatcgctagctccctc

SEQ ID NO: 224087 - DNA, 465 bp, Glycine max
gttgagctaattcatacgacaatcacttcttgctctgttatctgatgagacccgacatctattgagacgctctaaatagaattgtgaagctttgagctaactctaacagactataacggattgcttggatggctgattgagttccgtaatacatcgagacgctcgaaaatgaattctgaagctatgtgctaattcaaacgacaataactttatgctctgatggctgattgacgccccgaatctatcgtgatgctcgaaattgaattctgaacctcacagctaattgatactacgaaaaccttctactcgtatggctgattgagactcgttatatatgtcagaccatcgacagggatgctgaaactcttactagacaacgacaatattattgtcacatgctgatgaatccttagcctctaacctcaaattattgtgagcttcacatatcaacgacataattttact

SEQ ID NO: 224088 - DNA, 363 bp, Glycine max
  unsure (1)..(363): unsure at all n locations
ntangtgatggaatatcttattttctcctctctttctttcgtatcctcctaatgtgaattcctgaagcacgactcacatgatggagtctcttgtagccaacaggtctaatataaaaaggaaaatagaaaaggtggagtaaaaacacatcattgctttgctagttgctatgcttatcaataattcaatttctcttttcttctcgattcattctttagctttggggaattctgcaatgcctagtacatgctgaaataacttacagcaatggcaggttgtagtcagaatgttaatggactaacaattgagaacaaattcaaaacaactttatgttgatgggtctgtcttgctaagttgcttgtgca

SEQ ID NO: 224089 - DNA, 352 bp, Glycine max
  unsure (1)..(352): unsure at all n locations
tctaccagctggtccataagatcatctattctatgcaaaaggtacttattcttaaacgtcaccttattcaactggcagtagtctacacacaacctcatggtcccatctttcttctttactaacaacactggtgctgcccatggagacacactaggtctcacaaaccgttctacaagccttgagccaaaatcccaacttatcatataccttgacccagggtgagaatgtcaatcctcgccctcgaacganaaccaaaataaaagaggaaagaaagaaaattcccaatcaaagaaggggagaaggaaaaaaataagagaaagttcccgatcaaagatcggaagaaaacacaaga

SEQ ID NO: 224090 - DNA, 292 bp, Glycine max
gtaaaaaacgagcccccccacccccgggaaagaaaagaaaaaagggggagaagaagaggaaaaaaggaagaaagagggggaagggggggggaagggaggagaaagggagaaaagagaggaaaaggggaggaagaaagggaaaagaaggagagggaggaagaagggaagaagagggggaagggagggagaaagaggagaaggggaaggaggagggaggagggggggagaagggggaagaagagggaagagtgagagaatggaggacgggggggaagaggagaaagagaggaga

SEQ ID NO: 224091 - DNA, 391 bp, Glycine max
actatgctgccctagctgcgtaagaatctcacctgttaatccgttcgaccatagctgaagaacctgaagcctatgaaagatgctcactctttggatcttccagtgacttgttgagagatgtggagaattccaggctctggacttaccacaccctcgaatctcaccgaagaaatttccttcatcgaagaatatctttgactcagataatctgaatggaccctattgtctggaaaaagaaactgactcgggagggcataaggggatactcatgagtgtgaacacacagggtcaaaagacttcatgtctgaattactgaggtggaccaaaatcctcacttctgtcatctctgttacctctgtgaccactgatcacgcttggagatgacttccac

SEQ ID NO: 224092 - DNA, 105 bp, Glycine max
ctataactcgctattaggattctctgaagtccttgatacttatcaaatagggcattatcactagaaccttattgattacgacatactgccaaacatttcattacc

SEQ ID NO: 224093 - DNA, 266 bp, Glycine max
  unsure (1)..(266): unsure at all n locations
gctttggagaaactggagccagggcatgtgcattgacccttttttactaatcacccctttgctttttgggattgtttctctaacgttcgaaactttataatgtcgtacaatacttgtntctttccgaaggttactgaccttaacatcatgtattactctatgttggatacggaaagcacggaacctccggatagcgtacaactgctctttatatttccgcatgttacggaatctacacattgtttacaatgctccttcttgatctc

SEQ ID NO: 224094 - DNA, 52 bp, Glycine max
aaaaactacgtgtttacgaaagcgggagaaaaggagaaaagaggaaaaacgg

SEQ ID NO: 224095 - DNA, 264 bp, Glycine max
aatcgggaaaacgccgatgttttccttacaaaaaactgctgatatacatatagttacctcttttgttccactggtacgacaccgacgcgaatatttaacaaattacgtgaacaccaacgacggggaattattactttaataacgaagagactaaaatggctacctcaaggaaaaaaacgaagtacaattaggatccaacagctgatgagtcgacgactaccctaacaaacgtagacggaacacagacaaaattcccacctcgac

SEQ ID NO: 224096 - DNA, 230 bp, Glycine max
agtctcaatgcaacattcagctgcattgttcaagggcgagaggtgatggaaacttctctttaggtattctgatagagtaattctctctttgttagaggtgtgctcacactacacccttccacttttcaagagataattcttgtaatttataataaaacattacgatgctaataatagctcataaattatattatggactgaatataccataacatatatctgtggaatac

SEQ ID NO: 224097 - DNA, 285 bp, Glycine max
ggcacggcgcaactcacttggggtttgaaatcgcccttgaagttgatgatcatcgacctataaatgctgacgctacaagaactagtcttcaaggctgagacaatatgccggacctaccgaattttgagagatacatctatttggatccctttgaataattaaggttggcagagctctgctgcagcacctgatgagggaatagctgacatttagtgagtattacctaggcgacttttcattgaatagttaccggagagtgggggaatggccaagtgggacccgtcc

SEQ ID NO: 224098 - DNA, 251 bp, Glycine max
ttgaagaccgcccttttgaaatgtctgtatgcatctattcgaccatatcaaatgtctgatactgctaacaaagtaccataggtccttcagaatgactccgaaaatcaagtagcgacccgtacactaccccagagacttttggaagatgacacaattctcttgtgcgattcccatcttacaacatttaatgctctgacagatctcttgctgcaagcacactcactggaggtagaatagacagacaaccttta

SEQ ID NO: 224099 - DNA, 411 bp, Glycine max
  unsure (1)..(411): unsure at all n locations
ctgcggctcacttgttacaacttgatattttcatgtgtaaatatcaaagtgacctaaagctactcgtcaaacggttataagggttcttactggagtgagaagaatctggantattatatctatccttggccttgggactcgtctttaacatctaagaagtgatgctttctcacatctcacatatcatggatggactaaaagctatattgtctccatatcatatggtccttacatggatattgagaaaccttttcatcttcaagaatttttccttgtctataagactcaaccaaggcagcttatacactgaacacctggtaggggtgatatgtgtcagtccttcgtcgctctatgaacacctccgccacatcgcggcgcttacatcatctcccttctgcacttccctcttgt

SEQ ID NO: 224100 - DNA, 313 bp, Glycine max
tacattgatgtaagacaaacaattgattctaaatttaaaatctccttatcctgatttaaaaacgcgtactttaccttttatacagagacaggaaaagaataccccaggactttcaaacagactccaagatttcaagctagataacgtgacatcacacaaaatacctttttctttattgagctctgttaacgttttgaacgccactgactgaaccatgaaaatttgtgtttccactttagctgaacatccgcatgtgtttctttaagcaaccacagaagaaactggttaacaacgcatgttgtccgacttactt

SEQ ID NO: 224101 - DNA, 169 bp, Glycine max
  unsure (1)..(169): unsure at all n locations
gctcactacaagccttaagtgaagaaccatgatattaccatatccttaagggaatttggagctttggaattgtttgggaataagtgntgggggtttttgttcattgacaacttngtnntgtgctatgcttcatgatgtatcttgggccatacttgatgtacattgtata

SEQ ID NO: 224102 - DNA, 152 bp, Glycine max
  unsure (1)..(152): unsure at all n locations
cggggtaagagacctgggacgtaagtgggtgctattgccanaaccaagcttgccaatcccgacccaaccggcatagtcagtcagtgagaacctgtgatgtacctaaacaggcgagctccttgcagtcaacagataaaaggaacaaagaccac

SEQ ID NO: 224103 - DNA, 216 bp, Glycine max
catcagaccttggatgcgactgtgatcttatacccatatcagctagatcttgacgggtattcaagccatccttcgtcttgcctgaatttaaggagcgttccaatacactgtaccaacaattttcttcacaagcataacatctatacaatgtctaactcgcacatcacaccatgtcggtatatccacgaacatggacctcttcttccatatgcaact

SEQ ID NO: 224104 - DNA, 367 bp, Glycine max
gatgggaatgattaacggtgagagaattaaaaattagatttctattagattgaaactgatgggaatatacacccaaaaaaaactcggtgtgtatccgcaaatagtatttggtactgcctactgatacaaagtattctttgtacagaactgcggtgggtggtttgaatgcctacagaaaagggatgcctatttcatggatgagtgataaccgatcaggacaaaaaaaggcccttgtgacttacgccatttgagatttaaactttatgcactcacaatcggcctgattcggtaccttgaggaatgagatggttaagatctaactggctgactcacgtaatctcttatgcgtaagtatgggagtaaatat

SEQ ID NO: 224105 - DNA, 87 bp, Glycine max
cccgcccgaactgtgctaaatctctgctcttccacaatagggttcccgcccgcacgcagagaggggaaaaaaacctctgagaaaaag

SEQ ID NO: 224106 - DNA, 146 bp, Glycine max
  unsure (1)..(146): unsure at all n locations
tcacaatgtctcacagactcatctcatgctctcagaatggcttcctcttgtcgcttagttctctgccagtcttcttacaacanaagctctcanaactctctggaacttggactctctctctctnaaatctctaacatgcaaaagct

SEQ ID NO: 224107 - DNA, 335 bp, Glycine max
  unsure (1)..(335): unsure at all n locations
ttatctcttttatcttagggagagtgattctcctanattcttgagtgattcaagaacacnctggctgtatcaaaggacttttcacaacctttgtgtgttgccctcgctggaaagagtgattctttcctttctatcatctccacccttggtctttcanaccacaattccagaanatccacctctgcccaaaattatctcgtgaccataactccatttacacactcaaattaagtgattcttgagcctaaattgaatntcanaacgagacctcttacctcgtgttggaatcacctcattnggagccctgtagcgttccgtattgtcatttctatatt

SEQ ID NO: 224108 - DNA, 58 bp, Glycine max
acgctatggaaggcgcatttaaatatttagcctttaatctcccggtccaggtggaagc

SEQ ID NO: 224109 - DNA, 352 bp, Glycine max
agcccgagctcagttatggtctcctggattatatgagatttttgagcaacttcggaggagacaaaaaaatgcttactatctaaataactgacaatcaatggcagaaagataactcatattgacagtcagaaaccttttatttgagtgacaatggcataattacttgtggtgtgcggtttcggctatgaaagcctataagctgagagctctcgtacgagtgacgcacgtctggtatgaattgtacccagagcggactacagtcatctttgtcagcttggtaacctaagggtgacgtttttgataaatctattgattcaagtgaattgctgacttgactactcctttatgctgt

SEQ ID NO: 224110 - DNA, 80 bp, Glycine max
ttgaaatagaaatgaaaaaaactgggccccttatttctattttatgaaaagcaaaacattgccggaaagagggagaggaa

SEQ ID NO: 224111 - DNA, 303 bp, Glycine max
atatagggccctttatgaaaagtagaaaatggatcggtctgaattataccattgaatcgacccattctatactgattattctgaattattggaattgaaatcccccccacatatatctgtatgtgaaacgttgatcatgacatgaaaatgcatttggatggtataggaccctgaagaaaaaactaattggctaaaactaaagatatgctgtctgttatattgaatgtacgacggcgtgcatgagactagaggcaccactcgaatgtgacatctttgcgtattgaatcatcattgcaaggactt

SEQ ID NO: 224112 - DNA, 294 bp, Glycine max
  unsure (1)..(294): unsure at all n locations
ttgtaattccaactgtaactatctgttaattcgttcctaaagagagagcggcaaaactgttgctatctgcacattaatctgtgcaagatataacagatttatgtgtgcagtattttcgggcaagaagtcctggacatcgtatccgacatcagggaaactgcagcgttaagacgttatttgacattttaacttgccttggcatanggcacgccaaactgattccttgacttagcgttggacattaatgtgcagcgactccagctttccttcattgtctgagcgcttatgaattaa

SEQ ID NO: 224113 - DNA, 218 bp, Glycine max
acccacgacaagaaggcggaaagcaccagacccaacaaaacaaggcaaacaagagggaccaacacgaaaaaagaaaagaaggacaaaagaacgcagcaaacaaggaagaagccaccaggcacccagccacaagaagagacaacaccaagggcgggcccgcacccaagagacaggggacccacaaaggcgaggccgaggagaggcaacgaaaataccaa

SEQ ID NO: 224114 - DNA, 420 bp, Glycine max
cagcttaagatgcccggtcattcatcctatgaaaagggtttatttattggttatcaaaattgccattccttggattatatgggtgaaccaagctcatgcttttacaataaggttcatcaagtcaagttgaaatatggaagtaaccgtcttgcaaaattggggcaaaagatgaatcgagtcacatcactgcttcatctactgccaaacgtatttaagattgttgatgtccttgttacttccagtttcactttgacaaagatgttatggaccatgttgaaaatcttaactgattcaaccccatattctgtgtaaaaattcgcaatacagtaacttgtcaccattctgatacattctgcttttcatgcttgattgctattgcattcttccttgaaaaaaaataaaaaaaaaatgacttatcat

SEQ ID NO: 224115 - DNA, 439 bp, Glycine max
tactaagcttggagctttaatttatatgctccgcttgagggactttatttattagctagtggatctttgtaagaagagtcttgacaggtttataaaaggctgtttttaagtgtattctgaaaagcctaagtatgagcaggttccctagtctgaacctgtcatttcttctttcttattgtactctttcggtgtcatataaaaatatatacaatgtgtggctgagtaaagtaactcaacacttctctaacgtaatgtgtatctcaaaccctttaacaatgtagttcttaactttaacagcttggatatgcaacagatcatccagtcaattgaatgagtttcaccacacatgctgtcaagtctcactatacacaaaaataactttatttatgcaataatgctgtttcccaaagtttatacaaaaaccataaaactataagag

SEQ ID NO: 224116 - DNA, 426 bp, Glycine max
ttggcgcacgccttcaaagctatagtgatcccaatctgttgtattctatacttcgggccgcacttccaatgaagctgcctttctttatcagctttttgcccgtgaatacgggagcaataactttcccgactgctccaacatgtgccatgaaccgacaagcgtgggtttggcagcgagtatcggtgtatgtaaagggaccgtgttgctggaagactttgagaagtgcgatttagtcatttgcattgggcataaccctggtacaaaccaccctcgcatgctgacttcgttgcgcgctttaatgaaacggggagcgaaaatgatcgccatcaatcctctacaggaacgtggcctggagcgatttaccgcaccgcataacccgtttgaaatgctgacgaactctgagactcagttggccagtgcctacta

SEQ ID NO: 224117 - DNA, 332 bp, Glycine max
ttttctcttaagctcgcgtacgaagaatgtggtcattggaacactataaggttgcattaaaagcatgtactccttcatgccgggaaaactttcttgtgagcttatgtgttgatcactatagcacaaaaccactcactctaaatcagagtaggtctgtcaccaacatagcgtgacttctgatggagtatggcaacttccacaatctgaacttcacttattcgtcatcggattcgacataaactacgagaatgtccttgctaatgaaacctagatatcgagcaataaacgaattctcacatgccaacgaaaaatgctgaatcaaaacatgacac

SEQ ID NO: 224118 - DNA, 312 bp, Glycine max
  unsure (1)..(312): unsure at all n locations
ttcctctctttggtgcagaaataagattcattcatgcttaaaaaggaactttccatgcccatcttcagttaacaaatgttagtatgggaccatactacaacgcttaaattacttttatgatctgataggttgggttaaatattgactcaaattttgtgaccaaaattgaatgaaataagttaatgagaaactctcaactcaacatgatttcataccgcaaagaagnatttaagatagtcatataacatgactttgcttatgagtttatttacgccaaagttcactggatacttcttttgtaacaatcttaag

SEQ ID NO: 224119 - DNA, 301 bp, Glycine max
cattaataatatgccatacaaattcatttaatgacaagtcactattggtcaaggcagcatgtgatttcgcagactctaaacataaactcttgcaatgggggcttctagaagatgctagaccacttacatggatgctatttcgaacatggacaatccatggtatagggattgcataacttctatttaagacggttgtggatttcagcttcccagatgttgatgaactctgacatttgtgtttgactgcgacaaaagcaattacttgtgctggtcttggaggtgtagagatatactctaaact

SEQ ID NO: 224120 - DNA, 382 bp, Glycine max
gaagtcatggcaatgacgcaagttaagtataaaattaatttaatttattaggataaagttatgcgaatgttttatatatagtgacaacaacatacaatatgctgagaaaatgaatgcatatataggcgagtgaggcgacagttttgtgaatagaaatacgataggcgttgtccgtagatctgaggtggggctcgttcagaagaagattgcgagagagaaaaaagtaatgttacccttttgatccgtcgattatgcatccataagtggggctttaacttataattcacacagaacaactcaatgaagtagtaaccaaatcagtacatgatcatagatttcaagagcttataatctaatggtgaacacgacaatctaatgtatg

SEQ ID NO: 224121 - DNA, 432 bp, Glycine max
ctaagcttaaagcaagcctcgtagaggactgctgagcattttattattttatttctttggatacggagcgctctaactgactagtgacaaagctacccttcaggaattcacattccaccaactacaaccattaagttcatgccaaatagaatagctttgaggttgcctccattagacctggataaaatagaaggaaaggtgcctcctcataccaagccaatgcctcattctggccccaaagacaatattgccttgtgtgcaattccctatgattggagcacgtactttaactcgagatgcggctaaaaagactattactctgaagctagacgcttgagttgaatcaaatgatgccatgatcttttacttcatagacatgtatgatacaccacgtattgatgcacatttgagatgacaaggaagacacattca

SEQ ID NO: 224122 - DNA, 415 bp, Glycine max
cagcttagaggatgacgcattgaaggagcgacatgtttgtgttctcttaagaagaagcgaggctcctttattaaagaggtatgaaaaaaacgtggtttacatatgcttgatttcccttcaatcattactagttctttgaagatagctccaattccatcagcattctaaaaataccttatttatgacaaagctttatatataaaaaaaacaaagcttaatgcaataagagtaggaaacacgcttatattacattctaataaacaacaaatgcatacacactccgaagactacaatgataacataacaatgctgatcgagattaatttctaaggcagatccgagtatcgcacaaggctagcaagcggattcaggtactctcaatatcaatcccaaaggattgaactggatgtacata

SEQ ID NO: 224123 - DNA, 427 bp, Glycine max
  unsure (1)..(427): unsure at all n locations
ctaagcttaaccacgcnacacaaatctggtatgcaaacccctattttttggattttcaggtttgagaagtgaaattgagaatagggtaaatttgaagcaaactctcacctcacacaagtctataacatcaatttaaacttgttcaaactggatttacacctaaaattcccccgaataaaaatttgactcctcaacaccaaaatttaccctagaaatggctctttgttcactttggtcatttgtttttctctctagcacagcccaaactttctcataagtcctaaatggcatttcaagctagaattaactcactctaacctccaaataccactaaatccagatttggccttccaactctcaaagtctcactcttttgtccactcacaacaccatactctcaccttctaaccctaggttaactctaccc

SEQ ID NO: 224124 - DNA, 328 bp, Glycine max
agccaatacacgctccatttacaaataacatgtaaaataacttcatgttacctcaatatattttcctaaaacatcacatttgtgcgagattctacaatagaagactcccctgaagtcaatgccaccagatcaacctgcacataacaaatattagatatgacctaccttaatcagttgactaggccactgcacaatcatagaaaaaattttcaagcaaagttctggatgcaataacaaagtacataaaagtctatcttccgaagataagtaccatagggagaaagcacacaaagttcgttagcaaaagcaaaatacaattaacaaagaa

SEQ ID NO: 224125 - DNA, 376 bp, Glycine max
agtggtgaagccacgtaccttgatgattacgtctaaggagcaaaactggaagaacgaattattagaatcaacaccacatcctacttgtggtgtttgctccctcataggcagacatgcataacaaaaactgttattaaaatattccttttggataaaattggcacaaatctgttatttgaattcctctatatatagccatgtaaataaacaagcatgatatgagaaataaaatttccttcttaccttgaggttatcttcttcttcttcctctttggtctggaggtgctaaccctcgaagtcaataaacaaactcagagcacctaacataaggttttttgcatcatctgcattagcaaacaattgcttataccttggt

SEQ ID NO: 224126 - DNA, 421 bp, Glycine max
  unsure (1)..(421): unsure at all n locations
tncatcagtatctaactatagaaacaagcgncctaccngtatatgtttatgcatgangnacatatggaaagataaagactaagatctcaacaatcaatacaaataccactcaaagagttgggcatgttaaaagacaagacttcttcaagctcaaaagcttaatcttaatgttgctcccctatctctaacaatctccccctttttggctttgatgatgccaaacttgagttgttatttgagtgcatttggagagtcttgagagtagaaacttctcttgaaaaagcaacctgaaagtttctgaacactaaaagaagtgtcaagtcatatctcatcatcatcatagagtagagtaagttaccaatgtactactactttctaatgcaatatttctccctcttttggaacaacaaggccaaaaagt

SEQ ID NO: 224127 - DNA, 376 bp, Glycine max
aatcaacaagattagcactcaaaagtgaaaacatatatggcaagtaaggaagaatgaaatgaattacaaaggaaatacaacaatttcctaatatttcatttactagctcttaattcagcttggtgggctgtgtactattatattgttattcaaacagaatttagtaacaacatactaataagttataataagcttaaacattaatgactgattttataagacataaaccccagattaaaataatggattaccaccatattgtctctataaaacattaaccatagaaatcagcaagttaaatataaagaggaaacttaatcaatataccttgatcatactaacagccaatccaatattaactataagataaggaaac

SEQ ID NO: 224128 - DNA, 435 bp, Glycine max
ggaccttgaaactaagcttaaccaattcggataaataggcaattgtaatgacatatttatgtatatatacctaagttctgaaaggcttgaatgcaatcaaaggtttcagcacaaaagaattccatatcaataaacttagggtcgataatggaacgagatgagaaaagattggagtaccgtttctgctgttcgtcggaagaaaacactgtggaagaggacaatgatggtggaatttgtgctatggatgcactattggctccggaacgatgagctcttgaagctgaagcggaggcggaagaacccttttgtttctttgacgattctttcatttgaaggagtttttgcagattttaatcggtgaaatcaaaagagacatgaaaaagatgaagatccgcacttacgggagttgatttgatggagaaatgagtgagatac

SEQ ID NO: 224129 - DNA, 370 bp, Glycine max
aaatctaagctctaacttgacaaaagaagcttgaacccctgtagttttttgtctaaattctaagagggggggtgaattaaatattcaaccggtcccctaattaaaatctatttcactttttactcacgttgaattcccttatgacagtcttttaatattaattcaaagaacaactcgatatgaatataagcattataataaggagattaggaagagaaatgaaactcattttatactggtggcacacccttggcctactccagccccagcaccgcttgaagatcacttctgtaatcctttacagtttaacaacaagacatcttcttggttaagacctttcacagagactacagctctttccttaagatga

SEQ ID NO: 224130 - DNA, 300 bp, Glycine max
acatcaagcactcagtggaatattccaacaaaagattctagccctccattacaagggagtacctttcacaaatagtcaaagggtttcagagaaaataccatattacaaagcggtggggatgtctcctccacctctatgaacctacgaatcactcctaaacctataatctacctaaaagttagggcctctttcttccttgctcaacttttcttctgttcttcattcatcactaagctcacataatctattccaacctctcttttccattctttgcaattcaggcttaaaaaggactttttg

SEQ ID NO: 224131 - DNA, 443 bp, Glycine max
  unsure (1)..(443): unsure at all n locations
tcagcagcttctttctcctctcttttcctgacttcggctctttaagaatttttaatgaaaagcaaaagtgaattgacatattgtgaagattttcacattcaaaatacaattctatgtacagaactacagattatcaaacatgcaggtctaccaaaaaaataaaaccacccattttctgccagatataacagagtgaaatatatctaatatacagcccaattcttctcatttgagtgtcaaaagccacctaaacttaaaagcttgtaaaaattagtgttagaaaagcacatttattacatgtaaatatggaaatatccattactactaattatggatntagatggattctttgtaaccatgattgatattattataccctaatacgtaattacaaaagagcatgaatagacatacaacacacaacatttgatatatcctttcta

SEQ ID NO: 224132 - DNA, 370 bp, Glycine max
  unsure (1)..(370): unsure at all n locations
catacacaattcgcaacagagtaacttatagtctcaggttaaattgcactgtcatacattttcagattcatccaccaagtcgacaacaaaggaagattttgagaaagccaaatcacagaaaccggaaggtaaaagttgttgaaaatacaaacatcaaagaatttggcaacccaataattcgcatatcggtgagagcatacttaatacttagcactcacctatctgaaacttattcgcaataataggttcttttaatatcagtagtggattcttgttcatcatcaaacaacgctntatctatcatatattgatcttcaacanatatatctaccatataaaaaaaaatgaagttttaaaacaaatatatatt

SEQ ID NO: 224133 - DNA, 372 bp, Glycine max
atgaaaaccagtgagctccacctaaatcatccaactatttatccatattaaggattggaaaacgatcacgcatcataatagcgttgagtgctcaataatcaacacaaaaatgccacgatccatcgttccttttaactaaaagcaccgacgatgagaatggactagaactttgccggataaaaccttgggtcatcatggctgccacttgttcctcaatctcatgcttttaaaaatgaggattatgataagggctcacaattattggtgtagtgtctggtaagagattgatactatgatcgatagctctgaatggaggtaaacctctaaaaggttgaaagagagaaacatacttggccgcgaacgctgctatct

SEQ ID NO: 224134 - DNA, 427 bp, Glycine max
tattgcgccttaaaatatctgaactttgatgaatccgcatctagagagtaaaggaggctacaactattggagttagaagaaatgagattgactgcatatgaatcttcaaggctgtataaagagagggttaaaacttaccatgataaaaatcttctaaagaagaattttcaaccaggacaacaggtgctactattcaattcaaggctgaaattgttccctgcgaagctcaaatctaaatggtctagaccatttaccatcaacaaagtcaagccatatggagcagtagagctttgtgatcctcaacccaaggatccagacagaacatatgtagtgaatggacaaaggttaaagctataccatggtggcactattgaaagattaaccactgttttatccttccaagatacaaagaactatgcgtcaagct

SEQ ID NO: 224135 - DNA, 218 bp, Glycine max
ggcacctgcagagatggcgcgggggtcaagagaccatggggacatcaggggggtgctattgcccaaaaccaacttggacaaacccgacccaacccgggcattagcagtcagtgagaacctgggatgtaactaaacaggcgaactccctggcagcaacagaagaaaggaacaagaccacaatccaggaggctttggtggctggcagctgtgaacttgaa

SEQ ID NO: 224136 - DNA, 86 bp, Glycine max
gaagaagggaaaagaaaaacaacaccaaggacccgcaaaccaaagcagaagggaaaacggcacgaagagaacagacacaaaaacga

SEQ ID NO: 224137 - DNA, 351 bp, Glycine max
cccaagtgtctataaccggcgctaaaacaaagacataacaaaggcacgttgctacaacaatatgtgcttagggtattgaagccatcaagggaaagaaactgtactcgagcaaaccgcacctgcaatacgcaaaacctaagctaaagaggagagcacacaaaagaactatgatgaatgcgaaactgcacaatttaggttgtccaaagtggttgttacaaatggggcaacaccaaaccaacatgaaatggcccctaaccctcggttatggcacaatgaaggggtgaccaaactgatgaatatgctggctgaacagagcaatcacttgccgtaatgcgcttgtcaaaatgtgcg

SEQ ID NO: 224138 - DNA, 324 bp, Glycine max
aagcagcaaaaagaccaaaaacaaacaaccgcacaaccgagaggcgatcaaaagaacaacacaaggcctgaggaccaaaccgcaaacgaggaaaagaaggagcaagagccccgcgctcgtcgacccccaacagagacaaacaccaaaaagagaaaacacaaaaaagactgaaggcacgacgctgcacaagcgaaaaaaggcaggcgcaccagaggcggacacatggggagccaaaaccctccacacacgcaggcaacacccgaaccctataaacacaaaaaacagagacccccgttaggcaacacccaacgggagcctcaaaaa

SEQ ID NO: 224139 - DNA, 195 bp, Glycine max
cctgccccctcaaacaatgctggatgacagagtcggatgatggtggcgcaacctacagctttgtcttctctaaagcataaaataccgtattcagtgtgcagacgtgcagcttatccgaaacaagcagcgattgaccgtcggacagcgtaccggcttccatatatcatgtgacgccgatcttaaagcagttaacct

SEQ ID NO: 224140 - DNA, 433 bp, Glycine max
tgaatcctatcatggtaagttatgaaagaaaatgactgtattatttattgatgtaaaaaggcaagctaaagtttttttgttcatttaaaggcaaggtaagatgaaaccgcggaataattttgaaaaacatactatacattatacttcctagacgattagacactccttaattagtggactcgtcaatttatttagtggtcttcgaaccaaaattagtggtcaatttatctacacgcgtgttcgcaactcttgtttatttatatgtgaaatatgattttggctttggcaagtcatttatttattgtgtttacatgtctctgaagaatagaaaactaaatggagaactcataatatttataaatattaaataggttaaaagaaatacccgactaaattctttatttcttctacactttatcataagaaaaattga

SEQ ID NO: 224141 - DNA, 304 bp, Glycine max
acggtagaaaggcttggatggcaagagcgcagactcaaatgctatatatgaaaaaacaatggcgcaggggcgtcagaataattcgcaaggtacacggctgtgcaaccaccagaagggctattcaagcatactaaaaaaacaaaacaaaaacgctgtgaatgcgacacaacaaccagaacaaaaaatgcagacagaggtgggacactagggatataataaaatgaacgtgggctacaaatgagaattcgtgtcacagaaaggagaacacacgataacaacactctaaacttcgcatgggcagaaa

SEQ ID NO: 224142 - DNA, 419 bp, Glycine max
gcttcttctcaccacccacaaccaccggtggtcgccacggactgtctttgatctccgctgaaacctcacaccgagaggaacccttcaatccgagcggaatctttcaagcttgtctcgtggtttcgatagagaacgaagcccaatctgaccttcgcgattttcatcaaggtaacccggattctacgcttgttccttgttagtttcagcttgtctttgcatcttttcttactttagaaccaccattgtatgtttttgcgctctctttgaaaaaccctagagagagagactttataaaagttatctttttatgaaatgggtgttattttcgtgaccttcgctgaacctcgatcacattggcgtgaacggaattttaaaatgaagttccttttgttaatctgaacccacttatccttttatgt

SEQ ID NO: 224143 - DNA, 366 bp, Glycine max
  unsure (1)..(366): unsure at all n locations
aactannnnacaaccaacatgatatatatatatatatatatatcatccatagaaattaaatatgatttatgatacgcacacataccttctgtaatcgattaaattagatttcattagtatacgacaaaaataattattcaatgctttattaatgtcattatttttatagtgaaatgatgttacaatattgattttaaaaatatgtaagatgcaacttaaattgaaacaaacttatttgattcataaaaaaaaaatattattctacctcttccttttaccttaacttcaaaaccaaaagcgtaaaggattttattattgaaagagttagagcacttaaagtatcctagacattaatgggttttgaga

SEQ ID NO: 224144 - DNA, 291 bp, Glycine max
tcatgcattatgacaatcattaaatagaagttgaatatgacaactacctgaaaagccaactatactcactcaaggaccaacaaaagatccgatgctacagaaagtgagaaacactcaaactttctcatcatatctcaatattgagactaaataccccttattgaaccacggaaacttgctaaagctacacaaacgaagtgggatttggccggctttccaatttacgacaacaacatccatatagccatatagatcatacagtgaactcgaacctgcttaaaactaaagtcc

SEQ ID NO: 224145 - DNA, 405 bp, Glycine max
ttatagacacgagcagagccaaaaaaagatgattgtttttttaattaaatcatcactagagtagagaatagctatgtaccatcataattgataatgccatcaggctgaggacttctatcatatgagctagcatccaatgttggttctactttactggcggacgcattagtcattagacacatgttgacatattcctcattggtctcatccaacgatgaatcattcaggtccttccaagtgctcaagaggcttttctttttggacctgaagaattaatttttattatactttgactttccaggttaggacattttgacttgaagtgtcctggcttctatgtcatataagctaataattggaatattctcctcatgaaaggagtctttggatgagccgtcatactta

SEQ ID NO: 224146 - DNA, 345 bp, Glycine max
caccgagaaaaaggaatggcgtctgaatttgcacgaccctcaacactcgactacgagcctcgcgatatattacgcgactcaatcagacatcagaggaaaaagctaatgctggtcgaataggccgagagcttcaacattcaataacgagtgtgtcgatatattctgggactcaatcagacatccgacaaataaagtatcgtcgtagaatttgctcacagctacagaaagcaactatcaaagggctcgacatattacgggaccgaatcagacatgcgaggtcaaagatatcgccgtacaaatagcccagagctacaacatacaaatatcaacgacccgatatattat

SEQ ID NO: 224147 - DNA, 364 bp, Glycine max
ctcagctaacaaaagctgcgagtgggggaagccagagcttttttctttgtatcaaacataaaggggagaaggaatattgtagtcgatgctctttctctgtgtcatgcattactttctatgcttgaaacaaaattgattggtcttgaatgtctgaaaaacatgtatgaaaaccacgaaacttttgaaaaaattataaaaattgtgaaaaattttcagaaaatggtttctttaaacatgaaggcttttttttcaagaaaaaaaatgtgtgtgtgcctaaatgttctacaagatatttgcttgtttgtgaagcacatgaaggaggtttaatgtgggcatttggggtccaaagactccttaaacatta

SEQ ID NO: 224148 - DNA, 399 bp, Glycine max
  unsure (1)..(399): unsure at all n locations
cgctggccttaccctngataccagcctcttgctacgtgcaattattgccacaatgggatcatatggtcccatgagtgaatgtacaaccttcggttcacacacgagaatatgtacaaagctttttgcttccgacactcacacctctttgtaaatactaccggaacacagctttcgtcttcttattggctctcctctcccctattctttggggagtacacaaactagtatttaatatttaaagacaagttacatgtgcaaggaatcttgcaacttttcaacaagaaagaagagcaatctttattacttcaaggatttctttgattcaatacgatgattcactttaactacgccatagatttcgaaataaaaagatgaagctttgtctaccaaggaattgag

SEQ ID NO: 224149 - DNA, 427 bp, Glycine max
tccatcaaaatgtcccctatgtaggtctacttgggcatttattccttgcctaggaagtagttgaagctagaaagttaaaactccaagttgcacattatgttatcataaacaatgaaatgtttaagagagccatctcaaggccattgctgaagtgtgtcgacgaataccacacggagtatgtcctgaatgaggtgcataggagaaattgccaaatgcacaccatatgtcgaagcatggcaacaagagtcatccgtgttggttactattgtgtaaccttgagggttgataatgttgagtacattaaaacctacaaggaatgccaagaattcaacaatgtacaccacgcaccacccgatgcactccacaacatgacgtccccatggcctttctccatgtgaagaataaatattctatgaccattcaccaa

SEQ ID NO: 224150 - DNA, 376 bp, Glycine max
  unsure (1)..(376): unsure at all n locations
cctgatgctnttcaagccaactgagaacatcacttctggccttcatctgcttctctgttgctaaaattagtgattccatatgcttgacattataagttaaaaagcctcggattaaaaattgatattatcaataacaaattttatgtcataaaaattcaagataagttaattaaaaagatctacgctcttcttttctttctcaaattttctcctttgttgtatagttgactttttttgttcaatcacattgttgacaccaccgatcgagttcatcattcattggatctatctcttgccgcacattttaattttttacatggctttataagtaattcacgtccacgcattaccattcacttcaacattggagcacaat

SEQ ID NO: 224151 - DNA, 378 bp, Glycine max
  unsure (1)..(378): unsure at all n locations
aatgacactacttgtaccagcaaagtcctaactctatcttcttttatgtcttgctgaatgagtacaaagtgatcttgatgtcatattggtgagaaactcagcactggttataatcagtacaaagatttgtgtttcttaaaaccgacgttgtggnttactaacagccgttttcaaaaacgaatgtggtgagcctaaactaacaatggctttcaaaatccgatgttaacattgatactttaacatcagtagtttaaacatcgataaataccgatgttggaagtccctattaaccactattaaagtctatttcctagagttcttcgaacctaccctatgaagggtgtgtgagcctaaagaaaaattgcttcttttaaaaag

SEQ ID NO: 224152 - DNA, 416 bp, Glycine max
tggagtggtgaaccacttgattattcaggattaaaggtgtttgttctctgtcctttgctcatgttaaacaagaaaaactgaatgcaagggctataaagtgtgtgttcattggctatcctgaaggagttaaagggtacaagctgtggaaattggaactgggtgagacaagatgcatcatcagcagggatgtaaccttggatgaaagcataatggcaatgctaagtaaggagcacaaggataacaactcaagtagtgagaataccaattttgaggtggagcattctgaaattttagatcatggcaatggagatgctattgatcacactgatcatacagaagctggagataatgaagagctggttactcagcatgacttgtccattatcaattgacttgagatagagaaaaaagagtga

SEQ ID NO: 224153 - DNA, 404 bp, Glycine max
  unsure (1)..(404): unsure at all n locations
ctcttcgcaataatttctttcagactacacatggggttgtttaaactttaanattnatcacctaanattagtcttgctttagcttatattaattgttaaaaattgctctgcttatgaggggtttgacaaaatgttctaataaataaggtctttttggtttaatttcttatgttcaatttttgtatattgttcttttttgtaaaaggcttgactagataacaattctatgtttcatttgaacatgatcttattaagcttgaaggacccgagaagcattttcataatagtttctttcagacttcacatccgattggttcaacatgaaattattttaccctaaatagcttactttgctgatttaattgtgaaatatgtatgcttatgagtgttcgacaaatgttctg

SEQ ID NO: 224154 - DNA, 441 bp, Glycine max
gacacatcaaactcacttaaaacagattagacaggccgcgggcgctcgtttatgtttggcgggggggcataaatgaaaaagacctcttctaatataatagatgtgattgacggaatctttcgaatcacgtcggttttgtttaaacatgctgtgggtattgtcgctatgacttattttctttctatccagggactcaattatgtatcttgaaacccaatataattttgctttagtagcattgtaccaacaattagatatattcctgaattccatctataacataacaaacacgtaatatgatgccaaataatacctttcaggacgtgcaacttaacaacggtggatccagtaagatgtccgttgcattccggaatccaaaatatgggcaaacaaggcattggtccgggcactactctatcactgtgatggggtcccatcgac

SEQ ID NO: 224155 - DNA, 357 bp, Glycine max
  unsure (1)..(357): unsure at all n locations
tccacggaacgggtcaattgctgaatgctcatatctnttgatacttccatcacgaataaataaaccctacttctgcatggtttctcattgcaatctcctcaaacactagtaaagggaaggaaccgtaccttcctcaataaaactttctctccgatttggcttctcagttacggttgtcatcgtcggggagaaacaaaaaaaaaacccacaaaaagattataacccacaaaaccaaaattaaaataaaatatgaaaggtaaagtactacgatccactgtttctcttatcctactggtgggtgtcataattggcgtggttgctgtagttcaaagtccaaagggcgtcaacaacatcaat

SEQ ID NO: 224156 - DNA, 388 bp, Glycine max
  unsure (1)..(388): unsure at all n locations
gtgctctanaatacattgatgtatgatatattggaggttgttgtatgccattttttaagagtagtgtcccacttagtaaactaacttttcaaaggttgccttcgcgggaaatggccccgaggaagcttgcctcaaagaggtccaggaaggacaaggcagccgaaggaactagtttcgctccggagtatgacagtcaccgctctatgagcgctgtacaccagcagcgcttcgaggccatcaagggatggtcgtttcttcgggagcgacgcgttcatctcagggacgaagagtatactgatttccaggaggaaatatggcgccggcggtgggcatcactggttactcccatggccaagtttgatccacaaatagtcccttgagttttatg

SEQ ID NO: 224157 - DNA, 407 bp, Glycine max
ctcaagcttgaaaaggatgctctaatggaggaagagtaatagagaattggggagcaccaaattgaaggaataaaagagggaaagaagtggaactttgaagtgtatcttaataaactttcattcatcatatgtacaacaagtgttacacatgcttctatttatagactaggtagcttccttgagaagctttcttaagaaaacttccttgagaagcttctttgagataacttccttgagaagctagagtttagctacacacacccatctaaaaactaagcttaccttcttgataggcttccttgaaagctatagctcagctacatacccctatattagctaaaatcacccccatgacacataaacatgagatgtcaataaatatccttctgcatagcctactcaaatgc

SEQ ID NO: 224158 - DNA, 403 bp, Glycine max
atttctcggcctggcgtgactctaccgcaaattcatacagggatatgccgccatcgccgcgcccatgacatcattacttcagaaggacaaactttcatttcgaacacatgaaaactcacaaaagcattctgatgagactgcaaagctgcgcttatgacaccaaagccctatgtattgggcattaacccgagtttctccagcccatttaccattgagacagatgcttccggcatggctatgggtggtgttaaaactcagcatggacacccctagctttcttcagtaaaacatattgttcgcgcctttacgatgctcccacatacatccgcgagctccatgccataacactcaccgtccgcaaatggcagcaataactcctcgggcatcccttcaccatcgctat

SEQ ID NO: 224159 - DNA, 362 bp, Glycine max
cacacacccctctaataactaagctcacctccctgtgaagaattctatagaagctagagctttactacacccaccccctataatgggtgagctcacccccatgcgcgaatacatgaaaatataaataacaggcctcattcaaagactactctcaatgccctgaaagacaaggctaagaccctatactactagaatggccgaaatacaatgcctataaaaaggaggaaccaattctatcatttacaaaaaagagtgagagcaaccttgacccatgggctgaaaaaattactctaaggtaaatgaaaccctagcgcctctttattacgctagccaatcctcttgaggctttatccataccctcg

SEQ ID NO: 224160 - DNA, 459 bp, Glycine max
cggacctatgaaactaagctatgcgcatatttattacgaacgttctcttgcccaagacattttattataccgaaaaaatgcacccatatacaatcaaggcagctgtgttacctagatttattacacgtgcttccaaggtgtatttgttacttacatcacacacatctccttggctaaattcacatacatgcatactccgagcattttggggtaccaaaaattgcacatgtgcacatcttggtatttctaatacctatacatacacaaatttcatgatgaatcttgactatctacacaataaagtgctacatttcatgcctttttccaagttttcgctacctaaagccgcatgcaaattcaagcatattttcctttgttgactaaaaatgtattcaaactatatatatatactttttggaatatgttttctttcacataaacatcaacatatatatatat

SEQ ID NO: 224161 - DNA, 322 bp, Glycine max
ctattactcaacgtggcggacaaaaatgggctgctaacttgaatgggcattattgtcaatgctgaaggtattctgcgcttcactatccatgttcacacattattgcagcatgtggttacgtgagcttgaactactaccaatatatagatgttgttacacaaatgaacacatcttaaaagcttacttcgcacaatggtggcctcttgggaatgaaacgtctattactccttctaatgacacatggacacttatccctgaccctacttcaattcgtgcgaaggtctactcaaaatacaaggataaggaatgagatggattgggt

SEQ ID NO: 224162 - DNA, 429 bp, Glycine max
tcttatccaagctcatctggggagaggctcttatttcttggcttattccctagtggatggcgccgcctcttacctattctcctttgtcttccgctgcatctccatggtggaaaatcaccattaaaggacctcattaaatctcaaagatccagccttcatagaagctgcacaagcaagcttccatcactattgctcctacgtatcctcaatctgtgatgaggaactcagacctacgtagttcttgataactgtgagactaaaaatagtctcggtgttttcttcaccaaaatgtgaacatgctctagtaaagagacaaaactttcaactgatcagagcaacatatgctttttggatgagaaacaatgtgtctattgcggaaagagagtatgcctatgaaattttctcataaccgaaatgagattttggatg

SEQ ID NO: 224163 - DNA, 435 bp, Glycine max
tccttatagtgcgtcacgtataaaaccgagctcgatggtggtgcatgcctttgatggtactcggcgggaagtgatgggggaaatcgacattcccattcagataggcccccacacttgcaacctggtgtttcaagtaatggatataaatcgcgcctatagctgcctcttgggaagaccttggattcatgccctgggagtggtcccttcaacgcttcaccagaaattgaagttcgcagtgggtggacttttagtgatagtgtcgggtgaagaggatatgttagtgagatgcccctcctccgcaccgtacgtagaaacggcagaagaatcattggaaacggctttccaatcctttgaggtggtgagctgcgcctttgtggaaccaagtacgtcgctaccttctctctccaaagcggccataatggtggcgcgtgttat

SEQ ID NO: 224164 - DNA, 407 bp, Glycine max
ttaaccaatcgccttaacgactgtcctgaatgcatttattatagccaccaactcttattgaatattgtcctattctagataatgtacttttggaatctgaaattgttcaacacttgagatgcacgcacaaaggtaaaaattatgaagtttctctgaaaattgatattacccaggcttcttacactactagaaaaatggcattttacgacacgtgatctacgacagttatttgcggaaccgctttataaagtggtgccggggcactctctgaaatatcgtgtaaaaaattgcattttaccacgcactttctaaggcggttattgaaaaccaccttacaactctatgtttaataaaatttacccccgcgctttacgaaaaaaaccgtgttattttaataataaaaaagc

SEQ ID NO: 224165 - DNA, 405 bp, Glycine max
  unsure (1)..(405): unsure at all n locations
ttgacatagtctggaatctatgtatatatatcaanaccacttgtactaatcttattattataatacatattaattttgcggacaaaaaaaaactaattgttccaacctgtcaactcaaactaaccagtaaacacctctttaattggagacctatcatcaatttttagtttataaaatctcttcaagggacatggaaaaagttataggtaagcatatgatgaaatggtgtctatgacacaaaaagcacaaagtccagtatgaacacgtgggttatgagagggcaaagtagagaaaatataccaaaagaataaattaccttgtcacccccagcaaacataaatggaactacattttcatgcagggccaaaatccaatggataggcctgctaaacacaacctatatat

SEQ ID NO: 224166 - DNA, 429 bp, Glycine max
  unsure (1)..(429): unsure at all n locations
ntcaactttccagccgagttgtctatgaatcacctaaggaagtttattttccctattaagctttgcaactccaatttattcttacgaggagttgatggaagcttgattgtggggcttctatggaggctggatctttgagcttcaatgaagtcctttaatggtgattttccaccatggagatgcagcgcaagacaaaggagaagaggtgagaggaggcgccatccactacggaataagccatggaagaaggagcttcaccaccaagatgagccttggataagaagcttagagaggatgcttcaatggaggaaaagaaagagggagagaaagagagaggggggagcacgaaattgaaggaagaaaaaaggagagaagttgaactctgagttgtgtctcacaagactctcattcatcatagttacaacaagt

SEQ ID NO: 224167 - DNA, 476 bp, Glycine max
  unsure (1)..(476): unsure at all n locations
cttaagcactgagctgcaacttaaagaggaatctatagtctttgtttttntttttggaaggcaaagatataatatattatagaataacaagtaccagaggtactacatattacataacagggggtcctgacaattcaagagatacaacaccctacacaaatgataaccctactaacaaaaactttaactaaaagctgtagacatattcgaagaccagctataaaaaggaatctggaagttcctttcccaacccctcaaccaggtccatgagaggaacagagtgctatctgtcagcctagtgatatcaaaagtttgattctgaaaaatgatatcatttctgagcctccaaatatatattatctgctgactcttgtgtaaaattctgcataaagcactagattggtaatactctatacttctttttagggtacatgcaataatttatacttatatttctgaggtgtccatgttaaact

SEQ ID NO: 224168 - DNA, 482 bp, Glycine max
  unsure (1)..(482): unsure at all n locations
taaccaattaatgganaagtntaatgacaaaaataaaaatctttataattntaaggattaaaaaatataataaatccaaaattaatgtttgggacgtgtatggtgatcaagtatatttttatcttttaatttaatcattttacaatatgttttattaacaattaacaattaaaataaaaataaagattattttaatataattaaatttaaaataatttcttattcacagtaataattaagaataaaaattaatagataaatgtatttattactccatcctttcacttttttttagagaattgttgcttttatttatctgtcatttcaaagttcaaaagattatattaattattnttttatcaattatacccttagttatnttttatctttaatcaattcttacatgtaaatgatgtaattaccatggagtagaaagagagaggaataaaatangacactctacaactantttaattaaatca

SEQ ID NO: 224169 - DNA, 457 bp, Glycine max
  unsure (1)..(457): unsure at all n locations
agcttgagcaagattagaagaacgaggcatcttatttttaacaatgatataatgcatgatgcgacaatcaaatgtcaatgacccgacaagcaatctaccggtcatatccgcctggtcaatgcagaccatgcggcgagcatcatgactagagtaatcaaacttccagtcatcaacaagggtaccctcaaaaggttcaccttgactggggaattgtgtcaaagaaaagaaaagagactcatcaataatcataggtataccatgcaccttagaaattaaagttccatcctgaattttcaaatttgagtaaaagactcgcactaactcaagaataatatggtaatttaatgacataaaaggaatcaaaccagtgtttngaaacacttgatagcaatcaaatgtttccccatcaaaaaattcaagttcaagaatattgggatcaagaatttgacgagatgaa

SEQ ID NO: 224170 - DNA, 445 bp, Glycine max
  unsure (1)..(445): unsure at all n locations
tctatagaaggttcgttcctaatttctctacaattgcatcacctctcaatgagctggtgaagaagaatgtggcatttacctgtggtgaaaaacaagagcaagcctttgctttgctcaaagaaaagcttactaaggcacctgttctagctcttcctgacttttctaaaacttttgagctagaatgtgatgcctctggagtgggagttggagctgtattgttacaaggtgggcaccctattgcttattttagtgaaaaacttcatagtgccaccctcaactaccccacctatgataaagagncttatgccttaataagagccctccaaacttgggaacattaccttcgtttcaaggaaattgtcattcaaagtgatcatcaatcacttaagtacattagagggcacagcaagttaaacaagaggcatgcaaaatgggtagagtacct

SEQ ID NO: 224171 - DNA, 462 bp, Glycine max
aaagaatcaaccaattgctaaggatgttctattatcataggacggatgaattgacacaaatgcaatacttttgttaagggcttaggccttaaacaaagctcatgttggatgtttctgtaggtggaactatggatgctaaaaacaacagatgaagcaatcactttgatttagaatgtggcaaggaaagattctctaatcgttcatgatagaaaaactcaaggaaggcaaggaaatcaaggtaatgttccattctctaacaattaatcctaattggagaaatagtccaattttttgttggagacaagattcaagtccttaaaaaaaccatcatttcaaggaaaacaaaaacttattgtggatcgtacatccaagttggaggaaactttgaattaatttatggagggtgtttttttcacaccagaagaatgctgatgttcctataaagaatttgcgggactcaag

SEQ ID NO: 224172 - DNA, 351 bp, Glycine max
caccaataactcactccctccccctacgccgcatttgtgcatcatctcggaccctgatactaaccgcgagacaaacaaacaaggcctagggagaattttttaacctaggacatagcaacgccatctagagacaaccgagtcacttcgaaagaactatcttagggctgcacggatccatacaccactacaacttggtacagatcctcgtcactcacagaaaattgaagtttgacatcacagaaaagtgatagaccgtcccaaagggatactctcacaccacacttggaatgcccagcatttgatgaggttgtcaagctgggtgaggtgaacggcctcctgacacgaacccta

SEQ ID NO: 224173 - DNA, 435 bp, Glycine max
  unsure (1)..(435): unsure at all n locations
agctntgatgatatggtcttcaccgatgaatttattttagttgtctaanaagaggcaaatctgatcatcatgctttgatacatgccaaaaaaaactatggcaaatgaagagggtgagaatgagggagaagcccatgttgtgactgccattcctatacagccaagtttcccaccaacccaacaatgtcgttactcagccaataacaaaccttctccttacccaccgcctagttatccacaaaggcaatccctaaatcaaccacaaagtctgtctaccgcacttctaatgacgaacaccacctttagcacaaaccaaaaacaccaaccaagaaatgaattttgcagcgagaaagcctgtagaattcaccccaattccagtgtcctatgctgacttgctcccatatctacttgatagttcaatggtagccataaccct

SEQ ID NO: 224174 - DNA, 270 bp, Glycine max
tgccttattaactgcttggcttgttttccgcacacaaagtactttcgacacctactatacgttgattggacccatgctgttatgggaatgttgggacaatccttcaaaaccttattgatacattctgagaggctgggtgtcatcgtgccctatatacccccttctttatcataagccatccttcatttctcctttgaaatgccaacaatccatgtagctatggctgaactcaattcacgaaatctttctaaattgtgatcaaaaatgtgc

SEQ ID NO: 224175 - DNA, 434 bp, Glycine max
  unsure (1)..(434): unsure at all n locations
gtcacctgangctgcaagcttggaaaggtatttaacttcttttatttcaatctgctggcttagcgagcgtccgctaagcacaacactcttgtgtagaagcaaggcttcatgatgaatcaacaatgatttaatggtgttttgatgataacaatgatgacaacaaaagatgatgacaaaggtgatgaacaaaaagctcagaagaccaaagaacaactcaagtgaatcaaagaacatctcaagtgaatcaagaacaagtcaagagttcaagaatcaaggagaattcaagactcaagaagaaagtctagaatcaagaatcaagactcacgatctcaagaatcaagaccaagattcatgactcaagattcaagaatgaagaaaagacttaatcaagataagtattaaaaagttttttaacactttgaatagcacatgag

SEQ ID NO: 224176 - DNA, 472 bp, Glycine max
  unsure (1)..(472): unsure at all n locations
tgccaagcgttntaatggtccatttcagatattggagcatattgtctaagtagcttataaactccaattacccgaaggatctcacattcatcatgtttttcattgttcaattcttaaagcatttcaccaattgccaatagaagcaagctatccagtagtgttactaccaataaaagttggcaaccaacctaccatcacacctcttgcaatcctcaacacacgttgggatcactctactgttgaacctagattgatggtgctagttcaatgggcgggcctatcccctgatgacacttcttgngaagattgtgctagtttgaaagccacctatcaccttgaggacaaggtgtntttagatggcatgtgggatgataggaanggaatcatggtccaacaagataccacaggcacgaatgataggccaaaaggaaatcactccacaaaacatctagaaaatatgttgaaaaggcta

SEQ ID NO: 224177 - DNA, 454 bp, Glycine max
agcttcttagatgaatatattatatagtctttttaatttattatatagcttaatgtaatataactggcaaagtaagcagaaaaagtaggcaaaccttatacttgacctcagtcttaccaattaaccacaagtgtacttactacttacttggtagcctcgatatatccgtatcctcatgtgaaataatgtcttttctttcaccttcttttacactagaaaacaagttgagtcgagtaatgtctgtttacataataacgtgtaaatcctgcaagtgatatctcacctctccttttgtcacactattcatataataaaacctgagtattaatttgaattagctagtatctcctttaatgttgaaacgaataatcttcagacagtgatcacaggtgcaataaagtgctcatcaacatggtcattgaaattctctgagtaagagtaaaaccattatata

SEQ ID NO: 224178 - DNA, 482 bp, Glycine max
  unsure (1)..(482): unsure at all n locations
tcacctttttgagaaaggaagctattagagaaggcattatttttttaacatatactatccagagncaagctacactcaaaaagaagggctgctgcttttccaaaagcattgggctaatggtgaaccaattatagtccgtgatgtccttaaacagggaacaggtctgagctgggagccaatggtaatgtggcgagcattatgtgaaaatatggtttcagaaatcagctcaaaaatgtcagaagtgaaagccatcgattgcctagctaattgtgaggtttggtctcgctgtccctttggtgctgagtttgaacatttggtctaattagagtattatgtctctaaatttgtagtgttntccctttttcaaatccctcatctggtgtggattggctgtgatctctaatnnttttaaggatgcaaaaagaatgctatagtaactactgttctgcccagtatcattataagaaagataactaactttt

SEQ ID NO: 224179 - DNA, 462 bp, Glycine max
  unsure (1)..(462): unsure at all n locations
agcttaagcgtctctttagacccatcaatagtcttaatcttctcaggaatcctcgccataaatntggatagacctgccaattctaaatgaaaaatgtgataaatccaaaaccatgcaaatgcaatgtaaacctcaacaaacaaatgaaagtcggcgaaaacaaaatcaagaaagttatgtttacaaaaaatagaataccaacacagacttaaatgacacatgcaataacatttcgatcaatgccaacataccataaaaactatgatactattcgttgatctactaagccaatacatgcaacaacctcaaccaaaaagaaaatagtcaaatcagcaaacaacagataagcagaagcaaaaaactatatcaccaaagaaataatattgcaaccatcaacaaacaaatgagatgggccaaaaacaaacacaaaatagttttgtttacaaaaaacagaataccaac

SEQ ID NO: 224180 - DNA, 484 bp, Glycine max
  unsure (1)..(484): unsure at all n locations
ntgctgatttagttntcaccagcgaaaggatcaaagtatgttctataggaggtaaatttgattacgctgcttcgatgaattctagtgatatgaggcctgcggaaaatggagggaataagaaggagggagaaacccatgttgtggttgtcgttcctgcatggccgaatttcccattagcccaacaatatcaatactcagccaatatcagtccttctcattacccaccagcctaccagccaagaacacccaattatccataaaggccacccccaaatcagccaccaaatccacctgatgcatatgcaaggccaaacaccatccagggaaggaattttccagaatagaagtctgtagaattcaccccaattctagtgtcgtatgctaacttactcctatatctactcaataatgcaatggtagccataagcccaacaaagatttctcaacctccattacccagaggatacaaccccaatgtgacatg

SEQ ID NO: 224181 - DNA, 448 bp, Glycine max
agcttagcctattgattcctctagatgttcttttctttgtacctgtcataccctaatttcgtccggagaccattatttgttggcatccgtaaagttccgcaacattctggaagtcaaaaagagcattgttgcgcaattcgtaaagtttcgcaacaatccagaaggaaaaacaagcattgttgcgtaatccgtaaggtttcgcaacattccgaaagaaaatgggtgtcgttacataatccgtaaagttccataacgtttcgcgtacttttattttcatttcgtttgttttccgtacccccttttaacgtgctttaaccgcttatctaagccgttttctcacctaataaatgataaaatgaacttaaaccgatcgttgcattgtaatctcatttaaccaccattaaagtataatctaatcgatcgttcacactgtaaccatgattaaacc

SEQ ID NO: 224182 - DNA, 149 bp, Glycine max
atggctgatgctacgtgcaccatcataattgctcgtgcaccaagcattttagaaaaatgcgcaaaacgtccctcctggtatcttcttttctttttctaagggggttcccgtagagatttacgcctccatgcatttttcttccggctctc

SEQ ID NO: 224183 - DNA, 481 bp, Glycine max
  unsure (1)..(481): unsure at all n locations
atccttaaagtcacctgcggcatgcaagcnttggctttgtgaaaagaattttatctgttcttaccttttaaagagtatatcaccaatagcccgtgtaatagccagctgaccatttatgcgaggcacaccaccccaattttgaacttgaccaccacctgtttccaccccaatatccctgtcataattatgtcattataatttgtagctgaaaaattgaaagtttaatcacaattcataatctttctcaccgttagcctctgtgggagactaaaaatttttagagcacaagatggccttaaagtctccaatattggcaaccaaaatgttattatctgctaccaaaacaatggttgctgtagatcctaagtgaagattatttctagaggctttcttcatagttcaaatgtccttgcggcttcttggtttgcagtgccatataatcaatagcccaattataataattcccaagagtccaatacct

SEQ ID NO: 224184 - DNA, 396 bp, Glycine max
  unsure (1)..(396): unsure at all n locations
ggagtggctcattccacaaatgtgctctctgcttgatgtatatacgctgaacgacgttatccagaatgttgtggattccaccatagaagtcatgatatggancatcaataatctagaatgatgatacacaaacccggcgctatcgctctgaagtgatggaatgatcggacgacaccttgatctccttccactatttgataccatcgcggttatttcgagaatttattaccctatcacgtgtaatgagattacaccgtgcgcccgaccacatacctatctttgcctcgttcataacaagaatacagtcctagcctaagaccgaagtactgatactgactggaagagctctgtgaatgacagcactctatacataccatggagcgagctcaagcctgc

SEQ ID NO: 224185 - DNA, 464 bp, Glycine max
  unsure (1)..(464): unsure at all n locations
agcttctctgttatttccaggatgttttatttttcattccaaatttaagatacctgtgccaatttttgaagactcaacatgcaaaatacttcaaggaagtcagctagcagaattgttaaatcaaaaaaatctgataatttatgatgaagcacccatggctcacaaatttttctttcaagcacttgatcaaagtttaacagacattattaaagaaaaaaaaaatccgaatcaaatttttggaggcaaagttattgtatttggtggagatttccgacaaattctgccagtcattccaagaggaagttgttcagacattataaatgcaacaatcaactcatcatatctctggccttcctgtgaagtcttaacactcaccaagaacatgcgtttacaaggcaatgcccaatcaattgatgatcaagaaactacntaaattgcaaagtggattctagatattggagatg

SEQ ID NO: 224186 - DNA, 455 bp, Glycine max
  unsure (1)..(455): unsure at all n locations
agtgcaccctgtgcgctaagccacccaccctttcacttttatgcttagcgcacctctgtgctaagttcaaatatctttctaggtgtttcccaagcttagcgcaccttcgcgctaagcccaatttcttctctatcacctatttgggcttagcgcatcatgctcgctaagcccaattccctctttgtctcaaattaggctttgcgctttaatggtgctaaaccacccctttctcttgattccataatgcgctaaacacgacactcacggcttagcacattcatcctttctatgcacttgcactacgcgtgaccctcgtggcttagcgcttcaatcctttgtgtgtactggcgctaagcgtgaccctcgcggcttagcgccccntttntgtttagcagctttatctctttacttcatcttcatgcactactgctctttgtttgatttcagttcttatg

SEQ ID NO: 224187 - DNA, 473 bp, Glycine max
  unsure (1)..(473): unsure at all n locations
agcttggtgcagtatgaagaagaacaaaaattatactatctcccaaggtagtatctgttagtcgatcaatacgactaacttttgtgtaagaaatctgtgaaaattgtatctaactccttccgtgtatggttattttgtagtgttgtaattactttttgttaaagataggtaataaatacttagtactctcattttgtgtatttaataatcatttcctctcaatcttaggttaattaggcaagtttgtgaagtgctgattntgatttgctcgctaagccaatctgtcggcttagcgagccatccactgaacgcaacactccattcgctaagcgagaggaagaatctggaagaaggatgagttgtgcatgttcgctgagcgaggtgtcatcccgctaagtgcaccgcttgagtccatctgctgagcgagaagacgcgtgctaagtcgaaattcactaatgtgcgctaagcggtct

SEQ ID NO: 224188 - DNA, 111 bp, Glycine max
  unsure (1)..(111): unsure at all n locations
nntgtcaataagtagtgtagtttctcatgaggaggaatacttgttcttgtgggcatgtcactcggttcagaactttcttgagactcacgctgatcaccatggggggggggg

SEQ ID NO: 224189 - DNA, 481 bp, Glycine max
  unsure (1)..(481): unsure at all n locations
cgcatccttaagtcacctgcggcatgcaagctagcctatctgatgcagcagtaatgatggtcttatttatgttggggaacggttacgaacccggaatgggtttaggcaaagacaacggcggtataactagcctgataaatgccaaaggaaatcgtgggaagtatgggttaggctataagcccactcaggcagatataaagagaagcatcgcgggaaggaagagcggtagtcaaaactcgcggttgagacaagaaggtgaaggaagcccaccctgccacataagtaggagctttataagcgcgggtctgggagacgaaggtcaagtggtcgcgatatacgaagatgatgttccgagtacattggatttggtacgaccatgtcctcctgatttccagctgggaaattggcaagtgaaggaacgctccggcatttacgcanagagcataatgtaaacctttacggttntaanagctctatagtt

SEQ ID NO: 224190 - DNA, 483 bp, Glycine max
tactaagcttcacatcagaccacttccagggagctggaactacttcacatgtattttgttggggcctatgcaagttgaaagccttggaggaaagaggtatgcctatgttgttgcggatgatttctctagatttacctgggtcaactttatcagagaaaaatcagacacctttgaagtattcaaggagttgagtctaagacttcaaagagaaaaagactgtgtcatcaagagaatcaggagtgaccatggcagagaatgtgataacagcatgttcactgaattctgcacatctgaaggcatcactcatgagttctctgcagccattacaccacaacagaatggcatagttgagaggaaaaacaggactttgcaagaggctgctagggtcatgctccatgccacagaacttccctataatctctgggctgaagccatgaacacagcatgctacatccacaacagagtcacactgagaagagggac

SEQ ID NO: 224191 - DNA, 452 bp, Glycine max
agcttcaacattcaataccgagcgtctcgatattctactggactcaatcagacatccgagtaaaaagttattgtcgtttgaatttgctcacagcttcggtaatcaatttcgagcgtctcgatatattacgagactgaatcagacatccgagtaaaaagttattgtggtttgaattagcacacaacttcggtattccattttgagcaactcgatatattacgggactcaatctgacttccgagtaaaaagttattgtcgtttgaatttgctcagagcttccgtattcaatttcgagcgtttggatatattacgggtctcaatcagacatccgagtaaaaagttattgttgtttgaagttgctcacagcttcaacattcaatatcgagcgtttgatatattactggactgaatcagacaaccgagtaaaaagttattgtcgtttgaagttgctc

SEQ ID NO: 224192 - DNA, 440 bp, Glycine max
ctgagcaagcttgaacaacaataactatgggactcggatgtcttgtatttatacccgcaatatatccagacgctcgaaattgaataccaaagctctgagaaaagtcaaacgacaataagttctttactcggatgtctcgatgagtcctgtaagatatcgagacccttcgactagaatgccatagctctgagcaaattcaaatgacaataactgtttactcggatgtctgatcgagtcccgaaatatgtcgagacgctcgaaattgaagaccgaagctttgagcaaattctaacgacaataaccgtttactcagatgtctgactgaagcccgaaataatcgagacgctcgaaaatgcataccaaaggtctgagaaaactcaaaccacaataacgttgtactcggatgtcaaattgagacccgcaatatgtccagacgctcg

SEQ ID NO: 224193 - DNA, 458 bp, Glycine max
agcttaagcccaactgtagagtttaaaagccacatatggttacattatgcttgttgcgtaaatgtccgggcactcctccactcgccaatttcctagtcgaaaaccataagggcatggtcgtaccaaatctgacccactcggcgaatcatcttcgcatattgcaacgacttggccttcgtgtcctagacccacccttataaagctcctactgatgtggcagggcgagcctccttcgacttcttgtcccaatcgcgagccttgacccccgctcttccttcctgcaatgcttttccttatgtccgcttgtgtgggtttatagcctaacccaaacttcccacggtttcctttggcgcttatcaggctggttctaccgtcgttgtctttgcctaaacccattccgggcacgtaaccattccccaacatcactcgggccaccattattgccgtatcggacagac

SEQ ID NO: 224194 - DNA, 488 bp, Glycine max
  unsure (1)..(488): unsure at all n locations
ntcaagaagagttgaaattgaagtttatgagttgaatcaattattcttgtatgtaatctattacaagtaacaaaactcctgaaattcaaatagaaaagacatgacccctcattaaataattgtgtaatcgattaccagtgaggaaatttcataaataactctgaaaagtcacatcccttcatgagttttggaaaagccaccaaaggcctataaatatgtgacttgtctagaaaatcctcatagttttttagaatctcattgccttattctatccataaacaaatctctggccaaacactgtcaaatcaattaaggattcttctaagatcttcaatttgtatcatgcttctctaaaatagagaanaacttatgtgcttcatgttggatcaagtggtctcagaataattaagaaggcgggttgaattaattattaatgaccctttactaataaaaaatctatccttggtaatgttactaaattcaattag

SEQ ID NO: 224195 - DNA, 450 bp, Glycine max
  unsure (1)..(450): unsure at all n locations
agctttttctaccctaagtcattagttcaatgctgttatctttggctctaaagctcagatggccaagttacttatagtatattgctgcaagggtgatagataacttgccttgattattttctttttaaagaaaagcaaatttagttctatttgtgcaatttagcaaatttggcagtgttcataaatcctccaagggattctaattcaaatgcaaaaagaagaaaaacaggtttagaaacggagctcagaaagcaaacataattgagtgcgcagaggaacaccctgaaccaattgtgggttgtgggctgtgcacatcgatatataactgagaacttgttacaccaatatgcttggcatgagatttcctttgtgtccatgaagcatanggatataggaaccatattccacttcactatcctgcctgtatgtatgaattgaccatatttgggt

SEQ ID NO: 224196 - DNA, 461 bp, Glycine max
  unsure (1)..(461): unsure at all n locations
ggaccttgaaactcagctgngatatcgctcatgcttcgcaagatctcagagaatgtctttgaagtgaatgacttattgcaatcccaccaccgccaaaggccattgaatgactaaaataggtatttgccgaatggctctctgaggggctacctatgtaaatcatttcagaagaattatacttgctgagaacatcaactagattattcacattgaagatggtatcatcatcacagaggacaaaccagcgcacatcagagaggccaaggcaaaagctctctctgacaatgcgagaaatccggaggccagaagggtgaccaatgggattagtgtagcggaaatatgagatgtcttcagaaatcatgatagggggcaataaatcatctccaggttcttcaagcacttgttcctctaaccacacatggccacgcatgtcattangacgccaccacaatttgacatac

SEQ ID NO: 224197 - DNA, 336 bp, Glycine max
  unsure (1)..(336): unsure at all n locations
aactttgatggatgagaggcttgggagacacaactcaaagttcaacgtctcttcctttttgcttcttcaattacgagcgcccccctctctctttctctgcctctgtctctgtctccattgaagcatcctctgcaagcgtgttatacaaggctcatcttggtggagaagctgcttcttccatggcttattccctaggggatggcgcctcctctcacctattatcctttgtcttccgttgcatctccatggaggaaaatcaccattaaaggacctcattgaagctcanaggatcagcctccatagaagccgtgagcttcatcatctagcctccataga

SEQ ID NO: 224198 - DNA, 464 bp, Glycine max
  unsure (1)..(464): unsure at all n locations
tccctagcagactcattccataagaagtggtgcttttttgtttattctgcgagcggtctagcaattataccatagtctttaacaaacttcctatagtaaccagtgagacctaagaaacccctcaccccttttacagtcttaggctcaggccactccattatgcacttcactttactaggatcaacagacacaccagcagcagagatgatatggcctaaataatccacttgtgaacaaccaagactgcacttcttcttggttgccacaaaacaatgcttcaccaaaacttccagcactagttntacatggttcaaatggtcctgttcattcttgctataaacaagaatgtcatcataaaacaccagcacaaactgtctaagaaagggtctgaatatatcattcattgttgcctgaaatggtgctggagcattcatcaatccacaaggcatgaccagatattcata

SEQ ID NO: 224199 - DNA, 468 bp, Glycine max
  unsure (1)..(468): unsure at all n locations
agcttgtttaactacaatgttgggtctctttattctttcaataactagatgttntttatcatctaatgttcattntggtcagcctcatcccaaatggttataagttgagcaaaccatacgtgtattcctatgcaacattcatatcctgttattgattgttntttcatatcaataatcattgtccattgtgttgctcaactctatctcccctaccattctctctttcatccaatatgtgtttgagcgaaggtcgcttcataaaatgcccttcgaagcttgtcacactattttcttctccatgtagtctaacccaaggttggatgtgattccttaaacacatcaaaggttgagtgctttttttcaccaactctacatgtgctccctctctccactaacaagttggaaacaacaatggcaaatggattctaaatattcaaatttagtacaatggactatacttaaatgatg

SEQ ID NO: 224200 - DNA, 481 bp, Glycine max
tgagagagcccgagtagtcaaagagaagttcaagtccattttcataaagtctgaagagagtatgatgaactaagggacgtcaatatggccaccgatgaagccttggaatgagaaaccaagaaggcccgaaaggaagaacacgaccaaaacaagttttgaggggctttatagggcaataatagtgagctcaaactccgaagaggtgaaaggagtcatcacgggtcaaaggcatgatctggaaggacgagctaaaggcttgccttatgtcgaaaagaaatttgtcccaacagttaaagtgagactgaagggactatgtgggccatcatcgatgagtgcaaagagaagataaatctagcggcgactcacgagcaaaggctagaggatgagtacgccaagatatcagcaggaagcgaagcaagggagagggtaattgattcatggcaccaagaggcaacaatgtggacgggaccgattgtcttac

SEQ ID NO: 224201 - DNA, 243 bp, Glycine max
  unsure (1)..(243): unsure at all n locations
ccccccccnctcccgggtcccgcggtgccccctccccccccccccccgccggnatgagacctgacacgcaccnaancacgagcagcaccgaagaaaaaaaacatttatcaccacgcagaaagacaggcgaaaaaaccaccccacaggaaaagcaggcgcaacacacacacgacaagaaaggccagcccggcggaacgcaagcccagaaaaaaaaccaaccggaggggagcaggaggcaaaccc

SEQ ID NO: 224202 - DNA, 465 bp, Glycine max
  unsure (1)..(465): unsure at all n locations
agcttataagaacaaaatagcctcaatcatttccaaatatgcatgtgaattangacgcatcaacaagaatcaagccaaggctattgtgcaagcaatcaatggggaaaaacacaccaaatgattatgatgatggatggctcaaattctcacaaagctaaactcatcactttcaaattgagctttcaaaactatcatgacatgtagagaagaatcaaggatttcaagtcacaaaatgtcaagaacttttattttcaaaacaattacccatttcttgaacatatcctataattcaaagaaaaacatgcaaattcgtacgtgcacacaaaattgacccaaaatattaaactgaaaatccgacgaaactaacaacattaacaaattaacacaactaacaaattaacaaaaccaacaaaactagcanaaccaaagaacactcccccccctcccatacttaaacaacacatt

SEQ ID NO: 224203 - DNA, 475 bp, Glycine max
  unsure (1)..(475): unsure at all n locations
tgagctcactgttgctgccccacaatgctccacgaaattttcttggccatgctcttccttgcgagccctcttggtttcttgttcaagggcttttgtggtagctgcattttcttctcgtaacccgacacactctttccggacgtctgtagcgaccaacttgaatttttctttggcaagtctcgcttttcctagttcagttttcagagctcggacttcttcatcctcttccggagcttcgaaattctcttcgttgataatctttaacttggcgagccaatctaaaccccgtgtacgaactttcagccattcatgataaccaccaatgatgccattacgaatgcccctaagttctttatctttccttaacgggctntcccacgccttatggacactttgtataaccttgaaattntgcacgccaaaatctctcacaaggaaaggagacaggctntctttcgtcggagctcccctcatg

SEQ ID NO: 224204 - DNA, 465 bp, Glycine max
  unsure (1)..(465): unsure at all n locations
agctttctgcggagcaacgccagagaagccatggtggttggttggtatgtgtgagtcgcggaatggaaaggaaggagtgagtaataatatgaatgcgtgccatgatcgggcactcataggggtagttntgtccaatccagaagtgctgaaccgataagtgtgctgtgctgtaatggagtgggacgaaggattacgggatatggatgaatgacactttggtcagcttagtaagcatctacagtcaacgccttcatctttttgctttttattattttttttttttcaaccaccttaaccaaaggatctttggttttcaatggtacctgtaataattccacaagcttagaaaaaaatntattctttaaaagttcactcatcaaagagttataactgatattggtcctatttttctatttcatgccttataaatactcctatattctatcggagaatccaattaaatat

SEQ ID NO: 224205 - DNA, 395 bp, Glycine max
  unsure (1)..(395): unsure at all n locations
aactcagcttcttacagaagcatcaaacctcaactcaacagggctttgatcatcttatatcncttggccaacagactcagtcttctcattggacttcttctctggaacatgagaaatgaatgtatcataaattgtattgctataaacaaacttttcctgtgcaaggtcggtggcagatgagttgaatgcaactggatggtataacaaaaaagattttggtttcgaagaaccaacccaggtttcctctccatcctcggcaagggagactacatgatcatcaaggtgtgcagggccataagctgaatcagcgatctcaccaaccacctgcatgacttctttgtatttgaggccaagctctgcttctactgataattcatctctttcaaatatgagta

SEQ ID NO: 224206 - DNA, 425 bp, Glycine max
agcttcatccatatactcgggaggatctttttttactcctgttcataaaggtatggattaacaattgtatttaaagttatttccccaattaagtaaacaatgtaggttctgtatgatacttttgtcataaagatctcccttctaataagttaatcttttgggatgaacttattataggcttaaggaaccagaatcgtccaaagtaaaagtctccctatgtgggcacctagagtgtgacgtcataagttgcaacttttgagggtgttagactgttaggacagcaaggtaaaagaatattttcttgaaagactaaagggcagtcaaagtagttagcaacagttatggctgtcactgccagtgcgttaaaggaggtttcagtagataaataacaggaaacaaggatagaatggactatggaggcattc

SEQ ID NO: 224207 - DNA, 427 bp, Glycine max
acctcctcctgaattggcccttaatgtcatctatcctctgaaaccgtggaatctcacttcatgatattgcgtatcgagaggcataatccattcgtactcattgaggctataaaccatctatgcatctacataaatctatgctgcttggattgactgctttttatccatgcgcttgtacgtgaacgacaatcattcatcctgctttctttaggatatctcattatgggcccgcagtcctcaaacgctgaggggtatgaactctacaaccgataatggtggtgatgttcttataatatcaggtgcatctctggaaccgacaatatatgcgtattactgtagggcatacatagtctcttcctaactatgcttccacaatagattgctcataaagtttatgcagttacatgacgccactcgataactacct

SEQ ID NO: 224208 - DNA, 440 bp, Glycine max
  unsure (1)..(440): unsure at all n locations
agcttgaagttgcaatagtgctaatgtttctttttntacatactccatattgtggacaattaacttgggtttctacctttgtgatcatttagtttaatgtgctaagttgtttcaagtttggtctttggcaagtgtgtacaaagttagtacctatcactttctatattttttggtgttcagacctcactatgaagactaaaagtttcaagtctttaatatgttactttttaaatatttttggaggtagatgttgaaggtacttacgtctggccttgtgggagagctcattttcttgaaggctatgtcagtttttagtaaaaggctatgtcagtttgtaacagtgttactttattgctatgacaaatgttgtctttgagagcggtgatgctcacacaatacttacaaacaaagtatcaatatatcgtgtatggaacgacact

SEQ ID NO: 224209 - DNA, 348 bp, Glycine max
cgcacttgagaagagaaaggggcctatgctttacttgagatgacaagttttcccctagccatcgttgtcctaataagcaatattttgttccacagtgggaagaagaggatgaacctgcattacaaccagatccaccatacgaggttgagacagctggtgaccctagtttgcaagatcatcatttgtcttataatgctttaaaaggctcatcaagtcttggaacaatgaagtttcaaggatcaataaatggattgggagtgcagattctactagataatgagagttcagataattttctgcagcctagactatctcaatgcctgaagttacctatagaaccaattccta

SEQ ID NO: 224210 - DNA, 469 bp, Glycine max
  unsure (1)..(469): unsure at all n locations
agctnganatgaggaggtgtagaacggtgatactttctgcttttattcgttgaccacagagtggtacctggagatatgtcgcggaggtcaagagaccttgnggacgtcaggtggggtgctattgcccacaaccaagcttgaccaatcccgacccaactcgggcatagttagttagtgagaacctttgatgtacctaaacaggcgagctcttggcagtcaacagataaaaggaacaaagaccacaaagcaaggaggcttgtgtggtggctggccagctgtgaactttgattgatatatgggatatggcctctggtaatcgattaccaagggtggtaatcgattacaaggcttaaaaatgaagacaggagactaagatggtctctggtaatcgattaccaaggggtgtaatcgattaccaggcttaaaaacaagaataggaagctaatanggcttctggtaatcgattacc

SEQ ID NO: 224211 - DNA, 480 bp, Glycine max
  unsure (1)..(480): unsure at all n locations
nggaatgagggttgtcgatcatgagtggattatggttggagtgctatctatagtaggaaacgtggaacatatggatggagaagttgaagttaaagctccgcaagagcctgtcaatcaatggattctatttgagtctctcatgatttagaagatggataccatgcctcacctccatcaagatggagaacattgctacttggctggaaaacatagaaacaaggttgatcattagcaacctccttaaccccaatgaggatgaagcttagtcttttttaagtgcttgtttctgttgcttgcttggtctgatctacttatattctgtttgtttctatttggctctatgtgtttaaaagttacgatataatttagtagtttgatggttcagttgtacaagttttatatgaatgaaatgctatggctctntccttcagatctttgttaaaatgatttgtgatactacaactgtgtgccttataacac

SEQ ID NO: 224212 - DNA, 464 bp, Glycine max
  unsure (1)..(464): unsure at all n locations
cttaatcaccgccgctgcagctttgagtttctggttgaaactatttcttttttataaaacaaaagtgtgctatgcatctttttcattctcttctcccttagccaaaagaattcgccaaggactaaccgcctgaattctttttgtgtctctcttctcccttttccaaaagaacaaaggactaaccgcctgaattcttttgtgtctcccttttcccntttcaaagaattcaaaatgacacagtctgagaattctttagattcttcccttccccttaaacaaaagatttcaaaggactaaccgcttgagaattcttttgtctcccctctacaaagtttcaaaggactaaccgcctgagaactcngtcttaacacattagaaggtacattctttgtgatacaagtaaagggtacatctacttgagttgttgtgactgagaacaagagagggttcatctcttgtggatc

SEQ ID NO: 224213 - DNA, 460 bp, Glycine max
  unsure (1)..(460): unsure at all n locations
agctntgatatcgaaataaggttgaatgtgtttgtttgtatgtaaagaacatcgtgtaaggttatgttggacgagagctggacagttcttgagtgagttgcatgaacatattgaacgttcgggagtttcactgtgattggattgattcgtttatgggaatgaagattgtgcagggagcaggttacgtgatctgtagcccctgaatctaatatccaggaggtgagagacgctttgaaagaaagagacatacctgggtttgttggagtattgtcgatgcatgatgagattgaagccacctgtctgggttgagtgagtgccgtgttccctgcggatggctcctggattaaggcaagaagtgccttgtactgctcaggggagaagcgaacaaactcatgagactcgtgatgctgagcttgatcatcagtggctttgctttcaactgccactacgttgttcacgg

SEQ ID NO: 224214 - DNA, 481 bp, Glycine max
tccttgagaaggttcctagagaagctagagcttagctacacaaacttcttaatagctaagctcacctccttgagatgagaagctagagattagctacacaccttctataatagctaagctcacccccatgacaaaatacatgaaaatacaaataagttgctactacaaagactactcaaaatgccctgaaatacaaggctaaaatcctatactactagaatggccagatacaaggcccaaaagaaggaaaaatctattctaatatttacaaagaagaggggatccaaccttggcccatggggtcaaaaatctaccctgaggttcatgagaaccctaaggccttctttatgaaccctagcccaatcctctcggattcttctatccaatacccttggtgggtaggattgcatcacgttggatgttggtggcacgtgcttcttccatatctttgatatatataggatctgtgccattacatact

SEQ ID NO: 224215 - DNA, 466 bp, Glycine max
  unsure (1)..(466): unsure at all n locations
agcttatgcgcatatttccttacatacgttctcttgcacaagacatttaaccgaaaaagtgcacccatatacaatcaaggcagcttcattacctagattatttacacgtactgccaaggtgtatttgttacttacatcacacgcatctccttggctgaatttgcatacatgcatactcaaagcattttggggtaccaaaaattgcacatgtgcacatcttggtatttctaatacctatatatacacaaacttcatgatgaatcttgactatcttcacaaaaaggtgctacacttcatcccttttttcaagtttttgctacctaaagccgcatgcaaattcaagcatattttcctttngcggactaaaatgtattcaaattaaaaggtatatnttttgtaatatgttttcttcatgcaacatattntatatatatatattttttttttgcgagacatnttgactacc

SEQ ID NO: 224216 - DNA, 500 bp, Glycine max
  unsure (1)..(500): unsure at all n locations
tatgaaactcaagctgaggattatggngtacccatcacatgtggtactaggtggcggtcggtcgatggtgcacaacaagttttccacatccacaatgcgcgcataaacccaccatcccctgttgcccacctccaactgagctcacgtactcccacgtagcccatatcctcgtttctctcaacaccgggtccccatcaatcctcccaagcttccccaacatcaaagtaatacaacattcacacagcataagctatcacagccaagtaaaacagggcaaaggcagaaaactctgctcaaaacaccaaccaaaatcacagcttttctcacttaaagaccccagtaacaattccttcgatccaattcgttaaccgtttgatcgactctcaaaatttactggaagtctatagtacatatgcctacagtttgaccgttgggatctactagaagacattcagaactcattctgtactactctttcgacaaccaatcacacacaagca

SEQ ID NO: 224217 - DNA, 476 bp, Glycine max
  unsure (1)..(476): unsure at all n locations
acctgcagctgcaagcttcctcaaaaaatatgagggcgccgttgctctcaacaaaaggatgggattttcattagtcgtggctcacactttcatcttttggggtttctgaccagcctccaccacaatgctcctgagaaacatcaaattgcactctgcctcatcctcctccttgttggtttgttcttcaacaaccaccatgtttgtctcacctttctcacttcctcctcgtcaagaaatatgacatgcaattgacgatctcaatattggtggttaggatggaatggattaccacatttgtaacacaagcccttcctcttacgtttagacaattccttatatgaaagatggatctgtgtgtgtgacccgacccatacacaatatgaggacttgatgggccggttgtgtgtttggcccactttattgcttcctcccacccncatcgagcagaaaccagaccaacctccttttctctcctg

SEQ ID NO: 224218 - DNA, 369 bp, Glycine max
ctggagtaggattgagaatccgatatgttttctataatctctgaagactttgtgtattacggaagagtgatgagaacgctaccatgatgaagatagatggtgagccaatgcctgaagctattatcgtcgaatccatacatgcacagtctgaacaagagataaagagagcttaaatggaggaactagagagacttcaatctatagaagaacatgcaactcagattttttctttggatgttactcaacagcaagtagagatggaagctaccactattcctaagagacatggatcttgtataataaagagctcttgagcaagccatgcttcgatcacttatgtgagtatttcttgtagaagccggtgatgat

SEQ ID NO: 224219 - DNA, 464 bp, Glycine max
  unsure (1)..(464): unsure at all n locations
agctnttcgattcattctatgtacccgtagttttcttattgngtctcgagcatttttattctcgttttgtttactttttatacccccctgttgacgtgcttaagccattntactctaagtcatttctcgcttaacttaaaaataaaataaatttccaccgaacgtttgaattgtattatccattaacttcggttaaaataaattccgaccgttcggtcgtgccgtaaccacgttggaaatcaaaaagaggtaaaaaataatataataatcaaaaagacatcttttagtaaaataaagcggaaaatcaatcggacgttntctctttgggatttctcattcttaatcgaattgattaataactaaagtgaaactaaaggctaaaatcaattcgcctagtcaagctcgtccataaaaataggttntagaagttggcatctcattctctcactaagtaaaatggatca

SEQ ID NO: 224220 - DNA, 415 bp, Glycine max
tcaggcctgttatgtgcgccgaatcgaatacgaggagaagtatttcatttgaatttctcgagagcttcctatgtttaatttggagcgtctcgatatattatacgcctgaatcgaacctcagcgtaaaaagttatgaccatttgaatttctttagagcatccgatgttcattctcgagcgtctctatatgtgatgaaccttaatcggacctccgtgtgaaaagttatgaccatttgaatttctcgagagcttacgttgttcaatttcgagcgtctcgacatattatgcgcccgaatcggacatccatgggaaaagctatgactatttgaatttctcgagagcttccgttgttcaatttcgagcgtctgaacatactatgcgcccgaatcggacatccatgggaaaagctatgacca

SEQ ID NO: 224221 - DNA, 469 bp, Glycine max
  unsure (1)..(469): unsure at all n locations
agctggcttaagaagattcctaaagaagctttatcttatctacacacacctctctaatagctaagctcacctccttgagatgagaagctagagcttagctacacacaccctataataggtaagctcacccgtatgccaaaaacatgaaaatacaaaaaaaaaagtccttactacaacgactactcaaaataccccgaaatacaaggctaaaaccctgtactactagaatggccaaaatacaaggcccagatgaaggaaaaacctattctaatatttacaaagaagagtggatccaaccttgacccatgggctaaaaaatctacagcttcatgagaaccctagggccttctttagtagctctggggcctcttagagtcttctatccaatacccttagggggtaggattgcatcatcctctgcaccttgganaggattngacctcaaatcccgagggtcttcatactctgg

SEQ ID NO: 224222 - DNA, 490 bp, Glycine max
  unsure (1)..(490): unsure at all n locations
ctataaaactcagcttttatccaaacactctcttggtggtgaagcttattctttcatggcttactccctagtggatggcgcctcctctcacctcttctcttctatcttctgctacaactccatggcataaaatcaccattgaagctcanagatccagcctccatagaagcttctcaagcaagcttccatcatgttgttntattgtttttattgtttttacatacagaaaatagaaaaataaataaatgaatacatattttatagctggtggtttctaatgtttttcataagatttctaacctgtataatttgtgagagatgtatcatttntagttgaaaggtttcatgctngatgtngaaccattgtgcaatggtggaagaaataagtaggcttgaaaattntgaggtggatcatgtgtcataaaattatgccttgtgaagttntgggattctgtggatggaatgcattattccattcatgctctttcat

SEQ ID NO: 224223 - DNA, 373 bp, Glycine max
  unsure (1)..(373): unsure at all n locations
tgttggcagaaatcgtggtgacgaaagacagganaccgtatgcttcacactccaagaggcaccacaatgcggtgacataaacgagcactgcaaccgctccacgccaattcatacacaacaccacatcagcaactaaccctttgccgagaacgtgatgaaaggatgagaaactaacacactgacaagattgttataataatgaagaatgaagggtttacaatcatcaatgacagtcctgaccatcggagaaaaaaaagaaccaaccatacatccgagaggcattcgaaagggccccttagaaaatattcataatgtggtggcctgcccagctatatgagagcttcaatcataatgacattcatggtcatgagag

SEQ ID NO: 224224 - DNA, 452 bp, Glycine max
agcttctacaaaaataagaatacaaatatcctttttataccctatctgctatagggaacttatcattatattaacctttgcatctagatttccaagttctactgcttctgtacaaccatcaacaagagcattgaaaagttcaatctgtgctccaggtggagctgccccaacagcaccaccaacctcagcagcaattaagtcgatttggctctcattgccatatttcaaaacctggcaaattaattggggatgaacataaagcagcaaacatttatttactgctcaagaaaataacaaaatgaagaatatacaagacatacatgcacaaacaacacacacaaaaatgataagcacaaaactagaatagcttcaagaacaataaaaagaaacggtattcattaactcaagggagctctaaatgcaatgccaacacagtacacacacactggctg

SEQ ID NO: 224225 - DNA, 314 bp, Glycine max
  unsure (1)..(314): unsure at all n locations
tgcagttntgaagaccggcgttccgctagaaggggcacgagtgattcattcttctatatcacatatatatagaatagaatgatgactttacaacgtcaacgcgaaagtaactctattcatgcaaactttgtgtacaaacaataatataaagcgtgacatgagggcatcggttttatgtcgcgtacactaagctaccacgagcatcgatcattattccttggctcacatgatacggttatcgatttatcattntattactgatggcaataccaatatccttgcataagcacgacgacatgacgcctggcagcatg

SEQ ID NO: 224226 - DNA, 468 bp, Glycine max
  unsure (1)..(468): unsure at all n locations
agcttatgtgcaaacatatgcaatatanatttagtttgcacaagtaaagaatccaaggtacattgccttataccaactagcatcaagaaccatttgctaaactctacattgttagttacaactgaacccataaaaagctaattatcaacttcaagcatttgcacatggaagtagaggcttgtgactctctcttgaatatttgattggcatcagagctggatcattatatgctttgaccaacttatcataaaattcaggcatgttaggctcattnttgtcttgtctatccttcttgatgaagcaatgcaggaaaagtagtttcattagaatgcagaaagggaaaatgaanagggaaacaactcataattgaaaaaaaaagttcattctgtaactgttagatgcaagtgaattgtgggaatgaattcctttatgtatcttggcaaaagatcaactgaacaattcaggatg

SEQ ID NO: 224227 - DNA, 480 bp, Glycine max
  unsure (1)..(480): unsure at all n locations
cgtcgaatagttacaatttccatatttatccagaggttttgttgtttgatttaaaaaaaaattccgcgttttttgaatggtttgaaatgatcgattgcatgatttgagcgaagcgtaatgcgtagatcatatgctttgaatgagcatgcacaaattagaagagaaagaacatggattaggatcatgactgaaaatgttagttagtttgacagattgattgtgaaggtactcattaaccacaacccagtgagtgtgtgatctttaattttgagagaacgactaacattgagtaatgatatttgcatgaatctctgattatggaatgagtgcatcagcttgaagatgatgaaggccatagctgattgaaatggctacttagccgaanagcttaccttgtgaatgaatgatatatcccttgcacccatgttgagttgaaaatctgattgcttgattggaacctcgagcctatgaaattatatc

SEQ ID NO: 224228 - DNA, 423 bp, Glycine max
  unsure (1)..(423): unsure at all n locations
agcttatattacacagaagcaattttttattatatcncactntatatgattaggcactttcaacaagataggtaatattggcttacgtgcacctttaccattgcctatgttaataggattacgaaaagcatggcatgcatcttaaccagatgtttaaagtaattaatgataactcgataaacaagaagcagaatcttagctatgaaaccagtctcaacaaataaaaggcaaaccaattcaatcccacaaatagttaagctgttacaacaaaattcatttgacttctaaatctaaaaactatcacaaccatttacatcacaatatcttcctaggtcagacagttcaatctgtttcttattggaaaatatcatctaaatttaatccacaattctgactagccaaaagataggcattacgcacact

SEQ ID NO: 224229 - DNA, 445 bp, Glycine max
agcttggaggggttgatggcgaccctatgtttataggaatgaggataaaggctacgtgggagtgcgtgagctcaatttgaaaatgggcaactggggatggtacgttaatgtttgatttttggaagtgggagagttgatttgcgccatttcctgattgccacctagtaccacatatgacgggtaccccataatccaacaagcttgatgtgagaaagcgtggaagagtcagtcttcctacttttgtttgttgaccatagagtggtacctggagatatgtcgcgggggttaggagaccttatggacgtcaggtggggtgctattgcccaaaaccaagcttggctaatctcgacccaacccgggcatagtcaatcagtgagaacctgtgacgtacctaaacaggcgagctcctggcagtcaaccaataaaagaacaaagaccacatagc

SEQ ID NO: 224230 - DNA, 488 bp, Glycine max
  unsure (1)..(488): unsure at all n locations
tataaaactaagctgctacccaggaactctaatatcttccacctnttgttgtgggccattcttggatggccgcgattttctcagggtccatttggaccccatttctaccaactacaaaacctaagaaaactatattatctacacaaaaggtacacttctctatatttgcatagagggtgtttttcctaaggactgaaagaacttttctgagatgtcctaagtgatcatctaggctcctactatacactaaaatatcatcaaaataatcaactacaaatctacctatgaaatcccttaagacatgatgcataagcctcataaaggtgcttggtgcattagtgagcccaaaaggcatcactagccattcatacaaaccanactnggtcttgaaagcagatntccactcatcaccctttttcatcctgatttggtgataaccacttttaagatcaacttttgaaaagatattgcaccatgcaactcatcaa

SEQ ID NO: 224231 - DNA, 467 bp, Glycine max
  unsure (1)..(467): unsure at all n locations
agcttgctctanattacatagatgttagtatttatgggaggaggttatatgccatttttgctttaagagtaatgtcccactggtaaaactaactttccaaatgtttgccttcacgggaatggccccgaggaagcttgcctcaaagaggtccaggaaggacaaggcggccgaaggaactagttccgccccggagtacgacagtcaccgctttaggagcgttgtacaccagcagcgcttcgaagccatcaagggatggtcgtttctccgggagcgacgcgtccagctcagggacgacgagtatacatattttcaagaggaaatagggcgccggcggtgggcaccactggttactcctatggccaagtttgatccacaaatagtccttgaattntatgccaatgcttggccaacagaggagggcgtgcgtgacatgagatcctgtgttaggggtcagtggatccccgttg

SEQ ID NO: 224232 - DNA, 492 bp, Glycine max
  unsure (1)..(492): unsure at all n locations
actcagcttgagttgcctgacaaacaaggaatagatacctcacccatatttttgctatagcttgacagaatctcactatataaaaaatatgtgattctagccacaacgaanataattctagccatggtgaaataaggtcctgagacctcactcgaatgttagatgcaatgaaaatgaatttaaccaggcgaaacaaggtctgcagaaatcatgactttctactattattacccttctattaagttccaatccatatccaactcagatctttcatttccaaacatgaatatcgagataatacactattaataatctaaaacaatgatccaacatatcaaacataatatgaaagtaagtttaaagctttccttacctgtcaaactcaaggaacctactntaagatgaagaaaaggaagaaaggaaggaactntgtgtccagatgcaagcttttcttcaccttatagcagtctacatcatccgcaccaccttaac

SEQ ID NO: 224233 - DNA, 472 bp, Glycine max
agcttggtgtactttgtttgtgcaaagactaatgattgatatggacatctaactgcacacatgaatatagcattcataaattgaactgaactgaaaccggaatatattcatcattaaagaaggattcagcagtaaccaaatacctcatcagtgtcttcattcaagctacggagataatcaactaacttagccatgcgactactacgggaacttttgctattgctaccattgtcactgccatgccgtgtgtgactcctaaaaccacccccttcccaagttaatttttgaggttttgacaccggtctaaaagaaattcttatatccatgtcactttctatgcatccaccatcaggactagtctgtgatgatgagggctgagaaggactacctctggtctgcctctttcaccttctctgcctgagttctgtacatcgctcatctgtagaagatgagtccttttcattattgtcat

SEQ ID NO: 224234 - DNA, 469 bp, Glycine max
agctagaaggcaaactggatgcgttggttaacttggtaacacaactggccttgaatcagaaatctgtacctgtcacaagggtttgtggtttgtgctcctctgctgaccaccacacagacctttgcccttccatgcagcaacctggagcaattgagcagcctgaagcttatgctgcaaatatttacaatagtcctcctcaacctcagcaggaaaatcaaccacagcagagcaattatgacctttccagcaacagatacaaccctggatggaggaatcaccctaacctcagatggtccagccctcagcaacaacaacagcagcctgctccttccttccaaaatgctgctggcccaagcagaccatacattcctccaccaatccaacaacagcaacaaccccagaaacagccaacagttgaggcccttccacaaccttctctcgaagaacttgtgaggcatatgactatgca

SEQ ID NO: 224235 - DNA, 482 bp, Glycine max
  unsure (1)..(482): unsure at all n locations
gatactcagcttaggctgctcaatngctccaggttgctgcatagaagggcaattgtcttgttggtggtcggcaaaagagcataaaccatagactcttgcaacaggtatagatttttgattcaaggccagctgggttaccaggttaaccaaggcatctagtttaccttcaagcttcttagtttcagctgatgaagattgtcataccctaatttcgtccggggacctttgctagatgacatgcgacctttctttggtccttgtgaggtgcttggcacccatcattaggctatctgtgaaattccaggacatgccggaaaaccaaaaaatattgatgcacaatccgtaagtttccgtgacacaccggaaatcaaatggaagcatcgttgcataattaagtgagattccgtaacattccgtaagtcatataggggatgattatgtaatccgcaagggtccgtaacattacggaaagaaaacaagta

SEQ ID NO: 224236 - DNA, 463 bp, Glycine max
  unsure (1)..(463): unsure at all n locations
agctntgtcctcggatccctcttgttggactaaacttagaccaaacaacattattgtaacaacatttttaaaaccaaaacttaatccgcagatccctcatttaagactaagtttcaatcctgcttcattcaagttctaaggcaacaatacattttccaatgctaaagtcacctaaccatgcacataaatggttgatcaaaccaagagcatacaaaatttaagcattgaacacaagaaacacaatcaattagatattaaggtaattacattagttgttctttagaaatccccaacaatggtgtttagccagctattacagaaaaaaccctaacaataatgagattaagagtagagaataactgctccttacacaagaagggggatccctcctcctcttctcagcattgcacaatcactctacaactcactaatctctctctaattccaaaacttaggtatctct

SEQ ID NO: 224237 - DNA, 485 bp, Glycine max
tgtagccattagaaaaaaaagaacatgtgattagaagtatgtcttttttatgttagttagtttgtcaaattgattgtgaaggaatgcattgaccgtatcctggtgagagtgtgatccttaaattttgagagaaacgactatcatttagtactgatttttgcataaatctctgaagtatggattgaatgcaagaattgaggatgatgaaggccatgtttgattgtgatagccacttagccaaaaagctgaccacgtgcttgaatgatttatctcttgcacccagtttgagctaaatgaattattgattgattgaaccttgagcctatacagtgttatctcttgataccttttcttagggtgtaggagagcatcatccataaaaatcttggtaaaaacaaatttggtcgtaaattgcgggagttatatgttaacagcaatttgtcccagaattgggggagacattgggtaaagaaataaaatggtca

SEQ ID NO: 224238 - DNA, 492 bp, Glycine max
  unsure (1)..(492): unsure at all n locations
ctaagcttagaccaggcaactcanaatctaggtatctaaaaccccttattntattggatttcaaggtttaagaagtgaaaatgagaatggggtaaatttggagcaaactctcacctcacacaagtctataacattaatctaaacttgctcaaactggttttacacctaaaattccaccgaatcaaaatttgactcctcaacacccaattttaccctagaaatgacccttgttttcactttggtcactcatactcctcatttgcacagtctaagctttctcttaagtcctaaatgacatttcaaactaggattaactcactttaacccccaattaccactgaatccagatttagccttccaactctcaaagcctcactctntgtccactcataacaccacattctcactttctaaccctaggttaactctacccttcatctctagcagttttccataatcaatttcagcacacaaacatcacaagcatcatca

SEQ ID NO: 224239 - DNA, 448 bp, Glycine max
  unsure (1)..(448): unsure at all n locations
agcttccnccataactctagagaccanttancttatctctcaactctaccattagaaatatatcatgtgcaaaaagcatgcactgggtcacaagctcctaggtatgatgaataagaacattcaaaaccaatataaaaggaataaggcacagggttaaccattggtataaacctatagttatagggaaatcctccatggccacaccatgtgtgtgtgcatgttggtttaacctcatcatacatatcattggcgacatatggtctgaatgtaagcaactcgaactcccctattctcccatgccttccacaagacttcctatcataaatcttttctaagtcaatggcaaacatgtttagatcttttaatttcctccaatgtctttgcacccaatccctcgaaaggtatatcaactccataggtgacatctcatgcataatttcaaattggt

SEQ ID NO: 224240 - DNA, 381 bp, Glycine max
  unsure (1)..(381): unsure at all n locations
tctaagaaactggactcggcaattagacgcgatacgtccattgttctcaatcttgaagataactctacagtatcttgaagtttatcccacttgggtcagctggacaaacacagtcattctaaacatttcagcgtcactggcactgtattctcttgttgttatctaccatgtgttttctaaagagctggaaccacataagcctcttgccaagctattatgcataacagggattgtctttttctgcttctggcacgtattttcctatgctttaccttgatcctttgaaccattgcagatagacaattatataattttgcttctgcagaatttgaatggtgctattaanagtcagtatctttcagatgagagatactgcatttt

SEQ ID NO: 224241 - DNA, 291 bp, Glycine max
ttgaaagcaaagagaaaaaacgtgacaaacctctgaaagctgatgtgtatctacttgatgacaaaccttgcaaaggtgatgtgtatctactccctctgcttctgtatctctcaaagaagctcttggcttggcaaatacatgcaccctggcaaagcatgctacattaatcatcagacaagcggaactctcaatgaacgtcgctgacatgtatgccacattaagacttacaaaagaagtcccttattatcgattcttgcggcggctataaaaaccctgctagcagtcttctaa

SEQ ID NO: 224242 - DNA, 428 bp, Glycine max
  unsure (1)..(428): unsure at all n locations
cttggtttattaattgggttgaataaggcgcgtaattttcttttatcccatgtntcatctgtattcttcaaagtctgatatatacagtaaatgattcttttttagaatatgtctgtaaaggctaatgatcttaaacttatttatctttacattatgatatacttttttttgtgagaaattattctattatatatatatttatcgatagtttttcaactgttaattaagtttaattttaaactataaattagtttcctgcaagttacaccaaatatagtctaagaaagttcacaggaaaaaactctcccacgtgattattttccaaataagcccatcacttttctctatggtaaatatataccaccatgactgttgatactcaccatagagatatatataattcctacacgcttattacaaattatgac

SEQ ID NO: 224243 - DNA, 452 bp, Glycine max
  unsure (1)..(452): unsure at all n locations
agctnttcaatacaaaagttagtcgtatattattactaacacttgcacagggctaacccatgcactgtcagagataggataaatgaggcctgcttctagcaatttaagcatttcctttcgcatttcttccttcataacaggattcaatcttctttgcggctgtcttacaggcttgtattcggcttccatattgatcttatgcgtgcagtaggaagggttgtagaagcaagcttcatgatgatgaaccaagcaattttgatgatgccaaaagcccaagtgattgattcaagacttcaagatcaagcatcaagaatccaatccaagattcaagattcaagagaagaaataaagaagcaacaagtcaagacttcatatacgataagtattaaaagatcttttcaaaaaccaaatagcacagttntgttctacaaaagaaatttctcaaatcttct

SEQ ID NO: 224244 - DNA, 452 bp, Glycine max
  unsure (1)..(452): unsure at all n locations
ntctaaagttntatggttntccaaaccttgaaaacttaacttgttattcatctttttcattctcttctccttttgccaaaaagaattcgccaaggactaaccgcctgaattccttttgtgtctcttttctcccttttccaaaagaacaaaggactaaccgcctgaattcttttgtgtttcccttctcacttgtcaaagaattcaaaacaacacagtctgagaattcttttgattcttccctttcccatatacaaaagatttcaaaggactaaccgcctgagaattcttttgtatccccattcacaaagtttcaaaggtttaaccgcctgagaactttgtcataacacattggagggtacatcctttgtggtacaagtagagggtacatctacttgggttgttgactgagaacaagagagggtacatctcttgtggatcagttctagtggagg

SEQ ID NO: 224245 - DNA, 452 bp, Glycine max
  unsure (1)..(452): unsure at all n locations
agctngcatgaataacatctccctctntctcaagtttattcttcttgatatcatcaaaatcttcatgatttacaaaaaggtacgttttattgcattactttccttaattttttaaatagtgatcaaggggttcccatggaccctaagagaataaaggacattcctgattggcccactccaccaagtataagggaaatctggggctgccatgacttaacaaacttttgcaaaaggtttgtcccatatttttctatacttgtagcaccactcattgagttggagaggaaccatgttccctcatgggaagatgtccatgaaaagggttntcagaccttaccctactctaacatatccaacaccactaatacantatgttttattctttntataggtgtcgagggaaggagcccanagtatgaagaacctcgggattngaggtcaaatcctttcca

SEQ ID NO: 224246 - DNA, 447 bp, Glycine max
  unsure (1)..(447): unsure at all n locations
aggacctataaaactcagcttggttatacagaactaccgaggagctgntgttttgtttttgttagnnannnngtttggaaggcccggtttactttctgtgtgcgataaaacctgcgagcgagttttattatccttgaatgatattactacgtgatataattgtcactagacaataatttagctacaaagaatcatcctttaagttgtatttgagaaatcgctatggacagtgtcttctcagcatattcttgaataattttcgatcgtattgaattcaaaattttgttaaggaccatagacacgaatccagaacctctccaacttaccttctcaacatattgttcccaattaagcggttacgttatgcagttaggtggaaaaacacgactgaaacaaagaaaagattatgcggcgctgacattttggcttgattaagctcctactttt

SEQ ID NO: 224247 - DNA, 468 bp, Glycine max
  unsure (1)..(468): unsure at all n locations
agctntcagcagtagttagttttctctatttttttctttaatttttattttattttaatgaaatttctaagcgaatttccacatacaggttggtgcggtgctggagctgaccactatgagcccctgattgctcatccttccgcgtttggttcccaagaaaaggttgctgtggtactgtgaggtttccccggcctgcaattttgtggagtagaaattgagtagaattagaaattttattcgccctattttatgggccactcattgtggttcttctccgtcccaggggagaaacctcatcgggtagcatttgttttgactctcttgacattgccattgcctgcagtttgagcaaccctagagtattattattgtattagtttcaccggcttctgttttcttgagttaattagagggtagtgtgttgttcaaattggaagagttgagttgtatctcagtggatttcatcac

SEQ ID NO: 224248 - DNA, 478 bp, Glycine max
  unsure (1)..(478): unsure at all n locations
tgaatgctctattcaatggagttgacaagaatatcttcatactaatcaacacatgcacagtggccaaagatgcatgggagatcctgaaaaccactcatgaaggaacctccaaagtgaagatgtccagattgcaactattggctacaaaattcgaaaacctgaagatgaaggaggaaaagtgtattcatgacttccacatgaacattcttgaaattgccaatgcttgcactgccttgggagagaagataacagatgaaaagctggtgagaaagatcctcagatccttgcctaagagatttgacatgaaagtcactgcaatagaggaggcccaagacatttgcaacatgagagtggatgaactcattggttctcttcaaacctttgagctangactctcggatggggctgaaaagaagagcaagaacgtggcgttcgtgtccaatgatgaaggagaagaagatgagtatgacctggatac

SEQ ID NO: 224249 - DNA, 447 bp, Glycine max
agcttggaggggttgatggggacccggtactattatgaacgaggataagggctacataagagtatgtgagcttagttgaaggtgggcaactggggatggtggattcatgtttgatttgtggaagtgggagagttgatttgcgccatcgcccgatcgccacctagtaccacatatgacgggtaccccataatccaacaagcttgatgtgagaaagtgaggaagagtcagtcttcctacttttgtttgttgaccacagagtggtacctgaagatatgttgcggaggtcaggagaccttggggacgtcaggtggggtgctattgcccaaaaccaaggttgaccaatcccgacccaacccgggcatagtcaattagtgagaacctgtgatttacctaaacaggcgagctcctcgcagtcaaccaataaaagaacaaagttcacaaagcaag

SEQ ID NO: 224250 - DNA, 473 bp, Glycine max
  unsure (1)..(473): unsure at all n locations
tgtctcanaatccttctctaagttacgaagccaagtccatattaaaaataatgcatcatccatgattttgttagcattgaatatgtcgttagaaaagataatgttgttccgctgctgccaaatagaccatgtcaacgctagccaccaacacttccacctgctgacctttacagcctcagccaccccaaatatatgttgaaggaaatgatgttttgggttttgcgggagaggacccatgcaattcgcccaagacatcgattcccaccacagcggactgattttactgcaatgaaaaaacacatgacctgtattctcctccagattactgcaaaacacgcaagtcgtatcatttaatttcacctgtcgtctgtgaaggtttgcccttgtaggtagtcgatctctaagtaacctccatgcgaaagctaatactttatttggtgcatntgtcttccacagntcttcanaagctgaca

SEQ ID NO: 224251 - DNA, 462 bp, Glycine max
  unsure (1)..(462): unsure at all n locations
agcttgagagtgggttnttnttaacacattgttggttagtgtgtagttaatcttagtcgtgtttccacaagaaaagtttagagacattgagagaatcataggtctttgtattcgttgatcaagtcagtaatattagggtaggagcttttatgctttcttcaagaattcatcaccaaatttgtgaatatatgacttccctaaaggtatggtagagtagaattgcatgaacaaagtggacttatcacttgcaacaagcattagaattatgtacatgaaaaaattaccaccatatacatcatggtatatgtggcctggtacatttgacattcatgtttcttgtattttcttttcaaatagaaactttcatgttaaacattattgataaatccacacagatattggtattatgtattttctaattnttcaaatctttcatattgaaccgaaatataagaatggatg

SEQ ID NO: 224252 - DNA, 480 bp, Glycine max
  unsure (1)..(480): unsure at all n locations
nggtatttgcaattgaagaaaatagattcaaatatgcaatgataaagctgaacactacaacaccaatggattaaaagaaaaagttccagataaaaatatagaagaaataagtgatcatcattgcaattggagtaaagtagtgatctttctgctcttatgtcttggcaaaaaaatgcatttggatttttttgcgaggccttcaaatatctgattttacatttggttgtgcatgacttagattgattgaatatattaagtcttacaagaaggatctttctcaaatcattctcttgagatcctccattaaaattatttcactagatcatctcatcctaacctagaggttctttaactagctagatacatcatacatatatatgtatataagaaaatatcattgagctntnttttccatcagcaaattntaatttattagntnttggtgagaggggagtcgaatcatgacttctccctctcctc

SEQ ID NO: 224253 - DNA, 470 bp, Glycine max
  unsure (1)..(470): unsure at all n locations
agcttgccattanaaaggcattgttaatatcattttgttgttgatcccaatgaaaggaagtggataaagttagaatagttctgattgttataggtttcacaactggggaaaatgtttctttgaaatcaaaaccaggctgttgatggaagccttttggtacaagacgtgccttgtacttactgacggacccatctgaattatgcttgactctaaaaacccacttgcaaccaattggtttcctattaggaggtttaagaaccaattcccatgtattgttttgagtagtgcaaccattttttcatccatagcatctntccacttaagatctttaagtgttgttttgacaagtttaggaacaacatgagttataagcaaggttggttggagtctaagcttgacaattccattttttgatctanttgtcatangatgaatgttangaggtatgattggattggagacgaaactgg

SEQ ID NO: 224254 - DNA, 438 bp, Glycine max
  unsure (1)..(438): unsure at all n locations
acactatgaaactcagcttacacaatttatatttctcanacttgagttgtggaagactctttactatgtctttcctaactagatgattaagaagatgcatgtttatgtgagcagtcctacgatgccacaaccaagaatcatctatcttacttacccaacaactcagctcatgaaatgatgcatgttcaatgtttaacatatagatattacctattctcttgccaatatggacaacctcaccagacatagcttcactaataacactgcaattcttgttgaattcaattttgaagcctttgtcacatagttgactaatgctcaagaggttatgctttagcccatctacatatagaacattctttatttgtgttgtgtactgatttccacatttacttctctcattaatcttcctttattggtgnctacaaaagagacata

SEQ ID NO: 224255 - DNA, 467 bp, Glycine max
  unsure (1)..(467): unsure at all n locations
agcttgtgaaagactgtggaaacctctagaatattctagagatatgtgaaaccttcttgaaccttctggaagagtatgaaaggatatggaagggagtacaagagtgtagagactcctagaatgtgtggagcattctagagaattaatctccaccattcattgtggaggtggagtagtataaataagggtaggagccttcattcttaaccatccaagacaagagtgaatccacttcttagagtgagaaagctataaagttagagagcctctttgagagagaagataaatagcttgggaagtctctatcctcaagcttgagtgagccaccgtagagtgagtncaattgtaaacacatccttgtaaccctactattcttttgtatagtggaagaatctccgtatcggagaaatataatcgtgtactctcattactatctntaattactaagtgcctatcttaacttcatg

SEQ ID NO: 224256 - DNA, 447 bp, Glycine max
  unsure (1)..(447): unsure at all n locations
cggttcaaggtacttacccgttgaagatcgaagaacgatgattttctaatgaagaacgtcgaagaacggttgaaacctttgcgaaattcttcacggaaaacgttacggaaatgtttcggaagcgcctcggcttaaattttcttcacggaaacaatttttccaagctaattctaaagagagagaagtgcctaaggggctgaacccttttcttcttcacttccttccctatttatagcaaaataagggagatggttgccgcccagctcgcccaggcgagccaggttgcttcctccagaagcaacaaccttctggaggaatcttctggagggcccaagtgggcctggttgctatangcacccacatttttactaaatacacccctctgcttttatttggtgactctcnttttcgtaaagatacggagacttacgaattacgtaacgatac

SEQ ID NO: 224257 - DNA, 470 bp, Glycine max
agcttatggtaagatctgagacctaaccatgtgttgatgtttccacggaggccattgcctccctcgccaaatattatgaccagcctttgaggtgcttcacctttggggacttccagttaacacccatagtggaagagtttgaagagatcctgcgatgccctctaggaggaaagaaaccgtatcttttctcaggattctatccctccttagctagaatttcttaaatagtcaaaatctcgacacaagaattataccgcgggaagcaagtcgaaaatggggtggttggggtatcaaggaaatgtttgaaagcaaaggcgagagtcttggcaagtcaagacgaatgggccccgttcatggacatcctggcactcctgatcttcgaggtggtcctctttccaaatgtggatgggttggtggaccgggcagcaattgatgcttctctcgccttttatgaccgcaaggaaagcccg

SEQ ID NO: 224258 - DNA, 476 bp, Glycine max
  unsure (1)..(476): unsure at all n locations
tgtaagaaggctataactgatgattgtaatatcgtngctttttcttattacaatttcacctccatgtgtcaagaagaggctacccttgctgaatgctacaaataactcttcttcaaagggatagaaagcacttcttaaatttcctaacagtgttgagtccttatgttttggggtaaaatgaaaaatgtgttaatgattttgttttttacttttttcaagcaaaacaaaacatgtagagcaaattaatggcagcggacattctaactatatgtttgaatgtcacacacatgacatggcctattcgaatgcaaattgccatagagacaattactacattggcctatctccatacttctaacatcatccaccgtgatgtcaaaaccaacaacattctacttgacattatgtttttcggttaaagtagcagaatttgggctttcaagattgctccccaattatgtaattcatgtctccat

SEQ ID NO: 224259 - DNA, 455 bp, Glycine max
  unsure (1)..(455): unsure at all n locations
agcttaaagtatgcccgagtcattcatcctcttatatatgttgttgaagtattggcgatcagaattgccattccttggattatagggttgaaccaagctcatgcttttacaaaaaggttcatcaagtcaagttgaaatatggaagtaaccatcttgcgaaattggggcaaaagatgaatcgagtcacatcactgcttcgtctactgccaaacatatttaggattgttgatgtccttgttacttccagtttcaccttgacaaagatgtcatggaccatgttgaaaatctaaattgattcaaccccatatcctgcgtaaaaattcgcaatacttcaactgtacatcattcgcatacattcatgcttttcattggttgcattgttcattgcattctttccttgaaaaaataaaacaaaataaaatgaacttaatcattgttatcanaaaaagggacac

SEQ ID NO: 224260 - DNA, 462 bp, Glycine max
  unsure (1)..(462): unsure at all n locations
ntattcaagacaaagaaattaaagatattcaagatggatgttctttacagtctttagagtcttagaaagggtatattaaataggaagggaattccaattgaagtagcaaaaggtttggccaagaattttaagttaaaaagtctttttcaacaaatttactctctggtaatcgattaccagaggatgtaatcgattaccagtggccaaaaatgatttacaacagctattaaaatttgaattcaaaatttgccctgtgtaatcgattacacatatatggtaatcgattaccagcagtttctgaacgttttaattcaaattttaaagcttgtaatcgattacacatatactgtaatcgattaccagagcagattttcagaaattattctcaacagtcacatctttntgtgtggttcttgaatggctatcanaggcctatatatatgtgactcgagacacgaattt

SEQ ID NO: 224261 - DNA, 455 bp, Glycine max
  unsure (1)..(455): unsure at all n locations
agctgacgggactgaagacaagttctaaatannattgcggntttcgacttattagaaaccaaatgttaccgaatatttaaccgatacattattatttaactaataatagcgattcaaagcaaaagatttcaaatattagagattttttatgaagaaaaaaattgtcaaaagatgaaaaagtcgaatataaatcatggattaaaaacataattttattttcttaaaaaaagtacattttcctattccaaaagtgttaaattctctcatgttatttgtttctgaccgactctctttagtgtccaatttgcggatgtgaagggtagaaagacccaatgacaatgttgtcatcaaatttgaaaagaaataactataagaaatatataaaaaaaacataacactaatagaccanaacactatatgaaattaaatatgtttctatccataataaatagtta

SEQ ID NO: 224262 - DNA, 459 bp, Glycine max
tctaagggcatctacgaatgagcgtgagctatgtgccatttatgttgtctgaaaacgatggcggcaatatctccttgggcatcgttttatcatcgtcacagatcatatgacccttaaggaattgctgactcaggctgatcaaaccccggaacatcatacttatctagctcgattaatggggtatgattaccacattgtatatcgctccggcaatcataatcaggccgccgacgccttgtctcagatgccggagcaaagaacttccttgaagatactctccgtgccctgtctcacgtttatcttagagctttgtcaacaattggattacctgccttgaaatgtaacccataagaacgcgattctgcaacaccccctgagtcatcctcatttctccattaccaataacttgattcttaataagaatcagatttgggaccccaaggatttcaatgatactac

SEQ ID NO: 224263 - DNA, 391 bp, Glycine max
gatccttaagcacctgagcagcagctgtgactagataaaagattttcatctgtctggcttgagcgcatggcaatcctttggcaggaaaaattctaaaacaaaatcattggaggcactcctgagtggaatgcccaaagcaccatgcaagccaatcatgttagcatgatgtgccagacgatactccgccttgctgaaagaagtaatgtcattcgcaaaacaagagttggtggttgtgaaagctgtcccaactactccttgcccccccaaaaggtggcactcagagcaggctttcaggaaacccattagctctacatccgccacacaactagcagcatacacagtcgacacataattcatctcatcggttgaacgcccacatccactctttcct

SEQ ID NO: 224264 - DNA, 476 bp, Glycine max
cgttgttctgaagtttaatggttctcaaggaagaaatatgtgttctgacggtcccaagtaagcattcatccaactcctcaaaacttcacacttgatgaatttacactgataaacttttttctgctctcatgtagatctgcaatcgatatttgtgatggactgacatatctggatttgatcattaaccagattgaggtgagacattcatacttaatgtacaaattatgataattacacattcttatatgaccattttcctacgcaaatcattggtttattccttgctctttttttatgaatgatctggattgtgcactcgcctcacctacattttcttatgttcccttggtatatgttgccactgacctgtagttctaactcttactattcttgctgttgtgattatgtagaccctcaattccaagtatggaagcacggttccattgctttttatcaataaagatgacattcatgat

SEQ ID NO: 224265 - DNA, 445 bp, Glycine max
  unsure (1)..(445): unsure at all n locations
agcttatcatttagacttagaatctatgtttctaattggttacttgcaggaggagatttatgtagagcagcttgaagggtttctagtcaaaagagaggaggagaaagtttacaagttgaaaaaggcgttatataatgttaaacaggctcttatggcctagtacatcaggataaatgattcttttcaagatcttggatttgtcaaaagtccaagtgaagtttcattatttttgaaattggttggtgttgatttagtcattgtttctatgttgatgacctctttgtgacagacattgatgaaaaactaataatagagttcaaagctgaaatgctcaaagtgtttgagatgacaaatattggtttgatgtcctttntttgagaatgaaagtacaacaagatcacgatggagtctttatatgcatcaagaagtatgagaaggagatact

SEQ ID NO: 224266 - DNA, 485 bp, Glycine max
tgatgatatggtcttcaccgacgaaaggatctaagtgggtcttataagaggcaaatctgatcatcatgctttgataaatgccaaaaaaaactagggcaaatgaagagggtgagaatgagggagaagcctatgctgtgactgccattcctatatggccaagtttcccaccaacctgacaatgtcattactcagccagtaacaacccatctccttacccaccacacagttatccacaaaggccatccctaaatcacactacaaaacccacctaccacacgaccaatgctaaaacaccacttttagcatgaaccgaagcaccaaccaagaaatgaattttgcagtgagaaagcctgtagaattcaccccaattccagtgtcctaggctgacttgctcccatatctacttgataattcaatggtagccataaccctagccaaggttcattaacctccatttctctgagaatacgacttgaacgcaacgt

SEQ ID NO: 224267 - DNA, 457 bp, Glycine max
  unsure (1)..(457): unsure at all n locations
agcttctccacgccaccaggagaagagtgattccctcctagaagcttccagactcatgcactccatgtcccagttagagaagaagctcaacaagctcgaactctattgccacaccttgaaatctggcctcgaacaatgcaccagctccactacttcttctacttctccttccctcttcaatcctcaaaccctccaacatgactccgttattcagcacttcttggtctcggtctccgaagcaagatcaagtgtaaggcttttgtctcgctccttaaccatgcaactgaggcacatgggaaacaaggtgtacgagaaagtctccttccttctccaaccctacgacgtgaaaatatctttctcacagagcccaacaagaagcttggttttgtacctagaagccctcttgaacagaaccttcttcgaggactntgagacaatagggttccagaagaacgcg

SEQ ID NO: 224268 - DNA, 477 bp, Glycine max
  unsure (1)..(477): unsure at all n locations
ctangcaaactaaaagataactgaacaacanacagtttgattantttcatactcagacatcaatgatgattttaagttagcctcgatcttacgttttcctttacaagatgcccaaaatcattgcaatgtccttatcataattatttttaaaacatggcaaacgattgacttgtactgatccactgatatgaacaagacataacaatatatggatagtgtaaacaggctttgttaataatagaagatattgcgatgacgacaaacagttagggtcgtccagctagttagcagcctagaaatccaagacaagtttgattggaacttcataacttgatcgttaatgagaattctaaactttnttttatcttgatcaaagactaatcatgctcacatacatgattattgatacgtcaaaaagaaatcttatatgatgggattcaaatactacatcttcagataaatagattgcctttactt

SEQ ID NO: 224269 - DNA, 451 bp, Glycine max
  unsure (1)..(451): unsure at all n locations
agcttcttatccaaggcaattctaggtgttttatctccttcttccttggcttattccctagaggatggtgcctcccctatcctcttctcctttgccttccgctgcatctccatggtgaaaaatcaccattgaaggacctcattgaagctcaaagatccagcctccatagaagctccacaagcaagcttccatcacctagcatgatcacagattcacctccactccttatgttcccatgaacccgggtatagggtcctttttcaactcacagtgtgtgcaaatagtgttggtgtttgtgtgcatcaaatgaataaatatttacctcatgcatacattttaaaacgcactanaagcaacaaagagtttatattcacaagaacataaaanataaagggaaaccaacaaaggagaaagtcatgataaaacattgcacaagattaaacggcctaac

SEQ ID NO: 224270 - DNA, 396 bp, Glycine max
tcggaagaaagtgatgaggtacaagccctagaggcattatcttgtaagagcccgggtagtcgaagagaagttcaagtccatagccatcaaagtctgaaaagagtatgatgaactaagggacgtcaatatggccaccgctgaagccttggaacaagaaaccaagaaggcccgaaaggaagaacacgaccaaagcaaagttttgaggggctttatatggcagaaatagtgagctcaagctccaaagaggtgaaaggaatcatcatgggtcaaaggcatgatcttgaaggacgagctaaaggcttgccttatgtcgaaaagaaatttgtcccaacagttaaagcgagactgaagggaatatgtgggccatcatcgatgagtgctaagagaagctcaatc

SEQ ID NO: 224271 - DNA, 467 bp, Glycine max
  unsure (1)..(467): unsure at all n locations
agcttaagaaaaagcttaacaaacttatatataattgatcatgtattccgaaatatagggggagaaaacggatgcacattttatctatatacaattgtttgttgcttgcttgaatcttgatttcaggtattgtattgtcatcatcaaaaagggggagattgtagatgcaattggctttgatgttttgatgatgatcatgaagatgtgttgcaattgatgcaaatgggcttttcaagattaaaattcaagacaatacttcaagattacaagtcacaacatcaagatgatcactataatattaggaagggaattcctaattgaattagcaaaggtttggccaagtgatttaaaataaaaagtgttttccaaaggttntactctctggtaatcgatcaccagaggatgtaatcgattaccagtggccaaatacgttttataacagctataanaattcgaattcgaaattt

SEQ ID NO: 224272 - DNA, 440 bp, Glycine max
tacggacctatgatactctgcttagtcttattttgtatgttgttcccctatctatttgtatgtttactgcaacactacacacccactgcataaagggatggctataaccaaggcagctattatacaaccatgaccaagagtaaaatataatgtcatctattatgtagtttggatcagttatgacattactcatacttgcatcattcataatataagataatagcatcaatgtaatcaacaagacataacaacgtcgtatccagccaaaaggttcatcagtgcatttcgcagacttgtctttgattcttggccttactttctcataaagaaacaccacgagattgttcttatacttacactttggcttatctgagactaactgtgataaagtggagttgtacttgaaaccatatgcaaacgacttgaagtttctctacaac

SEQ ID NO: 224273 - DNA, 447 bp, Glycine max
  unsure (1)..(447): unsure at all n locations
agcttcanaggatataaaaccaatttatttgtttttgggttcacaagaaaaagattggagcagatggaaaggtcgatacctataaagctcgccttgttgctaaaggatatcgtcaacaggaaggaataaattatgacaaaacattttctcctgtggcaatgctcaaatcaattcggattctacttgccatagcagcataatatgattatgagatatgacaaatggatgtgaaaacaactttccttaatggtgaattgaaagaggaagtctacatgacacaacctgaaggattcacatcattggttggttgtaatgaagtttaacgatctatatatggattgaaacaagcttctagaagttggaacattcattntaataagacaatctanaagctcgagtttgttaaatgtgaggaagagccatgtgtttacaaaaaggtcaatggga

SEQ ID NO: 224274 - DNA, 478 bp, Glycine max
  unsure (1)..(478): unsure at all n locations
tgtctgctgacagcctaagtgacttatatgactgaatatattcttatttgaatcatatacaagggtntgtgattgtatattgatttcaatatttccttttaaaggtacttcctttntctatctggactgacaaagaagttgcaggaagaagttgatgagttctcaaatacttactacttggaccttcatgttggagacttgaagcaggaaatagcatctgctactagctagttactatcttgtcaaattttggactctatctatcttaagtaaatattcacattgaaatgtgaaggaaacaaagcaccatgttaatatgaagctaggggtatgggtttgagttatagcctagagtgttacttgacaggcagtgttttactaagcatgaaccacaatcagttaatcaaacatccatattcagtactccttctcattgtccagacacagaataacaaactcacacacacatgaatgacag

SEQ ID NO: 224275 - DNA, 464 bp, Glycine max
  unsure (1)..(464): unsure at all n locations
agcaagctttgctgattatgttgacagtctctgtgggacaccatatcccattgactatgacatatggctgagaaggttgaggcgaagtattcatgaagatgatcatggaaaggaaatcgatgtaacaggctaggctttcaaactgggtccaatttcagaaatgaaaactcttcatcttaacgtgtttctcattgcaatgcttggacttttgggtggtaaataaaacaaggaaagtcaatggcttaacctctgatgctcatgcatttgtattccttgaacgattggtttggggaatggttagtgcattccatgaaacgagcatatcatgatttttcttgttggtatagggagggctggctgctctatcttctataattcttgagaattgattggtggcatctttgggtatatgaagaatagtcattcctttcatttgaggagccanaacatgacttttaacaact

SEQ ID NO: 224276 - DNA, 441 bp, Glycine max
  unsure (1)..(441): unsure at all n locations
ngaagtacagaagagtcagcatgtagaattggccatgtttattcttaaatgccctaaaaatcaggtaaatacaatataccaacacaatctgtatctgttctatggcaattatgacaatacactcatgagaaaatccatattcataatccaacactcgcaaggtatccatacttgtaatccttaaaaaagaataactcttggccaccactgatggatgtccaaaaggcacaggctacatgaggagaagactgatacaagaaatataggcaaaaacacaaaagaatttaagatcaatgtttggtcaatagacacaatttacagtagaaaatttggtccatcttaatgaatgcacaagtaagccccgcaatnttacagctctcttcagtgtcgtactatgaagcaactatgtgttgacaatggatcctatcactttattcatat

SEQ ID NO: 224277 - DNA, 464 bp, Glycine max
  unsure (1)..(464): unsure at all n locations
agcttgcanaccanatgctcaccactattagtatataaatctttaagttgtttcatataaacctcctcctctaaatcaccattaagaaaagttgttttcacatccatctgttgcaactcaaggtcaaaatgagaaactaatgccaagataatacgaagagaatctttcttagatactggagaaaatgtctttgtgtaatctattccttccttttgagtaaatccctcaacaacaagtcttgccttgtatctctcaatgttgcctaatgaatcccttttggtcttaaatacccatttacatctaatggcctttgccccattaggcatctttacaagggtccaaactttgttactctgcatggaattcatctcatccttcatgagcatcataccataaattgactctttacaactcgtggctagatcaaaagtttcaagatcattntcagctccagtattatagtc

SEQ ID NO: 224278 - DNA, 486 bp, Glycine max
  unsure (1)..(486): unsure at all n locations
tcaccttataagtaagaaggaatattaccgccaatcaatagtgatctatttacctccaaaagatgtctattgtttctctcgactactccattttgcttaggggaattaggacatgatgcttgatgaaatgtaccaacaaatttcataaaatttgtcaactcatttttgtagtattcccctccattatcagacctaactatctatattggagtattaaatagtgtgtttatcattntttgaaaaacttgaaaaaccttacacacatcacttttgtgtttaagaaggtataaccaagtcattcttgtacagtcatccacaaatgtcacaaaccatcgcattccattatgtgtgggaagaggggtaggtcccacacatcatagtgaataatagagagaggagcattagctctgttgttatttataggacaagtaacgcgatgactttnttccattacacaagtttcacatttaaaatcagagatatgac

SEQ ID NO: 224279 - DNA, 431 bp, Glycine max
  unsure (1)..(431): unsure at all n locations
ttatatcacctgccgcatgcaagcttagatccaagtggtctagccccttactanatagttgtgaagccttatgtaacagntgagtagatggaccctttctttaccaacttggatcatagctggatcatgaatggccaaaggctgaaggtttacaatggtggtgacattgagagattgaccgccaccatcaaactccatgacccatgagggtgttatatgttaagttaaagaaacacttactgggaggcaacctaagatttctaaccttttctttcttttcttttgttttctgcatgtatgttgctttgacttttgaatgttggtttttgctgttttgggaacattccttgactttgatgtgccttgattgtatgaagttgttgatgttttgggtgatttgttgatgattacattgagctctgcctaagtta

SEQ ID NO: 224280 - DNA, 473 bp, Glycine max
  unsure (1)..(473): unsure at all n locations
tcactaatcccgacccaacccgngcatagtcagtcagtgatttacttgtgacgtacctaaacaggcgagctcttgacagtcaaccaataaaagaacaaagtccacgaagcaaggaggcttgtgtggcggctggccagctatgtatcttgggtggtatctagaaattagcctctggtaatcgattgccaagggtgtgtaatcgattacagtgcttaaaaatggagacaggattttaaatggcctttggtaatcgattaccaatggtgtgtaatcgattacacagggtgatatggcctctggtaatcgattaccaattgggtgtaatcgattacacagggtgatagggcactggtaatcgattaccatctatttgtaatcgattacacagtgtaattttcagtttccaatgtgcacagactgtgtaattcgttntggggcactggtaatcgattacgtactctggtaatcgatta

SEQ ID NO: 224281 - DNA, 457 bp, Glycine max
agcttcttatccaaagcacactcttaggggttattctccttcttccacagctcactccctaatggatggcgcctcccctctccttttctcctttgccttccgctgcatctccatggagaaaaatcaccattgaaggacctcattgaagctcaaagatccagccaccatagaagcttccacaacaagcttccatcaagtggtaatcagagcacatgagcatgaagtaggtgctccttaaacctccattaattttttgcttcaccttctcttccattgtcgtttcttcatttttctccatgtatctcctcacatgtcttgagctaaatagttttaacatgattctttagagtttccaccgattaaacttgctatagaagctagatttgatttctatggttccattctctgtcttgtcttgaaccacgaattggttgagttaactcctctgactctgtct

SEQ ID NO: 224282 - DNA, 435 bp, Glycine max
  unsure (1)..(435): unsure at all n locations
tagctcttgacctgaacagcactaactgcctgcaatctgtcttgtgctcgcgactggnccctttcttcccttcgcaacttgagttcactattgctaccccatagagctccgcgaaattcgttccggccatactctttcttgcgagccctcttgtgctcttgttcaagggctctagcggtnattgcattctcttcccgtaagccggcacactccttccgaacgtgtgtagcggccaacttgaacttactcttggcaagtgttgcctttcctaactcgcttttgagaagctggacttcttccgcctcttctggtgcttcagaattctcttcgctgacgacttttaacttggcgagccaatctaaacctcgtatgcgaactttcagccattcgtgtacccaccattgatgcattacgaatgcctctaagctcttgatc

SEQ ID NO: 224283 - DNA, 469 bp, Glycine max
  unsure (1)..(469): unsure at all n locations
agctngtattgtctctcagatcttgactagctattaacttcctgaataaaatgagtttatcccattttttactccaaagatcggtgcgaatcaaatcactcccgcattttatctctagcatgcattcatttttttacctactcctcacatttggtttttttaggaaaaacaccataactaaacgcgccccaaggcatacctatcacactagatccaaatctagaacgatgggtgatcaagaggagacacaggaacagatgaaagccaacatgttggctttgaaagaacaaatggcttccatgaggaaaacgtggccaccgctgccgctgttagttcggctgccgaagcagacccaactctctcagctaccgcgcaccatcctcncccaaacgcggtaggacgagaaaggagcacactgntgcacaacagcaaccctcaacacattacctcagcccaacctcacagcaca

SEQ ID NO: 224284 - DNA, 473 bp, Glycine max
  unsure (1)..(473): unsure at all n locations
ntataagcgcaggtctggaagacaaaggtcaagtggtcgcaatatgttattatgatgttccgagtacattggatttggtacgaccatgccctcctgatttccagctgggaaattggcgagtggaggaacgccccggcatttacgcaacgagcataatgtaaacctttacggttttaaaagctctatagttgggcctaggctttagagtttttccttttgctaaggctttgtgtcttttgtttttgaatttataatacaaggatctttcttcatctgttcctacgtctctacccattctcattcatttgcatgtttacttctttttctgaaacggcagatccgatgatgagtcccccgaaggtactaatacctgngacccgcctatcgacttcgagcaagaaatgaatcanacggaagatgaaggaaacgaggatgtgggacttcccccagaattagaaagaatggtcgccatg

SEQ ID NO: 224285 - DNA, 440 bp, Glycine max
  unsure (1)..(440): unsure at all n locations
agcttctagccaaatggacttaccttgaattatnttcnttgtatagccctttgagccttgtttcccttttcttgttttgaagctcactacaagccttaagtgaaaaaccatgatatcaccatatccttaaagaattttggagctttggaattgttttgggaataagtgtggggggtttttgtttcattggacaacttgttttgttggctatgcttcatgatgtattttgggccatacttgatgtacattgtatattggttaaatgttggacatgctgaatgaaatgttgtttctcacaggctataaaaaaaacaagaatataaaaaaattattcgaaaaataaaaaatcgaaaaaagaagaagagaagcaatagagttgagtgaataagatcttaaatggcacaagaatgatganactcttggttctactcttcatgtgt

SEQ ID NO: 224286 - DNA, 342 bp, Glycine max
tcactacaagccttaaatgaaaaaccatgatattaccatatccttaagggattttggaaccttggaattgttctgggaataagcggggggggttttcgttcattggcaacttggtttgtggctatgcttatgatgattttgggccatacttgatgacattgctattgaggaatgttcgacatgctgaatgaaatgttctcaacgctaaatagttaataaaaacattccaacaagaaaatgaaagcactacgctggtgaatagatcttgaatggccaaaatgatgaaactctcggtctcacctcacgataatacttctctacccttttatctcttatctttct

SEQ ID NO: 224287 - DNA, 483 bp, Glycine max
ggatcttaagcacgcggctgcagctgctgaacaaacttgagattcttttgatttatataaaggaggatgctcatatactttggagagcaaaagggagttgcgcttttcgtttttatctttttcaagtgcaaggttaatcaggtttcacagaagaaaataaggaaagagtcttaaagttgaacatgaacaaagctgctagcgtttatggccgtttgggactctttgcaggtgttattttcagctcatgcattcgtgggactcccaggaattttaaggtggagaatgattccggtctaatggtcaaaattggtgagttcatttcagccttgtacaatctggtcataataattgtaccagcattatttcatctcacattacattcatcatatacaagcatgctaatatctttctatctgactgcagaaacatcactcaacaacagtacaataccaaacaccatttacaatggcttcctcattcttg

SEQ ID NO: 224288 - DNA, 464 bp, Glycine max
  unsure (1)..(464): unsure at all n locations
aaccctctgattanatccactaataccaaatagaaaagaatgatattttcatacaccacgaaatatattacacaaatggcagaacagaacagagcagagcagagcatgacggaacataccaagcggaatcaaacaatggcacttccacctccaccggaactcgaagctccgttcgaattcgaagaagcagcgataaccactctctcttcctcgtattccttatcatccgttggtagctcaaacctgcaaacagggcaagaatttcgagaactcaaccaaggaacaatgcaatctccatgataccgatgcccgcacggtaacctcttcgccgcgtctccaacaccgagcaaatctttacatatagcgcacgccacggcttcgctttccgacgcaattttcaccgtcggcaaggcttccagcgcggccttcgacgccggcggagctccccttcttgcttccccgtc

SEQ ID NO: 224289 - DNA, 459 bp, Glycine max
  unsure (1)..(459): unsure at all n locations
agctntgactcgaatgtctgatcgatgtctatgatatatcgagacgctcaaaattgaacaacggaatctctcgagaattcaaatgactataacttttcactcagatgcccgattcacgcgcctaaaatatcgagaccctcgaaatagaacatggaagctcttggaaaattcaaatggccataacttttgagtcgaatgtatgatcgacgcccatgatatatcgagacgctcaaaattgaacaacagaagctctcaagaaattcaaatggctataactttcgactcggatgtccgattcacgtgcatcatatatcgagacccaaatattgaacacaaaaacactcagcaaatacaaaccggcataacctttcactcgaatgtatgatcgacgcccgtgatatatcgagacgctccaaatagaacaacggaagctctaagaaatcacatggcataactttt

SEQ ID NO: 224290 - DNA, 478 bp, Glycine max
  unsure (1)..(478): unsure at all n locations
ntagactaaactntaatggtgtgttagctcctattctagnctttatttttttacgngntagtagtggtgtcaagagccaaacaagacctatataaaaaaataaaaaaaaacaaaggcaacaacttttatgataacaacaaacaaaagagatatcatttgaaggacactntgtgcagcatgttgagactgttcaaacaacatataatgagactgttcaaacaaatgacatgaacccatagtaggatgtggaaaatatgcatattgagactgttcaaacaacatataatgagactgttcaaaaaaaatgtaaaatatgcatattgagattgttcaaacaacatataatgagagacagctatggaataaaatttaattccttaaattatactccacatatcaaaagccgcctttgtcagacagctcagttggttcttttatccgtcaataatacccattcaaaatatgtaattatgaaact

SEQ ID NO: 224291 - DNA, 452 bp, Glycine max
agcttatacaccagagactctatgatggaatgatctctactatccatttaatgttatttcgacattattgttgctttatttttatgtttatttctttgtttatggtttgatcacccatatacaagtatgttatagtgttttaatcattaggaaatgtttttacactaaaaacatgaaggaacttcttataacccatatctagggatcgaatggtgttgcttagccttaagccttatttatgcatctttactcttaaagcaagttacttggtttatctttctaagggattaggagtgaaatcaagtgatttatgttctttcacataaggaatcatggttcgagtagattggttagtgaaggtaatagttggaatagctttcaatagtaaaaacttcttaacattacatcaagagtacttttggtaggccaaacacctaacacttctacaagat

SEQ ID NO: 224292 - DNA, 431 bp, Glycine max
ctaaacctcgagaacttgtgttattcatccttttcattctcttctccctttgctaaaaagaattcgccaaggactaaccgcctgaattcttttgtgtctcccttctcccttgtcaaagaattcaaaacgacacagtctgagaattcttttgattcctccctttcccatatacaaaagatttcaagggactaatcgcctgagaattcttttgtatccccatgcacaaagtttcacaggtttaaccgcctgagaacttttgcttaacacattggagggtacatcctttgtggtacaagtagagggtacatctacttgggtttgactgagaacaagagagagtacatctcttgtggatcagttctagtggaaggtacatccactatgttgttcacagagagcaagggagggtacattccttgtgcatctctgct

SEQ ID NO: 224293 - DNA, 432 bp, Glycine max
tttagatatatgacgcctatatatatgatgttataattttgcatgatctgtcaaagaaaatatgatgtttctacttgcatgatgtgttataatatatgatgtttatatatatttcgaattttgctgttaataaaactgtttaattagaaactgtataattcttttgtttaataaaactgtttaattttgcatgatctgtttaataaaactgtttataaaactgtttatatataatatatgatgttaacatttctaaaactgtttataaaacagtttagttagaaaaaatgttaaaactagagaaaaaaaatgtataataaaactgttattttaaaactgtttaattagagtaaaacattctttctttgtttttattcgaacatttaataaatatgttatatacaatgatatatgctgatgatgatgtcggat

SEQ ID NO: 224294 - DNA, 438 bp, Glycine max
  unsure (1)..(438): unsure at all n locations
ctcagctagttgtaaagccnaagggaatgaacatcatttttcttgtttaanattagcggaacttgcgggggttgtcaagaattgaacctaatcttaatggtagagacaaactagtataaaactttatacgtcttatatctctatatctcttgtgttaactgacaggatttgaatttgattttattttaaaaaagtatttttacaaaatttcttgatatcgtcttatcgtacttgtttgcgaaaaccacagaaaactcctcgcggtggccttaaaagagaatttaccatcttttccacctttcgccaaaatccataagttgtctcgaccatctcaagtaagatgcagcctcttagccaaacttttccaaacaacacagttacatacgaacttggtgcccccaaacttgacatctatccactccaagcctctttttttgt

SEQ ID NO: 224295 - DNA, 435 bp, Glycine max
  unsure (1)..(435): unsure at all n locations
agcttattgagaaagatacaagttttttttgttatggggagaacanaaccatagctgctagtgatgaatggggggaagccaaaattcaggtatgtattattcaacgaaaatagagtttttgtggaggccagtcttttattctttagttttttatgtgtgattctgttttaatgaaagaaggattaatagtttatctttgaattttgataaaaaaaaattgataatcatgaaattgaacaatgtgttctaattacaaagattctttatctatgaaaaaaagattaattcttgattttagaacaaaacaattacgcacatttagtttatgtaacacacatttttttcacacaatttaatatcagaaaggttttatcatatgcttacctgttggagagatgcttgaatctcttgtcacgacattctttttctaaccct

SEQ ID NO: 224296 - DNA, 371 bp, Glycine max
  unsure (1)..(371): unsure at all n locations
ggccgccacggagttntccgactatgctcttgtgtggtgtttcaagctacaaaaggagagagcanganatgaagagccaatggttgatacatggacggagatgaaaaagatcatgaggaagcggtatgtgccggctagttactcaagggacttgaaattcaagctccaaaaactaacccaaggcaacaagggggttgaggagtatttcaaggaaatggatgtgctcatgattcaagcaaagattgaagaagatgaggaggtaactatggctcgatttcttaatggtttgactaatgatatccgtgatattgttgagttgcaggagtttattgaaatggatgatttacttcacaaagcaatccaagtagagc

SEQ ID NO: 224297 - DNA, 421 bp, Glycine max
  unsure (1)..(421): unsure at all n locations
tgccctagaccctagtacgatgaattcatgaacctctcttgaaaataattgtcgctactttttaatttaaaatatctgtatattaaaagaaaatatttaaattataagaaaattaatgattcattcaaataaataatatatgcaagtctagacatagaatggtgttaaataattaaaagggtaatttatcgttcataataattctatctaatttgaataaaattatttctttgttaaatacattaataaataaatgggaaaactctataaataagatcttaaacattattagatgcattctagaaaaaagatttatggagatntttgtgaggtgttctattattattattgngaattatttaatatatttcatagttattaactgtcgtacaatnattggcacaacattataatcaagatg

SEQ ID NO: 224298 - DNA, 478 bp, Glycine max
  unsure (1)..(478): unsure at all n locations
tatgcatcagacagaaaaagaaactaacagatgagccttttcacgtttgcatcaatattatatctctgactataaccaacagtgaaagtcacaaggtacttaggctttgatgttaaatcctgcaagcagcaacttaatcaaatactctgtatatagatgatataccgcaataaaaacatcagaggcctgtccagtccaaaaatttacagactggcctcataacaaacagaaaaaaaaaatcaagctcgaagaanaaatgcacgtggcaagcaacataaattttctatgtcactattctttcccaaattatatcaatcttagatttgcggtgttatatttagtttacttcatcgaaacaaacaaagaatctggtgaaagcatgtaagtcttctttaacaagtgtattaacaacagtagcacgaccataatttgtatttagatgtatatttctatgcatgcaaaaagaacatgtcttcta

SEQ ID NO: 224299 - DNA, 464 bp, Glycine max
  unsure (1)..(464): unsure at all n locations
gctatagtaatttaaatatctgttctaatatatttatttacctttatatcatgttttttctatctctaatacttaaaaacaataatcaaaacgcatcaacaacaccctgtatatgtgttntattattgttttggctacttttttttctaatcaaactaaatcaaagttaatatatgcttcatttacttttaccttttttgttcttgattntgttgctcgctgtcaatatcaccaaacaaagtacacattttgggggtttatttttttcttatgattttttgtgtgctatatatcatatataattctttttttttacaatattttgcattctgttttaattgtgattntaattcgtttatctaaaaaattaggagttgaagcattattgaatatattatatgacttacaaaatcaccacaatattatagtatttctatatactgatngagaaaataagctaggat

SEQ ID NO: 224300 - DNA, 483 bp, Glycine max
ctcagcttatatttatgcgaactattattgaaaatgtgcagttattgttttatggtgatggctatataatttttaaaatatgtcgcaagatatgaatggttattaaaagtttgctaaaatctaagatgaaaattttcatgaaataaaaaaagagttaactatgttttaagtccttaatttatttttatgtttatagtcttggtatataaatgtttcatgattgattaatattcttaaacttttttttctaatatttttttgttctttttatctattttgattgttaaacaattataattcatcgcgtagaatgaatttattaattcttaaaatacttatttcaaaataattcaaataataatttatgattaaataacaatataatataaaactgttatcaaactctaatattaaatgaaaaactaatgattgatattgtaattaactctagaattatcttttacaacaatattgtaacaagat

SEQ ID NO: 224301 - DNA, 445 bp, Glycine max
  unsure (1)..(445): unsure at all n locations
catgcaagctttctaggaagagaagcatcagcaatatatcttttctatggtatgcccncatttgtcggaaatacatctttaagtgattctttggggcaagtggtcccttcgtatttatcaaaatctggtaccttgaactctggaaggatgacaacatcatgtaccaaacacaattccgttatttcggcgaaagggtaatcaccaaacccttcgacaactcttaatctctcttcgatgagatcaagtttctctctcacttccattgccagaggcggccctcctactgagaaatgcaactgttgtatagggcggagtcgaagagctcctgccgtattgggtttaagcatatcattacacaccactcccttagcggtgaaagtgggatatgggttgaagtccccttgagcatgcttccgaagttcttcaccggcacctcctacagaca

SEQ ID NO: 224302 - DNA, 468 bp, Glycine max
  unsure (1)..(468): unsure at all n locations
ttntcctcanatccctcttgttggactagacttagaccatactttatattttaaaccaaaacttaatccgcagatccctcttgtaagactaagtttcaattctgcttcattcaagttctaaggcaaaaatcatttcccaatgctaaagtcatctaactaggcacacaaatggttgattagaccaaaagcatacagaatttaagcactgaaagaatcattgaacacaagaaacacaatcaattagatattagaataattaaatcaattgttatttagaaatctccatcaagggtgtttagccagccattatagaagataccctaacaataatgagattacaaaacctangtatctctgcaaaggttgctcctcttgctgcctccagagctctttttccgaaatagcactgtggtgtgctctggagtgtngtaaaaatctgttgtaaaagttctgtaccctaattctata

SEQ ID NO: 224303 - DNA, 465 bp, Glycine max
  unsure (1)..(465): unsure at all n locations
gctctagccaaaggacttaccttgaataatttcttgatagcccttnagagccttgtttccctttccttggtttgaagctcactacaagccttaagtgaaaaaccatgatatcaccatatccttaacgaattatggagctttggaactgtcatgggaatcacagtggagggtatgcgttgcactggacaactggtattgtgagctatgcttcatgatgaattctgggccatacttgatgtacattgtatattggttaaatgttggacatgctgaatgaaatgttgtctctcaaaggctataaaaaaaacaagaataaaaaaaaattattctaaaaataaataatcgtaacaagaagaagaaaagccctacagttgagtgaataacatcttaaatggcacaagaatgatgaaacgtctcggtctactcttcatgtgtaactataatcttacctccctttatttctta

SEQ ID NO: 224304 - DNA, 471 bp, Glycine max
  unsure (1)..(471): unsure at all n locations
tctagccaaatggacttacctngaattaattgcttagatattcccttttgttccttganaccctttccttgtgttgaagctcactacaagccttaagtgaaaaaccatgatattaccatatccttaaggaattttggagctttggaattgttttgtgaataagtgaggggggattttgattcattggacaacttgttttgttggctatgcttcatgatgtattttgggccatacttgatgtacattgcatattggttaaatgttggacatgctgaatgaaatgtttctcacaggctatagagttaaaaataaaaatattcttataaatgataacaaggctttacagttgagtgaatcagatcttgaatggacaaaaatgatgaaactctctgctctactcttctatgttaatatttaccttgacttccttctatttcttatttttatcttaatatgcacctattcacctct

SEQ ID NO: 224305 - DNA, 436 bp, Glycine max
  unsure (1)..(436): unsure at all n locations
agcttgagctcataggtgctaccccacaatcncttcgngaattctctcggccatattcctccttgtggagccctttggtttcttgttcaagggctcttgcagtggccgcgttttcctcttgtaactcggtgcactccttccggatgtgtgtagtagctgatttgaacttctctttggcgagtctagccttccctagctctaattttagagctcggacttcttcatcttcctccggagcttcaaagttctcttcaccgataactttcaacttggagagccaatctaaccctcgcgcatgaattcttagccatccatgataacctccgatgatgccatttcggatgcctctaagctccttgtctttcttcaacggattcctccacgccttgtggattctttgtataaccttgagaccttgcgcgcctaaatctttcac

SEQ ID NO: 224306 - DNA, 472 bp, Glycine max
  unsure (1)..(472): unsure at all n locations
tgttggccgcgattgacaaatggtgcggaagacgactctagtctctgcatgctatcatgcgttgagtcttagagatagcaaaagaatgtttatagggataactacttgggaatttccgcctgccccctaacttcatgggttagttcttgacaaaggtagtctgcgcggaacacgacataaatctactcatgtcaacgggcttgttggccgcgattgacaaaggatgcagaagacgacgttagtctctgcatactatcatgcgttgagtcttataggtagcaaaggaatgtttatgcggataacaacttgngtatttccgcctgccccctaatttcacggtgtagtgattgacatangtagtctgcacggaagtcgacataaatcttcacgtgtcaacgaaggtgttggccgcgatngacatanggtgcagaagacgacgttagtctctgcatgctatcatgcgttgagtctt

SEQ ID NO: 224307 - DNA, 463 bp, Glycine max
  unsure (1)..(463): unsure at all n locations
agcttagcgccaatcgagcgctgagctctgttgatatattctaatatgcttagtgcactgatctcgcgcttagcgtgcggccttgatattgatgccctgccagattcttctgtcgtgctaagcgcgctgaagctgtgcttagcccaataatgagctcagctcaactgtcactttgggcacttcatgacttagactctatttcacttgaaattgcacatatgtcatcattaaatccaatggatatattctagagacaactttatccataaaaaagaattatttacaaaaatcactacaaaataaccattaattggagaactatacaagttttggaaaatgatttctatacaaaagttagtcgttaaggcgactaacagtgaccatgattngtctccacgtgtcatcgaactagatggtctctggatagcanaaacggtgcggatgaccatgtattgtctctacg

SEQ ID NO: 224308 - DNA, 460 bp, Glycine max
taaaaagtccttctgattcaatttatgcattcctaactgtattttatgatatgaagtgcaaaggttggaccgcatgttagttgttaattattgattagcttaaacacttgagcttgagtgaaacagtgacattgcactggttaggcatccttccttgaaatctgtctgctgattagtttcattcagttgtgttgcttaataaaaatgctcttgtctctaaaaagctgcatgtcttatgaaaaaccattgattgagtcattggatagatgtctcatcatatggttaatgttttggaagcaaacaccctttgtaaataatcactggcattattttgcacttgaggacaagtgagttgtctttatttgcttaacgacaagcaaattgaaattgggggaagttgtagtcgtttatacactacttcgataaaactttgatatatatagattgctcaagtatagtc

SEQ ID NO: 224309 - DNA, 467 bp, Glycine max
  unsure (1)..(467): unsure at all n locations
agcttctntgagaaaacttccttgagaagctttagcttagctacacacacccctctcataactaagctcacctccttgagaagcttccttaagaagattcctaaagaagctagagcttagctacacatacctctctaatagctaagctcacctccttgagatgagaagctagaacttagctacacactccctataatagctaagctcacccccatgacaaaaaacatgaaaatacaaaaaaaaaagtccttactacaaagactactcaaaatgccccgaaatacaaggctaaaacccgatactactagaatggccaaaatacaaggcccaaacgaaggaaaaacttattctgaatattacaaagataagcgtgctcatacttagcccatgggctcgaaatctaccctaaggctcatgagaaccctagggcctttccttggatctctagcccaatctacttggagtct

SEQ ID NO: 224310 - DNA, 447 bp, Glycine max
  unsure (1)..(447): unsure at all n locations
ntgatggtgtcgagaagaaatcacatgtgtgtcatcatcttttaggggagaatgtgaatgtatgtatacatgattntgatgatgccaaagaaaaatcaaacaaggttgcttcaaatgataagcatttgcttcaagaataattcaagagtgcttcaacaaacaaagccttgtttcaagattcactaaagaccaagccttgccttaaaacaaagtgctttcaagacatgcaaggctctggtaatcaattaccaggaagtgtaatcgattaccagaagacagggttgagaaatagctgttgaaaaaggttttgaatttgaattttcaacatgtaatcgattaccatatgtctgtaatcgattaccagcaacgaaactntggaaattcaaattcanaagtcataacccttcanatataactgtgtaatcgattacacanacattgtaatcg

SEQ ID NO: 224311 - DNA, 422 bp, Glycine max
agcttaaacattcaatatagagcgtgtcttttattcaggactcaatcacacatccgagtaaaattattgtctgttgaattggctcacacgctcaacattcaattttgagcgtctcaatatattacgggactcaatcatacatccgagtaaaaagtaatggtcttctgaattggctcacagcttcaacattaaatttctagcgtctcgatatattacgggactcaatcagacatcctagtaaaaagatattgtcttttgaattggttcagaggttcaacattcaatttcgagcgtctcaatatattatgggactcaatcatacatccgagtataaagttattgtcgtttgaattggctcataagttgaacattcaatctctaacgtctctatatactacgggactcaatcacacatctcagta

SEQ ID NO: 224312 - DNA, 476 bp, Glycine max
tcgagcctattcaaacgacaataactgtttactcggatgtctgattgagtcccgtaatatgacgctcgaaattgaatattgaacctctgagcaaattcaaacgacaataactttttactcggatgtctgattgagtctcgtaatatatcgggacgctcgaaattgaatgttgaagctgagagcatattcaaacgacaataactttttactcggacttctgattgagtcccgtaatatatcgagacgctcgaaattgaatgttgaacctctgagcaaattcaaacgacaataactttctactcggatgtctgattgagtctcgtaatatatcgggacgctcgaaattgaatgttgaagctgagagcaacttcaaacgacaataactttttactcggatttctgattgagtcccgtaatatatcgagacgctcgatattgaatgttgaacctctgagcagattcaaacgacaataact

SEQ ID NO: 224313 - DNA, 460 bp, Glycine max
agctaggttcccaacgctatgttcatgttcttttaaaatctagaggtaaacctaggatctctgtaagacactatgctagatgacacaccatgtaatctgacaatctcactaatatacagggaggtcaacttttccaaggaaaatttgatattaatgggaataaagtgagcagacttggtcagcctgtcaacaataacccaaatagaatcaaaactcttgtgggttctaggtagtcctacaacaaaatccatagaaatactgtcccacttccactggggtatctccaaaggttgtaacttcccttcaagtctctgatgttctatcttagccttctgacagactaaacatgcatacataaactcactaacctctttcttcatgttgggccaccaaaacatcatcttcaaatcctgatacatcttggtagcaccaggatgtatgcttaagttactcccatgtc

SEQ ID NO: 224314 - DNA, 361 bp, Glycine max
cggacacttgaatctaagctgtccacaaaatcctaaacaccgtttatgtcttctccttaacgatcctcttgctttgatgcaatcctaccccgcagggcttggatgaaaaactccagtagattgggccagagatgcatgagaaggcctagggttccatgagccttaggtagatttcggcccatggactaagtcgagcccctatctttgaaatattagattaggtttattttttgggcctgattatggctcatatgaagagggtaccctaaaattaagattttcacctttgttttacggcacctaactctttttgtttagggagtttgaattccatgcctatggatatttatgttgggttgaa

SEQ ID NO: 224315 - DNA, 427 bp, Glycine max
  unsure (1)..(427): unsure at all n locations
agctntaaccgatcgttaagcctgtttctttcttatcaaaaaataaaataaattttcactgatcatctgaattgtaatatccgttaatctctggtaaaatgaaattcgaccgctcgatcatgccgtaaccacgttggaaatcaaaaaaagaggtaaaataattatactataatcaaaaaataccttttagtgaaataaagcggaaaaatcgatcggacgtttctctttgggatttctctttcttaattgaatcgactaataactaaagtgaaactaaggctaatatcaaccctcaaagtcaagctcgtgcacaaacaatcacttaagaggacttgaaagctcaatatctcagttcttcttaccgagataattgatcatctttaacgtccaaccccttacaatgatactcttcaattaaaagaatcgc

SEQ ID NO: 224316 - DNA, 468 bp, Glycine max
tgccatccagctcgcccaggcgagctaggttgcttcctctttttgcgatgccttctgaagaacttcctggaagggcctggttgctatttgcaccccaatgtttactaaatacacccccttgcctttttttgctgattcttttttcataacgttacagaaacttacgaattacgtaacgatactcattttctttccgtaatgttacggaaccttacggattgcgtaatcatcccttttttgccttccggaatgttacggaactttacagattgcgcactaacacttccttttaactttcggcatgtcacagaacttcaaagattgtgctacaatgctttcttttaacttctggcatgtctcggaacttcacgaattgcctaacgatgggtgccaagtacctcgaagtggtcaaacgagggtcgcatcccaacaatggatggtccccggacgaagttagggtatgatagt

SEQ ID NO: 224317 - DNA, 400 bp, Glycine max
agctttaccataaacatatcactattttttttttccttaagaagtctcttctcatcaacatatttcttcatcacctgctgagctctttgcaaattacacttcaacttagctaaagcagcatctctaagcatgagctgatcttgcactgaagttgaatcttgcaaattacgagtgtatctcagtagttgaggaggttctctaccatataccacctgaaaaggagtcataccaatactagtatgataagttgtgttgtaccaatattttgcccatggtagtaacttataccactcctcagggctatcaaatatgaagcatctaagatacattccgaggcatttattgacagcttctgattgaccatctgactgtggatggtaggctgtggacatgtttaatg

SEQ ID NO: 224318 - DNA, 473 bp, Glycine max
  unsure (1)..(473): unsure at all n locations
taaaggagcattcaaaccagatatattggtccccaatgtctatacttcaagatttcgtcaaggcctctccctcttgattcagatccaacccagaaaacattttaacgtgtgcctctgtctataaactatacaaaatacatgactcctcaattattctcaaaataagtttaactcgtcgtgcctcaaactgattcaactcattggctttccacagtggatcccatcacaatactcgtcgcgcaaaaacttattctcctcaaaggacccacggtcgtgtgattgtacagttcatagcttacaacttaatgcacacaacatctcaatacacatgtgatctcacaatgtaatacatactcaacttgtcacttacacacagttcatcacactttcctaatcccaaggcaacaagttntcacacctcatgcatcatatacatatcacacagtaataatattaatatggtatggtcatat

SEQ ID NO: 224319 - DNA, 469 bp, Glycine max
agcttcacttcactccttcaagtagtgcatgatctgctttcataggaaaacatgtttcctaaaagctactatcaggccaagaagatattgtgtccgataggtatggagtatcagaagattcatgcttgcccgaatgactgcatactgtacaggcataaattcaaagaaatgtccaaatgccctaggtgtggggcgtcatggtacaaagtgaaggatgatgaggacagcagtttatatgaaaacttaaagaaggatcctccagcagaggtgttgtggaatcttccaatcattccaaggtttaagcgtctctttgctaatgaagacgacgctaaaaaccttacctggcatgcaaatgggagaaactctaatggaatggtctgtcatccggctgacaactcgcagtggaagaagaatgatgaattgtatccgaatttcgggaaagaggcaagaaatcttatgcttggactac

SEQ ID NO: 224320 - DNA, 466 bp, Glycine max
  unsure (1)..(466): unsure at all n locations
ggtgtcgcactntcaactatcgatgttgaatatatagttgcatgaatttgttgtgatcaactcatccaaatcaatcaaataacacaagaattaccttaaacatcaattttgagttatcgaaattccagggcattacaaatgtagcgatgttaaaaccattctttctagtagtgattattactactgcatagggtacatttgtccttgtgcgaacactattttacgcatcacatgtaatgtacttcaactaaaaaataagtttgtgtatgttaaatgtttgtagagtttgctaatatacacacacttgatttttagttcaagtgcattaacaacttataactaaagattgtcttaaagtacatcgacattatagcttgttaatgtactccaactaacaaacaaattggtgtatgntaacaatttaagactcatgtatgtatgtaagtatcgtattaagatgtatttg

SEQ ID NO: 224321 - DNA, 375 bp, Glycine max
ttgggccttgtatttagggctccataatgtaggttgggtaccttaaaaatataggaatttttcagcccttgtattttaaggcacctacactagtttttgtattaggggtaattttgtaatctcacatgcactaagtggatatttgatgtgtgtgagtggaaataaatttaattgaattggtagaagcccaatgcaattaaattttagagggggaggtgagcatttgcttactacaccccattgccacctcatatagtcacactttgtgcatgtccttcatgcttttcatgcctcatgacacctaagcacacttagtggagaatcttggattactgggctgaaccataactaaaattcactaatcataattagtga

SEQ ID NO: 224322 - DNA, 478 bp, Glycine max
  unsure (1)..(478): unsure at all n locations
tgccacccagctcgcccaggcgagcagggttgcttcctccatattcatcagccttctggaggaatcttctggagggcccaagtgggcctggttgctatgcacccccatttttactaagtacaccccctgccttttttttggtgattcttttttcgtaaaggtacggaaacttacgaatttcgtaacgatacttgttttctttccgtaatgttacggaaccttgagaattacataatcatcccctttttgacttacagaatgttacggaaccttactaattgtgcaacgatgcttccatttgatttccggtgtgtcacggaaccttacggattgtgcatcaatattttcttttgctntccggcatgtcccggaatttcacaaattgcctaatgatgggcgccaagcacctcacaaggaccaaacaaaagtcgcatgtcatcaagcaaaggtccncggacgatattagggtatgacagtt

SEQ ID NO: 224323 - DNA, 486 bp, Glycine max
gtcacctgaagcatgcaagcttgttttgactaagatccagttcagactttatttttgatctttccttcaacagagcttcgggcagtaaaccactcaactggttgcatgcaaggcgaataatccgaagggataccacaaacgtgaaggaaggtagattaccctctaactgattattactagcatcacagacctctaaattgtcaaggtaaggcataccatcatgagcaaataactcaccactcaaggaattatggctaatatttaaatactgaattgaagagagaaatgacttatctgctagtcccaaatccggtgtaccagaaatcctgttgcagcttaagtcaatatatagcacactgcccatctgataaaatatatgcataatatccccagagaaactattcatgtgcaaatctaaatacttcaactgctcaagtgtgtgaaactcaatatgaagagtacctccaagttcatctgaagaaagat

SEQ ID NO: 224324 - DNA, 467 bp, Glycine max
  unsure (1)..(467): unsure at all n locations
agctnggtgggagtgaccgacactccatagaattgtcacaggcctgtgatcaaagcaggaaatcccagggccctgttggacttctctgggtcaactaggtgtctaagaggcgtgatccctgcaaactgatttatagcatccgagatcagctgggcaacatggacactcacctgagtcaggatggcatagaccagctaacaattcggcagggggaggtctgaattatggttgttagggagaatgttgctgagcaacaacgtcatccaaatttgagtgagggtggtcatgctagtgcgcatgatccgcacccgtctctccgccatgctccgagaaaagtcctgccccaaaatgcacaacaactagttgatggcctcctcatcgaaacccaaagcctggctcctcctctggctgaactcatagcgctggcccctctctaagaccaatgaatgcnctagaaactggttaat

SEQ ID NO: 224325 - DNA, 436 bp, Glycine max
  unsure (1)..(436): unsure at all n locations
agcttctattgtgaaactatagttattnncattgtcatgtgaaaacacatacacacagcataacaatattatggaaattattctccagaaattactcctaccaaaaggattagtaccagcttattgatcatacaaaaacctatgttccaaatcagccgtaaataaagatggactatcttatattgtctaatgaaagttgttgagaatcacgaatttaatgtataatgatatgataggatatgatatctgatttagaggaaactgaatatcctctaattatgtataaccaatactacctgtctatataaacaagcatctgttgtgtattctaacacactagtttagtctactatccctctatantttatactattttacaaaagtaaaccctttgaaacanattaggagcagannanaanaacaagagataacaata

SEQ ID NO: 224326 - DNA, 427 bp, Glycine max
  unsure (1)..(427): unsure at all n locations
tcgtcgatctctttatgggttgaaacaatcttcttttcttgtttnggtaaatttagtcatgttgttcaaatgtttggactaaaacgaagtgaagctgatcactctgtattttactatcatacatctcctggaaaatgtgtctatctaatggtctatgttgatgatatagtgattacaaggaatgatactactaagattgtccagctgaaagagcacttattcagtcatttccagaccaaagatctgggatctttgaagtatttccttggtattgaagtggctcaatcacgagatggtattgtgatttctcagaggaagtatgctcttgatattttagaagaaacaggtatgcagaaccgtagacctgntgaaagccctatggatcctaatttgaagctcatggcagatcaaagtgaagcttatcctg

SEQ ID NO: 224327 - DNA, 466 bp, Glycine max
agcttgatcaaaacatacatctaatcattccagtccactcaattcatacatttgctcattcaagtcattcacaaacacttatttcatatcaaacaaaccactgaaacatgattcaatcatttcactgttcaaacaagctttttgtacaagcaatcaacactaaaataactggaatttaaatgactaaaacataaagcaactaaataactaataactaaattgttcatgatttgcagaaattaaaacaaaacagaatttaaacatcctgctcatcctatggctgatcttcatttaaatccagcactggagcagctggtacatcctgaagaatgggctgctctaactccatggctggtgctgatggcatggtgtcctcagatataggtgcaggacatggctctagcatgggatctggagaagtctcttcctcctgagccatagatgtatctgtagcaaatgaaaatgg

SEQ ID NO: 224328 - DNA, 479 bp, Glycine max
  unsure (1)..(479): unsure at all n locations
tcagaacacagcaacacagaagctaagtgtccaaaactcttctattcaatgggcgctctaagtctgaaaagngacaatgagaatgaggttacattgaaccaaactctcacctaacaccagaccataacatcaatctagacatgctcaaactggataaacacctaaaattccaccgaatcaaaattagactcctcaacacccacaattgccctagaaacggctcatggatcactatggacatttgtatgactacctaacacaagccaaactctctcataacgcctaaaggacattcctagctaggactaactcacttgaatcgacacttaccacacaatccagatntaacctgccaaccctcaaagcctcactcttcttgcactcataacaccacattctcactgtctaaccctatggtacaccacactcatcgctaacagctccatacccaattcagtcatcacatcacaagcatctca

SEQ ID NO: 224329 - DNA, 457 bp, Glycine max
  unsure (1)..(457): unsure at all n locations
agctngcacatgtgcgctagcccaaacttttgttattaaacaaaattntgngggcttagcgagacgtgctcgcttagcaggtatacaagacatgaagggtgtgcttagcaagtaatctcacgctaagcacaattagcaaaaacttctgacagtgagatatttgggcttagcacgtacctcctacacttagtgcatagacaaaaatgatctgtgcccgcttaacgtgacaagacgcgcttagtgcacaacagcagaattgaaacatagcctatttcaacaacaaccaacatacttacacttagattttgcacttgatcaaattatcaaaataacatgttataagtcagcaagttcaaatcatcaaggcataacacagcangcataatatcacanacaattattgtacaaaaactatgcattatctaanatagtatatntaaaacaaaaaaaatagaaa

SEQ ID NO: 224330 - DNA, 110 bp, Glycine max
  unsure (1)..(110): unsure at all n locations
tcgcaaactactcccctatactacgtaggctcacaccggtgaaccccatcagactntattttttgttgcattatcataatcatctacatttatttattggccaaaatacc

SEQ ID NO: 224331 - DNA, 464 bp, Glycine max
  unsure (1)..(464): unsure at all n locations
agctngaacaatccatccttaaagttggctattagtatgttcacaacaaaacttgttcgataatattctacgatgctaatcagcaaatgtactaagtcgcataagtaatataaaacggtaagaaccgagtatcgaatcacaaggaacttgtttcattcagaaaatatatgttctataagaaaacatttgttcaaagcaagtgaatattaaatggagcttttatatgagaatctaatgaactacaaactaaaatatctagaagttgagaagtgaaaacagtcaagtaacaagcatttggtcattctattgaacttactttgatgttactaaatgtttttctttatttaacgtcgttntaatgttcttatgctgaanaacaacctanaccaagatctctcgagtgaatgggcctaactctatttaaacctcgttcttgatccctcaacanacttagtctaaaagag

SEQ ID NO: 224332 - DNA, 430 bp, Glycine max
  unsure (1)..(430): unsure at all n locations
cctctggctaaaaatgatggcactgattattcgtttatctggctcttccttctcctanactttagctgggccccgganagttttatatcgatatatactcccttcagagcgagacacgcgaaaccaatctatttctaaagttacaaccacctagagaattaaactaccgtccttcttgtgacaatcatatatgtcatttactctggtcacagagtcgtccgcaacgctttgacccaatatcagaataataaatctctctgtacctcttccgcctctctctttcttcaacttcatcaatatatgcaacacaaagtgagggatcgctataaatgaagaaccatgaataaattctaaatttgaactcggaaactataaccaaattaatcttcaattattaacaaccgaaacatactaccataaatcatgaatt

SEQ ID NO: 224333 - DNA, 382 bp, Glycine max
gagcatgagcttgaggagaagagaaaaatacatgtttgtcatcatcaaaaaggaggagaatgtgaatgtatgtatacatgattttgatgatgacaaagaagaatctaataaggctgttctaaatgataagcattagtttcaagaataattgaagattgcttgaacatacaaagccttggtgtaagactcactaaagaccaagccttgccatagaacaaagtgctttcaagacatgcaaggatctgtgaatcgattaccaggaagtgtaatttattaccagacgacagggtcgagaaatatctgtcgaaaaaaggttagaattagaattgtcaaacttgaatcgattaccatatgtctgtgatctattaccagcaacaaaact

SEQ ID NO: 224334 - DNA, 287 bp, Glycine max
aaatacctaccctggctcgcctatatggatgaggagagttttttgttatgagtccgtctcgagcatgtcgctctctgatactgtaaaaataaaggatctaacatcgctggcttaacattggggttggatgcctaaaacagtggcgagcatactcctaaataatggaaactcgtatacatcacattctcaaaactgatgttgacgagctcatgttgacaatggatgtgaccaaccaatgctgacaagagctcgcagacaagacttataaagaatagtgccggggtaaa

SEQ ID NO: 224335 - DNA, 456 bp, Glycine max
  unsure (1)..(456): unsure at all n locations
agctngatcttgaattaatcttttactatgcttatttgattattctttggcatcatcaaaatcatgtattcatacattcacattctccccctttttgatgatgacaatcattatcaagtgaattcttttcgacatcatcaaaacctgtatgattcacattctccccctttntgatgatgacaatcactatcaagtaaattctttttgacctcatcaaaacatgcatgattcacattctccctctttttgatgatgacaaccatatgtaggttaagagcaacaaaaaaatatctatctgtatagtttactccccctctgatttgcaatgattacttatatgaaacagttgaagattgcatatatttcataaaaaactgtctcataaactcttactatcttatcttttatctatctctccccctttctcaacatanaaaacaaatcatgagcagagag

SEQ ID NO: 224336 - DNA, 483 bp, Glycine max
  unsure (1)..(483): unsure at all n locations
ntacacaaacaaatggaaattatcaaaatgataacaatatttttgttctggcagcatacaaaatgccacacaaaaacatagaacactacttgctgaggatgcaatccactccctacttatagtagacactcaaagagacattctttctgccgccaattctagtgctacaatccacatagaacaatatctgaaccatattcttatccatattcttatcacacagctccatcaatagtcataggggctaacatagaaaagtccacaacatggaagttcacttttaacaagagacaaataagatagcaaaaaanaaaaaatcacaaataacaaatggctcactattgtacctgcttaaacacatacaatcattccaaagttagatacataatacattatcttaagcatcaagagaaacttaggatacacttaanaaaaagttcattcncatttgacaaaacaatgtctcaaatcaaataactacac

SEQ ID NO: 224337 - DNA, 437 bp, Glycine max
  unsure (1)..(437): unsure at all n locations
gagttcactgagagcttctttagggtactagcncatacttctatcgcgcctggaagctcgctcagcttgttgaagtttgcattcacttcttctaatgctctggtgggtcaaaattcatcatagcatgcatgcatgttaaaacaatgaaccacgtaatgatcaacatgaataaattatgatacacacacaaacacagntaataacccctcgattgatacaatcaattaatcttattttgtttcttgcacgctactaaacatgtcatatcagtttgatatgcaaggaataacaatattgatattgagatgtaagagctagaaatgcttaactaatgcatgtgatgttgaaactacaatggaatatttaagaggttgaagaatagaataatacaatggaattattatggtacatatcgccgccgcatttaactgtatata

SEQ ID NO: 224338 - DNA, 451 bp, Glycine max
  unsure (1)..(451): unsure at all n locations
agcttcacatggagcttcatcaagttataagtaacttaaatntataaataaacaaatgttatcttattttgcttaatggatttcacttgactatgtttattaggtgtaggctatgttattagaagaaattttatagcatccttcattttatgaccttttctatggtgttaagcctattctttctgactttccattgattgaacatgaatgacttggtcaacaattgaatcctaagactaaaaatttaaattcataaggaaaattatcactatagagtcctgaatgaccagttcacaactctattcagagtcatttctttctgatcactcataacctctaaactattttgctctttcaaaaagaanaatataccagccatcatgttangtcgtcacatgaaaaataataaaatgcggtcaataaactcttttcaataaagttaggtaacact

SEQ ID NO: 224339 - DNA, 406 bp, Glycine max
  unsure (1)..(406): unsure at all n locations
catggttctcacttcactactagaaataatggttttaacatcgctggcttaacattgggtttttttttctaaaactgatgttagcatactcgtaaataatataagctcgtaaacatcaattttttaaaaactgatgttaacgagctcatgttaacaatggttgttcaaaaaccaatgttaacatgagctcgttgacattgattttttaaagaattgatgttgtgttttaacttatataaaaacccaaaactcgtttcaccctgcgctcactctcccaaacctccttttactagagcagctgatgactctcaccactatgagttgagactgtcctccttggaaactgtcggcactcatgactcttaccactctcacaccatcacntttatcgtcatctctcagtttc

SEQ ID NO: 224340 - DNA, 397 bp, Glycine max
  unsure (1)..(397): unsure at all n locations
agcttgagcaagattagaagaacgaggcatcattttttttacaatgatataatgcatgatgcgacaatcaaatgtcaatgacccgacaagcaatctaccggtcatatccgcctggtcaatgcagaccatgcggcgagcatcatgactagagtaatcaaacttccagtcatcaacaagggtaccctcaaaaggttcaccttgactggggaatngtgtcaaagaaaagaaaagagactcatcaataatcataggtataccatgcaccttaaaaaataaagttccatcctgaattttcaaatttgagtataagactcgcactaactcacgataatatggtaaatttaatgacataaaaggaatcaaaccagcgtttttgaacacttgatagcaatcaaat

SEQ ID NO: 224341 - DNA, 385 bp, Glycine max
tctatagaagggctcgctcctaatttctctacgagggatcatctcttcatgagctggcgaagaataatgcggcatttacctgtggtgaaaaacaagagcaagcctttgctttgctcaaagaaaagcttactaaggcacctgttctatctcttgctgacatttctaaaacttttgagctagaatgtgatgcctctggagtgggagttggagctggatagtgacaaagtgggcaccctattgcttatttagtgaaaactgcataggccacctcactaccccacctatgaaaagagcttatgccttaatagaccctcaaacttggaccttacctgtttcaagatttgtatcaaggatactatactaattcattaaggcaacacgtaac

SEQ ID NO: 224342 - DNA, 397 bp, Glycine max
agctttggaagaaagtgatgaggtacaagccctttatgtttagcttgaaagagcctgtgtagtcgaagagaagttcaagtccatagccatcaaagtctgaaaagagtatgatgaactaagggatgtcaatatggccaccgatgaagccttggaatgagaaaccaagaaggcccgaaaggaagaacacgaccaaagcaaagttttgaggggctttatagggcatcaatagtgagctcaagctccgaagaggtgaaaggaatcatcacgggtcaaaggcatgatcttgaaggacgagctaaaggtttgccttatgtcgaaaagaaatttgtcccaacagttaagcgaaactgaagggaatatgtgggccatcatcgataagtgcaaagagaagctaaat

SEQ ID NO: 224343 - DNA, 389 bp, Glycine max
  unsure (1)..(389): unsure at all n locations
cagctnttctntctcaatcaagttgtctacggactattttttctaaangcaagctcacattcctggtctttctttgtctaacatacacacttgctcaaactcatgaaaaagaaacacaaattccatcaaaatcatgcattctattcaaaataaagtcctacacccatttttcacaaaaagataaaagtgttttactggcatgtcatcaaaatcaagtcaaactgttccatatgcttcagaataagccaatcaactaatcataaataaaactagcagtgtatgtagacataacggaaatactgtactaaaactataattataataataataataatctgaaaaggaaatcagtgtccaaattggagagtcagtcagcagctcatccaatc

SEQ ID NO: 224344 - DNA, 445 bp, Glycine max
  unsure (1)..(445): unsure at all n locations
ngaccaatcccgacccaacccacgcatattcaatcagtgataacctgtgatgtacctaaacaggcgagctcctggcagtcaaccgattaaagaacaaagaccacacagcacggaggcttgcgtggtggctggccagctatgaatcttgagtggtagttggaatatggcctctggtaatcgattaccaacggtgtgtaatcgactacaaggcttaaaaatgaagacaggaagttaagatggtctctggtaatcgattaccaatggtgtgtaatcgattaccatgccttaatatggngtcaggaagttgagatggcctctggtaatcgatcaccaacgggtgtaatcgataccaagcttagaaaagacacagttgttaagaggctctggtatcgataccaatattggtattgttacacaataactggcctggaattgataccagtat

SEQ ID NO: 224345 - DNA, 367 bp, Glycine max
agcttgaatctgaagctgaacacaggcagctttcttttcttataaaatatgaaaaggaagaagctgccacaatatttttggtcatcagcccaagctcacgagtctttaatgaggcagaaggcgacatcgcgttggattaaggagggggtcaaatatcttgatattttcacctggtgattaactcccatcaaagtttgtagctttctccaacagagatttcaagaaactatgagcagcataccagttttgaacggcacctcttatcaagaaactatgttctttggggaggctactatgaaaaatgtcaagacaatcaaactgattttgagggctcttgaattgcctcaggacttaaaaaaaatatggg

SEQ ID NO: 224346 - DNA, 344 bp, Glycine max
  unsure (1)..(344): unsure at all n locations
tgcctcanagagatctaggaaggataaagcggctgaaggacccagttctgcttccgaatatgacagccaccgttttatgagcgctgagcacatcaagggatggtcatttctctgggagcgacgcgtccagctcatggatgacgagtataccaacttccacgaggagatagtttcccggcgttaggcatcactggttacccccatggccaagtttgacccacacatagtactcgaattctatgcttatgcttggcctacaaaggaaggcgtgcgagatatgcgatcctgggtgaggggtcagtggatcccgtttgatgcggatgctcttagccagttcctgggat

SEQ ID NO: 224347 - DNA, 388 bp, Glycine max
tagctctcatacatagaattggggcgccattatctatttatgaagctgagaagcctcccattttatacttttgccaggaccatgatctgatattgatccccaacacctgctgtgcaatgttaagcttacgcttaactataagactggtcctatgctaccaaagtgatcacacagtggctaacaataccagccatcacccttttgtgattttttaactcctatatatataccaattgtgttggggtctaatttctagcattagaaaattgatgctataggcgtaaaaatgcctcatacgattttattcggaacttctgatagcaatacaagagtcagggtaaattatataattgagcatgagaaagaataggatgttttacagtttgta

SEQ ID NO: 224348 - DNA, 328 bp, Glycine max
  unsure (1)..(328): unsure at all n locations
gttcagcccctttggcacttctttgtctctcgaaatagctgacgaaaaatagttccctgtagataaatcaagcccgagcgcttgccgcacgttttcgtgaggtattacgcgaagatcttcgaccggtcctcaagaatcttcgctttcttcaggctttaacgtgctatgtacctcagaccaagcgtttcaatncattctatgtacccgaggtggtacacattgtgggtcatgacttctattctcgttacatttacttttataccccctttgacatcattaaccattaattaagtcattcccgcttatctaaagtaaataatactttata

SEQ ID NO: 224349 - DNA, 397 bp, Glycine max
agctctggaatctgcagaaaagatagcttatttttctattacataaaagtactattttatcaacaagaaaatacaacagtgtctggctgagatatttttgttattttcaattcaaaccaaaaggaaaagttatatttgaatgaaaagaaaagctataatccaatcataaagaaaatagtaattatttaaatcagatcataaacaaatgagtatatgactaacaacaaaaatgctcatttcttgatggtgctagcttgcatataattctaaccttccctgcgcctcttggatctgtataaggaagattatgagaaacaattattcttccaaaccaatcttctttctggtccccagcctggcagaacttcctaaaatagactctatttttcatctacaa

SEQ ID NO: 224350 - DNA, 422 bp, Glycine max
  unsure (1)..(422): unsure at all n locations
ttaccatccatggacaatagtaacaaacgacttctttgctcttcctgtgttccttccaatacaaaaattgtttgaattntgccttccattctcgataatgagaaccatcataagaggggaaagggatttgcgccctatccaccactgagacaatgggttcatgagtctcactatgaatgtcatcctcaggtgtgattttaggtcccttatgttgggctgcaatcgaaaccatcagtccctcgatagatatctgcatcattgcgaacgaattttgcattgactcttgaagatcagagatgatcttctcataagaatccatgagtgtctcaagctctttntgtgtcacaatcgtcacctactaattgttatagttagaaataaacttctaatgtaacttcactcactcttactcacacagcgta

SEQ ID NO: 224351 - DNA, 384 bp, Glycine max
agcttgcctaattaacctgaaatggagagtgttattattattaaacacataaaatggaagtactaagtatttattacctatctttaacaaaaattaattacaatactacaaaataaccataaattggaggagttctgatacaatttacataagttttatacacaaaagttagttgtattcatcgactaacactcgtccccttaagcgggagtccacttttggcgctaagcgcgacaattcgcgctcaacgcaattccctctcgggttggaattacgcttagtgggcttcatgaactacgcgagaggtcaaaagttgttattatgaaaatctcaacagtcaaaacgtggggcatgtgttaggaacctatagtctaaatttggaga

SEQ ID NO: 224352 - DNA, 157 bp, Glycine max
ccctcttgcacatgcctctatagtacatcctattcagagccatatcagaattgcaccgttactgcctaacacagacaaccattatgtcctttcaacaatggggaacgttctcagttagtataccaagtgacagctaccccagtaagactatcttgga

SEQ ID NO: 224353 - DNA, 378 bp, Glycine max
agcttctcccccaattttctataaagtggggtgttttttaagtggaaaaggcgacagccccttatgcacttttctctctatcgaattagcgaagaataaatgattccgcgaagaaaatccaagccacagcgctatcgaaacgttttcgtaacgtttccgtaattgatttcgcgaatgttttccatcgttcttcgaccttctttattcagtcttcatcggtcttcggtctttaacgggtaagtacctcaaaccatgcatttcgattcactctatgtgcccgtggtagcccacattcgtgtttgtggatattaccttttcggttcaattactttccgtaccccttttgacgtgcttaagccatttatttaaactatttct

SEQ ID NO: 224354 - DNA, 291 bp, Glycine max
tatagccaaatggacttacctttgaataaggcctgtgtattttctctttgagccatgattccctttccttgtgtgaagctcactacaagccttgagagaaaaaccatgatattaccatatccttaaggaattgtggagctttgtgattagtttgggaataagagcgggggggttttgattcattggacaacttgtattgctgactatgcttcatgatgaattttgggccatacttgatgtacattgtatattgtgtaaatgatggacatgctgaatgacatgatgtttctc

SEQ ID NO: 224355 - DNA, 349 bp, Glycine max
agctagtgttttgcctcaagcgacgatgtttttttttacaatacactaggactaccagataaaaataataacatttgtcgtctgtctcacataatgaggtttaagttatgatttatttgaccaagctttatttatttgcaattttttaaaagacataatcatcatctctattactcatataaagagcagttgactattgtctcatatttacaccattaaaaaatatggagaccaaattcgagaagaggttataataatataactaaaattgtcaaaaagaaatttatggacaaaattcataaaattgagaaataggataaccccaaaataaaattaagccacgatatta

SEQ ID NO: 224356 - DNA, 389 bp, Glycine max
  unsure (1)..(389): unsure at all n locations
agcttttgagtgaaacagtgtgatttctttattttntaaattagaatntcaacgttcaaggacactggtaaatcgattaccaaaacattgtaatcgattacagccttttgaaaatatatggaacgttgttaattcagtttgaaaactttttcgaactcattttgctactggtaatcgattacaacaatatggtaatcgattacttgagagtaaaaactctttggtaaaggttttgtcaaaaactcatgtgctattcaaagatttgaaaatactctttgattcttgtctctggtgaaggtataatataatcttgaatcttgatcttgattcttgagatcttgaatcttgcatcttgattctagatcgaagctttactctttagtctcgaa

SEQ ID NO: 224357 - DNA, 464 bp, Glycine max
  unsure (1)..(464): unsure at all n locations
ntatcttcagttcaagaagaaagtgatatataatacttgtatgaagtacaagagatgatgatttcagtttcttcgctaagagattaaataaattcctaagaaacaaagaaaatcaaagaagatcaaacttccaaccaaagaaaagaggagaggattcatcttttgctccaaagtattatgaatgtattcaaccaggacatctgagagttgattacctgagtttcaagaatagaatggaaagatctgagaggaaaactttcaatgataagaaagcaaataaagcttacatcacttgtgaagataacaatatggattcattcgaagactcagaaaatgaagtcatgaatntaagtcttatggcaaaaaattgtgaaagcgaagaagatgtacatcttcaacaataactatcttttcctttgagaactcagatgcatcactgttacataagaatcagcaactgcaaa

SEQ ID NO: 224358 - DNA, 382 bp, Glycine max
  unsure (1)..(382): unsure at all n locations
agcttgcgggactaatggaacagcagaaggatttatttttttatgnnacatagaccaggcgcaacactacatataaaaacagtccccatcgacatgtatgaatcatgggataaattgcatttataaaaaccacatctcatcacgagacagatactcttgcattcatcgagacatattctattgagaacaaattggatcacacagataacgatcctggtggtgttatgctctactttactggatggaattgaacttttagtttgaccgacacaaatgctaaagtctggttattgctgttgtctactacagagtgccaaaggagaaaatgaataaaaacagtcccatgatactcacggggctgacatataaacataatccttcc

SEQ ID NO: 224359 - DNA, 328 bp, Glycine max
  unsure (1)..(328): unsure at all n locations
tactaagctggactcngcagttgactggcaagtgaaggaggggtttttatttctatgctacgtgcacaactctgcaagatgagggacaggtttttggtggaaaacgccactgctactggcgatttgtgctgcaggtatgagtagccagtagcactggcgacttgagcatgaattagccattcccgatggcgatatcagctcctttataaaccaaagctccgcccatttgatgtgcgtctcttgaaatcatctgagagtggatattatatgtgcctcttctaaaaaatagtgagtctcaaactcgttatcctatattgtgttgaatcct

SEQ ID NO: 224360 - DNA, 404 bp, Glycine max
  unsure (1)..(404): unsure at all n locations
agcttgcctatctgatgcagcagtaatgatggtttcttttatgttggggaacggntacgaacccggaatgggtttaagcaaagacaacggcggtataactagcctgataaatgccaaaggaaatcgggggaagtatgggttaggctataagcccactcaggcagatataaagagaagcatcgcgggaaggaagagcggtagtcaaaactcgcggttgagacaagaaggtgaaggaagcccaccctgccacataagtaggagctttataagcgcgggtctgggagacgaaggtcaagtggtcgcgatatacgaagatgatgttccgagtacattggatttggacgaccatgtcctcctgatttccagctgggaaattggcaagtgaaggaacgctccggcattta

SEQ ID NO: 224361 - DNA, 348 bp, Glycine max
ctaagcttcgcatcagaccacttccagggtgctggaactacttcttatggtcttgatggggcctatgcaagttgaaagccttggaggaaagaggtatgcctattgtgttgtggatgatttctctagatttacctgtgtcaactttatcagagaaaaatcagacacctttgaagtattcaaggagttgagtctaagacttcaaagagaaaaagactgtgtcatcaagagaatcaagagtgaccatggcagagaatttgaaaacagcaggttcactgaattctgcacatctgaaggcatcactcatgaagtctctgcagtcattacaccacaacagaatgggatagttga

SEQ ID NO: 224362 - DNA, 348 bp, Glycine max
gcaagcttcttttgtcagtccatgggtggacagtttatgtttttgcagagcgagcccacattgcgggtccttgtgaggcaaatatacacacttgctctatctgaagaacaagaaacgcttcattcatcccgaccatgcattctatttaataatagggatcgaccccattgttcctagaagatcaaagtgtttaacggtcctgttaggaagaacagcacaaactgtcccgtatgcgttcaactaatggcaccgactttacctagataagacacaccctgttcgccgacatagcggtaatacgtgactagatctataaacctaattataatcataagtccggataggaaa

SEQ ID NO: 224363 - DNA, 389 bp, Glycine max
agcttatcacgtatcaagcacaggagccattgtttattttactctacccttagttcgatatacttatattgctcgcgcctacctgcagatgggttagatatttcattccttaccttatgacatgcatcttgttccttcattttaatgaacctaacatatgcattcctttgcatcatcctggcttatagttatatttttatcctgtacttcaacatttatcccatcttgattaaactcccaggtactttaaaccagtttcaaggtgggacaaagagactggaacactgtatctttccaagagtgtgccctctacaggctatttgcggagaaggtaacagaatacacttaaagaatatcgcatgccttcgagcatgcaaaccttcttctaa

SEQ ID NO: 224364 - DNA, 315 bp, Glycine max
atctaaaaatcccgccagaggacaatctttttctttcttggaagggaccacaggataatggacttccacaccttcatccacagccttttcactcacacaaatcctagcaatcctaaaacttacttatctttatgcattcttatcatacaccacatctttcactctctcctgggccctcaaatttttattcttgaccaatatttgcgtcactttttcttgactactgtcacctctcaccacaattatcttgccatcaaaactctttagacagcaggtttctttttatgcacaacactatacttaacctcagcctcc

SEQ ID NO: 224365 - DNA, 431 bp, Glycine max
  unsure (1)..(431): unsure at all n locations
ctgtatacaagaaagaagctctgataccacttactggactatgtgtccananatactaagaaggggctggaattatgatatcacaaacaaatccccacataaaaatcttacttttaattcaacccaacaacccacgattccttttatacaagaactcctagataataatgcagaagaatcttactaaatagaaataataagcaataaacattaaaggagtttgagtggaagagaatatggaaactcatatctatactgcttcggccacacccttgtgcctacgtctagtccccaagcaacctgctcgagagatccactatacttgcaaatcctgttacaagatctgaaccacacaaggacaacccttgctttgtgttcagatttctttacaaacagaaaccctctgtctcataatccctcttgagaaatag

SEQ ID NO: 224366 - DNA, 355 bp, Glycine max
agcttgagatgaggaagtgagaagggttatttttctgctgttattgttgaccacagagtggtacctggagatatgtcgcgggggtcaggagaccttggggacatcaggtggggtgctattgcccaaaaccaagcttgagcaatccccaccctcccgcggcttaatcgagcagtgagaacctgtgatgtacctaaacaggcgagctcctggcggtcaacagataaaaggaacaaacaccacacagcaaagaggcttgtggtggctggccaactgtgaactttgattgatatgtgggttgtggcctctggtaatcgattaccaaaggtgggtaatcgattacaacgcttaaaattga

SEQ ID NO: 224367 - DNA, 377 bp, Glycine max
agctttataagcgcgggtgagggagacttttgttttttggtcgcaatatgcgaagatgatgtgccgagtacattggatttggtacgaccatgccctcctgatttccagctgggaaattggcgagtggaggaacgcctctgcttatacgcaccgagcataatgtaaacctttacggtcttaaaagctctatagttgggcctaagctttatagctcttcctttaggtaaggctttgcgccttctgtttttgaatttataatacaaggatctttcttcatctgttcctacgtctggacccattctcattcaatagcatgttcacttttttttgtgttaggcagaaccgatgaccagttcccccgaaggactaatacctgg

SEQ ID NO: 224368 - DNA, 369 bp, Glycine max
ctagcttactggcggagacctgactacatgtctgttctctttcttccaaagtgctacagttaagatgatacttaccgtcatgagtcatgatattattggatataattacagatactttattcatataaaaccttattttatttctaggaagaggaaatctatgggatgtagggatatggtcatacttaagaagatcgacctggaatagagaaatccaacatcctacactgactaacgaggttatggatacaattaagttctttttttgttgaaaatttaatggatgtggataaggacatactttataagtttgtagatgacccatacacttacatacttatacctggattataatgttgacttcttact

SEQ ID NO: 224369 - DNA, 392 bp, Glycine max
agcttagtgggttttgtaaaaggtaacacttattttatgatttctcctttgaaaattgaagaacagaaactggggctcttcttaaatatatgttctttgaaagctgaagagttttgaagacccacaaccatacctttttgtttggtattttacaccgagaatatctctccaaaatatagtcatagactaattccttcaaggtggaaaagtcaccgacgtgaatattgtctctccaaacattttatatatatatatatatatatatatatatatacttgaggaattgaaccacttataacatgcaccaacaactgacttttaacggagggaatatacaaatccctacaaagaaaaatggtaactagctataaccatcaacttaatgcataaaa

SEQ ID NO: 224370 - DNA, 371 bp, Glycine max
  unsure (1)..(371): unsure at all n locations
agcttgntggaagcaatatgacgaccctattctgtattctgacgganaccacgcacccgcgactaaggaggaggaggtgactcttctctggtcgtggcgcaaactcccatccaagctagggatgctcatctcatccgaatatcaagataattataatcatatctaataagtaattatctaaattatcagtgaatattataattataactaatttttaaaatatgagtataatctacaataatcagctattgtttttaaaatataggtatataattagtcatgaataaactagttacataactaattacataatgagatatgttgaaaatccatcatataactagctatgaacgaataataataagctattt

SEQ ID NO: 224371 - DNA, 332 bp, Glycine max
  unsure (1)..(332): unsure at all n locations
ttcaacttggaggtacccatcatgctacccgcaatgaatctttctangccggnngtaacagcgaccaaagactacagggtgcatcacggtattgggcaaaacacagaacactactgggccgtaaagaccagatagaagagcttatacagggtgggtacctagctcagattattaaaagaccacacaaccaccaaacaagagcaagacccagacgacaccaccagaggaatcacgatgcatacagaagaagagatagagcacatcgagggaaacaaagacaccaacaaggacgacgcaagtgacaacctccacaagaacaagaactcgccctg

SEQ ID NO: 224372 - DNA, 394 bp, Glycine max
  unsure (1)..(394): unsure at all n locations
agcttatccaaagaggcagagcttgtttcttttttttcctaactcagtcacctgtaaagtcctactatattggtacaacgaaacatgtcacagtttaatgagtaattcaacattgtacataataagcgcctctgcctgtaaaaattttaaaaacatatacatatctaacatgaacttaatcttcatttcaagatgtgttgagtactatatacttatttatgaaagaggcanaattcacccatgttaatttggaagggactataaaatgcaagattgttacaatcactggaggaagtctgcaagaatggttctggatggaagttctttacaaattcaaaaaacttggaagcttgccaggaaattatatattgagttccaaatccataatctaact

SEQ ID NO: 224373 - DNA, 401 bp, Glycine max
  unsure (1)..(401): unsure at all n locations
tggagaggangcttcaatggaggaaaagtaagtggganattattanagaggggggaccacgagattgaaggaataaaaatggagagaagttgaactctgagttgtgtctcgcacgactctcattcatcaaagatacaacaagtggtacacatgcctctatttatagactaaggatcttccttgagaagctctcttgagaaaacttccttgagaagcttttttgagaatacttccttgagaagctagagcttagctacacacacccctctaataactaagctcacctccttgagaagctctcttgagaagattcctaaagaagctagagcttaactacacacaccccctataatagctgatctacccccgtgccaaatacatgaaatatataaaaaggccta

SEQ ID NO: 224374 - DNA, 407 bp, Glycine max
  unsure (1)..(407): unsure at all n locations
gcaagcttgcacctgacgccatggaggtttatttgttattttccgtgangatactgaccacgctgcttacaatatcttgcaaaatcttcttggcggcaatggcgatacacatatgacccacattgctttgcacgcgataacatatgaacactgtgccggtatcaacaacctttccctttattgctgggccagtataggcacacaagcaatatcttctcgataacagaagaagtcactggaccatagctgccttgattgaaaaagactgatgtgctttccaaagcaagttcttcaacacatacacatccagagaaggaagtgtgtggcgatttaatagagcatcacgtacagcttcaaattcaggtcttagcttctgaggaaataatctcgtttaagtgacctcataa

SEQ ID NO: 224375 - DNA, 285 bp, Glycine max
  unsure (1)..(285): unsure at all n locations
agctngaaatgaggaggtgtatagcggagagatttcttttttttattcanggaccacagagtggaacctgcatatatgacacgcgggtcatgacaccttggggacgtcaaggggggtgctcttgcacacagacatgcttgaccgatccaggagctactcacgcatagattgttaggataacctctatgtaccttaacttgctagctctcggcaatcacaaatgagaggacccaatacctcaagactaggaggcgtgtgtgggggctcgccaccagtgtaactcat

SEQ ID NO: 224376 - DNA, 372 bp, Glycine max
ggtgtgccaccgactgtgagaaacgtggaacatatggatggataagttgtagattgagctgcgctagcacctgcctgtcaatggactctatttgactctctcatgacttataagacggataccatgcctcacctccatcaagatggagaacaccgctacttggctggaagacatagaaactaggttgatcattagcaccctccttatccccccagaggacgaagcttaatctttcttaagcgcttggttctgttgatagctagcgctgatctacttagattgcagctagtttctattgcgctctatatgtgatagaagctgcgcactcaacttagtagcttgatgggtaagttgtacaagatttatatgaat

SEQ ID NO: 224377 - DNA, 368 bp, Glycine max
  unsure (1)..(368): unsure at all n locations
naagcttctcaagggagagtttctcaagagagcttctctttgttagctacctagnnctataaatagaagcatgtgtaacacttgttgtaactttgatgaatgaaagttttatgagatacacttcaaagttccacttctttccctcttttattccttcaatttcgggctccccccttctctctttcttttcctccattaaagcatcctcttcaagcttcttatccaaggcaattcttggtggtgaagctccttctttcttggcttattccctaggggatggtgcctcccctattctcttctcctttgccttccgctgcatctccatgatgaaaaatcaccattgaaggacctcattgaagatcaaagat

SEQ ID NO: 224378 - DNA, 325 bp, Glycine max
  unsure (1)..(325): unsure at all n locations
tcattgcctaacaagccaacttacaacagcaagccgcaatagactcattntaatgatgcacagaccaaagttgcgtatgttataaaattgtatgaccaagttgaaggtgcgaattgcaataaataatgaaagctatgcccagcaagcccaaaagaaaaggaaggaagtggtacttgaacccggtgatgatcttggacatttgaggacaaatgttgttcaaaaaggagggaatgatgagaatcatgaaacaggccaaatacagtctaaaagcccaattggagaacgaccaatgcccatgtggagaacgacaaaaccctccagtgga

SEQ ID NO: 224379 - DNA, 379 bp, Glycine max
agcttgccaaatagggaaacaagtaaaaagtttttttttttttctatatgctgtctccacttcgatgcccagaaagcttctacaccttgacttgtgtggaccaaccataactgcttctctttctggacacatatatcgtctggtcatagtggaccattacaccagatggacatgggtcaattttctaacctacaaggattagttttatgaacctttatcaattacgtcaaaatattgaaaatgaaaaaatattttgtatcttttcaatcagaagtgatcaccatggagagtgtgaaaaagacttttttcgacaaattcctggaagagaatagttttcaccataatactccacttgaagaacatcataattaaatgatgt

SEQ ID NO: 224380 - DNA, 328 bp, Glycine max
  unsure (1)..(328): unsure at all n locations
ntataagcgcgggtctgggagaccaaggtcaagtggtcgttgatttccaatatgatgttccgagtacattagatttggtacgaccatgccctcctgatttccaagtgggaaattggcgaatggaggaacgccccggcatttacgcaacgagcattatgtaaacctttacgcgtttaaaagctctatagatgggcctatgctttagagtttttccttttgctaaggctttgcgtcttttggttntgaatttataatacaaggatctttcttcatttggtcctacgtctctacccattctcattcatttgcatgtttacttctttttctg

SEQ ID NO: 224381 - DNA, 390 bp, Glycine max
agcttcagacaaaagcaaatcaaaatagaggtatttttttatccaccaatttagtgaattctcaaggtttgaaacgtgaaaatgaaaaatgggcttatttggggtaaactcttatctcaatcaagtctattacattgatttaaacttgctcgaactggttttaatgccaaaaccccacctattcaaaatttggcctctcaacaccccatttacctctaaaatgactcttttctttcacagttgtcactcatttttctattttctcttcccaagcttacctacaacccctaattgatattctaaacaacaattcactcacttttgactccaatttccactaaccccacatttggctcttcctacccttaaaatccacatttttccactcac

SEQ ID NO: 224382 - DNA, 391 bp, Glycine max
  unsure (1)..(391): unsure at all n locations
tactcaagctagcaggttcaggtgcangtgctgctactagtggaggcactataatttgggtgccaaacctctatgtgatggcactcacattttttcgatattgcacaattcgagaaggcaatttgtcaaatatctgggaccgagcctgagtcatctgagtagccatctgtcccatctggtttgtcagactctgaatggaggctcttgtctctcgctgaaattgcacattctggatgggcatttgcctcactaactctcttaacgaaggtcgacgaggagcctcatctgcttgtcgccttagttggaatgttgctgccgttgctcattggaagaagaacatatagctncgtttgaccaacagcatgctgtataagagggacacgctgttgct

SEQ ID NO: 224383 - DNA, 188 bp, Glycine max
gtttttttttttcccccccgcaaccagagcgcctccccggtttctagacgcgccctccctaattttccatattttccccctttgtggtgatttaagcttccatgaaaaacagtgtgggatctccgaggcattggtctacccttaattaacccgcccttggggaaaaaattagccacgagggttctata

SEQ ID NO: 224384 - DNA, 397 bp, Glycine max
  unsure (1)..(397): unsure at all n locations
agcataaagnatgcccgaggagagattttatattatgtngccgaagtactggcgagcagaatcgtcattccttggattataaggatgaaccaagctcatgcttttacaaaaaggttcatcacgtcaagttgaaatatggaagtaattgtcttgcaaaattggggcaaaagatgaaacgagtcacatcactgcttcgtctactgccaaacataattaggattattgaggtccttgtcacttccactatcaccttggacaaaatggcatggaccatgttgaaaatctaaattgaatcaaccccctatcctgcgaaaaaattcgcaagtcttaactgtacatcatgccatacatcatgcctttcattggtgaaatgcccatggattctctccttgaaaaa

SEQ ID NO: 224385 - DNA, 296 bp, Glycine max
  unsure (1)..(296): unsure at all n locations
gcatgcaagcttnngaacaattcagatgggcataactttttttctctgaggnccgatacaagcgcataatatatcaagacgcttgaaaatgtacaacggaagctctcgtgatatttaaatggtcataacttttaactccgaggtccgattgaggcgcataatatatttagacgctcaacattgaacaacggaagttctcgaaaaaatcaaatggtcataaccttatactcggaggtgcgattcacgcgcataatatatcgagacgctcgatattgacatcggaagctcttgagaat

SEQ ID NO: 224386 - DNA, 435 bp, Glycine max
  unsure (1)..(435): unsure at all n locations
ntgagggtgcgcagcccaccatctttgcatagtgaagcttctattatgtgtccaccatcacgattatcgtctccctttccattattgggggagctacttgagttgccaagtctctccatctttgggcgtattcttcgaaagaatcgtgcccccctttgtgcacactttttgtagttgcatcctatccggagccatatcacaattgtactgacactgcctaatgaaagcgaccattatgtccttccaagaatggactctagaaggctcctaagtcactataccatgggacagttgtcctagtaagactctctcaggaaaaatgtatcagcagcctctcatctttggcgtatgcccccatcttctgacactacatctttataatggtcgttggagcgagcagtccccttatacttgccatagatccgcaccttgaac

SEQ ID NO: 224387 - DNA, 124 bp, Glycine max
tagagaaaagggccggggggcccttggaccaggcattgaccgaaatcctgatttagctgtggcaaagaggtgggctgaatctggtaggaaggtcttgagcactttcctccggaatcagggtgag

SEQ ID NO: 224388 - DNA, 177 bp, Glycine max
gttttgaagaggaatcatactcgaagagccaggatgtcttattctggcgcctccaatcttcagatgagaatggctcattgttcccactgatccccatatcgtggtggagtgattaaacgaatgtggtcactggtctgcacctaactggagtacggaaggcacttgagacgtcaagta

SEQ ID NO: 224389 - DNA, 335 bp, Glycine max
agcttgtagggttaaaggctgcacgattttctctttctcacgcaacaattgttagccgtggttatactaaacatttttccaaacaaagatctggttaccataactcgcctgtgctttttcttccatgctatatgtagctaagtcattgatcctgtgaagtatgatgagctggaaaatgaggccgcaattatactgtgccagtcggagatgtattttccccctgctttctttgacatcacgattcacttgaattgggcatcttattagagaaaataaatagttggggctcactttatcttctggggatgtcccctgttgaccgatacatgaagatc

SEQ ID NO: 224390 - DNA, 328 bp, Glycine max
  unsure (1)..(328): unsure at all n locations
ctcttgagaagacttccttgagaagcttctttgataaatcttcnctgagaagctagagcttatctacacacacccctctcataaataagctcacctccttgagaagcttccttaagaagatgccttaagaagctagagcttagctacacatacctctctaatagctaagctcacctccttgagatgagaagctagagcttagctacacaccccctataatagctaagctcacccgcatgacaaaaaacatgataataacaaaaaaaagtccttattaaaaagacaactcataatgccccgaaatacaatgcttaaaccctttactact

SEQ ID NO: 224391 - DNA, 389 bp, Glycine max
agcttccttgagaagctagagggtatctttcttgttaagctagagggggggaacacacactccttcgatagctaaactcacccccatgccaacagaccccttcaatagctaagctcactcgatgccaaaatacatgaaaatacaagaaagtccctactacaaagactactaaaaatgccctgaaatacatggctaaaatcctatactactagggtacctttaacttgtagggtagggtgccctacaaacctaaaatggccaaaatacaaggcccaaaataaggaaaacttattataatatttacaaagaaaagtaagctcatacttagtccattggcccaaaatctaccctaaggctcatgagaatcgtaaggccttctcttacatcac

SEQ ID NO: 224392 - DNA, 358 bp, Glycine max
tatgagtcatgaattaatatgtgagagattaagaattctttatatataataaagtgaaaaatgaaaaatagtcaataaggcatgattacggagtatactttttgaatatttaaattatcttaattaattttgaatctataattgttaacatagtagattttcttaaataaaattcatctaaaaataacaccttagaaaattattatttaacgaaagcacccacctttattaagttagaaaaatattacttaagtagcactaaataaaatactttaattctaagatatagatattgaatgatcaattatgaatatataataaatttaaatctatttctagtatttatatttctttttca

SEQ ID NO: 224393 - DNA, 385 bp, Glycine max
agcttatcaagacctggagacaagttatgatcatttttgtgcatccaaaaatatgtggatcaacatgaagcaatagttctttaggaaaaaaatggaatgcggtattttatttttaatagaggaagaaggcattctatttaccaaaaaacaggctgtcaaaactgcatcaccccaatgccggacaggtacattggcatgaagtaataatgtccgagcagtctcaacaagattcctattcttcctttcggcaatgccattctgttgaggagtatgacgaccagaagactgatggagaatgccctgcgctgacaaaaaagaagaaatacgcaaagaaaagtattcttttccattatccctccaaagatcttaattgccctaccacact

SEQ ID NO: 224394 - DNA, 441 bp, Glycine max
cggacctataaaactagctcgagagatgcttcatggagaaagaaaggggagatttattataggtgtgagcactatattgaaggaacactaagggagagaatctgaactttgagttgtgcctcacaagactctcattcatcaaagatacaacaagtgctacacatgcttctatttatagactacgtagcttccttgagaagctttcttgagaaaacttccttgagaagcttctttgagaaaacttccttgagaagctagagcttagctacacacacccctctcataactaagctcaccttcttgagaagcttccttacgaagctagagcttagctacacatacctctctaatagcttagctcacctccttgagatgagaagctatgacttactacacaccccctatactatgctagctcaccccatgactaaaaacatgaaa

SEQ ID NO: 224395 - DNA, 84 bp, Glycine max
agcttgcatttggaattgcgaaagcgcgactttattttttttattagcacccgggatggcacacacactatattctacgtatca

SEQ ID NO: 224396 - DNA, 216 bp, Glycine max
tttacggaccttagatactaagcttcctattcaatccgaacgtttagttattacgggactcaatccgacattctagttaaaacgtattcgacgttcgaattggctgagaacttcatcattcaatttttagtcgttcctacatactctgggactccaaccgacatcctagtaaaaagctaccggcgtgttgatctcctcacaacctctttttcaatt

SEQ ID NO: 224397 - DNA, 394 bp, Glycine max
agctttgcgcttagcgggatgaccctttactcatttttcatgcacaactcatccttcttccagatttttcctcgcgcttagccgaggattgttgcgctcaacggatggcttgttaagccagcagattggcttagcgagagggtgaaaatcagcacttcaaaacttgcctaattatcctgaaattgagagaaaatgattattaaacacacaaaatggaagtactaagtatttattacctatctttaacaaaacgtatttacaacactacaaaataaccacaaactggaggagtttgatacaatttacacaagttttatacacaaaagttagtcgtattcaccgactaacaattacagtacccagcatacaagagacactaagaggaactcaaact

SEQ ID NO: 224398 - DNA, 343 bp, Glycine max
  unsure (1)..(343): unsure at all n locations
ctgcataccccaaagatccattatgagtatacttgtgaaagagagccatgagggtgggctcatgggccactttcggatatacaagacccttgtcttactcaaagaanagttttattggccccatatgaagaaagatgtccataagcattgcactatgtgtgtggcttgtttacaagccaagtctagggtgatgcctcatgggctatacacacccttacccatcccatctgcaccttgggtagacattagtatggactttgtccttgggcttcctagaacctaaagatgtgtagactctatctttgtggtggcggataggtttatcaagaaggcacactttata

SEQ ID NO: 224399 - DNA, 468 bp, Glycine max
  unsure (1)..(468): unsure at all n locations
tactcaacttaatggagcttacatcatgtggtatcaagagcatctttatctatgngatgttcttttgcttcctctatcctcttgntccgngaattctctntaattcctagttcttcatcttattcttcatgtatatcctccattgtcttgaggtttggtgctgtttagagtatattaaaaaaaatgaattaattaaatcttagatctacacttcttcttgcatgtctatggttcaaatattgtagatctactctcgaatcatgttgttgtgtcgatcttagggtctatcattctcgactcataatattcttgtgctgaacctcagatctaaattctcttccaaaatattgattagaaaacaaacacataaattaagtgtaaatcacttaatccatgtttgcttacagtcatcgttagtcataagtaattgtcacattatgctctaagctcgtgttgaattttaatttg

SEQ ID NO: 224400 - DNA, 287 bp, Glycine max
  unsure (1)..(287): unsure at all n locations
agccnnaatttagcaaggggagggaagtctttttaactctctacgaaacttgcgtgaagggcgaacaaaccctaagattacgcccgacaacaacaatagaaagctagaagctgaaaaaataaagcattaaattacaagcaatcaacaaaattaacctctaaaataaccgaaaagcgtggaaaaaaacaaaaacaacgcgatctattctaacagaatgtaacaagaaaacaaaaccgctaaactaacgataaaaaaatgaaaaactaaaaaccagtacgaagaaaaaa

SEQ ID NO: 224401 - DNA, 383 bp, Glycine max
agcttcttttagaccttgaacaggcaattttcttttctttcagaaccatgctatgtgctcgcgactggtccctttcttcccttcgcaacttgagttcactattgctaccccatagagctccgcgaaatttggtccggccatactcttccttgcgagccctcttggtctcttgttcaagggctcttgcggcaattgcgttctcttcctgtaacccggcgcactccttccgaacgtgtgtagcagccaacttgaacttctccttggcgagttttgcctttcctaactcgcttttgagagcttggacttctttgtcctcttccggcgcttcaaaattctcttcgctgacgacttttaacttggcgagccaatctaaacctcgtatg

SEQ ID NO: 224402 - DNA, 384 bp, Glycine max
agctctctagcttttcattggtgtattttgttttctttttggcgctctacattgtgggaatgtgctcaaatatatggggcaattttggctcgttttcttgcttgattaggcagaattaagggtgtgtttgggatggccctacgcctattatgcattttggaacaatgggacatgccaccttgtccccgttctcttgctattgacgcctaaacgcgcgcccaccaagtgttcggtgaaatgcctcaatggcattatcgcgtgacttttgaacgaaacaacccatggggccttttggtttgtacatattttctatttttggaatatgtcttcattcccgataaaggctacagtaattgccccacatatatcctaagactaagaatt

SEQ ID NO: 224403 - DNA, 320 bp, Glycine max
caagccttactatgcaagagaagaaccaaggattaatttcttcatctcgcataacatcaaagagatacctaagactaccttcgcattgataaatacaaagcatttgcaaccaaaaacatgtagatgtgagacatatggcttcctaccatagaacaatctatatggagtttcctttaagataggtcttattaaagccctattcatgaaaaaacatgcagcaataacggcttcaccccaaaaatattttggaaggggagcatcattcaataaaggtctagcaatttcttccaaagacctatttttcccttcaacgactctat

SEQ ID NO: 224404 - DNA, 343 bp, Glycine max
agcttgccattgggatgtgggacactttttgtataaactgtctgcgactatgctgttgtcaaatatcattaataaacccacagatgtttggataaaagtctgaccttggctatcagatgggattttgtttcaccaaacaaaaatgtcaaatattcaaggtaaatactgaatccagtattgacaaatacgagccatgttttactatttgtgtttgattacctattataatgagctatatgtatagatttgcaatttactgatcagaattaccaaatttaactttgattcacattgagaaattttggaaaaatagaaaaattcctagagacttttcctcgacacc

SEQ ID NO: 224405 - DNA, 396 bp, Glycine max
  unsure (1)..(396): unsure at all n locations
actcagctaccaatggactggggtgcccagttatcattcttcataatcttacacctcttaatatctaaaattttcacatttatgtctaattgccattttacttcattgtagtaaatttctaaggcatcgattgcctaagaaatctcgggcagtaagtagacataaccggaacgtgaataatcatcaataatggtgataaaatatcattcatttccgaaagaactaacatcacaaggttcacaaatatcagtatgcacaatttcaagaagttgagtgcttcttgtagctcctttctttgtatgtgttgcttgttttcccttaataccacccacacaaatatntatatccgtancatctagataaggaagaattcattctctattaatctttccatca

SEQ ID NO: 224406 - DNA, 241 bp, Glycine max
aaagaccaacgcaactcaggatattaacgcaaaacgaaacctcacacaaacaaaaatgatcacacacgcctggtgcaccaaaacagaacattacacacacccagcacagactaatataaaactctaacataaccgaaacacaatctagcccacaaataatagtgaagaaaaccaaagcaccatccctctcatactcgaagctcaaaaaacgccaccggattgacgcaacaacaaaccacac

SEQ ID NO: 224407 - DNA, 333 bp, Glycine max
  unsure (1)..(333): unsure at all n locations
agcttnaatgaagagacgagacctttgttttttttcccccacgactgactcacgctttcattggccattctctcataatgaacttcgactcacatcttctacttgagctatagagaagtggttcaacttgcaaggccttgacatctacctagaaaataattcctcaaagtggaatgttgtagatgtaaatgtttgttcaagtcactcttactctaacataaactactgactgagcatctgaaaaaaaatgttgatttctaaaaacaacttaaagtatgagctcccttgcggctttgtctcccttgtagagacccccttatctaaaaaatcttt

SEQ ID NO: 224408 - DNA, 476 bp, Glycine max
  unsure (1)..(476): unsure at all n locations
tggtcaaggtacttacccgttgaagatcgaagaacgatgtttattttatgaagaacgtcgaagaacggttgatacctttgcgaaattcttcacggaaaacgttacggaaatgtttcggaagcgcctcggcttagattttcttcacggaaacaatttttccaagcaaattcgaatgagagagaagtgcctaaggagctgaacccttttcttcttcacttccttccctatatatagcaaaataagggagatggttgccgcccagctcgcccaggcgagccagggtgcttcctccagaagcaacaaccttctggaggaatcttctggagggcccaagtgggcctggttgctatttgcacccgcatttttactaagtacacccctctggctttgtttggtgattcttttttcggaaggtaccgaacttacgaatacgtaacgatacttgtttcttccatattgtacngaccttgcgatac

SEQ ID NO: 224409 - DNA, 194 bp, Glycine max
aaaggaggacaaccagtttttaaggacaaaacaggcaaagcggcccccaaagaagaaaagacccccccctagcgaccgaataaacctacgcggagagccaagggagaggagaacaacaaaatgagccaaaaccttgaagggaagggagaacaacaccctagaaagaccatcctaaggatgaaaagagcccaaag

SEQ ID NO: 224410 - DNA, 250 bp, Glycine max
gctacaatgtaactggaatcgatacatacagacattggttggacatttcatacaccttcatggaatggcaacaatatgttataccattcatagacgattactctagatacacacacttgcttcttatacatgaaaagtcataatctctgaatgtgctcagaacatataaaggctgaagctgataatcaactcaacacaagaataaagtgtgtcagatcataccatggtggtgaacactatggcagataac

SEQ ID NO: 224411 - DNA, 389 bp, Glycine max
agcttgctgatgttgaaggaacagacggcgaaaatcctcttgtctcattactttgataaggagaatgctccctcgcaagggaacaacgctttaaaaaggatcatggggcataaacaccgataactgaccggcggaagagaacgaagaaacttctcaaagaataggactagaacttgtttctgatctaagtgccgagttatgctacgttaaaaagacacgcccacttgacttggatgttcttgcatgctctttttcccacctatcaagtggaatggctaacatgcacaacctgataacaggtctcttgtgtgacgaagataaaactgagaactttgccatttctatgcaatggcttctgaactatccacatagaaaggtactcgatctgc

SEQ ID NO: 224412 - DNA, 371 bp, Glycine max
  unsure (1)..(371): unsure at all n locations
aggtganatcaggagcagccatttttcttattagtcctccacggggcgcaggttgtgccatgttcccataatgtgccaaaacacatagctcagaatcagaacgctcaaaattataatgctcccaactaggatgatcacaatcaccaataacctcatgcgcacattcaccaataatggaatgcccacgatgacccaaaggtataaaatgatgcctaactaaactatgaaaagtcctatctatctcacggtcacaaaggtttacagcacaaggattgccctctatcatacactccattcacaatgctcaactatttgccctgcaatcaataaacgggcaagtttaactacactactctccaccgaatnccaat

SEQ ID NO: 224413 - DNA, 402 bp, Glycine max
  unsure (1)..(402): unsure at all n locations
tttcgattcattctatgtgcccgtagtggtccacattgtgtttctttcttttttattctcgatttggttactttttataccccctgttgacgtgcttataccattnttacttaagtcatttctcgcttaacttaaaaataaaataaatttccaccgaacgtttgaattgtattatccattaacttcggttaaaataaattcttgaccggtcggtcgtgccgtaaccacgttggaaatcaaaaagaggtagaaaataatataataatcaaaaagacatcttttataaaataaagcggaaaatcaagtggacgttctctctttgggattttctattcttaatcgaattgattaattaactaaagtggaactaaaaggctataatcaattctgctattcaagctc

SEQ ID NO: 224414 - DNA, 399 bp, Glycine max
  unsure (1)..(399): unsure at all n locations
catgcaagccnggaaattgggagtggggcatatatctctttcaccctgaacaacttgagagaaaagactaagtgttgagattgtatatccatttgtaagaagatttatagttagtcattgtgcaaacaaaccataaatcttttgatttttataaaaccagcagtggcttgtgagacaaagaatactatttgtcacaagtgatgtgtaaaatatgttacgttcgcacaagggcaagtgtaccttacacaatagtaacaattgactgggaagtctgtttatcaaacccaaaggactagttgcattctcccttaggtaagcttattaaacctccacttgagatgattacacagagaatttcatatttctgtgggtatgattctatgagaaaacaattatatg

SEQ ID NO: 224415 - DNA, 237 bp, Glycine max
  unsure (1)..(237): unsure at all n locations
acaaaaacnaaccgtacgaggaccaggcgggcccctatttttttgcaaaagaaccggggcaaaacaggggaaatcgcggcccgggaggacccccaacaggcggggaacccgcgccgcccaaaacgatgatgcgccctgagaaaacaaaacaaccccgaagaaggggatggagaagcccgacacccccaacatagcgtgcgaggcaggaccctgggcagaagaaaaccggggcagaac

SEQ ID NO: 224416 - DNA, 349 bp, Glycine max
agcttgggaatcctagaagaaccatcttttgttgtcatgcctaccccattacaagcctagaaagtcatttggaatcattttgtatgctcattgctgtatgatatgagatgaaatgcaaaggttgggacttgtgttagttggttatgatggaatgaacctaaacacttaagcttgagtgaaacaatgactctgacgttttggttgaagatcctttcttgaaatctgccatcctaactagcttattttagttgtgactctaatacgtgtgttcctatctttgaaaagctgcatgtctgcgaaaagcaatttattgaagctttccatgatattcagatcatatggttgaatt

SEQ ID NO: 224417 - DNA, 357 bp, Glycine max
  unsure (1)..(357): unsure at all n locations
tgggtgangtagcgcgtactgatgggtatccttattgtgttttgcttnggatagacccacgcgcggtgttgaagagacggcatgggcatctcctttccttctttttgccactggtgcccccgattcttttggcgttcacgtttgtggaggaaacgtaatgcaacgtttctctcttcaattcaacctcgattctttccccggcaacacccgatccgcatatgctggcggcatgtaacccactatcttttcatagtaaaacactggcagatggtctccatcatggggatcatctctctctcaaccatgggaggagctacttgtgcctgcaaataccttcctcgctgcgcatattcttta

SEQ ID NO: 224418 - DNA, 383 bp, Glycine max
agctttaaaacaggaggggggtttttttttttgtcattaagctttctttattaacaatagctacttttttaaaagtccaaaataagttgggtcaaacgatatttgattataagctgttttgagcatttggaaaaacctttgcaaaacttctctggacttgttttatgatgtaggcacttaacttgaaaattgaaggtatttggttaagtttataaaagcatcttatgattttttttagtattctttatcccatttcaataattttgcattgatgtttgtcaagcgcttatggcataagctctcatgtgataagctcttttggaataaccacttaattaaattgtctactcaaaagtgtacttacctaatccacacttattaag

SEQ ID NO: 224419 - DNA, 313 bp, Glycine max
  unsure (1)..(313): unsure at all n locations
gctttgagtaagggttctctacttccattccattgtttttcttgncttatgacaccattttttttatatatagttgagtgatcattatttattctaaagtgtccacttgataactaatactgcctcaaattttattttacctttntatcggtttcgaattcaaactccataggcatctgaaaaatcgacaaaattatggctgttgtcgcaaaacatgtttcattaaacacttatcttggcggcttggaggctgccatgagaggatggggttagttttgaattatgaagtgaagctaattaattagaaatgtga

SEQ ID NO: 224420 - DNA, 361 bp, Glycine max
  unsure (1)..(361): unsure at all n locations
cctaagatactagcttataagtgcctacattatngtcgccatggaatcgtttctcaatgaagtttgcatacgaaggatgataacggtggaaataaaactaagtctatatttacaaataactacatttgctgctaaaaaaaatatatttaatttcaagtttttacattgtactctcattgtatagtgcatatctttactatcacacggtcatagaaagctcacctttatcctacaccacatataggcattcatgttagacatattttttcattatacaaatcaactcaattcaaaaagacatatcaaaaaagcatatgatagcatatcgaaataatcagatattaaattagatcatagttct

SEQ ID NO: 224421 - DNA, 335 bp, Glycine max
  unsure (1)..(335): unsure at all n locations
agcctagatccaagnggtctagccccttcactataattttgtgaagccttatgtaacaggtgagtagatggacccttcctttaccaacttggatcatagctggatcatgaatggccaaaggctgaaggattacaatggtggtgacattgagagattgaccgccaccatcaaactccatgacccatgagggtgttatatgttaagttaaagaaacacttactgggaggcaacctaagatttctaaccttttctttctttcttttgactactgcatgtaagctgctttgacttttgaatgttggtttttgctgtttaggaaacattccttgactttg

SEQ ID NO: 224422 - DNA, 330 bp, Glycine max
tcgaaagaagagggccgacaacttatggttcgagaaactcccccatctttcgggaatacatccgaagatgccctcttcagacagatgtaactttgtacttatcaaaacccgggactttgaacttgggaaggatcacgatgttgggcacgaaacataaatgcactaaatctggagaatgggtaaattgccgaggccctcgactgctctaaacctctctttcagcgccataatctttcccttatcttctgcaaagggaacaaattcttttaccggtgtgggtgaggccggggtatgaccgactatgttctgatggtcatgcggggacggatc

SEQ ID NO: 224423 - DNA, 139 bp, Glycine max
caaacttctttataaaaaaccaccacagagatgcgattcaatcaatcactgttcaaaactggcgttgaccaaccacttagacagctggaatttaaaggactgaaatttttataactgcaacctaaagcttaaactggat

SEQ ID NO: 224424 - DNA, 344 bp, Glycine max
  unsure (1)..(344): unsure at all n locations
aactgcaccgctgcaatctttacatacacacctcaggtgtggagaactttttatttcatcttcccttccaacaatgtgcaatgtacttcatgacatctctagacctatattatcctcagaatganctcattcttgatcacttaaatttgacatttgcggttatatctatcctaaggaaaaagaggcatcacttgccggcctacctgatttgttgatggagcttgatagtatggaagaggtatgtcctactattactataatcctctaaatataacatggtgggaggagtcaatatttgttcctttaaatgttgtacatgaaatgctatattcaaccaatacatt

SEQ ID NO: 224425 - DNA, 392 bp, Glycine max
  unsure (1)..(392): unsure at all n locations
agctnngnttacatagatacatagatataacttatttatcacgncacaaaaacaatgaatgaattgttggacaagtggtctcaataacttaaaggggggtgaattaagtctaaaaatcttctcaattaatcaagatctaattcccttctaaatctctatgttcacaatattgaagatgaagatgaagatgcaaaatatttcaacaatattcttcaagttgcaagataaaaatatgcgagataaaataaccaatataggggcgagagaaatgcaaactcattttgtcctgggtcgaccacttcccgtgtctacgtccagtcctcaagaataattaagaaggcggggttgaattaattattcctaaacatttactaattaagatattactcttc

SEQ ID NO: 224426 - DNA, 383 bp, Glycine max
  unsure (1)..(383): unsure at all n locations
agctatgagggngcgtagaccaccatctttttctttntatagtaccgataatgtgtctaccatcacgattatcgtcttcctttttgcacatgttctgtaattgcatcctatccggaaccatatcaaaatattactgatactgcttatacaaggcaaccattaagcccttccaagtatggactcgggaaggttccaagttagtgtaccaaggaacagctaccccagtaagactttcttggaagaaatgtattaacagatcctcatcttttacgtattcccccatcttctgacaataccattttagatggttcttgggacaagaagtccccttgttcttgtcaaagatcacaccttgaacttgggaggtgtgatgatattgggtt

SEQ ID NO: 224427 - DNA, 284 bp, Glycine max
ccggagatatgtcgcgggggtcaagagaccttggggacatcatgtggggtgctatcgcccacaaccaagcttgaccaaatccgacccaacctcggcatagtcagtcaatgagaacctcgtgacgtacctaaacaggccagctcctggcactcaaccaataaaagaacacagtccacaaagcaacgaggcttgtgggcggctggccactatgaatctgaggggaaccggaattggccctgtaatcgacaccaaagggtgaatcggtacaggctaaaaaggaaccg

SEQ ID NO: 224428 - DNA, 388 bp, Glycine max
  unsure (1)..(388): unsure at all n locations
agcttgaaggtgtgtagtccaccatcttttcattgtttactacncggaatgcggctactatcattatcattttttcttcgacattgaggcgccacttgagttgccaggtctctccacctttgggcgtattctttgaaagatctgtgcccctttttgcacatgttctattgttgcatcctatccggaaccatattaaaattgtactgatagtgcctaatgaacgcaaccattaggtcctttcaagagtggactcgagaaggttccaggttagtgtaccaagtaacagctaccccagtaagattttcttagaaggaatgtatcaggagttcctcattttttgcgcatgcccccatctctcgctaatacatctttagatggttcttggggc

SEQ ID NO: 224429 - DNA, 340 bp, Glycine max
agcttggccaatcctgacccaacccgggcttttttatttagtgagaacccgcgacgcaccttaacatgcgagctcctggtatactaccattcataataactaagtttcactaaactaggaggttcgtggggcggctggccagctatgtatcttgggtggcatctggtaattagccacttgaatataaattttcattcggggtgaaatatatacaagacttatatatggagacatgttgtgaatatgggctctggagatcgattatctaaagtgccgaatctattctcccatcgacaagggactggtaattcattctagctgggtgtatacatgacacatg

SEQ ID NO: 224430 - DNA, 347 bp, Glycine max
  unsure (1)..(347): unsure at all n locations
agcttagnnctctactaggcttcgcacaactttttctttcgaaactctctggaacttggacctttctctctttagaaatctctaaaaatgcagaagctcaaggaatagcccaaactccatctccatttctgatttcacgcttaaataggtggccttgatggtgcttgagagcttaacgcatgtctgcctcgcttaacacacataagtgaatttcggcttggcgctcgtcttctcacttaacggatgcatgcaagtggagcacttaacacgatgagctctcgcttaccgcgtgtgtccacctcatccttcttctatattctttcctccactcaaccgcaagagaagtg

SEQ ID NO: 224431 - DNA, 359 bp, Glycine max
  unsure (1)..(359): unsure at all n locations
tactaagctttgtccgcgaaaggacatttgaaactgttttaagggtcattcttcttaagcaagcctcattgcttttatcgggtaaaatggaccgttcataagtataaaatcaacgcaccacataactttactgcttttcgaagaactacatangtctaagtttctcatcgcaattgaagatacgtaagagcaaaatccccacttttttcgaccctaagagatcgttaaaggtgcaagtcttaacgtttctctcctttcaaaacaagagattgttaaaggaccaacgccttaacacttctctcttattaaaaatcaatagaatcggcaaaagggtgcagcgcgctaacaattctctcttt

SEQ ID NO: 224432 - DNA, 391 bp, Glycine max
agctatggctgcgcagcagctctgattgcgtgagtatttatataagatgacgcattgtaatcgattacaggtattggtaatcgattacaggcccaataagccttctggtaatcgaatacaggatgttgtaatcgaatacaggctgcctgttcatgtgtaatcgattacactggatggtaatcgattaccagagcctatcctaggctagtttcttaagagaatatctatatttatgctcaaatacatcctatatgactaattttcactactaatacactaaattcaatcattcaattactatatacacaagaaatcatatattctatcataaaaacaagaattctaacaagatcaaacaaaataatctacaatcaaaaggtagaaagtaaat

SEQ ID NO: 224433 - DNA, 419 bp, Glycine max
  unsure (1)..(419): unsure at all n locations
ctcagctgcttggggctttatggggcggatcttgagcttcatgatgtccttttatggtgaatntccaccatggagatgcagcggaagacaaaggagaagaggtgagaagaggcgccctccactatggaataagccatggaagaaggagcttcaccaccaagatgagccttggataaaaagcttggagaggatgcttcaatggaggaaaagaaagagggagagaaagagagaggggggagcacaaaattgaaggaataaaagaggtagagaagtggaacttcgaagtatgtctcacaagactctcattcatcatagttacaacaagtgttacacatgcttctatttatagactaggtagcttccttgagaagctttcttgagagaacttccttgagaagcttctttgagaaaactttctt

SEQ ID NO: 224434 - DNA, 367 bp, Glycine max
agcttgagatgaggaagcgttgaagggtgaaatttttttgttttatcgccgaccacacagtggcacctggagatatgtctcgggggtcacgaaaccttggggacgtcaagtggggtgcttttgcccaaaaccaatctagaccaatcccgacctcaccctggcatatttggtcaaagagaacctgtgatgtacctatacaggcgagctcctgtcagtcaacatataaaaggaactaaaaccacaaagcacggaggcttggggtagctggccatctgtgaaacttgattgatatgtgagatatggtctctggtcatcgaatacccaaggtgggaaactactcacaggcttaaaaatgaagacagggggc

SEQ ID NO: 224435 - DNA, 307 bp, Glycine max
cttccatggtttattccttaaaggatggagcctcccctatcctattcttcctagccttccgctgcatctccatggagaaaaatcaccattgaaagacctcattgaagctcaaagataccgccttcatagaagctccacaagcaagcctccatcatattgtttctctaagatgtggtgctctcgcgaatgatttatttttctttgcaacaaaaacatgtatgcctttcacgtggaaaacaccggtggaccgttagggcctgacaacaaacctttttttctgagccccatgaatgacattgcctaccgc

SEQ ID NO: 224436 - DNA, 281 bp, Glycine max
ctcaaaatatgaacaggcggaagcttctctaaaaatttgaatggtcatacctttacacacggatgtccgattctgggatataatatatcgagactctccgatattaacaattggagcccttgagaaatttcaatggtcgtaacatttccacggaggtctgattcgtgggacataatatatcgagacgctctaaattgaacacgcggaagcttccgataaattctaaatggccatactcttttacacggatgtgcgattatgggatataatatatcgagact

SEQ ID NO: 224437 - DNA, 379 bp, Glycine max
tgcttagctatgactgtaacatgcagattatttttgttatgagtccgcaatcatttaaggactgtgggtgattcttgttgggaattaaatccacataggaaatcattggatgcctctaggaaagctttcatgaacataaaactcatacacgaatcttctaaactcaagattcaacacatcccataattccttaataaaattgaagtttatgccatcaggcccaagacacttattccctccacaacttcacattgcttgattgatctcttggtcagagaatggcacagtcagctattctctgtgcctctgaaaaatagatctgaagtgaattcctccaaggtagggttagaatgcatctgctcactgaatttattatgga

SEQ ID NO: 224438 - DNA, 392 bp, Glycine max
  unsure (1)..(392): unsure at all n locations
caccgggaccttanatgaccgcggcatgccactgagaaggtagacatgaacattgtttttttggtncggatcaaagataaaagggatgcctcacattatttctatgacacaaatgcaaaaatgatgatttggaaattttatgcaaaactggtcatgcatgcgcctatgctgacgctcaagagtcacatttttatggccctgtgatgcttaggctcaggatttctttcctctattttaaaatcaacctattgttttcaaaatatgttcttttataaattgtgcattcttcaattcatttggggcgtgagggaaatttcacacattcaccctttatgtgtaacacgtttttttttcaaaatggttagaacaatgaattttttgttttaagaaaa

SEQ ID NO: 224439 - DNA, 383 bp, Glycine max
agctgtcaagaatcaagagcaagatacattactttatatctcagattcacgaatcaagagaagactttatcacgataagtgtcataccctaatttcttccggggaccaatctatttgttgggatgtgaaccctcgttgaccactttgaggtacttggcacctattggtgcacaatatgtgaagttccatgacatgccaaaagtcaaaaagaagctttgttgcacaattctcaagttctgtgatatgccggaagtaaaatagaagctttgttgccaatccgtaacattttgtacattccggaagccataagaaggatgattgtggaatccggaaggttctgtgacattaaaaaagatacaagtgtcattatcataatttcgcat

SEQ ID NO: 224440 - DNA, 327 bp, Glycine max
agcttggcagaatataactttggcaatctgttattttctaagtgttgccatatcatactctgatacatctttcatctttggaggattatactctgagtgttcaatctactattctttgaatcagcaaatttattttgtactcctatcttcattgcatactctctatgagagagttatttgattgcaatcactctatcttgttgttcagaaatccacgagtgcctttatgatcaaagaatatctatgagttattcatctcaagggcgagtttaagggtgcgccacacatagtctaaagaatactctgtgcacgtaggacgtaaatgaa

SEQ ID NO: 224441 - DNA, 368 bp, Glycine max
agcctgagacgaggaagagccgattggtgtttttttctgcccttattcgctgaccacagtatggttccttgagataattggccggggtaatgagactctggggacatcaagtggggcgctatttgccaaaaccaatcttgaccaataccgacccaacccgggcattttcgctcagggagaacctgtgatgtacctaaacaggcgagctcctggctctctactcataaaagaacaaataccacaaatcaagaggcttgtggtggctcgccaactgtgaatcttgggcgaatattggttgaggcccatggtatccattacccacgcgggtaatttatactatgcttaaaaagattaacgacgctaaatag

SEQ ID NO: 224442 - DNA, 458 bp, Glycine max
  unsure (1)..(458): unsure at all n locations
tcgtccctatntttctataaatagggtgagaagttgtnattatataggttcaaccccttatgcacttctctctctctcgaatttgctgacgaaaattatttccgtgaagaagatccaatccgaggcgctgtcgtaacgttttcgtgagaaattactcgaagattctcgaccgttcttcaagataattcggtcggtcttcgatttcttcaatcttcaacgggtaagtacctctaaccaagcttttcaattcattatatgtacccgtggtggtgcacatcttgtttcatgtattattattctcgctcttcattgcgttttatacccacttttgacatgcttaagccatttatataagtcatttctcgcttaaatctaaagataaataaacttacacgatcgttgaattgatcgtcaatggtactggtaaaagaatttgaccttcgtagtggcgtaccacg

SEQ ID NO: 224443 - DNA, 312 bp, Glycine max
cagctaaaaaggcgaggacaccaggccacttattttatcagcacaccacccggctaattcttgctggatcacacctagaaaacaaacgggtgtacagtgaccgtccaagtgaggaaagaccaagactccggtacatatgcacatcaaatgttaggtgctacctcccccacctcaatgagcaggatcatcaccgataaaacctgggctgcggaaccatgcctcatttatgcaccaaatgcctagcccatacagaagcaaaccgcatttgctataaaattataaaatttcaaataatatacatgcgcatacaat

SEQ ID NO: 224444 - DNA, 336 bp, Glycine max
agctttatctttgtaaatattagattaaggttttattatttttgggccttgtatttacggcttcataatgtacgttgggtaccttaaaaatataggattttttcagcccttgtattttagggcacctacactaatttttgtattacgggtagtcttgtaatttcacattcactaaacggatatttgatgtgtgcggccgccaattaatttaatcgatttgcagaaccccaacgcatttaactttagagggggaggaatacattctgttcttaccacccattggctcttatcttcacacacatgcgattgatcaaaatctattactgccttaaattc

SEQ ID NO: 224445 - DNA, 386 bp, Glycine max
  unsure (1)..(386): unsure at all n locations
cttggaggattgaggtgacccggcgcttttattttttngtattaggctacctgggagtacgtgagctcatatgaaggtgggcaactatggatggtgggtttatgtgtgatttgcggatgtggagagttgatatgcaccatcactccgtcgccacctagaaccacatgtgaccgctaccccattatcctacgcgcttgaagtgacaatgtgtggagtactccntcttccttcttttatttgttgaccacccagtggtacctggagatatgtcacacgggtcacgagaccttggggacgtttggtggggtgcttttgccccaaaccaagcttgacctattcccacccaacccgggcatagtcactctgtgagaaccctgtgacgtttc

SEQ ID NO: 224446 - DNA, 301 bp, Glycine max
gacctatgagagcctgcagcatgcactccacttatgtggagggggggctttcttttcttggtggcccaacgcgaacttgaccattttgttgcttccgcgatagctcttttatgtcccctgtgtgggcttatagctatacctacttccccgatttgcttatgtattatacgctagatcgccgtcgtgtttttcctaaaccatccgggtctaaccgttcccacatagctggccatcataccgtgtatgacaactagctgccaaaaggggtctctgggaaatgtgaccactaaaaatggaaaca

SEQ ID NO: 224447 - DNA, 395 bp, Glycine max
agctttatatggattaaaacaagctccaatatttttttatataatgatgagctcattccttgttcaaaatggattcactagaggaataatggacactacactatttagaaaggcctagaaagaaaaccttttgattgttcaaatctatgtagatgacataaaggaatagtgaacactacactatttataaaggcatagaaaggaaaccttctaattgttcagatctatgcaaatgacataataattggtgcaaccttaaaaaggatgtgtaagaagatttttaacctaatgaaagatgaatctgaaatgagtacgatgggtgagctaaagttcttcctagggcttctaataatccacaaagatgatgaggatgagaaaggtaatgattcttcaaa

SEQ ID NO: 224448 - DNA, 391 bp, Glycine max
  unsure (1)..(391): unsure at all n locations
agcnagcttctacaatgtgcccttttttgtttttacaaccctgaaatcaagagacacatacacaggttttttagacgatcactcacttaattctacatattctccccctttgttttttagtttaagcttcactcgaaattaagttatttaattatatgagatcttgagttaatccctattttatctccccctttggcatcaacaaaaagccaaagtgcataagaaatataaaaccctacataaatgactaatcttacaagagaatagaaaacaatcaaacaagataacttatccattcatcaaactaaaaagataatacttcataaaatgtcatataatccagaaagacattcaaaataaccaaataaaaactacttatgcatgaaaaaat

SEQ ID NO: 224449 - DNA, 288 bp, Glycine max
gtgtattgtcacatagagctcgactaattattattttctgaataaaacgaagatattccatatatttactcccaagccagtgtgaatcaaatcactctccacgttatctctatcatgcattcatatttctttacctactcctcacgtttggtggttatgaaatacaccataacttaacgcgccccaaggtattgccttcgcaccagaaccaaatctagaacgacgggtgatcaagaggagacacaggaactaacgaaagccgacatgtccgctttgaaagaacaaatg

SEQ ID NO: 224450 - DNA, 401 bp, Glycine max
agcttgctcaagaagcccgaggcgtgttacatctttgtacgcgagtcataggaccaaagcactctaaactcaattatgaccgcatgggatctacacgaaaggaatgtcacaacctgccggaggctgacgagactcgatcactaatacaaacagaggtactgcatgcatctgagcccccgcagaaaaaagcaatgcgatcactggttgggcaactcttattagacccaaaaaaaaaatgttgcaacttccatcccctaccccccaattgggcagggagggcggatagaaagtgaccacgggaattgacggaacgaaatatattgggcaccatgtcacgccatctattttatacacaccaaaccaaacaacgcgaaatgatcaaactcccctcccccatacca

SEQ ID NO: 224451 - DNA, 296 bp, Glycine max
acgacactcgttcgctattgaatactattgcctgactatgtctttccaatcaatacaataaatagcaaaagaaatgcccccttcactacatactccacactatcgttggttttgtgatatttacccagcaaattcctctggagactatgttcatctttctcgcctttgatcgcaccctttttaactattcatcgattgctcttatagagatctatgaattagtcgcttctgaaaaatttaatttcaattgctatacgtattggcaaccgtcttcacactttatatgataaacattt

SEQ ID NO: 224452 - DNA, 379 bp, Glycine max
  unsure (1)..(379): unsure at all n locations
ntgcatgcctagtgattctagagagagaaaggtccaagtccatagattttgagagatcttgctgtgtgaagatctgcagagaccaaagcttgaagaggaagctgttctgagagcttgagatgagtttgtgagtggttgtgagatcctagaggtgaaggagacatcctcaccacttgtatttttgcaatctttcatcatgttcttctctttgctgtaaaggaggcttcctggttatggaaagctacaatcctctattggatcttccctgtaggtacttgatgtagatatctttttatctatttaatgtaggtttgtgtgtctctgcgctatcacttttattctaggatgctttaccttgatcatgtagatgcatgctttg

SEQ ID NO: 224453 - DNA, 83 bp, Glycine max
cccctcacttacgcttacaaccagttttgcgtttacaacaggctagggaaagaacaaatcgatataagggttagaaaagcaat

SEQ ID NO: 224454 - DNA, 304 bp, Glycine max
agcttgagcgaaattagaataacgaggcttctatttttaactttttgtaaagcacgaagacgacaatctaagtgtcaattgacgccgacggagcgatctacctgtcatatccgcctgtgcaatgctgaccatgcgtggagcatcatgactagagtgatcaaactctcagccattaacaggggtaccctccaaaggcctaccttgactggggaattgtgcaaacacaagaaaagagattctcctttatcataggagtaccatgcaccttaggaagtaaagctccatcctgaaattggcaatctga

SEQ ID NO: 224455 - DNA, 248 bp, Glycine max
ttcttatatgcaatgcaacagcgaaatgcaaaatcaaagtctcacacggtacccacatgtccctccaatcataaaaattcaaagaattgaagatcttgacataccattatactacttaagtatgtatactagctttattggccaataattttcattaacgtgtctaatatctgaaagttttgtacgcaaatcgtctgcatcatataccgaccatatatattgtaatgatgaaaaaaggggatttgatg

SEQ ID NO: 224456 - DNA, 361 bp, Glycine max
  unsure (1)..(361): unsure at all n locations
acgttgtgtctatattttttacatacattcttccngatacattgacatgtatatagttaatcgacactctcaaattaatgttgcatcatcaacctacaacgaatctcaaaattatatattaatgcctaccatgagtcaatgcaacacatctttacaatctgctatgttgaattaccaaaaaaaaagttggaacattactatctcttactaacgctattataacgttaacatattcatcacagaaaacatacttaatagtgttcctgcacatacaattgactatcaaacactgggtattatacaaaatgtaacttcaaaaaaagtgaatcatactcctcatcaagtaggtgaacaaatatcc

SEQ ID NO: 224457 - DNA, 173 bp, Glycine max
aaactttttttacttttaaaccacggctttagtactggcctgaacaccctcatgcaaagaaaggggcccaacctttgacaatttagaaagcattgcaggtgctatgctaatgacttacgcaaagaagtcatacactaccaaagattagatgctgacaacataaactccttggc

SEQ ID NO: 224458 - DNA, 338 bp, Glycine max
catatatgctaatgcctcgagtgggtccttttgtcacactcatattgattgaactttctttactaataccacctcaggttgccttaaatccacaggcttaagtccacttacactctctagcaccactgcaccaaaatatcctagtcttggccaccacaacctttaatccacaactcctaaccttaaataatatccacagcctcaggttgctcctatagctgactacatgatggccatgctcattccttgacaaaaactcagccacaacaaaactcaagtgatacttgtcaaacattttcagtcattgataactcaatttacatttttcaaattataca

SEQ ID NO: 224459 - DNA, 302 bp, Glycine max
caccacttaccaaggatacctgataattctttatttttttgacctgttccttcctgtttgaactactacatcctaatgaaaacacgatttccaatccttatgaatttggacttggaatgtttgaaataaagtgggggtttttgttcattgacaactgcttgtggcatgctcatgaggatttggcaaacttgtgacattcatattgttaaagaggaatgtgaataaatgtgttctcaagctaagataaaaaaaaatcgatatgaaaaaaaacacaaactgatgaataaactaatggccaaaag

SEQ ID NO: 224460 - DNA, 184 bp, Glycine max
aataaggggaggaagagagaaagaagaaaaaagaaaaggaaaaaagaaaaaaaaaaaaagaaaaaaagaaaaaagaaagaagagaaagaagaaaggagaagaaaaaaagaagggagaagaaaaaaaaagaaaaaaaaagaaaaaaaaagaatagaaaaaagaaagaaaaaagaaaaaaaaaaaa

SEQ ID NO: 224461 - DNA, 229 bp, Glycine max
gccttgattcttatgaagggggtcgaatatatatcacaacctttccccccattaacattcttactgcacttctattcaagacacaaattccctcaacaatgaactctcttataatgattcaattagaacaaccctggtatcaatataaaacacctaattaataaaagagatcaagggaagagaaagagccaactcggatatatactggttcggccacacctttgagcct

SEQ ID NO: 224462 - DNA, 357 bp, Glycine max
tttgctcaagaaaactgagcgcttcctgtgagactttatctatgaacaagctcccttggcttctaagataaccatacgcatactcccatatctctcagtagctgatgatagccgatagctcaacccacgttctagaggaagggaaacattagtttcctaaaactgttaccagcaacatactctataacgccgagaagtgctaccatagccacaccatactctataatgtcgggaaacattagttcctggcttctaagaattacataaccacaccaccaatagcacttattacctctgctcgacaacttaagccctactttcagagtcatcaaggggggggcaaaacaaactacactt

SEQ ID NO: 224463 - DNA, 246 bp, Glycine max
aatttgaaaaaaggtggtttaaaaaaaaggggttaaaaaacacccccccccacgggaagaaggaaggaagagaaaaaggaaaaaaaaagaaaaaagaaagaaagaaaaagaagaaaaaaagagaaaaaagaaaaaaaaagaaaaaaaaaaagaaaaaaaaaaaaaaaaaagaaaaaagaagaaaaaagaggaagaaaaaaaaaaaaaaaaaaagagaagagagaaaagaaaaaaagaagaaaaaaa

SEQ ID NO: 224464 - DNA, 413 bp, Glycine max
  unsure (1)..(413): unsure at all n locations
tgcaagcctttccaaatacaacctgtgcgtatcttcttacccaatggttccattgtttntgctcatatttcaagaaatgtgcagttatcgccacatttcattatacatgatgttctttatgttccaaacttcaaattcaatcttatttcaatctccaagcttttgtcttcactaaaatactctctcactttntccaattctcattgccaaatataggaaatgaagaccttgaagatgattggtttggctaaattgaagcatggattataccacttgcagatcaacaaggatataaaccaagtcattcctaaagcttccttcatcaataacttctccaccccacccattaccaacgctaacctttggcactttagactangtcacctttccgggaaacgtctcaatgttcttca

SEQ ID NO: 224465 - DNA, 394 bp, Glycine max
  unsure (1)..(394): unsure at all n locations
tganggatagaagttattcgtgatgcagatgaagccccccatctgcgaatgttcataacatcatcacgtatgtaacgggaagctacacttgttgctaaagatgtggaacatgtggatcatgcaactgacaaggtccatgaacagcctgaagaggaagctactgatgttgaaggttttctangcgggccccacgatgcatcaattttgatggactatgttcatcatatggcaatggtagtttggaattgagaggtatttatattttgaaataaataatatttttataactatttgttattattgttcaaatgatttaaatttttattttcaggaacatcctgagttgaagttgtcctcctatggaaggaagatagagaaatttggcaagcctact

SEQ ID NO: 224466 - DNA, 374 bp, Glycine max
  unsure (1)..(374): unsure at all n locations
catgcaacctngagacttaattgcttgggtcttactatattctgtagtcttcattgcactcacacccanctccagtacaagcctttcttcttcctgaacacacatggtcattaattcattgatagaccatttatctttatgtgtgttgtaggaaatcttaaatggcccatattcatgcggatgggtgttcaaaatgaaatgcactangaaggactcaaacatatcaacctctagcttcttaagttgagctgatatatctcgcatcttcatgatgtactcacgctcacctttcacactggtgagccgaagagaagaaaacttcatgatcaaggtgtttgctaaagtcttatctgaagtgataactggtcatcaat

SEQ ID NO: 224467 - DNA, 328 bp, Glycine max
  unsure (1)..(328): unsure at all n locations
acctccgcacctgctagacaccctattctccatcgtatccttcttcaanaccatattcgtacgtgatgccatcggctccgccatcggagatctcaaacgaagctcccgtgagacaaatcttgatgaccggaccaacctcttccacttggtgttcggaatcgcggcgtcaaccaagctatgggaccaaaggaaaagctacatcaaactctagtacatagcgagggacatgcacgatgtggtgtggctcgacgagatagtgaaatcaaaggaaaacaataacgacacactcctgtcgtgcaaatctctgatgacacaaccaatgcttaag

SEQ ID NO: 224468 - DNA, 334 bp, Glycine max
catcaacttggcctaacactcaaaaccatttttttaattttaagttttgaacgtgcatgctgataccgacaaaaccgaaccaatttcttccagtacactgtgagttacaccatagaatgtgcctggaccttatcggtcctttcttatcgtttccgagagctaaaggtctattaccaaaccttgataataacatggcagtaataataatagatcaattgacagattacggagggagaatggctatttctttggggatttgccagatgaagactaagcgtagagactcacactgtttgaaagcaaagtattcaatgttgaaggccagcaaaaaaaa

SEQ ID NO: 224469 - DNA, 302 bp, Glycine max
  unsure (1)..(302): unsure at all n locations
aatgacttttacctatagttggaggttgagatacacgttaatatttttacctatagttaaagggtgtatatataagttaacttttacctacgcacattatgaatggtacgaatagcatataataacaatcaaatgtaattgttgatgaaagtaaatttataagtaaaatctatattaatagattataatagattataatttgtcattagaagtccccttaaagttgatagtcaaagtgttcgtaagaataaagcttaatatatttatctatatattnttatcatctaagaatgggttttgta

SEQ ID NO: 224470 - DNA, 450 bp, Glycine max
  unsure (1)..(450): unsure at all n locations
ttcaaactcttcttgtaatgccattganagtcttcacaagaatttcaacactgtctttaatgttttggcaaataccaattatattgttaaggcattaaacgatcaattgactgttgaagaaaagaataataaagctcatgagtaggaaaaagataatctactaaaagagagagacttggctggtcaagaaacttcaaaattacaagcacaacttgtcgatcaaaagagtgcaacagataagaaaagtgttgagcatgtacaacaattgcaacaagccttcaagatagttcatgaagatggttttaagaaagctctttaccaacttgctctattcgcccataaaataaatttaaagaaattcgatgtgctaaaagatgttaaggatggggagctggtaagagaatctcacatggagagtcttgaagatgactctgatagtgaaacgatctc

SEQ ID NO: 224471 - DNA, 364 bp, Glycine max
  unsure (1)..(364): unsure at all n locations
catgcttgctnnaaaaggaagagagagaccanncactgtgctcatagcgttgtttgttttaggagngagctgctggctcaaggtccaagagaaacttgtctcgacattcatgtgagacaaagaccaacatgttagccatcgtcagcaagtaccacgaagaattaaatctatccacgacccatgagcacaaagtggcggacgagtatgcccgagtgtacgcagaaaaggaggctagaggaagggtgatcgactcggtacatcaagagggcacaatgtggatggaccaatttgctcttactttgaatgagagtcaagaacttgcccgattggctaccaaggccaaagcaatggcggacacctactc

SEQ ID NO: 224472 - DNA, 278 bp, Glycine max
acaaaacagctgatacccagctcaattctacttgatggcacatcaccatactgaagccctccctttatcaaagacctctctaagctgacatgcgaagccgagacccactcagccactccaccttgacggtcacggttcaaattctgaaagaacatcatctgtgccaaattgaacgggctaaactcactaactagaatgagcacgtccaatttcaccatggcgtatggaacgtgatcgagcgatttcgcgagaaaagcctgcagctactattgattcta

SEQ ID NO: 224473 - DNA, 188 bp, Glycine max
ctccttgtacagactgtccctcgacctattaagaaccgttcgacatggtcataagtctccaacgcgcgcaagttgcaagccacatgctcaacatgcaaaggacaacactccacagccctgtgaaacaaaagcacagaatcctgctcaatagcaagcccacaacagccttccacagccgaacataatca

SEQ ID NO: 224474 - DNA, 312 bp, Glycine max
gcatgctgaaacaagcaaatttttgctcacgttcttatcctacaaggcggggaggggctccgacgctggcaacaatatgtgcacactctggatctaaagatctaagaatattctccataattattacatcatcaagctttacatcatcaagactctatagaattagtcggagatgacttcaccttctttcatatgcaaggcctcacactcagctctcaaagtttgaagacgtacctggatatgctcccttatacgaggtttgaagcttctttcgccgactttgctttcgaaaccttcttgaagcatctcaaa

SEQ ID NO: 224475 - DNA, 419 bp, Glycine max
  unsure (1)..(419): unsure at all n locations
agctnngaagtggttcatgattattcaattttatcaacggnnggattcatctattttatatggttccaatttacaccactcacactagatttattgcttccttcctagcaaccttctgataaccatttgctgttgtcgaagtcaatttctggcaacagaattgttttaaatcttttccttaccacctttgttcctttctctccccatcaatcccttgtcttcgactgcaactgtctttcacaaaatattggcacccctaaaatttgaaattaaggccattccaagattgaaaagtgaaacacgacataaacatcaaatgtgatgcgtatgaccgaaagtgcattcaacatactaatcttcaacacaataacataataatgaaaaagtaaatataaagaagaagcttatttagacctact

SEQ ID NO: 224476 - DNA, 400 bp, Glycine max
  unsure (1)..(400): unsure at all n locations
gacctattatactcaacttgatttctttgtccagatacctttcttttctcatgtgctcccaaacccaatctccgggttcgaagacaaccttctttctccctttgttggcttgtttaacatagcttttatttttcctctcaatgtgatctttgactctctcatgaagcttcttcacataatccgcctttgcttgaccttctttatgcttataaacagatacattaggcataggcaaaagatcaagaggagttagtgggttaaaaccataaacaacttcaaaaggagaacaattagtggtgctatgaacagctctattgtaagcaaattcaacatggggtaaacangcttcccaagnttttaagttcttcctcaaaactgtcctaagcaaagttcccaaagt

SEQ ID NO: 224477 - DNA, 349 bp, Glycine max
  unsure (1)..(349): unsure at all n locations
tcatcctgcttggacgaatgagaaaacttgggcaaatgaagagggtgaggatgaagtanaagcccatgctgtgactgccattcctatatggccaagtttcccaccaacccaacaatgtcattactcagccaataaaaaaccttctccttacccaccgcccagttatccacataggcaatccctaaatcaaccacaaagtctttctaccgcacttccaatgatgaacaccacctttagcacaaaccaaaaacaccaaccaagaattgatatttgcagcgagaaagcctgtagaattcaccccaattctggtgtcctatgctgacttgctcccgtatctactcgataattc

SEQ ID NO: 224478 - DNA, 427 bp, Glycine max
  unsure (1)..(427): unsure at all n locations
ggagtagaaacatgggaccaactcattntatttcatataggaagtcatatctagtcaaggtctgagagaccatacaagtttcctaacgatttctaattatgtgggccattaagtctatcatatgctgacaatagccgagaagcccatgaatctcttcgggggcggagtatgtgtctgccatcgccttggccttggctaacaatcggtgaagttcttgactcccgttcaaggtaagggcaaaccgatccatccacatggttgcctcttggtgtaaagagtcgatcacccttcctctagcctctttttccgcgtatacttgggcatactcatccgcgattctatgctcgtgggccgtggctagacctaactcttcttggtacttggcgatgatagctagcatgttggtctccgtctcgcataaacgctg

SEQ ID NO: 224479 - DNA, 378 bp, Glycine max
  unsure (1)..(378): unsure at all n locations
agctntantcatttaagaacaaagcanaatgtgtcataaagttgntttatgaatgatgcggaatgcccatcaatcataaaatatcaagaacataccttgtggatggtaaaaggtggctgcaagtatttgaacccaagtaatggagcacgagaacccaagtataataagcatacaacactctttcggttcaaagcctctaattatctgtacacatttggcagaaagcagaaaataaacgtaaatatcttaaaattggcatctgcacaaatagcatatatagcatccggttactacacctacccagcaagacatggactcttttgagtaatattcacatatacaatattagttatgcctaagtaggattgcacatgaaca

SEQ ID NO: 224480 - DNA, 409 bp, Glycine max
tcaaactaagcctgataaatccactactatatgttctatcaagtcactgttgtctctaacatattataggatttgttgataaagattgttcacttactaagctatgaacatcttactgacaaatatacaattgactctttagtcttttctctcaatatgttcaaggaattttgagggctctttaaactttacaacaataagcaaaaagctgtttacatataggatgacagaataagagcacgtataattcatattcctttttcaaagcttttggtattcgcagtcttcaccttcaaatgtatgttgtctctcaacggttgaattcttcacttgatctttatttgatgaaagtggccatctggaagcatttaatgcatgtcccttcttcatacaaaaagtgcattcttat

SEQ ID NO: 224481 - DNA, 139 bp, Glycine max
ctgcagctgtccattttattcctatgctgttttaaacatttactgttatctggctctggtggtgaaatgcttccctgccgaatgatgatttagtattcaccaattggtggccttaccattcccataatttacctttttt

SEQ ID NO: 224482 - DNA, 410 bp, Glycine max
  unsure (1)..(410): unsure at all n locations
acatactaagctttctataagtcctaatgacantcaaactaggattaacttcctttaacctctcaataccactaaatccagatgtggccgtctaactctcaaagcctgactctctttgcactcattacaccacattctctctttctaaccctatgttaactctgcccctcatttctagtttggttgcattagcaatttcagcacttaattatcacaagcatcatcataataaccccttaacataatgggttagcttgactctcacctatcatgacaagttaacatgcttcatcaaatttttcacatattacttcattaagcattaacctagtaaactaccctcatatctccaaaacccatacccacaaaatttttggagagattgtacgcaactgaattttgagtccaca

SEQ ID NO: 224483 - DNA, 272 bp, Glycine max
gtcaactgaccatatatattaattaatacactccactcgatattaaggcacgctgatcatataatggttagctaactgagcatgactgcatcaaattacttaattctcttgatgcataattaatattcttaatagctgattaagacaaaccaggtgattcaatcttacacagatcatggtcaactcaagtggtttgatttaatgttttaatgtaagaacattcttccattataaacaaaactaataagatcatttccacacgacctttaatt

SEQ ID NO: 224484 - DNA, 298 bp, Glycine max
  unsure (1)..(298): unsure at all n locations
atggcttattccttaatggatggcgcctcctctcacctattttcctttgtcttccgctgcatctccatggtggaaaatcaccattaaaggaccccattgaagctcaaagatccagcctccatcgaagctccacaagcaagcttccatcaagtggtatcagagcacaagagcttcaagtaggtgctccttaaacctccattatattttttttttgccttctcttccattggtgnttcttaatttttctccatgtatctcctcacatgtcttgttctaaatgtgtgtaacatgattcttt

SEQ ID NO: 224485 - DNA, 372 bp, Glycine max
acgtcactcttataacactcaagcttatacattcactctctagcctcacgatatattacggtgactctatcaaacatcctttataaaagttattgtcgtttgaattcgctcagaggttcaaacattcaattgtcgatgcgtgctcgatattattgacttggagtttcaatcatgactatcccgagtataaactgttatctgtcacgttgaatatggcttcatatagttcatacatttcatattgtcagaggcgtgctcagatatagttatcgggacctcaatcaatactttcccagtaaaaagactttcgtcgttctgtatttggtcatagattcaaaattcaatttcatgggtcttatttattacaggact

SEQ ID NO: 224486 - DNA, 268 bp, Glycine max
tcatgattactccctattcaccattggttcagggaattccttagtcattctactagtgtatgtagatgacatcatcctgtctggaccaaattctacctctgtgcaggctattcagacccaatagcaatctatgtttcaattgaagatccttggccctctgaaatattcccttggcttataaatagctaaatccagcagaggtatctcactcgcctagaataaatacattggcatgcaaaccttccaatcttacaatggatcccaactt

SEQ ID NO: 224487 - DNA, 319 bp, Glycine max
gataaggagcacttacaagacataatctaagtaaaaatatcggaagaatacatgcatgcataatacaatgtcatagctttataataacagtgtggtaaagagagttaaaaactttgtttctcaaatgcaatgctatggaggttcactacataatggttgcctcctcccaacggcaaccattgggggtcgatcccataaaatagaacccccttacccgaagctcaatatacatgaatttagagataaaaagactatgaaagtgcaagatttcaagccttgcaatggcaccaccacaagaaccaatcgcaaaatttgattt

SEQ ID NO: 224488 - DNA, 393 bp, Glycine max
  unsure (1)..(393): unsure at all n locations
ttgatactttagtgtcgattttctcatatatgangacagacagcccaagagatcgagttcataactgaatcatcaacactctaaaatcatgaagatatttgatttcatgaatcaagtttctagattcatatgttctatgaatcatgcaatgcagtaattatcgagttgaagattctagaatctggataagactcagtcaggaatgtactataagttttcaaacattaagagcacatgaattttcacaaacctttaccaaagaatttactctctgctatcgataccattattgtatcgataccatgcaagatgtttctaaagcttaactgaattcaacgtccattgtttcaaagggtatcattgcatgtttgtatcgataccatggttgacgtg

SEQ ID NO: 224489 - DNA, 321 bp, Glycine max
  unsure (1)..(321): unsure at all n locations
gctcacaagaactggcatactgactttngagtcaagctgacgggcggaaatacccgagtgggtatccgattaaaatatttgctgtctgttagacgaaaagcctgataacacgcagagactaacgtcgtcttctgcgcccttcgtcaatcgcggccgacaagcccgttgacatgcggagatttacgtcatcttccgtgctcacaagatctgtcatactgacttttgagtcacgctgacgagcagaaatacccgagtggttctccgtataaaccttttgcattctgtaagacgaaaagcctgataacacgcagagactaacgt

SEQ ID NO: 224490 - DNA, 347 bp, Glycine max
gttcgtcttacaaaatacaaatagattatactgataaccactctggtatttccgcccgtcagcgtgactcataagtaagtatgacagatcttgtgagcgcggaagataacgtaaatctccaagtgtcaacgggcttgtcagccgcgattgacaaatggcgcagaagacgacgttagtctctgcgtgctatcaggcttttcgtcatacagacaacataaaggttatacggataaccactcgtgtatttccgcccgtcagcgtgactcacaagtcagtatgacaaatcttgtgagcgcggaagatgacgtaaaactccgcatgtcaacgggcttgttgccctcgattga

SEQ ID NO: 224491 - DNA, 425 bp, Glycine max
  unsure (1)..(425): unsure at all n locations
agcttctaaactntatacaagattgaagctctgacaccacttgtttgacaagtggcctcagatatcttaagaaggggggttgaattaatatattacaaactatttccccaattaaaattctatttcactttctattcaagttacaaattcccttaacaatgaactcttaaataatgattcaaatagaacaatctgaatataaatataaaacaataataaataaaagagtttaagggaagagaaagtgcaaactcggatttatactggttcggccacacccttgtgcctacgtccagtccccaagcaacccacttgagagttccactatctttgtaaatccttttacaaagtctgaacacacaaagacaatcccttcttttgtgtcagaattcttttacaacaagagaccctcatctcttaatcct

SEQ ID NO: 224492 - DNA, 479 bp, Glycine max
  unsure (1)..(479): unsure at all n locations
aggaccttaaaactcaagctgatgattatggtgtacccatcacatgtggtactatgtggcggtcgggcgatgttgcacaacaagttntccacatccacaatgcgcgcataaacccaccatcccctgttgcccacctccaactgatctcacgtactcccacgtatcccatatcctcgtttctctcaacaccgggtccccatcaatcctcccaagcttccacaacatccaagcataacaacattcaaatagcacaagctatcacagccaagcaaaacagggcaaaggcagataactctgctcaacacactaaccaaaatcacagcttttctcacttaaagaccccagtaacaattccttcggtccaattcgttaaccgttggatcgactccaaaattttactggaagtctatagtgcataagcctacattgtgaccgttgtgatctactagcatacatccagaactcattttacattactc

SEQ ID NO: 224493 - DNA, 350 bp, Glycine max
  unsure (1)..(350): unsure at all n locations
agcttnttttgtgaagaagatgaatgaacttatgatngacgcaaaatcacttggatggtcatagcttccaagtctagatctatgaccgcttaaggaggatttgactgattcctccataggaaccaaacgcacactgaagtaagggcgaaccctttcctcaagggtggtgccacccacatcaaggtgagaaacatgccactagtgatgacatcaccaacaggaatgccagagatttggtcactagtggcagcaaagttgtcgtggagatgagaggcgtcatcattggaactctcncctattggctaaacctctagagataacatcctatcatcattggagcgcgtaaaaac

SEQ ID NO: 224494 - DNA, 407 bp, Glycine max
  unsure (1)..(407): unsure at all n locations
tcttgcgtagccactcttggtgctcattttatcccanaatctaatccctcttattactagctattttgaattctttagttcctgaatgtacaaccttcaaattgttgctcgttcccctctttgttttctgcatgaaagaaaatcaatatcaaacaattcaggctgaattgttatcgttattattactcgaaccataacgaataacaactaaacaagtctctcttattcaaatggaaatggatgttgttccaccagcatcatcagctttggaacaggattttggtctccaaataccatggttggaggggattagatcaagggcctaaaaagcactatttttctacttggtgggatgacctatgaccatcatccaacaccaaagtatgaatcctcctcttaaccaaatt

SEQ ID NO: 224495 - DNA, 302 bp, Glycine max
  unsure (1)..(302): unsure at all n locations
tccccaatttatgtgtatttcgtagtaaatcntgcacataaatcttttgtatggttaacgctgtctctagaacatttccattggatacaatgatgaattctgtgcatttttaggtgaaaaaaaggctaagttttgaattgtaaaaagcagcagttgggctaagtgcatatccactgctaagcgtagcttcagcgtgcttaacgcaaaagagaatctggcagagcatcaacatcaaagtcgttcgctaagcgcaacaggggcctttagcccagcttagctcgagactatcgcaaacccaattt

SEQ ID NO: 224496 - DNA, 391 bp, Glycine max
  unsure (1)..(391): unsure at all n locations
tgcttacggaccttcatgggaatgtttgttttagtcgcactaatctttctaaacttagacctgatagtatcccttttacatgtggttacgacattatagctngtggcgtttgttaatagcctttgcaagaagtcgaccacttacatatattatgttataatgaagagtcgcgaagtatatgcagatggaagaatccatcgagtatataagttagttaaggattgagactagcaagaagaaaccaacaagagaaaactgtataaaaggaaacgtggggttgacaagggaacgaccatcccgaggtcctcgctatttttaacactctataattctacaactcactttattggttttgttttgtgtgtgaattatttatgaaatgactggattt

SEQ ID NO: 224497 - DNA, 231 bp, Glycine max
  unsure (1)..(231): unsure at all n locations
acttgagctaattcanacgacaattatgtgatgcatggatgtctgtttgaatctcctaaaacatttagacgcgcgaaatagaatactgaagctctgagctaaatcaaacgacaattaactttctgctcggatggcgagtatgagtccgttaatctattcgagatgctccgaaatttgaattttgaacctcagtagctatattctaatgacaattacttctttactccgatg

SEQ ID NO: 224498 - DNA, 232 bp, Glycine max
tgcaacaggtgtagatttctgactcacggccatctgataacctagctgaccaaggcatctaggattacttcaaactttttatttgcagaaaatgaagatgactccgcaggcacctcacggactccgttaagaacaataacaccatctcttgcacctgaatttgtgggagtcgggaaccatcctctcaatcaaactccctaccctaacaggggtcatattaccaagagatcca

SEQ ID NO: 224499 - DNA, 290 bp, Glycine max
aagcattcactattttatctctgttattaaggttgactatgatcaatgaatggctgagatgcatgcaagatattgctagatcgaggaaccttcatccatagccttttactgagattaataaccactctccttatattttcttatgtgaaacggcggacatcaagtgaatgaagcatattcatatctgtgaatctatgagcctatcaaattcttgcctataatataacggcggatggaagcgtgtgtgtgagataattatgattcatgacaccatcaactcgtgactcatg

SEQ ID NO: 224500 - DNA, 396 bp, Glycine max
  unsure (1)..(396): unsure at all n locations
cacaacaatctccttagtccaaaagaaattcataatactgttgtatctagttcttctaaactttggcatcaaagactaggccatcctaacaaggatgcactagcaattgtactaaataaatgtaatataccctttatcaataaaactagcagngattnttgtaattcttgctctatagccaaatctcacaaactaccctcttctccctcttctactgtttatactgcacctcttgaattagtattctttgatgtttgggggccctctttagtagaagcatcttgnggattcttgtatttcctaacttgtgttgatgcctattccaaattcacctggatttatctgcttaatcataaatctgacgtttctaacaagnttcagctttttaaagctatg

SEQ ID NO: 224501 - DNA, 393 bp, Glycine max
  unsure (1)..(393): unsure at all n locations
tctngaggataattagctgcgacaactctgttaggtattgcatactttgtcgtttgatcccacatgctgtgcttatggcgggtgacgcaaacctcatctcatgaataattctactagtaattgtcgatttgacgcagttttcaaagagatacgtcattctttttaaacaatgcaaaattgaatattattgtttattagcactatgttttatactttgtaaacaatgcaatgtgaagagaaattgtgattgaatattaagtgttaataacactacgtattaacacgtttcattgtcacgtgtgttctactaagtgatgttttcttaagattttagtgaatgcagatatttcgtcgctaactgttactgtttctacttgcatatacaaatgtgag

SEQ ID NO: 224502 - DNA, 269 bp, Glycine max
gatgaactaattcctctcctggagtttttttctttttgcaaaaagggggagtatttatgaccccctcaaactttacagagctgggcccatggcctgttagactttctactacccctgagccggctcagaaactcccacgaaccggcgagtctggagcgatgaacctaatcctctgtgatatcgagaatctgttcttacacccactttactccttttccgaaacttccggaatctattgaatgggggtcactctttcctacatttcttcc

SEQ ID NO: 224503 - DNA, 405 bp, Glycine max
  unsure (1)..(405): unsure at all n locations
ctgcagcttgagttctatttccttgatattcctttgctttcttaaaaacagacacaantatgtgcatccttctctcttaatagcttaattataattcatttgccataattntatcatcagctctacatcatttttcacaattaaacagaagacctattctaaatcaattaagattcaggatcttcttaattagttcagtatattaaaacgaatgttaacatttagtaaatttcaggttcggtttcattctataaattattctttattctatcaacttttaaataaaggttctcacatcgacaaggatattcaaacacacgtccatgtgtgatataagtcctatccttaccaaatggactaacatgtgttggctcaactactactacctctttcattttattatca

SEQ ID NO: 224504 - DNA, 407 bp, Glycine max
tcatacaatagcaacacaaaatctatgtatccttaacccctctttaatggttttcaagggttgagaagtgaaattgagaatgaggttaatttggagcatactctcacctcacacaagtctataacatcaatgtaaacttgttcatactggactttacgcctaaaattcaccgtaccaaaatttgactcctcaacacccaattttaccctataaatggctctttgtacactttggtcatttgtttttctctctagcacagcccataacattcttataagtcctaaatgacatttcaagctatgaataactcactttaccctcaataccactaaatccagatttggccttccaactctaaaaacatactctttttccactcataacaccatattctcacattctaactc

SEQ ID NO: 224505 - DNA, 380 bp, Glycine max
  unsure (1)..(380): unsure at all n locations
catgcaagctttaactctgatgtccgattcaagcgcttttatatatcgtttctcttatancgaagaacagaagctctggagaaattcgaatggncataactcttcacacggatgtccgattctggcgcataatatgtcgagacgctcgaaattgaacaccggacgctctcgagaaaattcaatgggcataacttttcactcagatgaccgattcaggcgcataatatattgagacacttaaaattgataaacggtagctcccgagaaattcaaatggtcataacttttaactcagaggtccgattcaggcgcatatattattgagacgcttcaaatatgaacatcgaaagctctctagaaattcaaatgcgcataacttt

SEQ ID NO: 224506 - DNA, 339 bp, Glycine max
ataaactcaaccggtataacttctcacacgatgctatatgtccactatttttactcacaagcaacgggagactcaacagtaacacgtggaagttgcccaccatccgtctatagtcaaccttcatattcttctgttgcgcatataatacgatgtaccatctgaggtgaggctcacgaatcaggccaagtattcttgctgattaaacacacaagaaattcacatatgggaaatgcaaagccacatgggtatactcaaggtagacttaatgcttccacatggttcttataataacaaggacaatggaagctgactccagcaatcacgtcatacatagacaat

SEQ ID NO: 224507 - DNA, 455 bp, Glycine max
  unsure (1)..(455): unsure at all n locations
atcttccttacaagtcttctattttgacctttctaaactcttangtgagggggncaagcagattcttttatggtgtttttgggtcatatcgatccattttcacccctaatatatttcaaggaagatattgctatcaatctctctaaatggtactccatacgcaatttcattgagtattagttaaggagtatttaaaatactttattattacttaatatatcttttctgaaaaatattatatccttttgataatttgttcaataaaataaaaatattaacgaaggaatttaaaactttaatacaatacatgctttgagtaaaacactatctattatgaatatctattatattcaatcaattatgtataataatttaaatagtattaattgtcttaatatttaatgtaaactatttaataatttagcctatttttattcctaactcaattaattaca

SEQ ID NO: 224508 - DNA, 358 bp, Glycine max
ccttaaaactagcttgcagtgcgatccaaccatattcataattgaacactgtttttgtgtctactatcactgacacagtattctcgtcattgaggtgccacttgtactgctaagatcctcacctctgggcgtattctttgaaagatccgtgccccttttatttttctgcacatgttctgtagttgcatcctatccaaagccattataccgacactgcctatcgaatgctaccattacgtcctccctgtaatatgactcgggtaaggttccacagttagtgtaccaagtaacaactaccccagtaagactttcttggatagaatgtacaaataattcctcatcttttggcgatgccccc

SEQ ID NO: 224509 - DNA, 429 bp, Glycine max
tctatagtggaaaggtgtgttgctgaagaatgtatcgagttttgctccaagtacatcgaaggtggtaaatctgccgggcttcctgaatgtcgtcatggtccatattgatgggggtaatggtacactatgaaacaatgttgtcacaatgactcggcaggaggtgtcacaagtgcatctctatgtattaaacaacacaacatatgtcattccatacatatatgctcacaaaaaagaactcacatcaatgaacccaatactgaacatgatgagggttttgcaagagcataatagaagtttcattaactagtttagagaaagaatattttcttgatgatggcgctctcaaaacattaagattggtagctgctggactatatctgattgtataacttggaaagggtatgatatctataattattccttctacac

SEQ ID NO: 224510 - DNA, 346 bp, Glycine max
  unsure (1)..(346): unsure at all n locations
agcttgactntggcttatacatgatngattcttgatttgtgactcgnaggaatttgattgggcaagattggatgagaggaagggtggttttcgaaatctgcactntatgcagaattntgctgttggaattgtgcagcataatatttgcataagtgcagaataatgctatgttttgctggttgtggaaagagtagttcagaatgagttctggatgtttgctagtagatcccaacggncaaaatgtaggtttatgtactagagacttccagtaaaattttcgagttgatccaacggttaacgaattggaacgaaggaaatgtactggggtctttaagtgagaaaaagt

SEQ ID NO: 224511 - DNA, 347 bp, Glycine max
acttaacctcatcgtccctcacagtctttagaattgggagccattccaatccttgtgttcggactctcagccacttatgatagccaccgatgatcccattactgtgtcccctaaactctctgtccattcttcacgccgcatcacatgccttgcataatcccttggagaaccctcacaattgggtcacttaaacccctgcgataaaagcgtgatgctttcggttaatggcgctcctctatgggggagccaaccgcttatggcagaacaggatataattatacacccctgttcctcatgaactttgacatctcgataaaaagatctgattttccccttttacgaggaac

SEQ ID NO: 224512 - DNA, 306 bp, Glycine max
taccgctcgctcatgaggaaacaaatttggaaagctaattggctggaattgcgcatgacagagactggcaaaagaaatggagagggcgggaatgtcaaaaacgaggggatcttgcagcatgccgaccattgaataagcgtaaggaaccaaatcatcgcactaaaaatgagggaagatatcgaaatctggtggggaggagatggacaactatatggcttcaattccaatttaggatgcaagacggaaccacacaggagggggggatgtaagcctgcaaacaaaaaaaaatatgaaaagtgaaatatc

SEQ ID NO: 224513 - DNA, 415 bp, Glycine max
  unsure (1)..(415): unsure at all n locations
nagctagctgttgtctgtggcttactcatattattggaaagngnagaggctgtggcccatacctccattgcagtcatttgtgcctgagcttgcttccctatatttattatttttgctcatgattatgagtgagttgaaacttcctgccgaggaccataaggtaaaataatttataatataggaaccaagataaatgtttaaaactatatggactaaaaagaaaaattatcacaactatcaggactaataggtgagttaaaccaaaataaaataaactagtgcaaaataatggtggtgtgattagacacttttaatcctaaatggctcgttganacatatatacctctacatatctgtgcattctgcaccaccaaccttagtggaataaatttatatgcaacccttctatggatat

SEQ ID NO: 224514 - DNA, 383 bp, Glycine max
agtaagaattgcaagatcatcttccttgtcaactcactgattattattgccatcaatccatagagatgacaatttatagagtgatccaagactctcaaatggatttccactgaatgtattaataaagagattgagaattgttaaatctatctcccttgagttgcggagatttcccaacaaagtcggaattggtccttcaagttgattatatttccaataaagtgcaactagagaagtcatatttcccaaagaagttggaatggctccttcaagttgattgtatgacaaatcaagttcaacaagagaagtcatatttcccagggcatcataaatattcccatgcaagttgctggaatgatattccaaagacttgagacgatgaa

SEQ ID NO: 224515 - DNA, 399 bp, Glycine max
  unsure (1)..(399): unsure at all n locations
tgcggcatgcaagcttncacaacatccaagaaattcaacatcttttcatacaaactaacactgtcaagaaaatagagcataggcagaaaactctgcccaaaacacaaaccaatatcacagcttttcacattcaaataccccagtaacattctcttcgttccaattcgttaaccgttggatcgactcaaaaattttactggaagtctctagtacataagtctacattttgaccgttgggatctgctataaaacgtccagaacccaatcggtgctactctttccacatccagcaatttcataacattttctgcacaaagccaaattctggtgcacctagttgacagcaaaattctgcataagtgcagatattcgaaatcacagtttccctcatccaatttt

SEQ ID NO: 224516 - DNA, 456 bp, Glycine max
  unsure (1)..(456): unsure at all n locations
ttgaaccaaatcctgactcaccataatacctgacccagtgtttttatgtctatccttaccctctgaagcgaaaaagaatagaagggaaatttccaatcaaagaaaagagaacgaaaatttccagtgtatgagataaaagataagtaaggaaattcccaatcaaagaatgggagaaagaaaatagaaaagaaatataattcccaaccaaagaatgggagaaagntaaaaatggaatgaagctcctggtctaataaaccagaaaaaatgtgcagagaggtctttggaccatacaatatctgatcaatacataattgtctccaaatgaacaaataggaatgtaatgaaaccacgacctataatggtcttcttccttttattaccaaccaaaatcccgtgcgcttgcgaccttttgtcttgtcccggctatacattatttattataattttttatatatt

SEQ ID NO: 224517 - DNA, 375 bp, Glycine max
ctcttggaagttcatcatttgatttgacttcttctggaggatcttcattggttcctctatcatatcctttggaatcttgttcatgaatattcatatgttctaaagaatctgcaatatcatctagcatattctttcttgacaagatagcattatattcatcaaaggtaacatgaatggattcctcgatattcatagttcttttattatatatcctatatgttttgctttgtaatgaatatccaagataaataccttcatcagaatttgcatcgaattttcctagattatctttaccattattaagcacaaagcattcgcaaccaaaaacatgtagatgagaaatattaggttttctaccattatcatactcatatg

SEQ ID NO: 224518 - DNA, 435 bp, Glycine max
  unsure (1)..(435): unsure at all n locations
actaagcttctatccaggcactctcttggtggtgaagctccttcttccatggcttatttcctagaggatgacgcttcctctcatctcttgtcctttatcttccgctgcatctccatggtggaaagccaccattgaaggacctcattgaagctcatagatccagcctccatagaagcttacatcaagtggtaatcagagcacataagctttaagtaggtgctccttaaacctccattaatttttggctttaccttctcctccattgttgtttcttcatttttctccatgcatctcctcacatgtcttctgctaaatgttgttaacatgattctttagaatttccaccaattaaacttgctatagaagctagatttgaatttctacggttcaaatntattggtcttggtcttgaaccatgaattatgttgagtttat

SEQ ID NO: 224519 - DNA, 166 bp, Glycine max
tatagagtttctaaatttctgtctcattatagacaggaccttggccttataagaacctggaactactcaagtcctcctccttatcctattcggtccctttttcttccctttttctcttgacatctcagctctatcagtattgggtgaactctttctggttatccca

SEQ ID NO: 224520 - DNA, 440 bp, Glycine max
ctcacaaaacatttatcacctctccatcaataatatacaacccttggatggatagaatcacacctcaatctcattatgggtcgtatctaccttcaacatgcaaacaaacatgatagcactgactccttctctttccatatatgctggctgtgcccaagcatgaccatatcattcctctcactcatatgcaaactaacatactatcatgccccatataactaccaacatgtgtagacccctccacaaccttccctcgaagaacttgtgaggcaaatgaatatgcataacatgctatttctgcaaaagaccataaccttcattctaagcttaaccaatcaaatgggacaatttggtacccaattgtaataacaatcagtccacaattctgacaagctgctttcttaatctgtccaaatcccaaaatgtcatgacatttattg

SEQ ID NO: 224521 - DNA, 352 bp, Glycine max
  unsure (1)..(352): unsure at all n locations
aaaagaaaattatccctaaaaactatgccttttccaatgagatttgacttgtactacaataatccggctttgaaaggagatactgcccttgtacaccgaaattggcgcatccctaaaataactaaagggaaaagcagaaactaaatttgatgcaagaaaccatagtcgtataagcatctcctatatagaattcttgaagggaaggaatggccnatccgctcctttgtacaacttgggaaagtctggcaacctcaccaaaatattcttatctttccaaaagcatcttttctgccaactcaaaaaaaaaaaacttcttccaaccaaattttcttgctgagatgaagacgatttt

SEQ ID NO: 224522 - DNA, 416 bp, Glycine max
cactcaagcttgtaaatatatatgcattgtgaatatatgtgtttatgcattgttttagtaaatatctagcaactaattaagataatttcagttggtattgtgaataaaatggtgtgcctattattctgaaaattccaagttagaatatctctattcctttggactaactacgcactccaattctttcagcatgaaactttgtttgccgatatcgagttcatgcacaagcgggtactcatcatttccttcgatgctattagcttctgctgaacttatttgctgtacacacacacacacacacatatatatatatatatcaaagttgtacgatattgaaaccaaatacattatttcaattaataggaccaagaatatgatactgatacgggataaacccagaagaaattcctataatc

SEQ ID NO: 224523 - DNA, 331 bp, Glycine max
caatatttatacctttttatctggataaaataactggaggatgggttggaaaggatattagatactacacgtatattgttatactggtcaaggtgggcgaatactcagtgtacatcacttgagttataattacccgtatcacaaattgatgtgactcttttcaacatgtatggtggagataaacaactagacatgatatgtaattgaatggattattaaattatccttaatatcatgtgttgactgagatgattaaataatattgaatggaagattctatgattagatcagatatagatacgttattgatgaaaatgtgaaagcataattg

SEQ ID NO: 224524 - DNA, 378 bp, Glycine max
  unsure (1)..(378): unsure at all n locations
catgcaagctntataagtgcgggtctgggagacgatagtatagtgttctttatatgtgaagatgatgttccaagtgcttcggatttggtccgaccatgccctcctgatttccagctgggaaattggcgagtggaggaacgccccggcatttacgcaacaagcataatgtaaacctttacggttttaaaagctctatagttgggcctacgctttagagatttcgtttagtaaggctctgtgtcttttggttttgaatttataatacaaggatctttcttcatctggtcctggtctctacccattctcattcatttgcatgtntacttctttttctgaaacggcagattcgatgacgagtccnccgaaggtactaatacc

SEQ ID NO: 224525 - DNA, 389 bp, Glycine max
taatactatcaattacaaaattcaaacttttgggaatttttcttgtcttatacaaacgaagcaatccaacattcccttatcagtgatttcgaaaaaaaaaatataatgatttaagcaaaccattcagattatatcagaagcaacaccacactcgatcaagctagatctgaatcaacgaattcaaggacaaaccctgtaattacacaaatcggaacacgatcacgaattctaaacccttatcgcacgccatcaatcgacaattcacacacgacatgttcattcacaaacaacgcgcgcgagacttcaagattatcgacgcacatgcaatcatttacagaaccagaaaaagattaacggatgacaaatgcagatcaaacgaagccagaaat

SEQ ID NO: 224526 - DNA, 277 bp, Glycine max
atctcataagcgattacactgctcgttgagacaatgattgatttagtcacgagcctcacttttatcgataccaagaggattaatcgatacttctctctcgttcattgtgtcaaaggtgaaaaataacactttaatcgattacataggtcatctactcgattatattggccttgagctgttttctagatgttggatgaacactttaattcattacttagataatctaatcgactactgtgtgtaaataatcgattaccttatagattaatcgattact

SEQ ID NO: 224527 - DNA, 331 bp, Glycine max
  unsure (1)..(331): unsure at all n locations
gtgagctcgntagtgctgtcccacagatgccctcagaacttgttcctgctccattcttcttttcgggcccggtgtgttacctgctctaactctccctctatagtcatgttgacatcctttagctcgacacactctttttcgaccctagtaactgttgtcttgagcttttccttgatcaccctcgttctttctagctctactttcaaggttacacttcttcgctttcttagaagacctaagcttccttcccacttggatacttttggtttgggagccaagatatcccttgcgtgctagacttcaaccacttatgatagccaccaacgacact

SEQ ID NO: 224528 - DNA, 355 bp, Glycine max
tatcatataatatcacacatgtttttctcttttaacaactaatattaatggacatggggtgggtctatataatgcactcccttcttaaaaacagtaatatccagtggcgttcagatgtgtaaagacttcaatccaatggagacatcatctatactagtgtgtagctgatcattgctgaggcgaaaaatataccttctgatacaccaccccattaggtgagataccttggcggtctttaactaaatacgataataacctacccccttgatcttgtgattaaatcttcggatatgtcgcttctaataaacggttattggtctttatcgagcccatatcgaaatcatacgttaacatt

SEQ ID NO: 224529 - DNA, 441 bp, Glycine max
  unsure (1)..(441): unsure at all n locations
gcttgagcccttgaaccttcgccccacatttttgcaacatagacacttcctctccctaagtgtctgggaaaaccccgaatccactttccatttatatccctcagaagccaaacacaacaatacctccttgccctttgaaagctccatccttgttgagacaataccgaccctcctcaggaggaattcactntatgtccatttgatggttagctttagctactattccctgcgtgttctagctcaaagaaataaactattttcacctatcaacaataaaggcccaaggtctgaatggtctaataaattcctcttcatggatgtgcttatttctccaactccaaagatagaacanctttctatcaagaacgctatttcacattaatgagtattaatnccttttgtaacaactactcccatcaaatagtgagtattttataaact

SEQ ID NO: 224530 - DNA, 445 bp, Glycine max
cactctatataacactcaagctttgcggatttggacttcgccggcagaatgatcaaagcgggtctgaaaagatgtttatttaatcatcccacttggacgaatgagaaaactggggcaaatgaagagggtgagaatgatggagaagcccatgctgtgactgccattcctatacagccaagtttcccaccaacccaacaatgtcattactcatgcaataacataccttctccttacccaccgcccagttatccacaaaggccatccctaaatcaaccacaaagtctgtctaccgcacttccaatgacgaacatcacctttagcacaatccataaacgccaaccaagaaatgaatgttgcagcgagaaagcctgtataattcaccccaattccagtgtcttattgctgactgctcccatgcctacttgatatttaatggtagccatac

SEQ ID NO: 224531 - DNA, 274 bp, Glycine max
  unsure (1)..(274): unsure at all n locations
gatccttaagtcacctgcggcatgcaagcttatacagaatattctgatntcattttcttcatctttgaaaagagattttgttcaatactttctcttccaagaaaagttcattgttcaaaaacttttgctactcttcttcttcatttacttctccctttgccaaaagaatagaanaactaaccgcctgaattcttttgtgncgcctccttctcttccagagaattccgaagacttaccgcgcgacaagtctttagatgcttcccttcccttaaat

SEQ ID NO: 224532 - DNA, 361 bp, Glycine max
tgtgcggatgtaagtgacatttccttacactttgttgatccttgagtccatctcgtcaaatcgcatgtccacttgttgttccaaaacatcaaacctttcaccaaaatatgtttgaagtccatcacacctgtccaagatactccgaaggagagaggaatcctctcctactggtaagtgtccttcatcttcattgggttgagcacccttgtttacccaagagtcatcacgctctttgcggtaaccaaaagatgcaatcacaacagcaccgatcaagaaggatctcttgattggaacataaggttcagaatcaagagggatgttatagtgttgaaggattagagtgactagatgtggatatgat

SEQ ID NO: 224533 - DNA, 424 bp, Glycine max
gttagattgctatttttaaaattatcacttctgtcaactttatgatgccttttctgaaaaggaaaagagctattatttcccttagattgttccaaacattgtctagttatccttttagaagttaatatgtgaactaaagcttttattgtagtccaaatttcataataagggcatagccttggcatctattctacgtaaatgatgctgtaacaaattaaagaagcattttcttttgacctgtattatttgtttttctgttcagtggtcatttaacagaatgttatctggaataataattaataaattattctgttgcatatatgctcacactccaatgaaaatctgatacataatgcattcttaatagtatagaactcaaatatgctggcttactgatcctttggttactatgtaactaaggaaa

SEQ ID NO: 224534 - DNA, 352 bp, Glycine max
  unsure (1)..(352): unsure at all n locations
agctnatctgtgaactatctattctataattataagcacgcataacacttgtagaactgtgatgaatgaaagccttatgagatacacttcacagttccacttctctccctcttttattccttcaattttgagctccctccttctctctgtcttgtcctccattaaagcatcctcttcaagcttcttatccatggaaatttttggtggtgaagctccttcttccttggcttattccctagtggatggagcctcccctctcctcttctccttttccttctgccgcaacgtgccctcttgtcgagcgagggcgatgctcacggttgcgctntccaaaggaggaaagatgcccgga

SEQ ID NO: 224535 - DNA, 457 bp, Glycine max
  unsure (1)..(457): unsure at all n locations
taaggaacacattattcttatgtgtcatttggaaatggtattgtgtccattatgtttcacagttatggtacatcttatggtgaatctaattaatgaagccaaaattggaggatcggtacattatagatggatgtatccaataaaagggtatgaccatttctaaactttgatgattctagatgttcatttattgctaatttggaggattgatatattgtttttttttaaatcacgggtttttgggaaaattgaagccatatatgcataataaaacacaacttgaaggctcaatagctaaaggttggctttctgaagagatgctaattttttgcacaaagtaattgngtaatgaaatngagacaagattcaatcgatgaggtcacattgacgatgttccatttgagtcttcatcatctttattccccaatgtagagaaacctattggaggttcatctta

SEQ ID NO: 224536 - DNA, 466 bp, Glycine max
  unsure (1)..(466): unsure at all n locations
agctntaacgtcaacaacggttntaggtagtctatcaggctagggtaggcttttaaaggtgttagcacaatccaacaaacgaaaatgtttgtaatgaatacaaaagttgactatttttaacaaatcaataagataaatagaagaagaaatgcatcattcactacatattccagattattgttggttttgtgatatttacgttgcaattccatttggtaatatgtttcatatttatcgtctttgttagaacacttttaaattttttatcgattgtataatagatatgtatgaattagttgtttttgaaatatttattttcatttttatactagtaagtaattatttgaacattctaattaataaacatataaaaaaataccaacgacaaatataatttaaaataaaatgcatataatgtaaagaaagagtatattantaatttattttattttttcnaatttttatg

SEQ ID NO: 224537 - DNA, 405 bp, Glycine max
  unsure (1)..(405): unsure at all n locations
ttgcatgcctagtgattctatagagagataggtccaagctccatagaattttgagagattttgctgtgtgaagatctgcagagaccaaagcttgaagaggaagctgttctgagagcttgagatgagttcgtgagtggttgtgagatcctagaggtgaaggagacatcctcaccacttgtatttttgcaatctttcatcatgttcttctctttgttgtaaaggaggcttcctggttatggaaagctaaaatcctctattggatcttccctgtaggtacttgatgtaaatatctttttatctatttaatggtgatttgtgtgttctctgtgctatcaacttttcattctagtatgcctttaccttgatcatgtatatgcatgccttgntatggtcattcaacagtgg

SEQ ID NO: 224538 - DNA, 437 bp, Glycine max
  unsure (1)..(437): unsure at all n locations
anctaggcaggctccctggtgggaggatttattgccactttcaagctttccgcgtagcactgttgtgcgtgcttttgatctgccttgacagtcatgatctctcccattaaggtggagaacttcatctttagatgttctatggagacgatggctcctagctcgttgagtgttttcctgtcaatcaaagcaaaataaatagtatttgcattgagtatcgacggttgtcgcaacgtgcccttcgcggtcgagcgagggcgaagctcacgggtgcgcttcccaaaggaggaaagatgcgcggagtctccaccaacgtatatttgtggataatgtcggaaaaaccgaaggaaaccggtcaaaataaaaattctaagttcgtgagttgtatttaccttgaggaaggtattaccacctctcactgttgtctataaggacaacac

SEQ ID NO: 224539 - DNA, 366 bp, Glycine max
tttgatttgagcaagattggatgaggggaagtgtgattttcgaaatctgcacttatgcagaattttgctgtcaaaataggtgcagcagggatttggctttgtgcagaaaaatgcttgtgtgtggttggttgtggaaaagagtactcagaatgagttctggatgttgctagtaaatcccaacgatcacaatgtaggcttatgcactatagacttccagtaaaattttggagtccatccaacggttaacgaattggatcgaaggaattgttactgtggtctataatgagaaaagctgtgatttcggtgatgtgttgagcaaagtttctgccttcgtctgtttgcttgctatgaagcttggcttttgat

SEQ ID NO: 224540 - DNA, 363 bp, Glycine max
  unsure (1)..(363): unsure at all n locations
ttcatgctggccctataatataaaacagtcccacaacccaaagctcacaaaaccatgctcatatcttggtgaggcatttcaccgagcacttggtgggcgcatgtttaggcacgaatatcaagagaatggggacaatgtggcatgcgccatcacttcagaatacaccctaggccaaggccatcccttacaacccctcaattcaacaaaaacaagcaacaatttgaggataaatccctcacgtttcttagcaaacacatgcaatgtaaagaccaaactacatcaatggaaagctataaagcccaagaatgaggtacttacttgtnggagacgaataatagagcaaaacgggatctaaaacgcaaa

SEQ ID NO: 224541 - DNA, 167 bp, Glycine max
gcaccaaggaacagtttttatgaacaaaagggaccttcaggcaacccacggggggcacacgagcagggcacgacaaccaaccgaaaaggaaggaagaacaacaaaaccgacaaaggcacatgcccccagcaagcagagaccagacacacaacacccccctggtcttc

SEQ ID NO: 224542 - DNA, 456 bp, Glycine max
  unsure (1)..(456): unsure at all n locations
agctgggtaagaactgagaaatattcatanactttcttgctcgcacatcgatcgcgtgtattacatttattccacaaggtttgatgtagaggagacccttaattctattacgcaacgtggcggacaaaagtgggcatgttaacttgaacagtcattattgtcaatgcggaaggtattctgcgcttcactatccatgttcacatattattgcagcttgtggttacgtgagcctgaactactaccaatttatagatgttggttatacaaatgagcacatcttaaaagcttactccgcacaatggtggcctcttgggaatgaagcggctattcctccttctaatgacgcatggacacttatccctgaccaaccacaattcatgcgataggtcggccaaaatcaacaaggatcaggaatgagatggattgtgtcaaccgtttgccaccgaataaatgctc

SEQ ID NO: 224543 - DNA, 293 bp, Glycine max
tgggacgagaatgagcgatggtttgcttggttctcccccttaccagcgccgatggtaacggttatttgtcaaagatctccttgatgaaatattcttttttgcctgcaggattgtaattttattaatgttgatctggagaatgctgactctgaccttttctagctgtctctgcaggggccgagtgtgactgaagccgagtatagctattttctacattgccgctcaatgatatttttcgcttctaagggtcacccttgattggggattacctactaaaagagattgtttattat

SEQ ID NO: 224544 - DNA, 400 bp, Glycine max
  unsure (1)..(400): unsure at all n locations
gatctaccaccgccgtcggcacttttattttatttttatatcattntaatattatttgtactttgatttccagccgggtatttggctatattattatgatatttgaacagttactatttctttatttgcatggtatgtttgaacaaatattaattatgttatttgactatatggttnttatatatttgatctattcatgggtcttgcttcatgattcttgcttcacgatttggtttaaattatcccatgaatattgtatggatgcttaattgtatttgtatgcttcaaacttgttatgcactttggctttttgttgatgtcaaagggggagagaaatagggattaattcaagaactcacatgagtaatcaacttaattttaagagaagcatanattcaaa

SEQ ID NO: 224545 - DNA, 387 bp, Glycine max
  unsure (1)..(387): unsure at all n locations
aagctcagngcaagaagacatacacatgtttatgttacccacaatgggttntagaaatagaaaagcatgataatagggacttgtttgtaaaatttgggctgaccatagattggtactttgcacctaagtaacatgggaaatgcttttaatggtgtcgatataatgtgtgtaaataaaaggggcataaaattcctcaccaagtatgaacaagctgttttcctaaatgaatgtataatagcattcgaatgccttttttaatgcaaatgattgcaggatgtaattagctttccgattccatattaataaatatgagagaaacaataaaaatctgcatggtgtacttcatatgtatataggtagttcgtgatagcataatgttatgatata

SEQ ID NO: 224546 - DNA, 82 bp, Glycine max
gcacccgagcaagaaggcaccctgggcggacgaaagaaggccagccggggagcaggaggcccccagcgcaaagacaggaggg

SEQ ID NO: 224547 - DNA, 278 bp, Glycine max
caaatccctcataatactatttatcttgaatcctttagttcctgaatgcacacccttcaaatagctgcttgctcccctctatcttttctgcaaatatgagatacagtggctgccaaaacatggaatgaagtccttaaaaaattaatatcaaagaaaacatggatgaaatcacaataaggaagcactactacctatctactacagtccttaaggctacttgccttcgctcctaatgtggtggggttttgactaataatcctatacctttgccctccaaa

SEQ ID NO: 224548 - DNA, 310 bp, Glycine max
aaataatttagtgagagagaagaataagaaataaaaagagcgataatggagaagaaagggagaaggaggagtgagaagaaaaaagggggggcgagagatagaagggaatgggggagggagaaaaatgtgagaggaagaaatagagagggaggaaaggacggaagttgaggggaagtgagagagaagaaagagggaaggaaggaaagaagatgggaaggatgggaaagaaaggaatggagggaaggaaaaaagaaaagaaagggatagtacgagaggggagagagtgatggatggatggaaggaaaggagg

SEQ ID NO: 224549 - DNA, 460 bp, Glycine max
  unsure (1)..(460): unsure at all n locations
agcaccgcagctgcagctatatattcttatacactttttttattttgatnngtaaattaccatgctgcatcttnaatgtctttctgttattataatcattgcttcctttcgggtgctgatgtcattgatgcaagtgtttgaaggagctaaccactatgaaatttgattctttgggatccagcgatgtcgatgctttgacattcacttcactatatctccagataaaagagctttttgtagatgtatgggacgacttgttgcctgcaaaaaggttgtatgctcagggaatgggaaaattggaattcaaactgggaaagctcgataggagggttaaagaattgataagtaggcttatatgttactttgtacaggaatcgaatgtcttagagctaatgttattgacttatacctcttaggatatgtaaataaagaaatcacatgtatctattattcatacatt

SEQ ID NO: 224550 - DNA, 460 bp, Glycine max
  unsure (1)..(460): unsure at all n locations
agcccagaacaatataggtgggcgtcattttatctgtttttgggcttggcggccacgctcaacatagtactttctacacctactgttcgttaatttcaccaatgctgntatgggaatgttgcgacaatcctttaaaaccttatggatacatttcgagaggttcgttgtcatgtggccatattcgacgtccttccctatcgtaagccatcgcccatttttcctttgagatgcgatctatccatgttgctatggctggactcagttcacgaaatttttctaaattttgatcaaaaatgagctttgatggaatgtacgctgcataaaatatattatgaataacaattctaagttttaatgaatgtaaaattaaccgtgaccatcatattatgacattcttcccaatttcttcaacttttctttttgtttggcttaattgaatttctactgaagatgcttgtat

SEQ ID NO: 224551 - DNA, 420 bp, Glycine max
atgaatggatccattgtatttggatctacttgtggagcttcaatgttaacacttggggtatatggattgttgtaaagccacaaaagtagcaagtaccaaatcctaattgttgaactttctggtttgatgctatcagctttttagtgcctaatgaaaaattgaaaaatgttaaacaaaatgataaatctattttatgaaattatcaagaaaaatggaaaatgcgccaacctttttcaagtgtaagctttgaagacttatttgttttataggaagaacaagaacaatcactatgagtgcatttgtattcaaaggttcctcttatttgggttgaacaacttatgcttcaacatgtgtatctttcttgatgatggggctaggaagaatgttcatgttagaatctatctccacgaatgtttatgt

SEQ ID NO: 224552 - DNA, 438 bp, Glycine max
  unsure (1)..(438): unsure at all n locations
gtcacctgccgcatgcaagctngtggcaaattgcaaaggtcatggtctgttttgtaacaccctgcaatatatatctatatattattagtaattatgcttgatgtctgattatttgttgcgttattttcatccgtaattatttttatggaagttaatttagttacatataggggtggatagataaggatgtatcttctcaaagaagcctcttgagaaagctctttcaaaaagccacgaggaagcttctagaggaagcctcttaatgaagcttctatagaaagctacattaagctgcctctgtaaaaatgctgcccaaccttcattataccgttggatcttctcgaaatttggtctgcaacttcaaaagacactttttcatgatctgaccggtgggatctttgagaagaagtctggagtgtgctataagcctcttaatga

SEQ ID NO: 224553 - DNA, 385 bp, Glycine max
  unsure (1)..(385): unsure at all n locations
agcttcgggtaaatagtgctggaaactattgtgacaacttcatatttggaaacgtctaattaacaattctttttagnttagctgcaggaaattctgctggtataaaaatacatgctgtatttgtatctaaagctttcggtgaaatactaattttaaatgctgggttgactaatgtggaaatatggatcattccaacttttgaaaacagcatggtctatcatggcaattacatttatttccctgctagttatgtctgtggtgctggccacttgtttcttcgtccgcaggcatcacataagaagagaaaggcctcgagctcctcttgttcatgaatntcatggtatgagtagtcacctagtgaaaccaatgccaagtttgatattta

SEQ ID NO: 224554 - DNA, 448 bp, Glycine max
  unsure (1)..(448): unsure at all n locations
agctaggaagaaaggcgagnatttatttgtatacancccacgcagcccttgctttagcttctatatgtgcaacttcacgccattagttaaaaaaaacatatgtatttttcatatctacaatataactgatgttgattatactactgaaagnttacttttcttattttattacctataacataaattttttcttgctaagtaatgagatgataagttaacagaatgtcacatcatcaggtacagacttaaggatgacaagaaaatcctcacccacacatatctaccgataaataagaagtacctttaatatgaataagggtcatcagcaggtataaagtataaaattatttttaacctcggtcccataagatacagaaaattctcaattaaggaaacaagttgtaaagcgaggttttgaaagagacattaacagtgaaactatgaatta

SEQ ID NO: 224555 - DNA, 456 bp, Glycine max
agcttctatcaccaagccataggaaagtgttgtgtagtgaagaaaaaataaccttaagatttattactcttgacattattcattatgaagttttgaagtctttatgtgctctttattataattagtacttatattttatgaactttgaatgttggtaacatttgttgttaatcaacttaagttatgatttcatcttgttaagtattttattaatgtccaatgtgtgtataaagaagttttcttcactgaagtatgttgaattaaatgtaaatggaaatattttgaattttaatagtttacaacaaaatacaaggcatgtgcatcgcatgagacattgtactattattaataaaaggaaagaagtgtttaagggaatcgctatatattcgagccagacattcttatatttattctatttttaaatcatacagatatatatatatatatatatatatt

SEQ ID NO: 224556 - DNA, 445 bp, Glycine max
gaccttaagcacctgagctgcagcttaaatttgataaaacttttttatctgctggtaatcgattaccatatatgtgtaatctattacacagcgcatattttgaattcaaatattaatagctgttgtaaatcagattaggcaactggtaatcgattacatcctctggtaatcgattaccagagagtaaatttcttgaaaaagaatttttaacttaaatttcttggccaaaccttctgctacttcaattggaattccattcctatttaatataccctttctaagactctagaaactgtcttgatcatccatcttgaatatctttaatttctttgtcttgaataaagctttgagaaacattgtatctttcttgagaagcatgtgatcctttggcatcatcaaaacattcagcttgatcctttgctacaaagttacacaagagttctac

SEQ ID NO: 224557 - DNA, 448 bp, Glycine max
  unsure (1)..(448): unsure at all n locations
agctngtgactcacaatcttgctatgctatattctgcccctcccgggagatatggaaaccattctggaggacagaggaccagtggaggacttcaaccagttggtgggagttctcagccaattaacagggtgtctcantctgcgggtagaggtagtggtggtagtggtgctcctgctattgttactacaccactcangtgtgggaagtgtggtcggcttgggcatattgcacgtgagtgcacagatagagaggtgacttgttttaactgccaaggtaagggccacctcattaccagttgcacatatccgaggagggagaagaggagtggaagtctgaataatcagagtggacgaccaaggaccacagggagagtgtttcctttattggtgctgatgccgacagctgataactcatcaagtatgtgttcataagcaagtcccttgttgat

SEQ ID NO: 224558 - DNA, 409 bp, Glycine max
  unsure (1)..(409): unsure at all n locations
caagctacaaagttgtttaagtccaagctcataaataaaataaaatatggacaagataagatatgattgaatgaaataaaatctggacgaaataaaatctagatgaaataaaatctggataagataagatttgataaaataaaattgtcttctctcttcaagtccaagcccaattccggattcaagcccaattgcttataattctcctgaaatcatattaaaaacacaaaattagtcaagtaggcctaaattataaaactgcataattaatttgacaattaaggcaaatcagtaaatataatggtgacaagaagggttaagatatagggaaaaataatgacacatcaatcatgctcaggtngactttgaaccatacactatgttcgccactgagagacaaacgtgtagt

SEQ ID NO: 224559 - DNA, 460 bp, Glycine max
  unsure (1)..(460): unsure at all n locations
ctgcagcttacatgtttattgacaaaaaattcgtgtgaatggtaacggaatataataataacttttatttaaaaaaattagaagttaaatctaaaaccaaaatatgtaaagaaaaatatctctatcacttacatgtctttccgtccaaaaaaaaatcaattacatgtcttaaacaattacaacaaaacatgttgttcttaccaaaatccaaaatctaaaatctgaacatgtcagagttgacacggcgaatgtggagtcccagaccttacacgtcggttnggaaggatgcctttgtcaagaggataggagggtggacctgcaaaacaaaggactccgacgctcaaataagaatatgagttcggagaataaagcaagcatatgcttaagtaaaactcatatgggagaaagagagagagacacatgtntgttgctcgtgtgttgagtgtgtgatgggatgtgt

SEQ ID NO: 224560 - DNA, 400 bp, Glycine max
  unsure (1)..(400): unsure at all n locations
agcttataatatatcgatacgctcgagattattcttcggaaacnctcgggaaattcaaatagtcataacttttcacacggattgccgattcgggcgcataatttgtcgagaggctcgaaattgaacaacgcacgctcttgagaaattatactggtttaactttttacacggaagctctcgtgaaagtcatatggccataacttctcacactgaggtccgatttaggtttataatatatcgatacactcgaaattaaacatcggaaactctctataaattcaaatggtcataacgtttcacacggatgtccgattcgggcccataatatgtcgagaggctcgaaattgacaccggagctcttgaaaattcaatggtcatactctctcacgttgtcgattca

SEQ ID NO: 224561 - DNA, 351 bp, Glycine max
aaagaataggttgccctagaatcaaaaggttgggtcaaaagagtattctctatgacatatatcttgatctgagtcatcgaactatagcgtattgcatctctaagaacaataaatgacaaacaactcttctatttatgcaattaaggcaaaacaccatactacaagtgatgtatctccatgtggagcttgtaggtcttgaatcttctttatcaatggagtcctttacttcttgaagaccctggcagtgaaatggaaaaggaagaaagatgattggagatgccccatcatggagaagatgagtcaagaagaacttcaccaccatattaagccatggataagagcttgaaggta

SEQ ID NO: 224562 - DNA, 472 bp, Glycine max
gaccttaagcaccgcggctgcaagctgagatggcatgtgaatgtgagtcatatttaagagaataatttgagacaaaatgaacaagtgctgttacgttgtttgtcttatcggacgaataatactagagcaaatttagtgaatcttagctctgctaagttagtgagtttcatttgattcgagcttattgtgtaaacactctttgagtgattaagaatatattttatatcaaacatatattgtttgtgaaagccaggagtgacttattgacaatgaatacttggatcttaatctcaggggagattaagtgcagtgccaggaggcatagagagtactcgttgtagccctaaatgacatagagaatactcgattataataaaaaaatatgattagagaaatccttcatggtttgaatgagaattggatgcatcccaatatctgggtgaactagataaaacctttgattttattactg

SEQ ID NO: 224563 - DNA, 396 bp, Glycine max
  unsure (1)..(396): unsure at all n locations
agcttagaacaatatagcttggccttcgttatattgncncagggcttggcgaccacgatcaacaaagtactttcgacacctactatcatttgacttgaccaacgctgttattggaatgctgcgacaatctttcaacaccctattcacacattctgaaaggttgtttgtcatgtgaccatattttcctccagatgtatcgtaagccgtgttccatttttcctctgaaatgtgatcaatccatgtcgctatggctggactcaattgacgaaattatctaatgtttgatcaaacacatgcttgctaggcgtgtacgcttgcataaatttgttaccatcaacagttgatcgtagatatgacactcaaattaacattatgtataaaatataccatacccaa

SEQ ID NO: 224564 - DNA, 473 bp, Glycine max
  unsure (1)..(473): unsure at all n locations
tcctcagagtcacctgcngcatgcaagctncaatatatgcttgagtctctactttttctctctacactcctcgtacttggaaccttcaacctttgcattattttctctttcttcactatgagggaaggcaacttctttgtgtgggtgcttttggatctttgtgagtgctttcgattctggtttgacctaagtaggtggaaggttataggtgaattcttcttataattattctttaatcttttgtagggaatggagtgtttaataagacagtgggtgagagaggttaattaataatggggaagttataacttcctcctttatctaattgattcacgtaatcttctacgtttggcaccgtgtaataagatcgataaagagggatttgaatgatcaatgattgaggtccatcttatctttataaacaaacttgaatattttcatccgcaacaaacactcctaaaatatattattta

SEQ ID NO: 224565 - DNA, 423 bp, Glycine max
  unsure (1)..(423): unsure at all n locations
ngcttattatatcagatgccttggatcttattctngggtacgaattttccactaagggtttgttattggaggccatgacacatccatctcagcaagagctggaaccgggaatttgttattgttaccaggtatctatttggaaaattgtcatgagattttttcttttccaccctttctccctccccattaattttcaacatgtgtttttagccttccgttaaaccacaaaaaaaaattgtttttactgtcaaggaaattaagctatctatttgtccacatggttctgatattaaggaaaataaggtgataactgactagttgtaccaaagattaataacaacattaatgtgatatgtcctataagaccttcagaatttttactaattggttctcttctttgtcgccccatcatattgtggcaga

SEQ ID NO: 224566 - DNA, 404 bp, Glycine max
  unsure (1)..(404): unsure at all n locations
agcttcagaataaaaactttctatcgattatcgaagaatgaacgaagaacaaaagtaggaatcaatcacagaagcaattcagaagtgcctcgacctcgtttnttcttcttctttctccttcttctcacttatttcactaaaatgctcttaatgtaagaagctgaaccctttacctcagcccccttatgcctatttataggaaatgaggggtggaggttgtttatcagcttgcccaggcgagctggttgcttcctccaaaagtaaccttgctctcccaagcgagctggttacttcagccctaagctttctggcacgtcttggcgagccaagggcctaataaagtcacaaaatgaccattttgtcctccctcttttgggtattttccatattcttttctgaaacgt

SEQ ID NO: 224567 - DNA, 451 bp, Glycine max
  unsure (1)..(451): unsure at all n locations
agctcacgaagtgggcctttaatggctttaatatgtttgtatatccacacctaataatgacctttatngtaaatgttaaaaaaaaacataaaaaatatatgtgtaatttcacaatgttgtagggttagttagtgtaacttactttaaaaaattatcaatggaaacaaagggcttgtaatntttttatcaaataatgaaaaaaatatcgtgctactaacaatatgaattcttttataatatcatccaattacaaacattcatataaggtaactttatctactttcgcaataaccatcttaaaggttatacaaaggattaattctgatatgttaaaccacaagttaaattatcacttaaagaagactcaagaactcctaattattttgattagatgcaaataaatacatgtggcaaaaaaacatctaatgcatgatctaatcatagcctacta

SEQ ID NO: 224568 - DNA, 356 bp, Glycine max
agctttgcttgtaatagatagctagagtttcttttttgggtagcaactattgaaactcttgatgtaatactcttactatctatttaatgttattttctagtgttccttgcttctatctatgcttaatttacatgcttgtggcttgatcaccatattgtatgtgcagctagactttttagtattggaaaatgctttaaaaccttagaacttgatagagcaagctaaaaatctgtatgtataggaatggagtgcagtgatctattatatttaacactatatgcttagtgcaactctgttagagcgagtttgttgaggaatcacggacacaagctaagagagttaggctcattcttgtg

SEQ ID NO: 224569 - DNA, 262 bp, Glycine max
atcaacagcttctcatactcagagtgggcgcccatcttacggcagtacattttgagatggaatttgggacaactcgtccccttatacttgtcgaagcacggcacttcgaacttcggaggaataacaacatcgggtactaagcaaacgaccgacatgtctgcaaatggatagtccccaaatccttccacggtcctcaatcttgcctcaaggagatcgagcctcctcctttcttcagtggccgggggcggccctaacatggaca

SEQ ID NO: 224570 - DNA, 429 bp, Glycine max
caagctgcttgtggggcgtctatgtttgctggatcttcgagcctcaatgagggcctttaatggtgatattccaccacggagatgcaccggaagacaaaagagaacaggtgagaggaggcgccatccactagggaataagccatggaagaaggagcttcaccaccaagatgagccttggataagaagcttggaaggatgctccaatggaggaaaagaaagagagaggggggagcaccatattgaaggaataaataaggccaagaagtggaactctgaagtatgtctcacaagactctcattcatcaaagtaacatcaagtgttacacatgcttcatatatagactatgatcttacttgagaagctttcttgagaaaacttccttgagatacttctttgagacaacttccttgataagcttgagcttagct

SEQ ID NO: 224571 - DNA, 457 bp, Glycine max
  unsure (1)..(457): unsure at all n locations
agctntacttacaacaaacaaacttctcttaactctnganggngnntcaacaattaaatccttgtttgatgaatgtgggcgtcgggggcatttaataacatataatgcacatgtattcctcatgcagaaagtccactcttcaaagcttgagtattgagtactgcaaaaggtgatcacttcctttgtgtcagagtaggtcctcttacaacaaaactcttcttttgatgacgatttaggaattgtagaccttgcctttatttattcttcataggattcgacaaatcctgagagaatgtttctgcaaaagaaatctcatacacaaagtattaaattaagtcttaaatgttatcctaaatgtcgtatcaaatcatgactatatctacctatcatctgaaacatcagacacaaatctctcaacgcatgttctaataaaacatcagatatgaaacatcagaca

SEQ ID NO: 224572 - DNA, 457 bp, Glycine max
  unsure (1)..(457): unsure at all n locations
agctngaagaggatgctggaatggtggattatatatagagaacgggggagcactaaatcgaaggaataaaacacggaaagaagtgcaactttgaagcgtatctcataagactctcattctgcaaaggtagaaaaagtgctacacatgcctctaattatagacttggtagcttcctcgagaagacttctcgagaaaacctccttgagaagcttctatgagaaagcttccttcataagctagagcttagctacacacacccccctcataactaagctcaccctgctgagaagcctccctaagaagactcctaaagaagccagagcttagctacaccatacgtcgctaacagctaagctcaccctcttgagaagagaagccagagctcagctacacacccgtcaaatagcaagctcacaccgtgacacaaacatgacaaacaaaacaaaagccttctaca

SEQ ID NO: 224573 - DNA, 388 bp, Glycine max
agcttggatcccaacgctctgttttagttctcccaaaacctagaggaaaatctaggatctctatcagatactatgctagatggcacaccatgtaacctgacaacctcacttatatacaaggtggtcaacttttccaaggaaaatctgatattaatggcaatgaagtgagcaaacttagtcaatctatcaacaataacccagatagaatctaaacctctaggggttctaggtagtcctaccacacaatccatggaaatactgtcccacttccactggggtatctctaagggttgtaacttccctgaaagtctctgatgttctatcttagccttctgacagactaggcatgcatacacaaactcactaacctctctcttcatgtttgcca

SEQ ID NO: 224574 - DNA, 344 bp, Glycine max
gttaaaactatatgcaccccccccgcccagtccacaaaagttctcaaaacactataattatcgtgagagaacagactaaatgttgagcttgtatatccatctataagatgctcaaagagttagtcattgtgcaaacacaaacaacaaatctttatgatttatatagaattagtcgtgactatagaataaaaaatattggattacatcacacttatggtagaagttgatttataagagatagaagtagtcataccaaaaatacgcatactctgttaagctattgagacttggtgataaattcatgtgcccggagacatcgctttttttagaaatctattatctac

SEQ ID NO: 224575 - DNA, 478 bp, Glycine max
  unsure (1)..(478): unsure at all n locations
ggacctctaagcacctgagctgcaactattggtattacatgtnttggtcttaaatatnngnngagccttcctagaaatagggaattagccatttggaataacaaccttacatgtttgatgaaatgaatcctcaaagctaaaagttaaaaatacatgacaacccaaaacatggaatagtaggtatatgcttactaattaaaagagaataaagatgaaattggataaacatattgtaaactttgtatttcaagtaatatggaccataaagttaacacttgaagataaatgtacaaccatttgggggaaaaagtctttgagttgttcaaataccattgaggatatgtaattaacaaggggaatgaaagaaacataagtactcatttctactcaactgtgtttaatcagcatgttttgaggaatacaaactcactgacagatctgttagcactcaatatgtgatggatcttagcatatctac

SEQ ID NO: 224576 - DNA, 262 bp, Glycine max
  unsure (1)..(262): unsure at all n locations
cagtccctatggtcaggaaagagtgtgatgtgctgaaaaatgttcacttgacctcggtcgaaacattatagcgggagtcacaaagggcccaataggaataatggaacaggaacaagttccgatgggctttatggngcatcaataacgagctcaagcttataagggccgagagggatgagtcacggattggaagcatggtgttagaagatatagtgaatgctcttcaaagggcgaagagaggtttgacggaacagctgtacat

SEQ ID NO: 224577 - DNA, 406 bp, Glycine max
cttggaaatcggaacctgatgagactagatgcatctatcagcaggatgtaacctctaatgagagcagaatgacaatgctaagcacagagaagaaggataacaacttacgttgtgagagtaccaaattgggggtggagaatcctgagatttcaaatcatggcaatggagatgctattgattgcactgatcaagcacaaatttgcagataatgaagagctagttgttggatcaagtggtctcagaataactaagagggggggttgaattaattattcataaaactttaccaattagaaattactcttttaaggcttttacttttgatggtaagagaatatggagtagaagagaaacttaacagaaagtaacagctgaaattaaatgcacacgggaaagtaaaagagta

SEQ ID NO: 224578 - DNA, 432 bp, Glycine max
  unsure (1)..(432): unsure at all n locations
agcttcacactngataatggagacacattatcatttctgggcaatgacactcatggtgctccgaacaaaggtggaatatggaggatttccttgagggtccgcgcttatgcaatcatgaaacccaactccaaactctaaagtggaggacacatgaacaaccttaagcaataacattcatgtggctccggaacacgatgagaatggaggattgccttgagggtcctcttttaggcaatcatggaacacagctccaagctcaaaaatggaggacacatgaacagccctaagcaataacattcatgtggctccggacaaggacgagaatggaggatcgccttgagggtcctctcttacgcaantatggaacacagctccaagctcaaaaatggatgacacatgaacatgccaaacaatacatntatgtggctccga

SEQ ID NO: 224579 - DNA, 376 bp, Glycine max
agcttgagtgagccacctgtttgtgagtctgttccaagacaagagtgaatccactccttggagtgagaaagcgagaaagttttagagcctctttgagagagaagataaatagcttgggaagactctatcctcaagttggagtgagccaccatagagtgagtcaattttgtaaacacatccttgtaaccctactattcttttggttagcggaagaatctccatattggagaatcataatcgtgtgtcttattactacctttaattacttagtgcctatcttaaacttcacgaagcgggaaaatctgagttttcccaacaaatactaagttaagaaatcaagagcttccactgttataaatttacaactaaatacttt

SEQ ID NO: 224580 - DNA, 338 bp, Glycine max
tattccactaaactacactaattattttgagactttgaataattatgtaacactttctattttttatactaatatcatcaagctttatttatgtttagttattgaatatggaaacttggtcgcgaggatacacctcttcgttatttcgtacttattttgcttatataaaagtactactagtagaacataatggtggtaattaaggacgaaagagggagaactttcattctcattattctataataataaaataatgaaagagatgtactataactcaagactcatgaggcgatttgtcacccgatgagatggattatatattcatcattttacattta

SEQ ID NO: 224581 - DNA, 407 bp, Glycine max
agcttattaccacacgagataatctttttaatataaaacttacacccatcgaccacctacttcatttaaccacgttgagcaaaaatgtggaaaaactatatatttgactcttatatacttcttgaaaacataatcagtattgacatatatatgtaaactggagcgggtgtatgcatgtgaaacacataaaatagatttcacgtatagacaaacgtactatacaattctatctgtagattatctcactaacgccgttcattcacgtgataccgttattccccatatagacagaaatttgaagagtcataaagaataactaactggtgcaaccgtacgtcaaggctatatacaaccccccacgtgagtcagaattcgcgaaagaacatattctaaactcaaggaggtga

SEQ ID NO: 224582 - DNA, 308 bp, Glycine max
  unsure (1)..(308): unsure at all n locations
agctntgaccattggaattgctctatagtcttcccttggncaatttcgaacatctcgatatcttatgcgcctgaatcggacatcctagttaaaagttatgactcattgaatttctcgactgcttccgtcggtgaatttccagtctctcgatatattatgcgcctgaatctgacctccgggtgaaaagcgatgaccatttgaatttctcgataactaccgttgttcaatctcgagcgtgtcataatattatgcgcctgattcggacttccaagtgaatagttatgatcatttgaattgctccagagctc

SEQ ID NO: 224583 - DNA, 398 bp, Glycine max
agcttataagaagggccataggtagtttattgatttgtacagaaatttaaacaggtgcatataatttcttgcaaattatgttcaatattatagttaatattctaaggaaaaataaagcttttatacagtctatgcaattatatttcggccaaaaatgcaattctagttagttagatgatacttttttggggctccatccagtctagacaaatatttaaaaatcgtattaagatagtacttgactttcctttatattttaaaataattttttatggctgaaatataattcttgttcaactatttttatcaatcctcaatttaggtattcctagtttagaaatgagactcttaatcctcttattatacaaaattagtagctttgggcctccatccatatc

SEQ ID NO: 224584 - DNA, 387 bp, Glycine max
agcttctttgaaagagttctaatgaagttagagcttagctacacacacctctctaatagctaagctcacctccttgagatgagaagctagaacttagctacacaccccctataatagctaagctcacccccatgacaaaatacatgaaaatacaaaaaaagtccctactacaaagactactcataatgcctcgaaatacaagactaaaaccctatactactagaatggccaaaatacaaggcctaaacgaaggaaaaaacctattctaatatttataaagataagcgggctcatacttagcccatgggctcaaaatctaccctaaggctcatgagaaccctagggccttccctaggatctctggaccaatctactgggagtcttcta

SEQ ID NO: 224585 - DNA, 447 bp, Glycine max
  unsure (1)..(447): unsure at all n locations
agcttatcaacaacaatctatttgtgagtttttggagtggccaggccagagaattatgatcctagcatgaaaggcatgtgagtgttgaaccttcttattatgcgaaaagaagcgtatcttgatccgatctcctctctataagcaaatagcttcattaatagtttctagtttggaaaaatttagactcgctttaggttcctccaacagaatgtcttcaggttcctctaaattactttttgaatgataaaaggtgcccatatcttttcaaatatgatattaaattaaaatgttggtagntaggaattgatccttctaacacatacaaaactaccttttgtattccaaatgctcaatattaatggagaagcatgccttttggcttgaanggggcaccttctctatttcaaaagctattgccagatttttgagctatctggatagattctc

SEQ ID NO: 224586 - DNA, 365 bp, Glycine max
accgcggctgcagctggagaggatgctttttggaggagattaagagtgatattttaagggggggagcaccaaattgaaagaagaaaagggagagaactgaactttgagttggtctacaagactctcattcataaagttacaacaagtgttcacatgcttctattctagactagtaacttccttgagaagctttctaagaaaacttcctgagaagctctttggaaaacttccttgagaagcagagcttactcacacaccctttaaactaagctcacctcttgagagagaactagagcttactcacacccctatatgctagctaccccttgaaaatacgtgaaaacaaaaaaatctttctcaaagac

SEQ ID NO: 224587 - DNA, 429 bp, Glycine max
ttacatcaaatgccactctactccagatgtttgaaggatatgttaacaatgtatcataagtatattcacccagaaaacattgttgtggaaggaaatcgtagtgatgtgattcaaaagatccttccacccaagcataaagaccctgggagtgtaactattccttgttcaattggagaagtcactgtgggaaagaccaatccaacaagggcctaacatctttcagaagactactaagctataggagactttgactcatgttatgcaagtaacaatgtcaaatcataaaagaactgagtcaacacttaagaacattgatgtccatgtgggacaactatccaagcagatatctgacaaggtctccaattagtttcgtgggacatacagagaaagaatccaatgaggaatgcagaactgtgatgataaaagtaa

SEQ ID NO: 224588 - DNA, 323 bp, Glycine max
  unsure (1)..(323): unsure at all n locations
cccgcagctgcaacttcgngtggaggaggggtcctttttttttttggattttttacccccagactgttaccaagcaaggccaggcggactttcctcactcccgagaagcttaggcgttcccattattgcacatatgatcgattgaagcccttacattatgaaccgctgatgcactcgtattaggttcgacttctacaagataaacaatttgtctcttaagaaaagagatttgattcaacctctgtctttgctaaatttttgaggggtccaactttgaaacttgctttgtatgcatcctgtaatctattgcgcctactattgca

SEQ ID NO: 224589 - DNA, 417 bp, Glycine max
  unsure (1)..(417): unsure at all n locations
gacccaagcaccgcagctgcagcttctaattaaagccgagcaatgaatttgtttttaangccggancctattcatccctgtgcctttgtacatcttcaagttgtttggacttaatctctagtgcttgtgacataatttatattgccttttagttttgaatcaatttggttcaagagctgtggcagttttgattcattctgatttgtaataagcctgagcattgttttactttttccctcttaagagttgcttctttcttgcttatacaagaggcttatacttcttcctttaacaaaatgtgtgcatcccaccttctcagtttgagtccatatgaaaatatgaaaactggtttacattctacttgtataagggaaagtaggtgagtaaaacctaattgattttactatactacacaca

SEQ ID NO: 224590 - DNA, 371 bp, Glycine max
gacccaaagacgacacgcagcctgcaagcccgccgaggaagcaggagtatactttataagaccccccccactatcgcttctgccatgctcaaaaacagagtggaatggataaatggacaaaactcactaatttcaagtgcggcaagctatgccattcacctctttcctgagaaagcaaccttaaaatataagtcaaatatttggccttcctttataaccaggacctctgaaaaagattcctacatgacacaaatttatgaagaaccaacaataaaattcataaatttatcgctggctaacaaaatacatccaagaccaacaactaacattattattggcatcacaaaaccaaatgcaaataacttttttat

SEQ ID NO: 224591 - DNA, 196 bp, Glycine max
tggaacagtggaatgattataaatcacagaatatggacaacaaatgggcttctattgctgaatctcagttggagagataaaagagaaactcttaacaggatacataactgttgggcctgatgggatttctattgaattctcgaaaattcgtgcggaacatgttatataatgtggctcactgagccatttaatggga

SEQ ID NO: 224592 - DNA, 365 bp, Glycine max
  unsure (1)..(365): unsure at all n locations
gggacccaagacgacctgcagctgcaactaaaaggaattgtgtttgtttatctgaaccggaaggancgatatgctattttttgtttgtgagatacaattattctctttgaacaaggatggtgatgttgatttgaatgcttcaccccaagcacttgataagctcctgggttatgaacttgctttcaagataaaggtgcaacccaagttcaggaattttgctgctttgaagtgttcagctgactcgagcttaataaatggtgagatggatatgctagctgatgctgaggtaatgttcaatgcaagttatttgatattacctattggtgaaagtatgtattctattcatatttattgggtttgcatgg

SEQ ID NO: 224593 - DNA, 258 bp, Glycine max
cccttttgcatatctgaaaacccggcagcaaagagaaggtcaagcccatagccatcaaaggccgaagagaggatgatgaactaacggacgcccatatggccaccgacgaagccctggaacgaaaaacccacaaagcccgataggaagaacacgaccaaagcacagtttgacgggccttatatggcagcaatagtgagcccaagctccgaagaggtgaaaggaaacatcacgggtcaaaagcatgagcttgaaagacga

SEQ ID NO: 224594 - DNA, 399 bp, Glycine max
agcttctactaaccaagttccacctaatttttcagccgataaattttttattgaggattaaattgtaaaaataagagtaaaatacttcaatgtaagaagtttcgaggactaaaatgtaaaagtgcgtccatgcaccctaacttacatggtacattaattgctgcacatgttctttcagttgcattacagtagaaggcttaaatgcaggtacagtatacaagcaataagaaaagaaaaagttgaaatcaatatctccaatagggaaaatataatactttgagaaaactaaattcattggattcattaaactaagaaaatagatgggaatagtaagtaccactcaccgatataaattacgaatcatgcatatagcagaaaaaatcaaccataatggacact

SEQ ID NO: 224595 - DNA, 296 bp, Glycine max
  unsure (1)..(296): unsure at all n locations
atttagnggattttcaagggttgagaagtgaaaatgagaattgggtaattttggggtaaactctcatctcaaacaagtctatagtattaatttaaacttgctcaaactgatttttaagcgaaaactccaccgattcaagatttgacccctcaacacccaatttatcctagaaatgactcttgctttcacatttnatcactcattttctcatttgctctgcccaagctttcctacaagtcctaattgacattttaaactaggatcaacctactttatactccaatttacactaaccc

SEQ ID NO: 224596 - DNA, 394 bp, Glycine max
  unsure (1)..(394): unsure at all n locations
agctcggcnnnggntcagacagggcgaactagtttttgttacttgtcngcaccgacccgagcaagattggatgaggggaactgtgattttctaaatctgcacttatgcagaattttgctgttcaaataggtgcagcaggattttggctttgtgcacaaaatagcttgtgtgtggttggttgcggaaagagtactacagaatgagttctggatgtttgctagtacatcccaacgatcacaatgtaggcttatgcactatagactcccagtaaaaatttggagtcgatccaacggttaacgaattggatcgaacgaattgttactgtggtttatataagtaaaaagctgtgattttggttgatgtgttgagcagagttttctgccttgctctgttt

SEQ ID NO: 224597 - DNA, 317 bp, Glycine max
  unsure (1)..(317): unsure at all n locations
attctataaatagaccncctatctttaatggagagggctaccactactggaaaacccgcatgcaaatctttatagaggcaatagatctaaatatttgggaagccatagaacaaggaccttatgttccctctatagtggccggaagttcaacaatagaaaaacctataacatattggactgaggaagatagaagattagtacaatataatttaaaggccaaaaatattattacatctgccctatgaatagatgaatactctatgggttcaaattctaaaagtgctaaggatatgtgggatacactacaantaacacat

SEQ ID NO: 224598 - DNA, 184 bp, Glycine max
caaaaaccacccaaggacacaggggcgaagagacctttcataaaaccccccaggcacagccaaacaaaggccagaccgccggatagagacccaccccccagcaaaaacacgcgcacgaacactcacagcccaagggcaaaacagcaggcagcccctgaaacacacaccaagaacaaccagagag

SEQ ID NO: 224599 - DNA, 362 bp, Glycine max
  unsure (1)..(362): unsure at all n locations
agcttgccacccaactcccccagcgagcttgtgtgtttattgtgcctantncgcatnngcaccccatgtatactaaatacaccccttgccttttttgatgattctttttctgtaacattatggaaacttacgaattacgtaacgatacttgttttctttccgtaatgttacgaaaccttatggatcacgtaatcatccccttttttggcttccaagatgttacggaactttacggattgcgcactaacacttccttttgacttctggcatgtcacggaacttcacggtgtgtgcaacaatgcttttttttgatttcggcacgttacgaaactgcactaattgcctaacgatggggtgcaatt

SEQ ID NO: 224600 - DNA, 380 bp, Glycine max
  unsure (1)..(380): unsure at all n locations
cagctgagcaactgatgcttggtaacttggtaccttctggccttgtatcanaaatctatacctgttgcaagggtgtgtggatagtgctcctctgctgaccaccatacagacctttgcccttccatgcagcaacctggagcaatcgagcagcctgaagcttatgctgcaaatatttacaatatacctcctcaacctgagcagcaaaatcaaccacagcagaacaattatgacctctccagcaacagatacaaccctggatggaggaatcaccctaacctcagatggtccaaccctcagcaacaacaacaacagactgctcctttcttccaaaatgctgcttggccaagcagaccatacattccttcactaaatcaacaata

SEQ ID NO: 224601 - DNA, 402 bp, Glycine max
  unsure (1)..(402): unsure at all n locations
agcttaaagattactaagcgnttgtttgagttggtgtgtnagaaaaccaaccaaatttttagaagagattcataatagattaagattttttatatattttttctttattgagcctttatataacatatctatatatttaactttatacaggaatcaatggacatcttacccatatcttcaaccaatttagtaacccggggttctttctctttttctcttccttaaaagaatcatcagctgtttcagcatttccctctaaattaacatgcagatcagggttttcgtcatctgagattaaatccctccttttgtggggaaggtatgccaactgtaaacaaaattggtaattagaaaaatgcatatacaaggaatgaattaagcagagtattgtcatcttgagac

SEQ ID NO: 224602 - DNA, 227 bp, Glycine max
tagactttctcctcttgtccatgaactacaaatacttcaagctgctctacaaaaatttcttcttcccagtgcccattcaaaaaggctgatttaacatccatgtgatgtataatccaacctttttgtgcagcaagagctaacaacaaccttatggtatccaacctggcaaccggagaaaaaatttctgagaagtctaccccgaacatctgcgcatatcctttcacaac

SEQ ID NO: 224603 - DNA, 413 bp, Glycine max
  unsure (1)..(413): unsure at all n locations
taagacgacctgcagcatgcaacttctaacttatacaagaatttttctttattcctttgntagacaaggcgctcatatatctaagagggggggttgaattaataaatcacaaactattccctaattaaaaatgttattttgattttaacccaaaacccaagattcctttcaaaattaattcctatattattattgaaattaaacttactgaatagaagcaataagcaataataaataaaagaatttaagggatgagaaagtgcaaactcatttttatacttgttcggccacacccttgagcctacgtacagtccccaagcaacccgtgtgagagttccactaacttgcaaaaaacctttcaaggttttaaccaacacggacaacccttcctttggttcatattgcttacaaca

SEQ ID NO: 224604 - DNA, 307 bp, Glycine max
  unsure (1)..(307): unsure at all n locations
ntgcggatttggtcttcgccagtgaaaggatcgatgtttgtcctataagaggcgaatttgatcatcctactatgacgactgaaaaactggggcaaatgaagagggtgagaaagagggagaaacccatgttgtgactgccattcctatacggccaagtttcccaccaacccaacaatgtcattactcagccaataacaaacctcctccttacccaccacccagttatccacaaaggccatccctaaatcaaccacaaagtctgtctaccgcacttncaatgacgaataccacctttagcacaaaccaa

SEQ ID NO: 224605 - DNA, 70 bp, Glycine max
accccaaaagaagacagccggggggggggtggtttttttcaaccccccgcggaaccaaccaaactctcaa

SEQ ID NO: 224606 - DNA, 403 bp, Glycine max
  unsure (1)..(403): unsure at all n locations
agcttagcanccaactcctaaggatcaggctttatgagttctaatttggaataagcatagagtgattccccatcttccacaataataggggtcttcaagaaagtattaagcgtatcctcatcaaagttaatcaaatgacctctcaccctcacctgcttaggtgatttgtcctcggggtcatagaggttggcgtaaaattccttcacaatggcaacatcaatgtttccatccccaaagtcagtcaactccttgtcacagtggtgtctctcaagttcctccgtgaagacatcaaactctgtataatagaccaccacgttcctttctcgcagaagctttctaagcacaacaattgttgtatatctttcccaagcctctcgggaagtaaatcttgatctgccaaatc

SEQ ID NO: 224607 - DNA, 339 bp, Glycine max
  unsure (1)..(339): unsure at all n locations
gcttcttattctcagctgatgaagcgaattcgggctacttcttctctcctctaatgaaaataacatcatttctggcactaaattgctgggagtttgaagccatcttctcaattaaatttctggcttcagcaagggtcatgtcttcaatggctccaccactggcagcatcaatcatacatagntttgtaagatctctcctagtattcatataagctctttccactgagttgcctaatgcatganatatcctttctgatggccgtggtcctggaagcatggaaattttttctaagactactctcttgangtcatcccagctcgtgatgaaccgtggagcat

SEQ ID NO: 224608 - DNA, 401 bp, Glycine max
  unsure (1)..(401): unsure at all n locations
agcttatgnaaattncaataataaccaagatgctttttttttaggaatacgctgaaaaagctggagactatgaaaaggtgttaccgggacatgagtcacaccattagtttgtctccttatataactaatataaaaggtttgattgattaacaataagggcttacacttatttaaaatgttacctagctcagaaacatctttaacaatgccatttattttattcatgacaaccttagagtcaaatttaatttgcaataagaactataaggttggttggtaagaagtaagagaagaagaaaaaagattctgcttcttgtagccccattgaacttgtagcctgaataatgatagagcattcttactctattatctttgcagttttttatagtaatttgaacctt

SEQ ID NO: 224609 - DNA, 393 bp, Glycine max
acttacatactcctatgctgggacttgttattttgtcttattctacgctctgccacaccattctgacacggacaaccagacttattgtattgggcaacaatcccacgtccttgaagaatattcgcaattgaacctggtgcttgtacatcctctgtgtatctaccatagataccctccacctctttctgatctcacgatcctaatctgttctccacatggattctcaaccttgagccttaaaaacgttaacaggcgtctaaagcttcttttttagaactgaagttagtcgagatacatattctcgcgaatattcatgtattaaggttattaaaaattttcgactatatgctttcttgtctggccaacctatgtctgatcgatgaattctatgta

SEQ ID NO: 224610 - DNA, 312 bp, Glycine max
tcttcaaactcttacagagcatcccaaattgcttaaaactttacaagtcataaaatgcacatcgcttcataatctaccagaactttccccgtcgctcgaaattcttaatgcaagagactgcgaatcattgatgactgtattgtttccttcaaccgcggttgaacaattaatggaaaatatgaaacaggttatgttctggaattgcctgaacttggatgaacattctctagtggctattgggttgaatgcacaaatcaacatgatgaaattctgcaaccaccacctatctacaccatatcgggagcatgttga

SEQ ID NO: 224611 - DNA, 396 bp, Glycine max
  unsure (1)..(396): unsure at all n locations
agcttnaagggtcatgccttttgttattattgatatctcacaaacgggctctgatgggtgatttcttctacaagaaaccatctagatggaagcctcatcgctttcatatgactcctggtagcctacttaccatctcttctaacttcaaagactctggagatgagttcttgaggaagtttgatgaagaagctgccaaacaaaagggaagaaaaatgtaaaagccgaatatgtatcaaagtctaaagaaagaaaaatctgaggggcagctgagttattatgactgaaggatgcaaaatccacgggggagctcctatagagaagttgattaatttcgtccttttggcttttaacactccaaacacatatctgtgatgtgaaatattctacctgaataaa

SEQ ID NO: 224612 - DNA, 250 bp, Glycine max
ctcataagaattttttgtcatccgcattttgggtagtgtctgtcttttatagactttagcgaaggattcattataggattagcgttgagtccttgaaattattgatgtttcacactgagagataatgctgtgtgactctgatttcagaggaaaagaacataatatagaccgttgcatgtgctccttgtactcaacgaaagcgagccttgagtaatactattttgtgtagaccctataatctcttctatat

SEQ ID NO: 224613 - DNA, 384 bp, Glycine max
  unsure (1)..(384): unsure at all n locations
agctctananagcaagagaagtgtttcttattttcttcattccacccnccgcaaaccgaacaggactctctttacggcttgaggaacaactaactttcancctctttcagaaatggtatctttccatgctgaaatgccggcggttgggccactgtacaccaagcgtggcgttgatgccaaagcagaatttcgaaactgaacctactaaacatatgctaggctaggctacatagttaggtctcattcaaacgtgtacatataactacaataaaaaactgttgcttgatcaaaaacaaaaggatctgtttggacgttagccatgatgggagaaatcttttctaccggagagtgctcgcacatttgcatgtcgatcactaaaagcag

SEQ ID NO: 224614 - DNA, 247 bp, Glycine max
  unsure (1)..(247): unsure at all n locations
accaacnttaagaagaaaaaagatggagattttttatgctctcccttggaaagtaatcacaaaaaattctcttatagcacatttgtaacctaacggggtagttatttcccaaattacttccttttgttcaatgttacattggaaggttggaataagcttctattcagagggcaacgagaagtacatgaataggaatattaatacgtactaaagtttaattgaacataaataatttctcctgtatatg

SEQ ID NO: 224615 - DNA, 406 bp, Glycine max
  unsure (1)..(406): unsure at all n locations
agcttcattgactccgccaccccttctactctccctcttctcccttaccctcaagncctgcactgccctcaacctccccttcctccccacctacctacacgcccacgccgccaagcctctacgacactcgcctctccctccctttcgcccaccgactcttcctccaaaccccattgtcgtaccgaaacatcatcatttggaacaccatcatctcctttcacgcacacaacaacaacctccaacaagcccttcaactcttctactcgctcgacactaaccctaccgattcgaccttcaaccctgagatgatgatgaaaactttgagaaaatgttggcgatgatgaagaaaactctgatatgaaagaagaaaaggaaatcgaaagtgaagaaaacactgggatgaaag

SEQ ID NO: 224616 - DNA, 346 bp, Glycine max
  unsure (1)..(346): unsure at all n locations
tctcagatatggctctgacaactaaatatgagattgagtgatcaccacccaaaattaagggacgtaatggatcctgaaaaaacaatatatatatatatatatatatatatatatatatatatatatgaggagaatcgagttatatatatagtttcaaacacaacaaaatagaaaactatgataattcatataaagatcgagaaatgttagaatacactcttttcaatatacattttcttattgggtactttctttntaaatcataaaattntatgggtctaatggcttatttatgaatctttggcatgattttgtattttcaatggaatttaaccaataaaatata

SEQ ID NO: 224617 - DNA, 374 bp, Glycine max
  unsure (1)..(374): unsure at all n locations
agctacaactacgtttttagtgtttgtngtcttttattcgncctatagcaagagaagggtgtcaaagtataatgagagtaaagacattgagagttcagaacacaaggaggatgaggaaatggctcataaggaggatttgatgatctttcagggtggagaggaccttacaatatgtcacattttggatgctctgggtgaagtcaattgaaaatccaactatggaacacgtccaagtcgttaagggcaaagagaagcaacaaggtgagcctgctcaggtttctgaggccaatgtgcactgcaaggggtgaagaattggataagatgattcactttttttttttttgacatatcaaatataccatccaacaaagagt

SEQ ID NO: 224618 - DNA, 326 bp, Glycine max
gacactatagaaactcagcttgaaaataaatctgagtctaaaagtcccattttctctccccctttggcagcatcaaaaagccaaagtacgttgtaacatataatcatacacaaatggataaacatacaagaaatgtattcatacaagaaaaaggagaaacttattaaaaatcaaacaagataataaattatccacaaatcataataaaatcatatgtatcaaataagtcataagacatcataacataaaacaaatcatttgtctaagtcactgtcataccctaatttcgtccggggacctttgcttgatgacatgcgacctttctt

SEQ ID NO: 224619 - DNA, 404 bp, Glycine max
agcttataatattctttaatacgacattgttttttattttttgattgtctaaatttaccatgcatgcatctattaatgtctttttgtttattttaaacattgcttcctttcgggcgctgatgtcattgatgcaagtgtttgaaggagctaaccactatgaaatttgattctttgggatccagtgatgttgatgctttgacatttacttcactatatctccacataatacagcttcttgtaaatgtatgggacgacttgttgcctgcaaaaaggttgtatgctcacggaatgggacaattggaattcacactgggaaagcttgattggagggttaacaaattgataagtaggtctatacgctacattgtacaggaactgaatgtctcagagctaatgttattgac

SEQ ID NO: 224620 - DNA, 341 bp, Glycine max
ctttctgggctcgccgaatcatgactggtggaccatcttgtcttgtctggttccaatccgctagtgatggtggagagattattgtgaggtgtggtgaatatcccaacgtacctcttgtgggtatgcgtggcgggattatctacaacccactcctcgctcgacagcattcgggtgccctataaagacaaaaccaaacaaccttgccttgactaatgaattctatcttaaccatggtgatcactcgaacaaaagggaaagaatcgcacaagcttggagcgctatccgcagactcagcagaagtcagttgggagagatatcatacttgtgcacgaatcttatac

SEQ ID NO: 224621 - DNA, 407 bp, Glycine max
agcttcatgtcttggactatactttcaaaagtaattgttaagtgtgttctcataactcaacctacagaaacaagagtttgtattaaaagaataaatgtcaggtacttactcagatgtaagtctctttgcgaggaagaccttcaaggcagcaccaaaatcaagccttgacagtgcctctatttcaggatattctgatgcttgagttcccacatctgtacaaacacctccaatgataagaaggccaacaagtggcataggaagtacacgtgaagcccataaaagcttggatctcaacgggtcaagatcttccggaattgaagctggctgcaatactgcctttgtagacttaagagtcatatctcttgcaaaagaaaagaagctttcacctttttcaagctgaaattaaa

SEQ ID NO: 224622 - DNA, 331 bp, Glycine max
tttctcgattactctgagcagaatttacattctagactacttacgatccaaaacgggacaaaattgaagcgataaaaataatgtcacgcacacaaacatatataatattacataaagctgtacatttatggaatattatgggatgcatagatcccccctgatgaattatgtttccctctacgtggatgccacatcatagaatcacaagcctgcagtaacaacaaaaaggtctcgtgttgtagcccctaatagtaccacctactacatcacagctagccataatacctaagcctctacgactaatggtgcacaaaacaagcatagttctgac

SEQ ID NO: 224623 - DNA, 401 bp, Glycine max
  unsure (1)..(401): unsure at all n locations
agcttcancgagagatgtggctcattcagcttctttctcttcccacccgcggagctcaccaaagacgtcgccatgattgctccaagaggaggggaattccaatagctggggttagggttatggttagggttagggctagggttccagttttgggacttaacggaacccgctatctgacaaggggcaaggaggaaggagctggttttgggtttgtgagtgaaatcgaaatgtcactttgtttttgtatataggagcatcttcaattcttattcaacacgaaatggatcaattcgtcaatttttatataaaaaaaaaccttaaatataattttgctctttttattttatctgacccatatattcaatttttattttaaaattaacatatttaactttttattt

SEQ ID NO: 224624 - DNA, 362 bp, Glycine max
  unsure (1)..(362): unsure at all n locations
ttcactttatacaaagaatgatgatcattgatcaaattcagattcaatgattatcattctttccttacttaagtaacttgttaccagatgcaggtatggaacaattgtaaaaacacctaataaccaacctgtaaatgactagcaacattctctctagtcaaaccagggacattcatctcttcaacaattatctttggcacagcctctgaataataacttanggagaacattttaagtgacacatttatatatatctatatatatcttaccacaaaaactaaaccgaaagagaaaaccctgtctattgtgatcgagaaaaccattaacatttgaaaacatcgatgaggccaagtttttacaca

SEQ ID NO: 224625 - DNA, 412 bp, Glycine max
  unsure (1)..(412): unsure at all n locations
agctttntaaatgaaacttaaaactgttcatctatcccttacatgaggtatgngaagttccaccttgtccaaacattaaggcacactatgtgtttacactcaatttttgaaaactctatgcactctttaaacctaaccaacctatatggtgaagaccttacaaatccaacaacattcctaggggttgttatggaattgtgcgcatctcttaaacgatcattgaaaaccaaattaaatatatgagcacaacacctaacatggaaatattgaccatcgatcactaatcctcccataatcttcaatttcttcttcaaaaaatgccacaaccacatcattggatgatgcattgtcaactgtgattggtgacacatttttgagtccccatctcttcaatatttcttcagtatttttt

SEQ ID NO: 224626 - DNA, 398 bp, Glycine max
agcttttcataaagcttacggtaagatatgtttcctatccgcggtttatgtctccaccgaggccattgcctccctcgtccaatattatgaccagccgttgaggtgcttcacctttggggacttccagttatcacccacggtggaagagtttgaaaaaatcctggtatgccctctggagggaaggaaaccatacctattctcgggattctatccctctctagctagaaattctaagatagtccaaatctcgatgcaggaattagaccacagaaaccaagtcgaaaatggggtggttggggtaccaaggaaatgtttggaagcaaaaacaaaagtcttggcaggtaaaggcgaatgggccctgttcatggacatccttgcacttttgatcttcggagggg

SEQ ID NO: 224627 - DNA, 217 bp, Glycine max
tgctctaacagacaatatatggtctctgctctctcttccaagagctctctttcttccacactcactgtcgaacctccagcaacacttggaatctttctggtgcatctttcgctctcacaacactattgatgcatcaattctattctttgaatctaagattctatgttctgatgataaagcccatggcgatacgaactcgtcaggatcaaaaaactca

SEQ ID NO: 224628 - DNA, 324 bp, Glycine max
  unsure (1)..(324): unsure at all n locations
acccaactaaagggatatatcacaataatcaaactntcatctgatgatcaacaagtgtcatcggcaatcctaattatatcaactatattgcatgaatgccattctgattcaattgaaaacataatcccttgcattttctgctttggccactgctcttgaagaaaccaaaagtcaactaaaacacctgttggtctaaggaaaggaccttactacgacattcttcttgctgacccaaaataccaatgattcttatttacatggggactttaaaaggattgttacattaacacgacatctatggcctttcatatacttaataatttg

SEQ ID NO: 224629 - DNA, 352 bp, Glycine max
  unsure (1)..(352): unsure at all n locations
aaaactcaagctaacacacnaatcgacctaggctgaggggtattttctgaatttaaagcatttcagcatagctctagctcgaaatatttatctacatgtatgacattcaatccagacctatatgtccaaatgctgaaacctgacactactaatatataaactgttgcgtgtcactctcgttatgaagaataaataaaataatgacacataacttcttcggaggcatgaagatgacgataacttcatgtcacacaaacaattagcataattggtcacaataacaattagtcaaatcctttatataagcaataatgtccgttagttcacgtacaaaaaagctatttcttcttaa

SEQ ID NO: 224630 - DNA, 385 bp, Glycine max
  unsure (1)..(385): unsure at all n locations
cagcttntaagagagagatggagattatttttgtacaacaaccgaattcatagagaaaagacgagatgggagtgtaggtcccaacttaatctcacattctggccgctgattatagaatacaccgagttcattatggtctatgccgtgtacgaccctccttacacggagttgctagttactgcttacatataccattgcattgtcaccactcacccattgactccgagctaccatacgtgtttaattttactttttttcttttctacacggaattattcgaaattattaactattactgcttaataatattaactacagtggtgactattagatgtggactgacattttactttatgattgtataattattcacgttaataaatga

SEQ ID NO: 224631 - DNA, 280 bp, Glycine max
aaaaatactctcagccctctaatgatgaaaatacaacttcctttggtggtcggagaaactcacggacgtactctctgtatcatcacgtagacaccggtcaccaacattaatattgcccctcaccaccacttctaccggaggctaagtaggtattaaccgttactttcattatcatcaatagctccgctgctattgacccctcccttcactggggcaatacacggggtaattagagagcaatcaagtccgaggaattttattctttaagagccgtaagtga

SEQ ID NO: 224632 - DNA, 312 bp, Glycine max
tccattactattacgatgtaatcaattaaaacacagagtgctaacttcaggagaaaatttctaactttagaaactttttccttactcctacaagatgatgcatgatgcacatatgaaatgatagagactaagatgccttacacaatacaacaatcaatacaaatgccactcaagagagttggacatgtaaaagaaaaaacattttcaagatcttctccaagcttcaaggctaaggcttcatgttgctccccctatctctaacataccaaggattctggccgcccgaaatacactctttttgaatgagtgtac

SEQ ID NO: 224633 - DNA, 335 bp, Glycine max
ctaggaaacttgatccttgacactgggcagggaattatttcatactttcagccgcaagaataaacataaactatatgaagaaacaacaatgttcaagcaataaaaagcatatatattcccaatggacaataatccattaattcaattataaaataaaaatattgctgtaagaaatgaaaacacacgaggaactgtgattcaaactgttagtccaaaattactttagactattacttgactttctagattagaaactcacgattcggaagagacacactcattttaagcatagcccaatctttagtcatttaaaattctaaaggacttcccatctc

SEQ ID NO: 224634 - DNA, 399 bp, Glycine max
agcttgcattgggtcatgatcggatttatcttaaattgctcacgtttaattcggattcaaaattttaagttgaagtcctacattttagtttgggccaaccaacctagctagctaaacccattttgccacctcttatttgaccaaactattttagacgtggtaacaaatagtaagtcggcatggcaatgtatgatttattacctcatgatttatatataaatagataaactaaaatggttacgttttatgtgaatgttttttcttatttttcaatagaatcttctccatctgagtatcctcagcatagtctcgtttggtgtcaattctttaacacaagtgaacataacgaatataataaactcttgtggactttgataaaatcaatgtatgtgtttggga

SEQ ID NO: 224635 - DNA, 338 bp, Glycine max
  unsure (1)..(338): unsure at all n locations
cgctaggattcaatccatgggatcttgtagttaaccgtatctagttaanacttatacaatgctcgagtttggactataactaaactaagtaacactttggcccttctgttttagtccttttacatgtgaaaagaggaggaaaaactgaaaagcatagcagtcctaataagtgataatgaaaagttttggtataacatataaagtatttgttcagaattttcctaaatgggttatgagtgtagttggttgagttttaaagttatattggcaagttcctgcttttgtttgtgaaaatgctagcatatatgaactaactgtgtttctcttctcgctgcatc

SEQ ID NO: 224636 - DNA, 253 bp, Glycine max
atgcgataccattagatgacattatccgcatatagggacttgcctcgcctctggcttgtgccggagtggaacccctacgattccatgatgaggtttttctacactgtcgccacgttcatgacgatgacagatggcgggaaaaacacgctatctgcagtgtttgaaataatccgtacgcatggagtgtcttgagctacaccttatgtgctctcagaataacgaatgtcaatgaaagagaaatcattcatctgtg

SEQ ID NO: 224637 - DNA, 398 bp, Glycine max
  unsure (1)..(398): unsure at all n locations
agcttcccagntatggaaagctaaatcctctatctgatcttccttggaggtacttgatgtaaatatcttttcatatatttaatgatgttttgtgtgttcattgtgctatcagaacttcattctaccatgcttttgccttgatcacgcagatgcatgtgtttttaggatcattcaacagttgaaactggtctgattcttagaacttgataggacagggctagtttgtcgtattttcatgaggaatcagggtacgacaacctagttgttgtatgtttgtcttaatgcggtcctggccgagtttagtccaacaagaggaatctgaggatgatgcttgatcaggattaagctagactatcatgaggaatcggggtttagcatttcaggagacaccatagaac

SEQ ID NO: 224638 - DNA, 309 bp, Glycine max
  unsure (1)..(309): unsure at all n locations
acttgttctattcatcttttcattctcctctccccttgccaaaaagaattcgccaaggactaaccgcctgaattctttttgtgcctctcttcttcctttttccaaagaacaaaggactaaccgcctgaattctcttgtgtctcccttctcccttgtcaaagaattcaaaatgacacagtctgagaattcttttgattcttcccattccctaatacaaaagtgttcaaaggactaaccgcctgagaattctttngtatccccattcacaaagtatcataggtttacagcctgagatcttgtctcacacat

SEQ ID NO: 224639 - DNA, 405 bp, Glycine max
  unsure (1)..(405): unsure at all n locations
agctngagcaaaaccaaaggtaccggctgttttttatatttgctatggcatcaaccaaagataaatgattggtatctagtcgtcttcatattggacctttatcatatgatctgtccttttctttaaagtagcctatattgaagtgatgctatgattctggtccgctagtcttaagatgaagacttgcatcaagaaaagcgttttaagtataagattttttgtttnagttgttcgtacagaaacaaaagttacaatattacttaaatgagaggaaagaattatgcttcacttcagccagaagactcagtgtatgtttgacttattttagtaaacttagttctaataaaattgattttgtaacattaatctacattaaaagtgacatcatttttattatgggtcact

SEQ ID NO: 224640 - DNA, 155 bp, Glycine max
tcccacttaagtttgcctatctcctttatgcacaacaaactgcctctttgatgcctgaaaattctataattaacgttatttgtccaacaaacgtcttgcgaagttgtgatctcatgggctctttgtcctctttacattacccctcggcgaattta

SEQ ID NO: 224641 - DNA, 407 bp, Glycine max
agctttgaacaatatagttggccttcattattctgtctttgggcttggcggccacgctcaacaaagtactttcgacacctactgtacgttgatttcaccaatgctgttatgggaatgttgcgacaatcctttaaaaccttattgatacattctgagaggttcgttgtcatgtggccatatcgacgtccttccctatcgtaagccatcgtccatttttcctttgagatgcgatctatccatgttgctatggctggactcagttcacgaaatttttctaaattttgatcaaaaatgtgcttgcatggagtgtaggctgcataaaattagttatgaataacaattttaagtataaatgagagtaaaataaacgtgaccatcaaatatgaaatcttacccaatttcttcaa

SEQ ID NO: 224642 - DNA, 370 bp, Glycine max
  unsure (1)..(370): unsure at all n locations
acctataaaaacncagctcttacaaatggtagaacactaactatacaggaccactatctacctntctcaacacaagcaaccaccttcttgttcacctataacacacaaatttacaacgaagcgcgacctggtccctctgcacttgagtttttaaataccactgaagctgctcgaatggcgcctttcagctatcgacctgagcagcatgcaggtgctgcagtctatgcctgcaactctgcatacccaagtgcaagtgctgaagtcgctggtcaaactaacgcatccatgcacctttggacgcctcaataggagctgagatatgcattcctttgcgccagtaccagtggcgacatgccacataacttcgccc

SEQ ID NO: 224643 - DNA, 409 bp, Glycine max
  unsure (1)..(409): unsure at all n locations
agcttctanacaatggtatcttaagtcaattatattatccgatgtatggcttngtagagaacacaattgatcaatgtatctacatgaaggttagtgggagcaaatttgtgattttagtcttgtatgttgatgacattttttttgttgctaatgatgttgctatgttacatgatgtaaagaagtatctgtctaataactttgaaatgaaagatatgggtgaggcatcctatgtgatatgaataaaattatttcgtgataggtcagaagggttgttgagatagtctcaaaaatgatatatcaataaagtattaaagagatttagaatgaaaaattgctctgcaaggattgctccaattcaaaaaggggacaagtttagtcaaatgcaatgtcctataaatgatttggaatg

SEQ ID NO: 224644 - DNA, 347 bp, Glycine max
tggcatcatttctggcgctacactgctgggaataggaggccatcctctcaattaaaatttctggcttcagcaggagtcatgtctcccaaggcttcaccactggcaacaactatcatacttttctccatattactgagtgcttcataaaaatattggagaagaagctgttctgaaatctgatggtggcggcacctggcacataatttcttaaatctctaccagtactcatacaggctttcttactgaattgactaaacctgagaatacttactgatggctggggcccgaaacacgaaaaaatttctataatactccttaagtcatccacctctgatggaccttgacaa

SEQ ID NO: 224645 - DNA, 407 bp, Glycine max
  unsure (1)..(407): unsure at all n locations
agcttcaggctgcacaattgctccaggatgtttgtttttatgtcaaagnccgcanggcgggcagcaaaagaacacaaaccaccaacccttgccacaggtacagattatcttattcaaggccagctgggttaccaagttaaccaatgcatccagtttgccttcaagcttcttagtttcagatgatgcaaatgggttcgtaactacctcatgccctcctctaatgactatggcatcatttctggagctaaactgctgggagttggaggccatcttatcaattaaatctctggcttcagcaggagtcatgtctccaagggctccaccactggcagcatctatcatacttctttttatattaccgagaccttcataaaaataatgcataacaagccgctctgaaatctgat

SEQ ID NO: 224646 - DNA, 402 bp, Glycine max
  unsure (1)..(402): unsure at all n locations
agcnnncacgtacggacgcgagtttatctctttcactatgtcggngcgnaaaaggcgacattaccttctcggacaccccttcttcatcttgactaatcatcgaagcttgaagaaattgatgacccaggtcatccaaactcctgagcagcagcattacatgggtaagttactcggattcaattacatgatccaatacaaattaggcgcacagaacgtagtggcggattctttattcagagttccacccccttccaccatgctgctttgatccattccacattcattgttcatggaccagctacgcaaatcttgtgcgactaacacggcgtatcaagaaatgctccataaaattcttcaccctcccattgaccatctaggattcatagcttaaaatggcatgat

SEQ ID NO: 224647 - DNA, 300 bp, Glycine max
ttttcaacatacttgaatcaacccctcaacatctcttagtatcatcatttcatcatctttccacacttccaactgaacattacaatccatttctcttgatctttctaaaatttgttgtacaacatttcttcttcccaaaaaagtcatgtggtcaaagactgagcaattcatcctttgcattctcttctcccctcttcaaaagaacgaaggactaaccgcctgaattttttgtgtctctcttctcccttacaaaagattcaaggactaaccgcctgacaattctgttgattcttcccttcc

SEQ ID NO: 224648 - DNA, 393 bp, Glycine max
tctcaaggaagctacctatgctatgagagagaacatgtttaacacttgttgtaactttgacgaatgagaatcttgtgagacacagctccaagttcaacttcactcccgtattattgcttgagatttcgagctcccccctctttctatatctcactctttcatttcctccattgaagcatactctccaagcttcttatccaaagctcaacttgggggtgaagctccttcttccatggcctattccctaatggatggcgccatctctcacctcatctcctctagattccgcggcatgttcatgcggggaaaccaccattagaggaccttattgaagctcaaagatccatcctccctagaagcttcacatgccagcttccatcaatgataggcaaa

SEQ ID NO: 224649 - DNA, 277 bp, Glycine max
  unsure (1)..(277): unsure at all n locations
cgcagcgcagcngaagaaaaaaagcccggtattcatttccccggccagacaaaaaccgcccagcccagaactggggaagcccacgcgaccacaccaaccgggccatcggcacaatcgaagcaacgacagcccgaacaagcgcaacacaacaaacctcccaccaaacgcaaacacccacaaccaaagacccccagcgcagacaaccgggggagacacccacccaaaggaaacctcaaacgagcacacacccacacaaagcgcggacaacaacaacgcc

SEQ ID NO: 224650 - DNA, 354 bp, Glycine max
  unsure (1)..(354): unsure at all n locations
cgaccggcaggcacgcaagcnncaaaacggaggacaagagaagngaatcaaccatgttgtccgcacgagaagngggtaaagaccccaggcgaatgccctccaaaaatccgccaacaactacaaagattgtagtggggccgcggctgggaggtagacacacaataaaatccatggaaaggtccccccatggccggtgaggaacaggaaggggacataacagccctgcagacttcttattgtgcaagaaattaagtttgagccaaatgatatgtgtgaacccactgataagaaacaaacaatccgagcaagccagggaagaaataaacaccactgatgcaccacgagtcactgaac

SEQ ID NO: 224651 - DNA, 337 bp, Glycine max
  unsure (1)..(337): unsure at all n locations
ggacacaaaaactcagctaaagggctatcatgggacgagcgcatatcttgttctatttaatacactaataagaaattgcatttaagtatcaaaacaactgagaaaatgtagctgcattattcttatttttctttacacaaagatgtctggctaaaataaaccacgatttgatgagaagaaaaaatatataatangataaagaattcttctctgttgcctaataagataaagaatgtaataaataattaacaatattatagaaggtgatagaccctttcaactttaagatcctttctcaatattgggtattttacacctcatatttggcggttttctc

SEQ ID NO: 224652 - DNA, 395 bp, Glycine max
  unsure (1)..(395): unsure at all n locations
agcttatgctctatgtattttatgtngggtttctctacttgctngangaggattcaataacgcgtgagtaaatcttgtgaatgacatgttgggtctccgattagcttgaattcacaaagtttaccacaaaactaaagccttttctaagaaatataaaattctcaaataaatgatcactcaattctcctttttccatgcacttcatgctgggtctccgacttgcttggtggtgtttcaataacgcgtgaataaattttgttaatgacatgttgggtctctgacttgcttgagttcacaaattttaccacaaaactgaagtcttttctaaaaaggataaaattttcaaataaatgatcacttaattctcctttatccatgcactataagagggtctt

SEQ ID NO: 224653 - DNA, 389 bp, Glycine max
  unsure (1)..(389): unsure at all n locations
agctttgcatttntctttggactcaccatattttctctttcttcctcatttttgtttatcgttttcagcttggtttggcatgtatgatgaggtttgaatatcgtgtatatcggtgtatgtgtttttgttgtgctatatgagtttttgcaggccaacaagacaaaagcttggacctttgttgattttatcattagtttatctttcctataccaagcttttcgatttttggtcggctatttttgtctgtgaaccatttntgatgatgcatgtgcatcctttataaggttttcttcgtcatttttgttttttgttttcagcttggtttggcatgtatgatgacttttgaatatcggggtatatcggcgtatttgctcttgctatgttatatg

SEQ ID NO: 224654 - DNA, 414 bp, Glycine max
agcttgcttgtggggcatctatggaggctggttctttgagcttcaatgagggcctttaatggtgattttccaccatgaagatgcagcggaagacaaaggagaaaaggtgagagaaggcgccatccactagggaataagccatggaagaaggagcttcaccaccaagatgagccttggataagaagcttggagaggatgcttcaatggaggaaaagaaagagggagagaaagagagaggggggagcatgagattgaaggaagaaaaagggagagaagttgaactttgagttgtgtctcacaagactctcattcatcaaagttacaacaagtgctacacatgcttctatttatagactaggtagcttccttgagaagctttcttgagaaaacttccttgagaagcttctttgagaa

SEQ ID NO: 224655 - DNA, 403 bp, Glycine max
  unsure (1)..(403): unsure at all n locations
agcttatggcagaggagcaacanacgcctattattgttcttaatttatgtagaccangcaggcaatgcaacaaaacatcaccataaccactccttacaagtacactacatagtaaatgaacctacatccttctctttctatttatgcttttcttaactaaaccctattagcttctagagttatagaaaattactatcattgtgaaagtgtaagtttctaagtctgggtgataacacattaatgtattcaaccaaatacattatcaaactcaagcatcccactaaaaatatagcgggattagacaccccaatacaagccaaaacacaataacaagttcaaacaaaacactaagggaagttaaaataatggcagccagaagcaaaaccttccatgacaatataca

SEQ ID NO: 224656 - DNA, 239 bp, Glycine max
taccctaaaacatggagaatattaacatatctttttgaactggattaaggaaaggacctacgtctcccattaaaagctgaggctactatgtgaagggaatatgaaccacattctctgtgcgctctattcgctactcaaattgggtggacatcacttctgtcgcaggctctatctgcacttcaaaatcaggctccagtgctgggacaggatcagattgcaagcactccctcacttggaca

SEQ ID NO: 224657 - DNA, 376 bp, Glycine max
  unsure (1)..(376): unsure at all n locations
agcttgcccananaaggaatccacggaggattttgcttttttcctcgaaagacaggaaagcggcttctaatgactcctctgcggcctccacataaggcatagaggatgggcagctcaccaagatgtcttcctcgccttatacgatgaccagatgcccttcaactacgaatttcaacttttggtggagtgtagagggaacaactcccactgagtggatccacggacgccccaacagacagctgtagggggggttaatgtccattatttggaaggtaacttggcatgtgtgagggcctatctgtattgggaggtcgatctctcccctaacctcttcgggggtgccgtcgaagcacgaaccaccattgaactcggcttc

SEQ ID NO: 224658 - DNA, 289 bp, Glycine max
ctcgaaaaatcatcgggtacaagccatgaggtgatacactctcttttactaaactatccataatcgggtgaaatcacttctagtcagcacaaatatgtatataactcacttagtaggaccataaagtcatgcttaggtagaaactgaatacaaaagcgtgggtgagtttaggtatacgaattcttagcttatgaatagataatgtacttaacgagaaaaagagtctaatcaagcctatcttacactaacgatcaagaattttctcttattactaagccgtattgtactt

SEQ ID NO: 224659 - DNA, 405 bp, Glycine max
agcttccataatcctaagacctatctctatcttttacagctatgatcattttggaaatctgtaattaatttaatttcagttgaatagtacaacgaaggcgaaaattataaggtaacctcttcaacggccttttctctgagtcgttcggagagcctcaaggctttgatctctgcctgcgcttctgataattctctgtccttatctacaaacacacaacacagtgagtgagagtcattagtgaaggagcaaaatcaggttaagaactcgtcagatcgagtcgcattttcgcacctctcacttcattctccaagcgattaagctccaccttcaccggatccgaaccgtgcaacaggttcatgaactcgtccgcgtcgaggctcggcctcatcgaatgcgcgcgcctcc

SEQ ID NO: 224660 - DNA, 333 bp, Glycine max
tatacaagatagaagagaggcactcatggaccttgtttatctggagttctccagctagattcagctgagataagatcagttcctgccatggagcaggtgttgagaaatttggcgaagaaactccagctgctgtgcttgcagcatccaaaagagcaccatcatatttgagctcaatacaatcataagggtttgagtgcatcacaaatccataatcaagaaggaaaagatcattgtttaaacagccatagcagagtaacaggggatcatcttctttaattgctgtctcggccacaacctgaccgaagaaagaattaccacagcacagaataattc

SEQ ID NO: 224661 - DNA, 353 bp, Glycine max
cccagagcgcctgaggacacatccgccttcagaccaaaaataatgaaaaagccggtctctaacttttcatcaaatgagcatttgaaactcctgaagcgacaacaccaaaaccaccccaatatctccaccctatcctgtccaaagcgtacgagaaattcaacgaaaataaaacactcgaacagggaagaaatcggataagtcaaacaaacaagtatactattggaaccggcacatatattaaaatgacacaggcaaaaaaagacaactatagatagccggcacgtgcgaccaaacgacttaaagataaaagtgccatgacacaaaaccttgaaatgaccagcaaaaaatctgca

SEQ ID NO: 224662 - DNA, 329 bp, Glycine max
agaagaaggtatcatgaggtcataataaatctacatgagtgggcgtgtgccgatatatatatatactcgtgtgtcacttatcacaaacaggaacgatcaagatcaccgtgatgccacttcattataccgaccagttcttaacaccatatatgcaaacagagacttggagctcaaggagatcggatcattatataaaatactgagtttaggagcaatgtgaccataggaaagaaacatcaatagaataacgaaattcataatccctctgtctcatcgccgggtgcaaaacaatagccaaaggggggaggaaaaggtaagggaaacaaccg

SEQ ID NO: 224663 - DNA, 406 bp, Glycine max
  unsure (1)..(406): unsure at all n locations
agcttgcagcaaagttgggtctgaaccaacatgnnttattttctcaatcacaaaactgtgggctgggcatgcccactatatactaaaagttgaaccattttatttttaagaataaaattttcaaattggtgtttggcaattcaagatgcatcatgcgttagaattgtaaagatagacttgaacttactcttaaagtgaatatttgttttgacagaagtcttagagtaaatatttttcattgtaaagatcttgttcgtattaactttgaaagtccggcgatattaattcttaaaaatatatattttatggcaacgaattcttttttttacaaaatggcaatgaaattcggacctagctctaaaaaaaaanaaaaattcgggcctaaacgttacacaagccacccact

SEQ ID NO: 224664 - DNA, 381 bp, Glycine max
taagagtattgtgcaagagaacaaagtttgaagaatttatttatagctttagcaataaaggaagtagatgagaattcctttactccaaacagtgtcgttttaattagttcatagagctataaaccatgtaagaaggttagaggacactgtgttagcccatatttttgatgagctaaaaatatgctctaaattcgaatttgttaaattctgttcgaatcggaaaaagagtttgttgaaagagattcccaagtgcaaggaagtatttacgaagtataacgctaagacaagaaagagggcttcgaatcattgggcgattcgagatggtgtatggtcgaatcgaaatcaatgcagctagaattctggacttagcacaatttctga

SEQ ID NO: 224665 - DNA, 312 bp, Glycine max
tgctttaaaatgattttatgcattatggtttcttggaccacattaatctccagaccacgtgggcaagatgttgatcttatacagcttccccctcaaatttatttccctctattgggaatgattgtgaatatggtttgctggggctatactaaagtaaggttttagaaaagctctgtgactgcaatttcagccgtaacgccaaggcttttggagtccttgccagcattacagtggccaacaacaaaaaagctacaccacgatagcaggataaccagtatttttaattctttatactgtttataacgtgtaata

SEQ ID NO: 224666 - DNA, 289 bp, Glycine max
tacacaaaaaatttaatacttgcattgttgggaaactaaattccttaaccagataaaataaaatcaaatgctaatatgcactaaataaaaaatctttatgacttaaaacggtgttcatatgccgacggcttacataatgctggttcgggcacgagaagatctacgttctgccttgctctcacttgcttggtgagcggcgcttgcacataatgggctcagatatgatggataaaaaaatttaaagtgcggggaaatatatttatacactcttttaccactaaaatcaaat

SEQ ID NO: 224667 - DNA, 357 bp, Glycine max
aaacgcgaagggaacctcggatccctgtcggatacaatactggaaggaattccatgcaaccttattacttccttgatgtacaactccactagcttctccattctatacttcatattcaccggaataaaatgagcagatttggtgagtcaatctactatgacccacacagcatcatttccacgactagtcttgggtaaactatatacaaaatccatagatatgctctcccatttccattccggaatttccaatggcttcaattctcctgatggtcgctggtgcttaaccttagccttttgacatgttaaacatcttgctacatattcagccacatctttctttatgccatgccaccaa

SEQ ID NO: 224668 - DNA, 341 bp, Glycine max
accactaagcaaatgctttctcaactttattaagacttagagcactaagctaaccaattggcagattacaccatcaaaatttctaaaattctcacctggacttgcggcttctctcaagctcgtcatggacctcgtgggtcatgactcgtggtactcgcggattccaagtttctctcgagcacatcattgacacaagcagcaagctgccaagcttctcttgagcttgtcgtgttcgtgggtgggacttgcgacttccaaaagaactatgcgaccaccataccgcaccgtcgtgtcgcatgttatctgggctcgcactctcaaactcaccgcgaatgaagaac

SEQ ID NO: 224669 - DNA, 410 bp, Glycine max
agcttagccctaaaggggatggaccttttcttgttttgtataggatcatataacaatgcctataggttggacctcccagaaaaatattgagtcagcaccacttttaacatttctgatataactccctttgcaggtggagctgatattgtggaggaggaactaacatattcgaggtctaatcctcttcaaggggaaggggacatgatgcaagctccattggagcttgtaggcctaagatcttctttatcaatggattcctttgcttcttggaagatgaatggaagcggaatggagaaaggaatagaaagaggagactcctctttaaggagataatgagtctataagaagctcaccaccataggaggccatggataatagcttggaggaagaatgagatgaatgatgggaga

SEQ ID NO: 224670 - DNA, 253 bp, Glycine max
cttttatttctgaccacagaaaggacctggagatattgtcgcggggtcatgagaccttggagacgtcaagtggggtgctattgcccataaccaatcttgaccgatcccgacccaacccgggcatattcggtcaacgagaacctgtgatggacctaatcaggcgagctcctgtcagtcaacagataaaaggaaaacaagaccactaagcatggatgcttgtggtggctggccagctgtgaattttgtataatat

SEQ ID NO: 224671 - DNA, 397 bp, Glycine max
agcttagacatttctatattagactttgtgtcttttatttttacatgaatagctcataattgaggttctaaagttataaactttgtattccttggatgttttagaaaacccaactaatgttccattatcaaatttagaattaaactttcctaagttgtccttggtgttaagggtgaaacactggcatctaacaggatggaaatatgaaatgttgggtttttgtcctttccatagttcataaggagtcctttttagaatgagtcttatataaactttgttttgcaaataacaagcaatgttcactgcttcaaccatttagtgttaaatgtaaagttgtcattaagcaaggtcttggccatttcttgcatagattattctttctctcaacaacaccatt

SEQ ID NO: 224672 - DNA, 405 bp, Glycine max
  unsure (1)..(405): unsure at all n locations
agcttganggcatgggatgatcccaaaagtatttatattactttggctaccctcggatntgaaaggaaccctatggagtctgcgttagtgactaacgccacatgtaccctattatcacaattgtcttggtcgaatgagttttcttctcaaatgtgcaagagcaaacctcgaggattcattttttttctctttttagtaatcacaagtgtgtgtgggttctattccagaatccaaactcaaaagcaaaattagtccttccttgatccacatgggctttgttgggcttgtaacgtggtcaggggtaacaaggctatgatagaaaggatcagaaaggctcacagagtgtttaagggttatattgagtaagaaccttgagagccctaattgtactctattcatttcaac

SEQ ID NO: 224673 - DNA, 348 bp, Glycine max
taaatctcagctatgaagatgattatgtcttggtggcgtgtttcttatagacctctaactaagttattatgaaggtgataaacttatatcatataacacatattattggacttgactctccgagaacttaattagtctaattccatctttatatcatggtttgagtagcaacaattatgattttatagactataggttattttacatagaattttactcaatggtctataatactatgatcccatgtagagagaggttagatctatataaaaatttaatataaaactagtttgtaacccgtgcatacgcacaggttgctcgcaatttatctaggcatgcatgcttatt

SEQ ID NO: 224674 - DNA, 412 bp, Glycine max
  unsure (1)..(412): unsure at all n locations
agcttcattaagaggcttctagcacactctattcatcttctttaagatcccaacggncagagcttggagaattgttttgcaaagttgtagaccaaatttatagaagatccaacggttaatgaaggctgggcagtgtttttaccgaggcagcttcatgtagctttctctagaagcttcattaagaggcctcctctagaagcttcctctagaagcttcctcgtggcttctttgagaagctttctcaagaggcttctttgagaagctacatccttatctatccacccctctattaactaaattaacttccttaaaaataattacggatgaaaataacgcgacacataatcaaacatcaaacatatttactaataatatatagatatatatatcagggtgttacatggagcatctc

SEQ ID NO: 224675 - DNA, 345 bp, Glycine max
ccacaccatcccccaagccccggccaatgaactgagacctccagaccggaactaaaaacaacgcagcagcaagcacacacagagaagagaatatttttttagaagcaaaatgacaatgaaaaatatacgatcgaacacgccagcagagaacaaaattgccaagcctgaacaaaggcgaccaggagaacggcgacatcgggcgaccaacccaccaaagctccccgcataaacacctactgcaccggagacatcgaacacctgggcgtacaccatttacattgctggagggagcagcaacaccacaaaggatgcaagacacgaaatgacgaacaggacagagcaaaa

SEQ ID NO: 224676 - DNA, 390 bp, Glycine max
agcttgccacaccatcaccattccggcccttgtctatgtcgggctcgtatccatgtcccaacattacacgggctaccatgatcatggctccagatgagcgcggttgcaccgggggagactccacataagcgttgctcaccactttgaatgcttgaaaggcagtggccaaggactcctccttagcctccatatagagtgtagaagaaggacaacttacaagaatgtcttcctcccccaagactatgatcaaatgcccttccactacaaatttcaacttttggtggagcgtcgaaggtactaccccaactgagtgaatccaaggtcggcctaataggcaaccataggctgagttgatatccattacatggaaagtgatttggcatatgtggg

SEQ ID NO: 224677 - DNA, 333 bp, Glycine max
gcttggaccaatggaaattgcaagacctaattcttatcttcttaatctaagcacttgaatgacaattaatatgactaatgggtagcttggacagcccatgattccaaaactaactataaaaggcttaagtatgtttaagccaaaaatggagaaactcttttactaaaattgataactcctatcctaaccctctagataaatgtgctaaccctcctagattaatttcctaatctctcttggaatatgtgcagctcaagtggaccttggacagagttcactcacaaatagcccaattacactagtgcctagtggattttctcacatttgaaatta

SEQ ID NO: 224678 - DNA, 298 bp, Glycine max
attacatgcctcctctgcttctaaaaaattatgctcctccatcttcacatactgcgtcgtcttccggtattgattctggcactggaaacaattgtttattctcgaataagaaggcgacctactacaagcctttctctgtcggcatggattgctccggctcccgtgtccgcgccgaataagtgtacgggtccgagacgcaatggcacaggacagggaaagagtcccgaaacctacaactcgggattccaccggttgttggaacaaatttctcagattgagatcaacaccctcacagatc

SEQ ID NO: 224679 - DNA, 450 bp, Glycine max
  unsure (1)..(450): unsure at all n locations
ctatanaaactcaagctgttaaatgtcatatcaacattgcggtgatgtggttcttttacggcctctcananaaccgtttggtccgtcatctcatacgcttttgtggaggaagaatggtgtattaattctaagccacatttagagttcatttttcatcattcaataatctaaaattcagcctaaacatgaaactaaactttgtatggtatcaacgtaaggtaaatatgtttaaaactagttcataaactatgtgactggcacgttggattgaataatagcattatattattctgcttttcttagtgtattttaaattttataaccaggtttcctgaatcgattaccccagctggaatggatgatgattggcattggatcaaatctccatactctgaggatgattatgctctgtgtggaatttgaatgctgatctttatcaaagtattttat

SEQ ID NO: 224680 - DNA, 404 bp, Glycine max
  unsure (1)..(404): unsure at all n locations
agcttgcaaaatctataannataattgcttttaatagttttctgcgaangcatcaggttttggtaaaaaaaaataatttaactcattctttgccccctcccctagctcttttactttttgtcattgatctcaaggactaggttttcaatgaggttatataaatttttacatgggacaatgtcatgacagtgagtaagaaggaattgcaaattcatttccttattatatttaattttctaatttcatgattttttcctacttataacaccaatatcaaattctgtgggattcttgctcttccatgctttatggtggtatttaacataaccattttttgataatttagtatttttctgtacgattttatggtgaccaataacatttttgtttcatgattgacattg

SEQ ID NO: 224681 - DNA, 277 bp, Glycine max
  unsure (1)..(277): unsure at all n locations
acactaacttgacttttgttgacgccaaatggttcccaactcaagaaaaccctggctacatacaacatcgacgcttggaccaggaaatcacggaagtgacaactagctgcaagataaacacacctactcctaggaaagaaatgagctggtacccctggaatagaggcagcctctaccacatngaaatgtaagagagcaactctagcgcataaggattgacatgcgtcaataagagaccgaacatgacacagaacccacaccgtatgaaacaacatca

SEQ ID NO: 224682 - DNA, 400 bp, Glycine max
  unsure (1)..(400): unsure at all n locations
agcttctcatgacatttttatgtttaaatcccatcgtcgggagcctggcaaccaaatttccttgttatgtaatatttccttactatctatntaatgcaacgccaatttttattatttctttcttgtgctttattgttactgtatgacctgatcatccatgcattacttttaggggttatacaatgggaaatgataatttctaaagaactgggaaagggcatctaaacaattcattgctagagataaagtgactttgtttttgcctctgtatacatattcatacttcatgcaatttactattctatgtttgcaaagggatttgggagagagaataaataaattaggctctctattgtgagggatcagggctgagtatcttactagatgtgggtggaaattg

SEQ ID NO: 224683 - DNA, 434 bp, Glycine max
tctaaagtagtataatgaagtcggctacgatgaggagttaatatttgacctccaatactaaatgccgattcagaagctacagtggagatcggaatagctaacacatcccttgcaattgcttgtagtgttggatactttaactcattcaatttccaccacattaagatatcaaaatatgaacttcttggtaaaacttcctcctctaagtaatgatctaactccgttttcatagttgagggtcttgcccttttctttctttcaatgtatctatcctaatcacacaatttactctttccatcactaaccacatcttgtgattcaaaagaactagtagaatcttgatgctttttggcttgaattccgaaaccaatcatacacaagttcagatctattaactgtgaaaaaaataatgggataattgattaagtaaactc

SEQ ID NO: 224684 - DNA, 395 bp, Glycine max
agcttgcattttaaacgggcttgtttctttgatagagtatagcccgcgggttttgtaggccagctcacattcacacacacacacaacttaaaaattgtgaattgtttaaacaaaccattttaaatgcacataaatacaatacatataggtaatatcaactataaaatactcaagtctagattaggtgaagtgtaaagtctaaatccaaacaagtccaagtacaaataatataatacaaatagatagtttattaaattcttaaataacacatcaaataattatcaatcttcaatgataatgttcggcttcatccttgatgtagttagttactccaattttcaatctctaaagatttgttcacttcttctacaatgatcaaggctgattaaaagcac

SEQ ID NO: 224685 - DNA, 297 bp, Glycine max
tgacgtgccatcattgttccagcccagactctttctattctcataaccatcttttagcataactcgagctaccatcaaagaggcaccagacaaatgtggttgtactggaggagactccacataagcactattcacaatttccaatgcttgaaacgatgtttctagtgactcctccacaacttcaatataaggcataaaagatggacaactcactagtatgtcctcctcgcctgacactataacccgctgaccccctaccacaaatttcaatttctggtgcaattttgatgggaccac

SEQ ID NO: 224686 - DNA, 280 bp, Glycine max
cacgggaaaaagaccccctagaacggctcccacaagaacctccaggaccactaacataatgaagaaccacacgcacaacaagcagcaaggggacgtttttgcttccttgatgggaggaaataccttatggctctcggagatcggggcgttttacggaggcggaacacggtacacttggtccttggggacctggaaacgtaagtgcccggtctaagtctggaacttgagttgtcgggatatggttctttcaaaggtggggtgatggagacgagcgatgaaa

SEQ ID NO: 224687 - DNA, 402 bp, Glycine max
agctttgacttaagtcatcaagagattatatatatgtgaccatggcatgagtttcaaaaaagagaaaatcatcgatcatctttgaatcatctatctttcacatcatttgtttttcgacatccttgaatcaatcttccaacatctctaaatatctacttgcatctttttcaacactgttaatataatttgctaagtcatttctctccatctttctaaaagtttatgttcaacactttctcttctaagaaaagttctttgttcaaaaacttgtgttattcatatttgtcattctcttctccctttgccaaaagaacgaaggactaaccacctacgttcttttgtgtctgtcttctcccttacaaaatatataaaggactaactgcctgagaattcttttgactc

SEQ ID NO: 224688 - DNA, 395 bp, Glycine max
agcttcttatccaaggcactctcttgagggtgaagctctttcttccatggcttattccctagtggatggtgcctcctcttacctcttctcctttgtcttccactgcatctccatggtggaaaatcaccattgaaggacctcatttaagctcaaagatccagcctccattgaagctccacaagcaagctttcatcaagtggtatcagagcacaagagctctaagtaggtgctccttaaatcgccatttgttttttgctttaccttctcttacattgttttttgttcatttttctccatgtatatcctcacatgtcttgcgctaaatgtttctaacattattctttaaaatttccaccgattaaacttgctatagaagctagatttgattttctatg

SEQ ID NO: 224689 - DNA, 326 bp, Glycine max
gtcgcgtgtatgatattcactcgtttgttttgtagcacaggagaccttcaatcctataacgcaacgtggcggacaaaaatgggcagttaacttgaatggccattactgtcaatgcggaaggtattctgcgcttcactatccatgttcacacattattgcagcttgtggttacctgagcatgaactactaccaatatatagattgtggttacaccaatgagcacatcttataagcatactccgcacagtggtggtctcttgggaatgaagcggcatttctccttctgatgaggcatggacactaatccctgacccaactacaattcg

SEQ ID NO: 224690 - DNA, 225 bp, Glycine max
ctgcactttggttaaaaaaaaagttttcttttcctttacaaacagcctgcaatgtccattgatcgacaaaggccatttttttgatggacctctcgtccaaaggaaaaatctgactttgaacctaaatctgctggttgcgtgcttcttgtccgttctccgttttggccgccgggcgttcaagcacatttattaaacctaaagacccacgggtaagtggtcttaatt

SEQ ID NO: 224691 - DNA, 302 bp, Glycine max
agcttagcataagatgtgtgtaactctcgttctccaaggaagcttctcaacgaggctttcttccttcatgtattatggcatgggggtgggctcacctactggaggggcgaaacactagctcctcaaggaaaccacctatgctataaacatgaacatgtgtaacacctgtggcaactttgatgaatgagagtcttttgagacacactacacagacttgcctctgaccctctttttcctccactcccatgccacttatctttctctatctctcatacttttcctccactgaagctccctttcta

SEQ ID NO: 224692 - DNA, 446 bp, Glycine max
  unsure (1)..(446): unsure at all n locations
tanagtatgcccgagncattcatgcgtatgagatgttgttaagnattggcgancagaatagccattccttggattatagggttgaaccaagctcatgcttntacaaaaaggttcatcaagtcaagttgaaatatggaagtaattgtcttgcaaaattgcggcaaaagatgaatcgagtcacatcactgcttcttctactgccaaacatatttaggattattgatgtccttgttacttccaagttcaccttgacaaagatgtcatggaccatgttgaaaatctaaattgattcaaccccatatcctgcgtaaaaattcgcaatcttcaactgtacatcattcgcatacatccatgcttttcattggttgcattgctcattgcatcttttctctggaaataaataaatcaaataaaggaacttatcattgtatataaagaaaggacac

SEQ ID NO: 224693 - DNA, 407 bp, Glycine max
  unsure (1)..(407): unsure at all n locations
agcttgcatttggaattgcgaaagccccacttcatcattatgattagnacctgacatctcaaacaaacaaatcaaacgtaacaagacaattatagttgctgtttgaatacctcacccactcaagtgtatcacacaattatggcttttctctaatgaaacactcttgccttttaccactctaattccccttgagttcttaggcaattcaagagattatggccacaacaaagaacaattcaccaatatgtgtaaggtaaggctagagagacaaggaaaaggttaaccaagaaaaaggctaacaatgtttttaggcacaaatgaaggaaataaaattcagaatttaggaattcaagtaacaatccttcatgcaaccaatatattaccttaaagagatatttttttttaaa

SEQ ID NO: 224694 - DNA, 345 bp, Glycine max
  unsure (1)..(345): unsure at all n locations
ggacacataaaactcagcttgttacccctgttgaattgcttacatagatctattctagcaccactaattggtctccttttgaagttgtntatgggtttaacccactaactcctcttgatcttttgcctatgcctaatgtttctatttttaagcataaagaaggtcaagcaaaggcggactatgtgaagaagcttcatgagagagtcaaagatcaaattgagaggaaaaataaaagctatgctaaacaagacaacatagtgaagaaagaaggttgtcttcgaacccggagattgggtttgggtgcacatgagaaaagaaagggttccggaacaaaggaaatcaaag

SEQ ID NO: 224695 - DNA, 380 bp, Glycine max
ttttttgcctcctgccaggattggagctgctaactgggtttccaccaatcatacttccactgttgccacaggtttgggtaaatttctgtatgctgttggaaccaaaattcaaatttaattttggaaactatattgtcgtttgattattcttagagcttctcgtttcaattaccaccgtcaccatatactacgagacacaatcggacacccgagttaaaagtttgctagtgcttagctctactgagctttaaaagattgcgttagattttgttaaaacataagcacttacacaatgaacgatagctggagatgctgcacatgatgttcaactgtatgtcaacgaatgaaatctggcttgactatgcacaatgctaaaataa

SEQ ID NO: 224696 - DNA, 280 bp, Glycine max
aaaaccagctgagaaaacacgacaagggggaccggtgttatcatccacgaaaagcggacctcggagtgaaacggaagctctaagaaaagtcaaacgacagaaactattcaactcggatgactgatcgagcgctagtatacatcaagacgcgcgaaaatgaaaacggaaacgctaagaagagtcaaacgacaataactgttaactcggaagtccgacagagccctgtaatatatcgagacgctcgacattgagaacggaagctctaagaaaagtcaaacga

SEQ ID NO: 224697 - DNA, 414 bp, Glycine max
  unsure (1)..(414): unsure at all n locations
acctgcgggctgcaagctagagacaagctatttgagtttggattatgtctttgcaancccagcggtggtgattcgtcatataatttagagataatcccagtccatccataaacagggtcctgaatcctacgttgtgcttcaaaatacaaagaatttgcagcttgttcacgtaagtatggtggaatttgctgcaacatcaaaatttacaaaggttatttcgtaacataatgttattgtcttttcatgacatattctaactttgatattatctagttaaaacacctgaagcatttttccaacattgctgccaccatagattctgtgaacacaagcaaatctctgaggatcattggcaggaaaatatggaaagaaaatgcaatctgaagagcattttcttgtttgattcttgcatgc

SEQ ID NO: 224698 - DNA, 399 bp, Glycine max
agcttgcaatgattccttataagcaattgttattatataaacaatggcttcatattatatacttcaataataaataataaatctaagaaactttattcaacattgaattccattaaaattcctctaagcaatcaacccatatctaaaattaaaagcaaatttgattaaatcaatgagtccgtttttacattattatgcattgtattgtgcaattcctttatttgtgggatttatttctcacacaataattcattaaattatagaaatgttttttacctatgcttacatctcggataaattaaaattttatttataaaaccttttcaattgtggccaatatcttactacgaataattccgacaacttcaagagaaaaaatacattcacttattacagaga

SEQ ID NO: 224699 - DNA, 314 bp, Glycine max
  unsure (1)..(314): unsure at all n locations
gcttatacaatatttatattgataataaactatacatggtgaaatatgattttgaggacaacaaagaaaaggtaatcaccattggtacatgaagtgaatttgaccattaaactggagccaaaattttgtgtctcctaatgcttagattgattgaacaccaacatcgatgcattttccaggattgaacaccacatggatacattntccaagattgaaccttggttattattatgatgaaagtntaatttccaacttgcaatgactttcgcggtagggaaatccattatagttgatacaaatactgtgaaagttac

SEQ ID NO: 224700 - DNA, 393 bp, Glycine max
  unsure (1)..(393): unsure at all n locations
agcttgcaccncttcactctccttaagcatgttttcctctcccccaataagaccctttagctttgggagccaagatatcccttgcgttctagacttcaaccattggtgatagccgcctatgacaccattgctacttccccctagctctttatcttttatttccactttattccacgctttatggatcctctaaagtatcttcgcattagcttcatcgaaacctcgcgcgatgaaaggcgcgatagtttcctccgatggcacacccctcatagggtcacctaactgtcttatggacaacacgagattacaattaatacaacccatcgtccctatcaaagggacatttgggaatccttcacatgagcataacactcctgctgctccttctttcca

SEQ ID NO: 224701 - DNA, 324 bp, Glycine max
  unsure (1)..(324): unsure at all n locations
ttagatagcgctgtatacacgacaaaatatttttaattttgcanaaaccctatctaaaatattttaagaatgaaaaacaaaactaacatatcttacgaagactaaaatgaaaaaaaaaatagtgaattacattgacaaaaaaaatatttaagcctattttatttcttattgactatatttaatttttttttagatttgactcctctaaacggaatagacatgtgaagaaaaaaaaaggatatatatgtctatcattaatttaaaaatgcttataaagaatttaaattgtggtcgtgaacacgaatttatcgcgttctttgatat

SEQ ID NO: 224702 - DNA, 414 bp, Glycine max
  unsure (1)..(414): unsure at all n locations
agcttgagggaaaactngatgccttggtcttcctagtaactcagcttgccatgaataaaaaatctgcatctgcacctattgcaagagtctgtggtctatgttcttctacagatcaccatacaaatctctatccttctttgcagcaatttggagtcaatgagcaacctgaagctattgctgcaaacatttataatagacctccccagcagcaaaaccaacaacaacaaaataattatgatctttcaagcaatagatacaatccaggttggaagaatcatccaaatttgagatgggcaagccctccacaatagcaacagtctgtccctcctttccagaatgctgctggtcaaagcaggccatatgttcctnnctcaatgctgcagcagtaacaacaacaaagacaacaagcaactg

SEQ ID NO: 224703 - DNA, 403 bp, Glycine max
  unsure (1)..(403): unsure at all n locations
tctcaagcaagcttccatcaccctcagagagaccttgcacactgtgacccttaagctagatgaactcattaccaaactcactacccctaaataacctggccactcaccatggtcctctaccgtcattccaccacttgtttcaccttcctcttcttattgcatgaagcttgaagttccaaggtttgatggtacaaaccctttgggttggatattcaagataaatcagttttttgaatatcattcaaccccggaccatgagcgtctaactatagcttctccaagaggagaaggttctcgatagtcgtcgttctttccgcgacaaacctactccaattccaccttccaccaccttctcngtctctttaccttcttccgcaacctccttctctcctttgtacctaca

SEQ ID NO: 224704 - DNA, 419 bp, Glycine max
  unsure (1)..(419): unsure at all n locations
agcttaggaacccaaactttgtagcttcaatgcattaagacatactcatggctaggaatccaaattntggttttagaattagaaaagcatgaaaattaggacttgcttgtgagagtttttgctcgaatttgggctgccccatgtttgatactttgcacctaagtaatatgaaaaacaccttgcaatagtatatangtaaataaaaggggcatgaaactctttgcaaatggtgaatgaatattgaggtcgcttcctaaatgaatgtatgatagcacggaattcccttttgaatgcaagtgtgtgcataatgtaaatagcttgccaatataaataaatgtgagtgaaacaataaaaatttgtatgatatatatttcacatatatgtaggtggtttggaatagcaaatgtttacgatataaa

SEQ ID NO: 224705 - DNA, 377 bp, Glycine max
tgaaattaaacatggaagcacaaggcagagagaaacagccactacttttcactgggatgtccggttcaggggcataatatatcaggatgcccgaaattaaacatggaagaataaggcaagttcaaagggccataacttttgactcggaagtccgattcaggcgcatgatatatcgagatgctcgaaattaaacatggaagcaagagaaaaattcaaatggccacaacttttgactcggatatccgatccaggccaataatatatcgagactctcgaaattgaacaacggaagctctctgctaactcatatggtcataacttattactcacatgtctgattcacgcgcataatatatccacatgcttaaaattaaaca

SEQ ID NO: 224706 - DNA, 448 bp, Glycine max
  unsure (1)..(448): unsure at all n locations
caagcttctttggaatcttcttatggaagcttctcaaggaggttatcttagttatgagaggggtgtgtgtagttaagctctagcttctcaaagaagttttctcaaagaagcttctcaaggaagttttctcaagaaagcttctcaaggaagctacctagtctataaatagaagcatgtgtaacacttgttgtaactttgacgaatgagagtcttgtgagacacaactcanagttcaacttctctatctttttcttccttcaatttcgggctcccccctctctctntctctccctctttcttttcctccattgaagaatcctctccaaggttcttatccaaggctcatcttggttgtgaagctcctccttccatggctnattccttaatggatggncctnctctcactcttctctttgtctccgctgcatctcatggggaaaataccatt

SEQ ID NO: 224707 - DNA, 350 bp, Glycine max
  unsure (1)..(350): unsure at all n locations
ctacatcanatgccactctactccaaattcatgaaggatatgttatctttgaaacatccgtatattcaccacgaaaacattgtagtggaaggaaattgtatgttgtgattcaaaagatccttccacccaagcataaagaccctgggagtgtaactatttcttgttcaattggagaagtcactgtgggaaagaccaatccaacaagggcctaacatctttcagaggactactaagctagaggagactttgactcactttatgcacgtaacaatgtccaatcataaaagaactgagtccacacttaagaaccttgaagtccatgtgggacaactagccaaccacatagctga

SEQ ID NO: 224708 - DNA, 423 bp, Glycine max
  unsure (1)..(423): unsure at all n locations
agcttcaccatcattacgtatatggctgaatgtatttttctctaagtagnaattggtatatgattccaaccaccattctttatttcttcttttagttacataggaggtgcgagtacctgagtaggggaggggataaccggtctggtggaggatcagacctccaacgtcatcattacacccaaatcttcaagatttagggccagtgtcaattgagctattacatgcgtttctaatgtcattctgatcttgggctcttcctgtttttattgcaaaatcttgttatctagaacattatataatttgcccaattctgcagtataatgcgattggatattcgatagagttgatgagattcataatcctatgataaaaatcttgctaagattcatccatacacaggaacatgtaactggcgcgttatgc

SEQ ID NO: 224709 - DNA, 321 bp, Glycine max
tctaaatatgggaaaatcaaagaaggagcgacgcgatagtttattcttctaattcaccaagagttcttatttgatagaaacaaatatttcatatctatcttataaaacaaattaaatctataattacatctaatgaagtcttacaaaaatatatacacgcgcgaattacgcttgataagaaatttatttaccttatatcgtacatttatccctctctgtcaccttaaatttgtgatgccctaacgctgtttctcgtagattaagagaacactctataaaacatatgagctgtaatactctatatttcgcacgtacatcaaa

SEQ ID NO: 224710 - DNA, 414 bp, Glycine max
  unsure (1)..(414): unsure at all n locations
agcttaaagaataaacgacagtcccgctgaattaattatatgtcaagnnataattcctgctgctaaagtagttgtactcacttggaaccaactctcatgtcttgtaagtatgaacgcttggacaaatttataacggtcaagcctcaactaatgccacagtctgtgcgatccgtgggcactaaagtggcaatggatggcataattcttggacctatacatttgtatgtcttctctacttacatgggattatgtgctggcaataatcttcctcaagtgaacgaagacttgaagaggaatatcgtccaccctgatttataacgggcgcgtggacaatgtcacgttctattattgtatgtcctgagaaaaccacttcttatgtaactttacttgctgacgtgctttctgcatggttga

SEQ ID NO: 224711 - DNA, 376 bp, Glycine max
gcatgtcagcttgcagctgagctctgatgactttggtttaaccttggaattcttgcttcattgaatcccatatattatttgccgtgctcctctggaggattgtttcaacgacttcacgatctattgcctggaaaaggtaattctttacctttacgttcttcaacttctgctcctcgatcaatctgcattgtgcctctggaagatttaatcctcttgacacctttatatacgagttatcatgatagcccgctattctttggagcggagaaaattctccatcaacattacccaatgatcataatgaccattataccttggaattgcacgctgacgaaactgctactcccaccttctgccattctttctcaactcgtct

SEQ ID NO: 224712 - DNA, 427 bp, Glycine max
  unsure (1)..(427): unsure at all n locations
ctgaacaatatactnggcctagaggagaggtcgttggtcttggccgccacgctcaacaaagtactttcgacacctactgtacgtggatttcaccaacgctgctatgggaatgttgcgacaatcctctaaaaccttattgatacattctgagaggatcgtagtcatgaggccataacgatggccttctctatcgcaagccgtcgnccatttntcctttgagatgcgatcaaaccatgttgctatggctggactcagttcacgaaaatattctatattatgatcaaaaatgtgctcgcatggactgcatgctgcataaaaataattatgaataacaattttccgtatacatgaaagtaaaataaacgtgaccatcaaatatgaaactctactcaactccttcacatttctttttgtgtggcattattga

SEQ ID NO: 224713 - DNA, 466 bp, Glycine max
  unsure (1)..(466): unsure at all n locations
agcttctagcacactccagatattgtctcatagatcccaacggttaaatcatggtaaagtgtcttgtgaagttgaaaaccaaatttcgagaggatccaacacttaacgaaggctgggcagtgtttctaccgaggcagcttcatgtagttntctgtagaagcttcattaagaggcttcctacagaagcttcattaagaggcttctagcacactccagacatcttctcaaagatcccaacggtcagatcatggaagcgtgttttgtgaagttgcagaccacatttcgagacgatccaaccgttaatgaatgccacgaagcgtctttaccgacgcagcttcatgtagctttctctagaagcttcattaagaggcttcctctagaagcttcctcgtggcttctttgagaaagtttctcaagaagcttctttgagaaactacatncttatctattcatccctctattaact

SEQ ID NO: 224714 - DNA, 385 bp, Glycine max
  unsure (1)..(385): unsure at all n locations
tacggacctataaaactcagctttgtttggtgtgctagaaagtagcaacgtatgattgctanggttttccgtgcaagctcaaccgagggttcgttccgaccgacactggcatgttgttcttctcatttaggaggataagaaaacgttcgcccaccccggcaaaaacaaaaaaaaacattattcacggaaattaatcgaaaaaatggttgctgacgtcaccatctagagatgaccgatcgagctctatcaaagaagaatcaccggatgacgccgatcaaacattttctaatcgacatctttcaaaattcattcagggattgaaaagaaaactcaatagccgacatctgtcgtgaaatggccatgactgatattcttcagccgacat

SEQ ID NO: 224715 - DNA, 392 bp, Glycine max
  unsure (1)..(392): unsure at all n locations
agcttgaaggcacactggatgcattgtttattttnggaacccagctggccttgaatcagagatctgtaccattcgcaagggtttgtggcttgtgctcctctactgaccaccatacagacctttgcccttccatgcannaanctgcagcaattgagcagcctgaagcttatgctgtaaatatttacaatagacctcctcaacctcaacagcaaaatcaaccacagcagaacaattatgacctctgcagcaacagatataaccctggatggaggaatcactctaacctcagatggtccagccctcaccacaacaacagcaacctgctccttcgatacaaaatgcgtgctggccaagcagaccatacattcctccaccaatccaacaacagctac

SEQ ID NO: 224716 - DNA, 465 bp, Glycine max
  unsure (1)..(465): unsure at all n locations
tatatgagttagcaactcctatatgacatgacacaactctttcatctcactcagcctttgacttggcacctgattcagcttcattcattacatgcaaataactaaaatcgttagtcgcggaatacactgaattggcccacttgttcatgcaatgattagtgttaattgattaatgttccttattactgtaccaatcctttattgctccactttcccatcgtctcgtttagattagtacatggtgtgattagaatatgacgatccttcactacccttaaatggcatatgctagtactatgctagatgtatgtggcatttactcatcctctaatctatcatctatctacacaaccatacgctgacaatttgagtatggaaccatatatagttcaaagntaactctatactaattactaaatctatttgactaagtgaaaaagacacattattgtatttattacaatc

SEQ ID NO: 224717 - DNA, 435 bp, Glycine max
  unsure (1)..(435): unsure at all n locations
agctntgtgtaatcgattacacttatttggttatcgattaccagtgactgtttatgaataaatcaaaagatgtaactcttcaaaaagtttttgactttttcaaattggttttaagtttttctaaaagttataactctgctaaatggtcttcttgaccagacatgaagagtctataaaagcaaggctttgttttgcattttcaattaatccattctttcaatcttgaatacttttccaatcaatctcttacaatcctttacaagccttgaaattctttgaacttcttcttcttctttgtaccaaaagctttatgaagttttctagttttccaaaccttgaaaacttgtgctattcattntttcattctcttctccctttgccaaaaagaattcgcgaaggactaactgcctgaattcttnttgtgtctctcttctc

SEQ ID NO: 224718 - DNA, 460 bp, Glycine max
tcagcctgatagctaggcaacaacttatccttggctatatgtgacctattgccgccaagggcaattccttacggccataactgaggtccatgaagctaagcaagattcattgcggcaatgtgagccctacgcatgtccttatcagctaagcgcatgctcctctgtactttacatgcatcattttagctaagccagccagatcctagcttagcgagagttacaccttttcggatctgcaaacctcgctaagcggtgtgatcctcgtgctaagccaagcctgtgtaaaaataaaaaaaaaattgtataataatattttgaatgtgaagtttggctaatcgcggtgtccgctaagcgacgggtcttggaaaaccaaacgtcttgctcgcttagcaaggtatttcgctaagcgaggatgtcaaacatagcttggttaagtgtaacatcagtacattgacaaatg

SEQ ID NO: 224719 - DNA, 466 bp, Glycine max
  unsure (1)..(466): unsure at all n locations
gataatattatagcgaggctacatactnttttatactacaacatatcaattctagtttcatccgacaaatataatttaaattttcttgcatgcgtaattacttagtttacattcaaaaagttaattaaatagggttccaatgtaactcccttatttttatctttatggctagagaaatatcttacttgagccatatatacccgatttattaattacttcacagaaaatttctctctatttccattgtcaatgatgaaaactaatacaagaaggtcatctaataatggaacaaaactaatgctttctagcgtagttcattattctgcatgtggacaatttacatgaatttcaaattcccatatctctgataggtatagggatggaatcactgtttccgagtttacagagagagagaatgtactgtgtgtacaaactgttacagtactgagattatggcattatttgt

SEQ ID NO: 224720 - DNA, 463 bp, Glycine max
  unsure (1)..(463): unsure at all n locations
agcttaggtgattgcgttctaatgatcgtgtgtggcgtttaagagaaggaaagagtcagttaaatgacttgaattataaactcatatgtttattatgtatgcattattttattattattcaatctcaacatgagagaaatagtagaggggagggctgcacaaatattctcaaggaaagggagtctctacacaaaggcccctaagttcccttgaactgtcagtatccgtttttatgtgtaaaacttgaaatgattctaacttttaagtcaaataaattcattctaagttgaaaccttacgatctgcttaatttatgtttataaataattattacgaattaattcttttctaactaatctcaaattatgataagtaatttggcatttttcagtcagaanaatattntaatttcattgcaactctaacaattcccaactgttacatanatcatattaatacattta

SEQ ID NO: 224721 - DNA, 388 bp, Glycine max
  unsure (1)..(388): unsure at all n locations
ctcagcttcaaaggctctntatggacttaaacaagcacctcactcttggtntgatcatttcagttcttttcttcttaaatatggtttcttttgtagtaaggttaatccatccttatttatttggcactcgaatattggatcactaattcttcttctttatgtagatgatatactcctcataggttccactaccactctagtttccgacttcattaaacttctataatccgaatttaccatgaaggacttgggccctctccatcactctcttggcattgaaatactccagaanactgatgaccttcatctatcctaatcacattatacccttaccatccttgaacgagctaacaaggttgatttgtaaccaaagagcacaccacttgga

SEQ ID NO: 224722 - DNA, 360 bp, Glycine max
agcttgccaacaagaatagaatactatgagatgtttcctgatagtgcaatagatgatgatggtgaattggttcatctagcaccgatgggagaagcaaaacctgtcaccttccaataagcaattaaaaaagaagtatggttacaaactatgagagaagagttgaaagccatagagaggaacaagacatgggagctggctagtctaccaaatggcaaaacaactataaaggtcaaatgggttttcaagaacaagctcaaaccagatgggagtattgctaaacacaaagcccagctagtggcaaagggctttatgcagaaagaaggctatgattacatagaagtctctgcaccaatggctagg

SEQ ID NO: 224723 - DNA, 420 bp, Glycine max
  unsure (1)..(420): unsure at all n locations
tccaagaatcaagatcaagagtgaagactcaagattttataatcaagagaagaattaatcaggataagtatgaaaaagtttttttcaaaaactgagtagcacatggatttttctcaaaacctatttaccaaagagtttttactctctggtaattgattaccagattattgtaatcgattaccagtagcaaaatggttttcaaaaagctttcaactgaatttacaacgttccaattgatttcaaaaagatgtaatcgattacaatgttttggtaatcgattacaagtgtgcctgaacgttgaaattcaaattcaaatgtgaagagtcacattctttcacaaaaagctttgtgtaatcgattacactagattggtaatcgattaccagtgatagtttctgaacaaatcanaagatgtaactc

SEQ ID NO: 224724 - DNA, 434 bp, Glycine max
  unsure (1)..(434): unsure at all n locations
agctngaggtgttgctaagcgattccgtgattatttgcaaggaggtggaagaagagagggagatgatggaaatggctgagctatggcgcgaacaacgcgtgcaaatgaagctagctgatgtacagtttttacttgaagacaaatataatcagatggtccagttgattgcttttctccaagtgtttntgagatcaaggggtgctgaactatacaccactgaactagaggacgcagagttgatcaaacaggtagttgaatcagtaaatatcaaacgcattctggagctttcatatgaattttcacagtcagatgacacagtttccacttttgaggagctaagaacagaatacacagatgaggggaagattaaaccatgttattctcataccacacttactagccctatgtccacaatctacattgtaaatcttgat

SEQ ID NO: 224725 - DNA, 365 bp, Glycine max
  unsure (1)..(365): unsure at all n locations
tatcctctttggccttgcaagcgaaagagctgatcacaatctttatgcttacactgcagcaagatgtttgtacctggtaattggttcagttagctttttatatcagaaaatattaattgttaattctgttagtttttattaagagggaatcaaactcgagcctttttttgtctttacttcctttttaacctctcaatcaattttatattccgaattggtttggttacttaattaatactttgtgggtcttcctcttccccactatgtatttcattgcatgtatagtgtatacaacttagcaattacgtaacgtaatatatatgtactgtggtgtgttatactgcgatgtangatttggagaagca

SEQ ID NO: 224726 - DNA, 453 bp, Glycine max
  unsure (1)..(453): unsure at all n locations
agcttgaatgtgagattcattgatagttcctaatgttatcccttcaacccctaaaaaaggaccaattagtttggcaacactccgcttctagtgatctaactctcaaggatgccagcttgttcttcatgtctccccctcctccgaatctttgctttaaacaaatttggaaccccaacattcctccatcgacctcctttcttttttggagaactcttcataganagctcatgactgatgacactctttgggcgaagggctatcacattgtctccatgtgttccttttgtggtgatagttatgaatcctcataccatcttattcttcactgcccatttgctctttccctgtggaactagctcggtgcattgctggattgtgacatcaacaccaactcagctgaagcattttgtcttccaacaaatcctcttggtccaatagctaactgacacttct

SEQ ID NO: 224727 - DNA, 451 bp, Glycine max
  unsure (1)..(451): unsure at all n locations
actcagcttctcagggaaattctcacggaaagtacgctaggctataaatttatatcatgtgtaacacatgctgtaactttgatgaatgagagtcttgtgagacacacttcanagttccacttctctccctcctttttctccttcaatttcatgcccgccccctctctctcattcttttcctccattgaagcttactctctaagcttcttatccaaggcactctcttgatggtgaagctcctccttccatggcttattccttagtggatgacgcctcctctcacttcttctcctttatcttctactgcatatccatgggtgaaaaataccattgaaagaccttattgaagctcacagatccagccttcatagaagcttctcaagcaagctctcatcatgttatagagaagnaacaactnttacacatacataagataacacctcttttattt

SEQ ID NO: 224728 - DNA, 455 bp, Glycine max
  unsure (1)..(455): unsure at all n locations
agctngtangattatggtgtacccatcacatgtggtctaggtggcgcgcgagcgatggtgcacaacaagttttccacattcacaaatcgcgcataaacccaccatcccctgttgcccacctccaactgagctcacgtactcccacgtagcccatatcctcgtttctctcaacactgggtccccatcaaccctcccaagcttccccaacatccaagtaattcaacattcaaacaacacaaactatcacagccaataaaacagggcagaggcagataactctgcccaaaacaccaaccaaaatcacagcttttctcacttaaagaccncacgaacaattccttcgttccagttcgttaaccgttggatcgactctaatatcttaatggaagtctctagtacataagcgctacatttgaccgttggatctactagcaaacatccagactcattttgac

SEQ ID NO: 224729 - DNA, 473 bp, Glycine max
  unsure (1)..(473): unsure at all n locations
actcagcttgcccaaaaaggctntgaagagaagatggcaattttttactaagtaaaaaggatcatctttaaggtccaacgctttagaatgatcacctcttaagcaaaaaaagaatcacttgataagaaagaactacgtaggtctgagtttctcattgaggatacgtacgagcaaaagccccgcttttgtcgaccaccccaagagatcgttaatggtccaacgccttaacgtttctctcctttcaaaaacaaaagatcgttaatggtccaatgccttaacgtttctctcctttcaaaaacaagagatcgttaatggtccaaagccttaacgtttctcccctttcaaaaatcaaaagaccgtttaatggttcaacaccttanatgaccttctgttcaataataacatattctgcacaaaacgacacaaacgacttaaccaaacactttgttccgaaagaactacgtacgtctgat

SEQ ID NO: 224730 - DNA, 464 bp, Glycine max
gtcccggaccttaagcaccgcggctgcagcttctctcgaaagaagattcaaagctatcatataaaatgaggacagtgctttcgcgcttgatccattccacgccttccatttccaggatcaagtatgctttctgtcttttcacttttattccctttttcctttttaaccgctatgttccgttagcgtgtcgtttttcgttctatgctcgattcgacgtgtgcttgttgttaaatatattgattttatattcatatacacatattatgactttttatatatatattttttgatttttggtaactacagtgttgcgcataatatgctatgtggaggatagccggtgcaaactaagtgtgtcatgagtttaatacttaattatttatttatggaactcactgtgtcaagttcagtacaaatgtgaattgaattctatggtgattgtcttcatgattcgtagaatactc

SEQ ID NO: 224731 - DNA, 477 bp, Glycine max
  unsure (1)..(477): unsure at all n locations
gcgccgcagcagcatcactcacatcacttgagaaagggcggcgaatattattggcttcgtcaggattntaaaaaactccgtgttgtgtccccatagacatccatttttttggggaaaaagaacaacaacatcataaaatattctactagtatatggttgtttaattaactaacacctgagatgagactttgttttttttttttacataggaaagaaaactctctccaccttgttaacataacataacattgttgcctcacaagacaggaaataaacacaaccacagttaagaaagccaaaaatttctccatcattttgcacatacctctctgggattctcttttttattaaagatagttcctttgtacctcacatatttataaacacatgctgccctctccaacctncatatgctaactggctttctatatacaatagaagagtttcttccaattccaaactgaattgaatttctgt

SEQ ID NO: 224732 - DNA, 404 bp, Glycine max
  unsure (1)..(404): unsure at all n locations
agctntatgtgatactagtgcgttgaggacgacatctcttactacctaagaacacataaattgaaattgaaaagtaagacaagaatattttcttcaaaatggatgcgtagatatcttgcaaataataatatatcataatagtacaattacaattatagtaaaaagtaaacacgtatgatgacaaaatatttagcatacaacacaagattacaagttttaacacgcatggtaaattcaacacctcaaataacattaacaatttaagaaccaaatgttaagcatgatctctctctctacattgaagaatgcaacttaaggacaanggttactgcttaaatgcatcgatataatatacaaaggtgtaacatcaaagaatgttgtcagtgcacactactatgaatact

SEQ ID NO: 224733 - DNA, 417 bp, Glycine max
  unsure (1)..(417): unsure at all n locations
aatgcctggattacctgngaaagagtatgctcacccaaagaaaaaggtggccttgggattaaaaatctctacctttttaatataagcctcttatctaaatggaggtggagatttctccaataccactttgtagtttggtcccctcttattagattcagatatggttgttctttctctgatctatcccatctggcccacaaaattaggttgcttctaacatgattcgcaatgtcggcaatggctctcaaatgaaattctggtatgttctttggtttggtgactcatgcttctcacacttgttctctcgatagtctcagtgagtgacaaggcttccttgtacagtaactcttctaagtggagctggcagtggcagcgtaacttatttgctttgaggaagactactacatcgatctgatt

SEQ ID NO: 224734 - DNA, 340 bp, Glycine max
  unsure (1)..(340): unsure at all n locations
agataaggtgaccccattncaccccatctattttgtcatcgtgaggagcaatgttcttatcacaggcatattaaacttggttcacaagggcaaactaacccccatggttggtcccacctccttctcacatcctctatgcaaatgacatcattattctctgcataagcactaaaacgaatgtccacactattctgaatctgatgaatatgtatgcctatccccctggtcataatgttaaccatagaaagcctacttaatattctggtgggccttttcataatcgaattatgaaacctccttcttacttgcatttgatcatggtctagtaacgcttatctac

SEQ ID NO: 224735 - DNA, 335 bp, Glycine max
  unsure (1)..(335): unsure at all n locations
ngtagagatgccaaaggcaactagagagagacatactattatcttacactcggcttgagatccaatttgctaaatactgacctcgctcaacactttcacttgggcacaaaaatgctacattaaacctagaaacaaanaaagcatatatcggtttggagcgaagttacattttctctacaccaaaatagaataacatttctcgttagaatcattgagttctgggttacgaattcaactcatttcaaccttctctacttataaatacaacaaatatcaacaattgtaggtatgtacgtaattaccatgcacgagcagcctaataaaaaaatattata

SEQ ID NO: 224736 - DNA, 474 bp, Glycine max
agctggggacaagtaacaagtttagtctaatgctattaaaatataaaaaggtcaggtctaagtataactaaacacaactattatggtatgatttaattaatttgtgtgcatatgaatatataagtaaaacaatatctttctttatatatttttatatttaatatacatatattatcattgcattaatatagtatacagaataaatgtaataattatatttgttatataaaaactattttacataacattaaatattgcatttttttcaatatagtatattggttaaaattaataaataatgataatacatacatacatatatatatatatatatcttaaattcttaaaaaaatatttgtataatatacatatattatcattacatttatggactttcatcaatatactatactatataaatgccattataaatgctatataaaacttaatcgtatgtatatatttaaacacata

SEQ ID NO: 224737 - DNA, 469 bp, Glycine max
  unsure (1)..(469): unsure at all n locations
tctagccaaatggacttaccttgaatgaatgcctttgattttccttttgagccttggttccctttccttggtntgaagctcactacaagccttaagtgaaaaaccatgatattaccatatccttaaggaattttggagctttggaattgttttgggaataagtgtggggggtttttgtttcattggacaacttgttttgttggctatgcttcatgatgtattttgggccatacttgatgtacattgtatattggttaaatgttggacatgctgaatgaaatgttgtttctcaaaggctaaagagtaaaaaaaaaaaataaaaaaaattctaaaaanaaagaacaagaaaagccataaagttgagtgaatacgatcttaaatggcataagaatgatgaaactctctggtctactcttcatgcggaaattctatcttacttcttttatattttcttaatatgcactattcc

SEQ ID NO: 224738 - DNA, 449 bp, Glycine max
  unsure (1)..(449): unsure at all n locations
agcttgaaccataacccagtgaaagtgtgattttagattngaagtgaacgactagcattgagcaatagtctttgtatcagtctctgaattctacaatgaaaagcataagtttgaaagtaatgaaggccattattttatttntaaactacttgaccagaaagcttaccttgaattataattgtatcctttgcaccctttgggagctgaattaaattctcaaattgaaccctgagcttgaatgaatatctccatctaccttgcttaggtgctaggggagcatatggttcaaggcaatttgccccacatttgggggagttagttgggatgttaagtgaaaaagtaagacacatcaacacacacaacacataagttacgtgttaaaacaaagagtaaaatgaacataaagagagtgtgtgttgttgtaataaggccaaatgcaaggcaagtga

SEQ ID NO: 224739 - DNA, 466 bp, Glycine max
  unsure (1)..(466): unsure at all n locations
ggacctatgaaactcagctggatttcttggtccgggacctggctttctttgtgtacctaaacccaatctccgggttggaaaacaacctttntgcgccccttgtttgcttgtttagcatagctctcattcctcttttcaatttgggccttgactttttcatggagctttttcacatagtccgctttggcttgtccttccttatgcttaaaaactgaaatattaggcattggcaacaaatcaagaggagttagtggattgaaaccataaacaacctcaaaaggagaacaactagtggtgctatgcacagtcctattataagcaaattcaatgtgaggtaagcaaacttcccaatntttaagattcttttttcaaaacggtccttagcaaggtacccaaagtcctattcacaacctctgtttgtcattcgttgagggtganagtagtataaatagtagctagtaccaac

SEQ ID NO: 224740 - DNA, 396 bp, Glycine max
  unsure (1)..(396): unsure at all n locations
agctttccaacatcataaagagatataatggttatgttgagaataagagttctgggatgaagaggaaagaacttggttataggattctagaactagatgtctttatcccattctacaacatgcagtaatgtatgattggatgggtccaaccttgcttgtcgagaaacttatagtgatttgtctgtaacaccctaaatttgggattacttatagtagagattntaaacttgttttaatttctcaaacaatgtactttcattctcaaagactataaattctaacaatgtgaatttgacttttacattacattttacaacttgcactaattagttttgaaagtgacaccatgtattaaataaaacttatcctctacaatcttggacagacacacatagt

SEQ ID NO: 224741 - DNA, 442 bp, Glycine max
  unsure (1)..(442): unsure at all n locations
tgttgaaattgccatgtttgggtgaggagacatatctctttctgttttanggttttgtgatgatgtttgtgatgtttgtatgctaaagttgctgaaggaaaactgttacagatgaaatatacagctaacctatggttggaaagtgagaatgtggtgttatgagtggaaaaagagtgacgctttgagagtgggaaggctaagtctgaattctgtggtaaatggaggttaaagcgagttaatactatcttgaaatgtcatttaagaattgggagaaagcttggactgcgctatagagaacaacaaatgatccaagtgaataaagagccatttctatggcaaattagtgtgttgaagagtcatactttgatttcgtgacattctaggtcgtaatccagtttgaacaagactaaatacatgttatcgactagtgtgaggtgagagt

SEQ ID NO: 224742 - DNA, 419 bp, Glycine max
  unsure (1)..(419): unsure at all n locations
agctngtatagaggatatactcatatattatatattcttttatgacaactgtttttattctattttttatttatttggctaaataataagcttacaacctaaatgtagcctttctgtaggtaacgctgcttacagttaccctcccctaacccactaggtcacccattttatggggaagtcatgnttcaccattctaatgttangacatgtcacaagattgactgagtactaacgacttataaagacttcctaatgaaggaccaccagtaggatttgagcccagacctttcttgttgatgctgtgtgatcttagcagttgaccaacctccttggcaaacagattactttgacatgacagagagtggtggtgaaatgggtgtggtaactgggaatctcttctcatgtangcaaaggggaaa

SEQ ID NO: 224743 - DNA, 473 bp, Glycine max
  unsure (1)..(473): unsure at all n locations
ctcagcttctcgggccttctgcaaagaaacatttggtatttttgtttacaagaaatataacaatcattacaaacaagggccaaacaacacttctcatggcacgagtgtcaacatgcactttataaaataatcatattggggtcgtgctattttatgacacatacgtatttgcacacataaaaattttgtgtgaagcattttacgacacctatccatgtacatattttttgacaaaccttttcatgctacatcctatatatatacacacattttttggaaggcttcttttgttacctactcacaaatacacatattttgagaaacactnttacgctacccatccaacactttgtaaggcacttcatgctatatatattcatattatgcaaggcattttcatgctatatatatntcatatttgcaaggcagtttattaacattntgcanggcattcatgcatatatatcacatat

SEQ ID NO: 224744 - DNA, 236 bp, Glycine max
aacagttcgtttaagattatggtaccctaagaattctgtatgccacctaatagaatactcacatttagattctactggatcaaaagctgatatgaaaagtattactggtacatgtcagttcataaggtctgcacttagtagttggaatccatcaaccaaaatactgtagcattatccacaacagaagcagaatatattcctgctggtagctgctgcgcacacagtctggggatgat

SEQ ID NO: 224745 - DNA, 441 bp, Glycine max
  unsure (1)..(441): unsure at all n locations
nttgaatcgccacgtcatgcaggagctgagcatangcgttttgcangaaagnggagtaaatcgcgacaatgggtttgtacccaccaatcgccagacccgcagcaaagagtcaccgcgtgttgctcggcaattgctcacgtcgaagtagcgatccgggaatttacgtgaaaactcgaccatgccggaaccttcacgcatcgccggagtaatcgccatcagcttgttgtctttcgctgccgtttcgcacaaccagtcgccaaagattcttgaatagctcggcaaaccgccgctactttttggcaaacaaccgctggagggatcactattatgcacggcgtggaaagtgatcgggtctttatctgctcggtcataaccacgaccttttttggtcatgatatgcacgaactgcgggccttcaggtcgcgcatgttctttagccgg

SEQ ID NO: 224746 - DNA, 482 bp, Glycine max
  unsure (1)..(482): unsure at all n locations
agcttacanatctgttntaaatccaagcccttatattaaataaaatcaaatctagataagataagatctagttgaaataatatctagatgagatcaagtctaaataatatctagataagataaagtatagataagataaaattttgtagaataaaatagtctgccctcttcaagtccaagcccaattctagattcaagtccaatgtttcattaattcctgaaattagattaaaaacatcaaattagttgaatgggcccaaataataaaactgcctaattaatttgacaattaagattaatcagtacttaaaatggtgcacaaagggttaagaaataagagaaaataatggcacatcagggacccattanggccagtacccattccccatccctaaatataataaatctatcgatctanaacaggaaannaaaacacttttattattatagtattacaacaacaacaacaacaacaacaacaa

SEQ ID NO: 224747 - DNA, 377 bp, Glycine max
  unsure (1)..(377): unsure at all n locations
tactatattagcgtaaaaatttttggttagaaacattctttgtcatgtttntgtctgataagcttattacatgttgatgattataacacatatatatgtatatgaatcttaaaataaattaggaattaatagttcaaataataaaattaaattgaaggaaattattatattaagattcaatgataaatacttttaatttattttttagtttaattatttattaactctntgtaattaaaaataatatagttcgatttaatatatacatgttgtgtgccatgtaaatattaatactatgtcatgtgtatataattcatgagatgtgataacatgttgctttgggattataacattatgactaagaatgggtgtatgtg

SEQ ID NO: 224748 - DNA, 454 bp, Glycine max
  unsure (1)..(454): unsure at all n locations
agcttctcanagaataattgaactaaagtgtgtttttcctaaacggtgacacaaagagccaaaaagtcaaaagataaacttcatacaaaataacaatatactcttatttattaaaatacagtccataattgggttttttttttctctaagatgtacataataggttaacctttgaatcaatttctcctaaaataataacacctttcatttttatttccatctttaattcttttaatttattaattgcaaatttaatctttttaaatcttacatgtatattcttatcattttaatttattaatttttatatgaatctttaaaaaatggggtagttagatgtagaggatcattgtttacgataaccaggacataatgcttgcataggatgattaaagaagtctatatcattcggtgaaacatgaagcgtaataatgtgagttattataagctcttg

SEQ ID NO: 224749 - DNA, 240 bp, Glycine max
agattcacgtatgacattcagaagaatcatgattccagagaagatgatttcacaagggaagtattgaaaataattttttaaacatcaaacatagcacagttttgttttacaagacaagtttttctcaaaattctctaagttaccagagtttttactctctggtaatcgattatcagtttcctgtaatcgattaacagtgacaaagtttgatttcaaaagctgttaactgaatttgcaacg

SEQ ID NO: 224750 - DNA, 426 bp, Glycine max
  unsure (1)..(426): unsure at all n locations
gatcttaagtcactgcagctgcagcttatatgaactacgcacttctcattgtttgttttatccaggaacagagcaagtacaagctgtcagctttgacttgtgatattaaaaccttcaccgttttagaaacttcaacgaaacgaaacctcaagctacgtttcttaaacatggtttgttaaatgaccctaataaagggtttggttgaagacgaatccttgtgtatgatccctcgaacgtgaaccaatttcatggtgattcctgtccacattagtattaatcaataacctatagagatttatggaaaaaaaattgatgatcaaatattatcttactataattttatacaaatnttcatgaaccctctgatattaaatatattggaaaatactcttaagaaataattattaaaacaactactttcatgat

SEQ ID NO: 224751 - DNA, 459 bp, Glycine max
tgtagctgaagttcttgagaggagcagaagagggttcggttatagcaaaagacacattctcctgctctcgtttactggaagatcaaaggtatttcatctctctcttattttgattaaatattgtaatctttatttttatgtgtttacaacgtacattacattttcatgatagtatttttatgttacgacctctactagttagctaacaagtgtaattcattataattttttgtaattcatttcttttgctggctccattggtttttattctaaatacctattcttattttataacatatatggtagtagttgtaacataaaaattggtattgaatcttaagttatgcttcttcctccaccaattattcttcttagttacaacaattattatagttcttcttcttaatctatattataatcttgtgggggacttacttcttctaatacaaatatactatg

SEQ ID NO: 224752 - DNA, 377 bp, Glycine max
  unsure (1)..(377): unsure at all n locations
gatccttaagcaccgcggctgcaagctgatagttccncgatttatggtcattttggagtaaatttgattaataaatcttgttttatggttcatgttgtctctagaacatttccattgaatttaatgatgaaatctgtgcattttcaggtgaaaaagaggctaagttttgaattgcaaaatgtagcagttgggctaagctcaacagttgggctaagcacatattcaccactaagcatagctttagcgcgcttagcacaaaggagaatntggctgagcgtcagcatcaaagtcgcacgctaattgtagtaggtgccttcagccaggctaagcttgagactggtgctaagcccaatttcacttactcgcgctaagcgcga

SEQ ID NO: 224753 - DNA, 423 bp, Glycine max
  unsure (1)..(423): unsure at all n locations
tgccacctagttcgcccaagcgagctaaggagcttcctttataaggcactgccttctggaggaacttcctggaaggcccaagtgggcctggttgctatttgcacacccctgtttactaaatacaccccttgcctttttttgctgattctttttccgtaacattacggaactttacgaattccgtaacgatacttgttttcctttcgtaatgttacgaaaccttatggattacgtaatcatccctttcttggctttcagaatgttacggaacctcacagattgtgtaacaatgcttccttttgatttccggcatgttacgaaacttcacggatcgtgcaacaatgctctcttttgacttctggcacgttatggaacttcacgtatngtgcaacaatgggtgccaagtaccttgaagcggtcaag

SEQ ID NO: 224754 - DNA, 423 bp, Glycine max
  unsure (1)..(423): unsure at all n locations
agcttgaccaatcccgacccaacccgggcatattctttcagtgagaacctgtgatgtacctaagcaggcgagctcctggcagtcaacagataaaaggataacaagaccacaaagcaaggaggcttgtggtggctggccagctgtgaattttgtgtaatatgtggattgtggcctctggtaatcgattaccaagggtgggttatcgattacaaggcttataattgaggacaggaggctaaaatggtctctggtaatcgattaccaatgggtgtaatcgattaccaggcttgaacacgaagtcatgaaacctagggagcctctggtaatcgaatacccagcctgtgtaatcgattacacagaggaatgggtcacttggaatcgattacaaggcatgtgtaatggatacacaangtatattgcata

SEQ ID NO: 224755 - DNA, 417 bp, Glycine max
  unsure (1)..(417): unsure at all n locations
actaagctctcgggttcttgaaagctatataagaggcttcttttatatatctagaccttatctatccacccctctattaactaaattaacttccttaaaaataattacggatgaaaataacgcaaccaataattcaacatcaaacataattactaataatatatagatatatatatcagggtgttacacatcctacccttcgtctcggtacaaagaagataccctngcacaagtatatgttctctaaaatggggctctcggaatgattattttcttgcaaaacatgttatctttagtggaaaaccgtggacgtcggcccgcacacctnttcgaccacagatgtatgcttaggcttcatgtgtctcacttcagttgactgattatgatgctaatagacctangaatctcatctaccct

SEQ ID NO: 224756 - DNA, 462 bp, Glycine max
  unsure (1)..(462): unsure at all n locations
agcttgctaagcgagatctgcagattttatttacattcttcagggtcaaaaacacaattttctcatccccctctctcaaaactccaccaaaccaccctagaaactcctcctccaccacccaggaccatcggtagccaccacaagccactgttgcttgccgccaaaccaccatacggagaggaaattacaatgcacagcggaaattaaaagagtagggaagaacgagacaaacacacaagagtttttatactggttcggaacaacccgtgcctacatacagtccccaagcaacctgtggtcctggagattctttcaaccttgtaaaaatacttttacagcacagatccacaagggtgtaccctctcttgtctccttgacctatggatgtaccctcactagaactgaccacaagagatgtaccctntcttgttctagtcataacccaagaacgtacctctactt

SEQ ID NO: 224757 - DNA, 412 bp, Glycine max
  unsure (1)..(412): unsure at all n locations
ntcttggagaaacttccttgataagctgctttgagaattctttcttgagaagctagagcttagctacacacactcctctaataactaagctcacctccttgagaagcttccttgaaaagattcctaaagaagctagagcttagctacacacacctctctaatagctaagctcacctccttgagatgagaagcttgaacttagctacacaccccctataatagctaagctcacccccatgacaaaatacatganaatacaaaaaaaaagtccctactacaaagactactcgaaatgcctcgaaatacaaggctaaaaccctatactactataatggccaaaatacaaggcctaaacgaaggannaaacctattctaatatttacaaagataagcgggctcatacttagcccat

SEQ ID NO: 224758 - DNA, 424 bp, Glycine max
  unsure (1)..(424): unsure at all n locations
agctnttgaatcctagaagaaccatgatttgttggtatcctaaccccactacaagcctagaaagtccttcggattcattctgtgtgttcattgctgtcataccctaatttcgtccgggaacctttgctcgatgacgtgcgaccattctttggtcctcgtgaggtgcttggcacccatcattaggcaatttgtgaaatttcaggacatgccggaaaaccaaaaaatattgatgcacaatccgtaagtttccgtgacacaccggaaatcaaaaggaagcgtcgctgcataattaagtgaggttccgtaacattccgtaaggggatgattatgtaatccgcaaggttccgtaacaattacggaaagaaaacaagtatccgtacgaaattcgtaagctccgtaacttacganacaaaatcaccaaaac

SEQ ID NO: 224759 - DNA, 457 bp, Glycine max
  unsure (1)..(457): unsure at all n locations
tgtagagtttcatcgaggctaggattatgtgaacctgttattatcatcaagtttgggacttangtttgacgagtcttatgtgcaacgcatgtgttgtgctcttgcatacatatcactcatcatgggtggcatgtactggagacatcgtgccgtgaatcagtaggactaaccaagggcggaccttgggttttgcaagccctttggaggattgactagggaattgtctaaactgggttttgggcgccatgctgttgcatacatgtcactcaccatgggtggcacatactgcagacttagtggcgtgctcttgcgtacatgtcactcgttgtgggtggcatgtactaaagacgtagtggcgtgttcttgcatacatgccacttgttgtgggtggaatctactanagacttaagggtgtgctcttgcgtacatgtcacttgctgtgggtggtgtgtattgg

SEQ ID NO: 224760 - DNA, 138 bp, Glycine max
tctaaatggatatattctctctcttaagcttgcgtatgaagaatgtgcccattggggcattatatgcatgtaccttttcatgctggacaacactctctgttgccagcgtattgaacactactgcaagaaaccatttgc

SEQ ID NO: 224761 - DNA, 459 bp, Glycine max
  unsure (1)..(459): unsure at all n locations
nggaagtaatntgtattgtttgtattatggaacatgtgtaagttcactacttgcatgactatgctagaataagcaccagtgtgatggttgactgcaaatccaattgtcaacttctctggtgttataggatctagtgttcttgctcttggtgctgatctttctaaagctattggagccattagatatgctgcaaataaatttgctatacgtaggataagagaatgttgttaagattagtcttttgttttaaaatgaaatatgaattcattgtgtttattattagtgttcttatctcttgcaacattgcaatcttcttttggactatgtttaagaatacccttatagtaattataaaaaaagaatacctctatagtgatccggattgcaattgttctataactaaatactgctctaacatgatacttctgttgttgagtgttactataaaatataaaatgc

SEQ ID NO: 224762 - DNA, 320 bp, Glycine max
  unsure (1)..(320): unsure at all n locations
agctnggacaaggcagagacatatgatcctatgtgtgttaatgcacaggacctctgtgcccaaaagggttcaaaacttcaaggtggggtctggaccattgggcttctcacattagcttctcaaaatttggaggagttcactcctgtgttttttataattttcaaaggtccagttaagcatgtggttctcttatgctccgatgcaacaaggttagtatataatacaaattgggatgagaacttctaatttctttccattttcacactctttgatttgttcttttggcaattctgaacagttcctctttgaagagcaatatg

SEQ ID NO: 224763 - DNA, 449 bp, Glycine max
  unsure (1)..(449): unsure at all n locations
ttctaatagtctcctgagtntcctgatagatcgagttctccagcaatagattcaactgcaacctcaacaatttcttgctccttgttttttcaagcagccttttcttcagcaaaacacttcatcaaataatttatctcattctgatctgagcgttgttcctggataagttgattgacctgtaggcgagccctctccagctcagtatgcagagctgacatcagagacatactatatgaaggacgatcttcatgaccccacatccggtttataattttaagtagctctctggatgtctgtaaagcattactaacatcttttaaacgtcctttaactccaacagcagatgaagcaggggtctgtgctcgcgatctactttcaatctgcaagacaatcgagatgtaactatcatgaggcatacacatcaagtatttctcttgagaattcacaaa

SEQ ID NO: 224764 - DNA, 244 bp, Glycine max
  unsure (1)..(244): unsure at all n locations
agcnncacttatcatgctaactgaatctgctgtgacaacaaatgcatccgcccaagctagacgccccatttgtgggtttgggtctgaaaattgtgctagtgacatgcattaaccacattctgactgttaaaacaaacgcaacaaatctgattaaataatctactctcaacctggataaatatttaccgtgcccatgccaaatataaactctcggatattcccaaagtctttgactataatactc

SEQ ID NO: 224765 - DNA, 268 bp, Glycine max
  unsure (1)..(268): unsure at all n locations
ccggccttaactacttgtcaacaaagctgaaggttttgtgctctgtcggcctgccttttaagctgccctattgtaggacaaagctatattgcttgttgggatgcttgtgggtaattcactcaattacttgaaacacgttttttttgccatggggtcttagaaactgtaactaaattattgttagctcttgcctccttttcatttgcactctaaatgcaatagnacttgtttatttaacgtggacggcttttaatccaaaaaaaaaaaa

SEQ ID NO: 224766 - DNA, 442 bp, Glycine max
  unsure (1)..(442): unsure at all n locations
agcttgctggtgctcaggtaattntgtattttttattcgnnatagtaagttataatatgctcaagtcatttagatttgctgtctgtaaagtagattatcaatttaacatccacagataatagcatgaagttaatgtcgtgatgaattacatatgatgaattttgaagattttttgctcactttttcattttacaataagactctcatctgagactttaataataattggctggtagttgtggtgtttatggtttgatgctgtatgctgctttaatgctctgtctttaagcagcacattggatttttaactataggtctggctaattattcctaaattggaaatagttctgctataattcggtatgattgctgctgatcttgcatgttatggtaattctagcgaacatacatttgactgatttgacttctgtcatcttgtatt

SEQ ID NO: 224767 - DNA, 455 bp, Glycine max
  unsure (1)..(455): unsure at all n locations
tcgcaataggtnnaaggggatagctgcgctgtatggtattcttcaaaanggnatacttaattcctttccaaactagttaagaacatccccaaatagtcatataagacaatcatgatttctatataaattattttattaaaaaaaaggttttgatggactaatgtgtatgagaacaaaaaataatggagttttatgaaggaaaattctctattttggaacatgatgagtttttcttttttccaaaactttagatataaaaagaaaaagactatttctggcatattcctagagtttttcttaaagaaaagaacatgttcgcattcggtggaaaatactttgtgatagatgtatgagctcgtaaaggacccattatgaanattaatggaaacgggtaaactattatgataacacataaatctctgaaggtctaactgtcaagtaagaatcaaattatt

SEQ ID NO: 224768 - DNA, 457 bp, Glycine max
  unsure (1)..(457): unsure at all n locations
agcttgccttgtgtttcaggcaatgacaactcttggttntgcaaagatcttagtctacagagaacttattgtgaacttcaactatattgtaatgtgaattgtcttgtcataatgttttaggaggtgtttagtaaatgaaatctcgattatttcttcttcatcatagtatagttgtctataatatccccaccaagaaatatcaaatagtccgtttacaattcgcaaagttttgaaatatataagttaacaggcctaaactttgtgtacaaatcatcttttgtcattaatcttttgaaaacaagaatgntacacattgattgtttagatcttccagagaaatcttatacaaattgtgcttattggcagtaaaatatattgatccatacgttaagtttgaactcctaaagtttaattgacaacggaactcntcattagcagttcttatttaaaaactact

SEQ ID NO: 224769 - DNA, 447 bp, Glycine max
  unsure (1)..(447): unsure at all n locations
tctccactttacatccaacgcatgagttctagtcatgataatagcaggacatcacaatcaggacggatttctttcaaggagtatttattttctttatagtttagacaaaattcagctctcatttntgaactatacttacttaactgactgctaaaaaatatattttgaattgaaagcttctgtgttttgcatacatttgattcacaagatatatctcctattgatttattgaagaatgtttcccttacacatttaaactcattatttgtgcgtgaaatgttttccattttattatagtttaaaagggagatctctgagttctgcacaggagaagtccatagttgaacctgaggctttgatgaccaacgaaatagagtggtctaacaacttggagcattcactaacagagagggacataacgcatggaaatgatctatcaaccacatt

SEQ ID NO: 224770 - DNA, 274 bp, Glycine max
  unsure (1)..(274): unsure at all n locations
agcttataatattctttaatacgacattggttgttattntttgattgnttaaatttaccatgcatgcatctattaatgtctttctgtttattttaatcattgcttccttccgggggctgatgtcattgatgcaagtgtttgaaggagctaaccactatgaaatttgattctttgggatccagcgatgttgatgctctgacatttacttcactatatctccagataatagagcttcttgtagatgtatgggacgacttgttgcctgcaaaaaggt

SEQ ID NO: 224771 - DNA, 331 bp, Glycine max
  unsure (1)..(331): unsure at all n locations
cttgatctcgcttctgcctgccgaactgacttgaccatctgactttgttggtaccaagcagctagtgattgtggagagaatattgtgagttgtggtgaatatcccaacgtacctcttttgggtatgcgtggcggaattagctacaacccactcctcgctcgacgacaattcgggtactctataaagacaaaaccaaacaaccttgcctagactaatgaatcctatcttaaccatggtgatcactcgaacanaagggaaagattcgcacaagcttggagcgctatccgcagactcagcagaagtcagttgggaaaagaaatagactatgtgc

SEQ ID NO: 224772 - DNA, 397 bp, Glycine max
agcttgagatgaggaagtgttgaagggtgattctttctgcttttattgtcgaccacagagtggtacctgtagatatgtcgcgggggtcaggagaccttggggacgtcaggtggggtgctattgcccaaaaccaagcttgaccaatcccgacccaacccgggcatagttggtcagtgagaacctgtgatgtacctaaccaggcgagctcctggcagtcaacagataaaaggaacaaagaccacaaagcaaggaggcttgtggtggctggccagctgtgacacttgattgatatgcgagatatggcctctggtaatcgattaccaagggtgggtagtcgattaccaggcttaccaatgaagacaggagactaagatggtctttggtaatcgattaccac

SEQ ID NO: 224773 - DNA, 331 bp, Glycine max
tgttcttttatcaagtccatgcaaaaccacctgagtccacctggtattcgggaaagtccttcattattttcatcctcaagatacacattttgtttttcaaaaaccctttttgttgtgttttgatctacaaaattttcgaagggtactggtggttgtttctttcaaaagcatgttagttttaagaaaaaggtttgaaacctggacaaagttatattcaaagactacaccatcaaacatcagagcgcgcgcaaaaataaataaaaaataaaccacgcgtaaattttcttttgttaacactcattacaacctaaaaacataacatagcaataaa

SEQ ID NO: 224774 - DNA, 374 bp, Glycine max
  unsure (1)..(374): unsure at all n locations
agctttcgtgaattaatgttcacgttcaagatgaaattcttcgtattaagcagagacgttagtgatccaatccaacattggagaaagagataaaacgaagggcacattaaaaaggtttagctcgttgtttctgattgatccgaacacacccttttgcgtgatatggctcgctgttgcttgtttntattcaaagtaaacaaagtgaagataagcatgcacgatattaattaacacttatgatacctgacttatatccatgtcaaatgatcacacatccttataaggaagggttgaaacttgtacttataaatttgggtcctactcacgttaagttctcatttatttgtcattntgatccaaagggggtaaaccga

SEQ ID NO: 224775 - DNA, 179 bp, Glycine max
  unsure (1)..(179): unsure at all n locations
tgaagctacctcggtaaaacgctgcccagccttcgttaaccgttggatcttctcgaaatttggtctgcaacttcacaagacacttgtccatgatctgaccgttgggatatttaagaagatttctggagtgtgctagaagctttcgttcccgagagcatntcttatttaagcacttcagc

SEQ ID NO: 224776 - DNA, 421 bp, Glycine max
  unsure (1)..(421): unsure at all n locations
agctttaggtgtgtattagagtgctttgagtctcggngtatattttcttattggcttgactccctttttatagctgtcggagtggactcgggtttgactccctttttatagttactggagtggacttgggtctgataccaaaaatcttccttatttatattttgatattttctggatcttttttgcttttaatccttccttttcatatctgccagccataaataagagaaatatcaattcctaacatttaagccanaaataaatgctaaataaatatttttaaagatattttaaatatatttttattataaaaaaaatagctcatatttaatagttatcaaacacaataacttaattggaactccttaacaaaacatgattcatcatcctttgatatttagacattatcagatgggacaag

SEQ ID NO: 224777 - DNA, 384 bp, Glycine max
  unsure (1)..(384): unsure at all n locations
tctcccctatttttctataaatagggaaagaagtgaagtttataagggttcagccccttaggcacttctctctctctcgaaatagctgaggaaaattagtttcgtgaagaaaattcaagccgaggcgctttcgtaacgttttcgtaacttttccgtgagtaattacgtgaagattctcgaccattcttcaagaatcatcgntcgctctttgttttcttcagtcttaacgggtgagtacctcaaaccaagcttttcaattcattctatgtacccgtggtggccacatttcggtcatggatttttgcgtatatcattgcttttataccccttttgcgcgttaaaccatttattaaacatttccgcttaatctaaaataaaacattt

SEQ ID NO: 224778 - DNA, 450 bp, Glycine max
  unsure (1)..(450): unsure at all n locations
agcttggagaggatgcttcaatggatgaaattatntatggagagaaagagagaggggggaacatgaaattgaaggaagaacaagggagagaagttgaactttgagttgtgtctcacaagactctcattcatcaaagttacaacaagtgttacacatgcttctatttatagactagggagcttccttgagaagctttcttgagaaaacttccttgagaagcttctttgagaaaacatccttgagaagctagagcttagctacacacatccctctcataactaagctcatctccttgagaaacttccttaagaagatttctaaagaagctagagcttagctacacatacctctctaatagctaagctcacctccttgagatgagaagctagaacttagctatcaccccctataatagctaagctcaccctcatgacatacaacatgataata

SEQ ID NO: 224779 - DNA, 216 bp, Glycine max
cccagtagtccaagaaaaattcaagttcatagccatcaaagtctgaaaagagtatgatgaactaacggacatcaatatggccaccgctgatgccttggaacgaaaaaccaagaaggcccaaaaggaagaacacgtgccaccaaagttttgaggggctttatagggcagcaatagtaagctcaagctccgaacaggtgaaaggaatcatcacgggtc

SEQ ID NO: 224780 - DNA, 382 bp, Glycine max
  unsure (1)..(382): unsure at all n locations
ggatccttaagtcaccgcggcatgcagctgaaatggctagacatgatattgtttggcttggtttggntcaagggtaaaagggatgccccacattatttccatgacacaaatgcgaaaatgatgatttggaaattttatgcaaaactggtcatgcatgcacctatgcggacactcaagtgtcaaatttttatggtcatgtgatgctagggcttacgatttatctcctctattttaaatcaacccaatgtttccaaaatatgttcttttatcaatttgtgcattcattcgagttcatttcgggcgtgcggggaaatcttacagcattcactcttcacgtgtacacacgttttttttctcttaaaaattggtcatgatcaatgaa

SEQ ID NO: 224781 - DNA, 454 bp, Glycine max
  unsure (1)..(454): unsure at all n locations
tcttccgggaacattccggatgacgttcttccggaagtattctgtgagtacttccggaagacacaaattcttcttccggaaataatttttccggaaagtttccggaagaatcttctttcggaagaataattgctaaagggcagtttcgccacttcactgtttgctgggtgccccagcaataatgctgggtgcacgtagcaactcccctattaattgttgctgaaggcccaaactaatttgaaggcccaagttaaataagtttttagttataatttatttttattgtaattttggcccaaactgtttaaaaggcccatgtctatttttatctttntgttcagctacactataagtatgggtttttgttntgaataaaaaaaacttttgggcattctgataaaantgggtgagagtttctctctgggttcctcgttgaaccaatatcagacttatc

SEQ ID NO: 224782 - DNA, 467 bp, Glycine max
  unsure (1)..(467): unsure at all n locations
agctctatacaccttgngcgattgtcctctattcggttggactgagngcttcttctaatgctccttaagaaacaaaatgcaaatgtcttaatctcattattggttatgagaaattctatttgtatactttcattccacatttgtcgcataatttttttaaataaaaaatgtgtgtttgatctgatctgtttcggggtttgtttctttaccaagcgtgttcgtattttagtgtaagttttcaagacttcaatgtcttctatctttaaaatttcaagacttcaatgtcttttctcttttacatttcaagacttcaatgtctttaatctttacatttcaagacttcattgctttagtcttacatttcaagacttaatgtcataatcttatatttcagacctcattgctttgtccttacattcaagacttcatgtttctatctttacatttaagacttcattgctttggct

SEQ ID NO: 224783 - DNA, 468 bp, Glycine max
  unsure (1)..(468): unsure at all n locations
taagctccttcaactgcacaaggctcttaatatttgattttatccttgtggaaccttcacccgacgaagacactgacaaaaacttatcttctctttcttggacaaagtatggcaggctgggggcaagtaaattttcttcccatcagaccttggatgcaactgtgatcgtatacccatataagctagatcttgacgggtattcaagccatccttcgtcttgccttgaatgttaaggagcgtcccaatcacactgtcacaaacatttttctccacatgcataacatcaatacaatgtctaacgtcaagatcacaccagtacggaagatcaaagaaaatggacctcttcttccatatgcaactctgacttttatccttcttttgggtcttcccaaatacagtattcaagtgttgaacccgctgatatacctgttcgccagttaacggtatcngcgcaatatcatgctcttg

SEQ ID NO: 224784 - DNA, 225 bp, Glycine max
agcttctagatgagttatgtctgcgaatccttctttctgtgaaaagttatgaccatttgaatctctcgagtgcttccgttgtttaatttcaagcgactctatattctatgtcctcatatcacacattcgagcgaaatgttatgaccattctaatttgtcgagagctctccgttctcaatttcgagcgtctagatgagtttcgccaccgaatcatacatctgagtg

SEQ ID NO: 224785 - DNA, 357 bp, Glycine max
ctatgctcttatgtggtgttacaagctacaaaaggagagagcaagaaatgaagagccaatggttgatacatggacggagatgaaaaagatcatgaggaagcggtatgtgccggctagttactcaagggacttgaaattcaagctccaaaaactaacccaaggcaacaagggggttgaggagtatttcaaggaaatggatgtgctcatgattcaagcaaatattgaagaagatgaggaggtaactatggctcgatttcttaatggtttgactaatgatatccgtgatattgttgagctgcacgagtttgttgaaatggatgatttgcttacaaagcaatccaagtggagcaacaatta

SEQ ID NO: 224786 - DNA, 335 bp, Glycine max
agcttggcaatcctgaccttcccgtgcgtattagtcagagagaacctgtgacgtacctaagcatgcgagctcctgtcagtcaaccaataaaagaacaaaagtccacgaagcaaggaggcttgtgtggcggctggccagctatctatcttggtgtttatctgaaaaataccctctggtaatcgattacagggtttaaaaattgaaacagaacgttcagtagctattggtaatcgattaccatctgtgtgtaatcgattacacagtgttatacgctactggtaatggattaccaattatgtgtaatcgattacatagagttatctgctactggtaat

SEQ ID NO: 224787 - DNA, 228 bp, Glycine max
gacactaaaaactcagctttgcttattagtgcacaacgccatgagaattatcatatcttgggatttgctttattgcctccaacagagggatagttacctctacttttctaaacatttacaagaactctttctctgcctctttcatattttgtaggaaactgctcttggagggaatggaacaaggggaatgtgctgcttctacaaatcagaattacctgtggaagaaga

SEQ ID NO: 224788 - DNA, 421 bp, Glycine max
agcttctagagaaaactacatgcagctgcctctgttataactcttcccatccttcgtaaactgttggatcttctcgaaatttggtttgcaacttcaaaagacacttttccatgatctgaccgttgggatctttgagaagatgtctggcatgtgctagaagcttccgttcccgagagcatttcttatttaagcacttcagccttttctttcgtgtagcttagggaaaacgtcatttcttcttctttctttcttccaaagccatttataaagttccaagcactttctccatcacccacagccaccattagccatcacaaaccatcattgttctccattgaaaacccatactgagaggaacccttcaaccgaagcggaatcttccaacttggcttgcggtttcggtagagaacgaaaatcctaa

SEQ ID NO: 224789 - DNA, 412 bp, Glycine max
  unsure (1)..(412): unsure at all n locations
gacctataaaactcagcttcactattagtcccaactccttcagaattagcattcttggaattgctttattgatccagcagagtatgtttacctctacttttctaaatgtttccaagatctccttctctgcctcttcccattttttgttggaaattactcttggagggaatggaagagggatatgctgcttctctttagattcacctgcatagaaattnttaggtaacttactctttaaatttttgtcatcatctttttttggagtagagtgaggttgggcaggttcatttgcggatgaagaagatgctactggttgagttccttgacactgctttcctgacctcaatgtaatggcactcacatttttgnngatttgacacgatgagaaggtaatctatcacaaatctgggac

SEQ ID NO: 224790 - DNA, 380 bp, Glycine max
  unsure (1)..(380): unsure at all n locations
aagtcacctgcggcatgcaagctntagatgatgttgctgatagaactgatttgaattctttcataangcnantttgacatccgnattttcctatttttattgctgatatgcagcagatttgactgattctganaattatggtcaaccagtcgatgttaacttgataacattagataaagttcacaaagaagacgagggacatgatccttttgatgactctgaaaccaatgcaattgggagcatgcttcccgatgatgaagaggaccttntggctgggattatggatgattctgacctcactaaattgcccactcaactggaggatttggatgaaaatgatctgtctgtcaatggagggggatttgagatggactttgaac

SEQ ID NO: 224791 - DNA, 398 bp, Glycine max
  unsure (1)..(398): unsure at all n locations
agctngtgttggaggaaattcttggaccctttttattttcatactcttaaactnttattgagtatattaagggaaaacaaataaacaaaaggaatctaggtgccgaaagagctaaggatgtcttaaaaataattcatacaaatatttaggatcctttccctatggattcaaggaatggaaaaatgtattttattatgttcaaagatgattactttttctttaattgatgagaagtcttggtctttaaatgttttcaagtctttcaaagttgaagctgaacttcaattagaaaagaaaattaaggttgtcaaatctgactgtgatggtgaataatgcgcgaaatatgacatacaaggtgaacaacgtctacaactcttcacctttttctctttcttcat

SEQ ID NO: 224792 - DNA, 455 bp, Glycine max
  unsure (1)..(455): unsure at all n locations
ntatggagtagttagtctagtaattacatggatatttaatttttagctttatggagtagctctatacaagaattntaaattatataaataatttcgcataattatatacttagtctagtaattacatggatatttaatttaaagctttatggagtagttagcttttcaaattaactntaaaaatcaatactcccttctctcattataattatcgtgtaacataaaattatctcaaaataattattatttaactttccaattacaaatattatttatttatttttatttttatcctttataatattaatgatagataaagaatgcataaataaactaataataatataatattaattctaaaaaattatcgtatcttttttatttatttattacattntttaatctgtgtaacataatttaagatgattattatttttgaacggatagaataccat

SEQ ID NO: 224793 - DNA, 509 bp, Glycine max
  unsure (1)..(509): unsure at all n locations
ttaagtcacctgcggcatgcaagcttagcaaatggacctgggtgttgcccagtttcatatatctttcgtaatactcatcacctctatcatatctaataattttcatatttatgtctaattgcctttttatttcattctagcagatttctaaggcatctattgcctaagaaatctcaggcaataagtagacataatcgtaacgtgaacaatcatcaataatggtgataaagtatcattcttttccgaaagaactaacatcaaaaggtccacaaatatcagtatgcataatttcaagaagctgagtgcttcttgtagctcctttctttgtatgttntgcttgtttcccttaatacaacccacactaatatttagatccgtaaaatctagataaggaagaatntcattctttattaatctttccattccttctctagaaatgtgacctcatacgttatgccacaagaanagcaaatcgtcattcacttaactantgttagtggccacattat

SEQ ID NO: 224794 - DNA, 387 bp, Glycine max
  unsure (1)..(387): unsure at all n locations
agctcaggctaaattaggctaatctatcatttgctgcttaagcttanactagtcctacacgagggatctacagacaaaactcagtttatgttagtctaaacctaagagggctttctcaattgtgctgaatccaacaagatggatctaaggatgaagcttggattgattccgtctaacgagggattgaggtttagtaattcatgctacaacatataacacaagagcttgattgattacagaaatatatttatatggatcagctctgtttattatatagacccaacatttgtacctactgctgtcactcttacttactttgcattatactagtttcgcaaaaatctaattaaatcttggtaaaattataatcatacatgtctttcatat

SEQ ID NO: 224795 - DNA, 469 bp, Glycine max
  unsure (1)..(469): unsure at all n locations
cctttaaactaagctgcttgggagcttctatggaggctggaggagtgagcttcattgatgtcctttaatggtggttttccaccatggagatgcagcggaagacaaaggagaagaggggagaggaggcgccatccactacggaataagccatggaagaaggagcttcaccaccatgatgagccttggataagaagcttggaaagatgcttctttggaggaaaagaaagagggagagaatgagagaggggggagcacgatatcgaaggaataaaaaaagggagagaagttgaactttgagttgtgtctcacangactctcattcatcatagttacaacaagtgttacacatgcttctatttatagactaagtagcttccttgagaagctttcttgagaacacttccttgagaagctcttttgagaaacttccttgnaagctagagctagctacacacactcctctcataac

SEQ ID NO: 224796 - DNA, 456 bp, Glycine max
agcttctatataagctgaaccatggttttcttattgacaagccgagctttattcagaaaattagagtttatctcttttatcttagtgagagtgattctcctaaattcttgagtgattcaagaacaccctggctgtatcaaaggactttcacaacctttgtgtgttgccctcgctggaaagagtgatcttttccttcctttcatcttcacccttttctttcaaaccacaattccagagaaatccaccacctctgcccagaattatctcgtggccataactcccattttacgcactcaaattaagtgattcttgagcctaaattgaatttcataacgagacctttcacctagtgtttgaatcacctcattggagccctgtacttcagtattgtctttcatattctgtcagccacacttacctacttttacattcattattcttttatgcagaacaact

SEQ ID NO: 224797 - DNA, 404 bp, Glycine max
  unsure (1)..(404): unsure at all n locations
agctngagcgacatgctatgatctattcttttcatgattctcanacagctgntgtggccaaggaggccttggaaggacattgcatatatgatggaggtttttgcaagcttcacatttcatattcacgacatactgatctaagtataaaggtaaacaaccaacactaatctgtagagtcgggattgatgttcatttgaataaatgattgaaaaactctgatttgaagatgtcttgtatccaatatgatacaacggtggccagtcgttattcaagcaaataaagccaatcttaattcatgaatgtacatggttaactgtactcaacttgagattcttgttttgagccttggtctctttcctgaaatgatgtcggtttatccttatcatgcactgaanatcccttct

SEQ ID NO: 224798 - DNA, 459 bp, Glycine max
  unsure (1)..(459): unsure at all n locations
cgtgatgctntgatgcctggttcagaagagtctgagtctcttattttaagccggatacatcattctcctgaaagtacacattgagacaatttctatatctttcattgctttttatccatcacgttttaatttcctccctcttttttgttgctttcattttgagctagaataaaaggaaatggcattcatattccctagaatagcgcatttctgatcccccatgcatgagtttcctcgcatttcgttacttctattttagcatttctgttcgtgcatgccgtggcagtaagtttctcatcttagttgcattcccttctgcataagtgcaatggatcttaatttcaaaaaatgcctttctcagaaaatngacagtggtactactggttgagttatcttgttctgttccacgttcttgcatttaccacccacgacttatttaaaaccaacttttctccaatc

SEQ ID NO: 224799 - DNA, 467 bp, Glycine max
  unsure (1)..(467): unsure at all n locations
agctntggagaaggctgatagcagcttctcgttaatctcatctactggctttgcagcagatgccactctactctaaatttttgaaagatatgctaacaacgaagcacaaatacattcattacgaaaacatcatagtggaaggaaatcgcaatcctatgatcccgaagatccttccacccaagcataaagatcctaggggtgtaactattccttgttcaattggagaagtcaatgtgggaaaagctcttattgacctgngagccactatcaatctgatgccactctccatgtgcacaagattaggagagctggaaataatgcccactcgaatgactttacaattagctgaccactccattaccaggccatatggagtaattgatgatgttttggccacagaaaacattttatctccccacagactttgtgtaatggatatctctgaaacactgacctccttgtatatt

SEQ ID NO: 224800 - DNA, 469 bp, Glycine max
  unsure (1)..(469): unsure at all n locations
gggttcgaggtacttacccgttgaagagcgaagaatgatgattatcgaatgaagaacgtcgaagaacggtcgaaacctttgcgaaattcttcacggaaaacgttacagaaacgtttcggaagcgcctcggcttagattttcttcacggaaacaatttttccaagcaaattcgaaagagagagaagtgcctaaggggctgaacccttttccttctcacttcctcccctatttatagcaaaataagggagatgcttgccgtccagctcgcccaggcgagccangttgcttcatccagaagcaacagccttctggaggaatcttctggagggcccaagtgggcctgggtgctatttgcacccccatttttactaagcacaccctctgcctctttttggtgattcttttctcgtaaagttacggaaacttacgaatntcgtaacgatactcgttttctttccgtactgtaccg

SEQ ID NO: 224801 - DNA, 384 bp, Glycine max
  unsure (1)..(384): unsure at all n locations
agctcgtggatgttcttattgtcagagtnngtgncattatcctcccatggcaagaacctagtggggtagattctaccttggtactcccatgtgatgttcatttcgaatttgttaggttttgagatttgaaatgtttctgctttttttccaaactcgtctgggggtatgcaccacaaaattggctgttgagagttttgaaccctccgccgatgactatgtagaatctcattaggaaatntcgtatgaggtaccaataaatttgtgcacatgcatggcaagactttgatagaggctaggctcgcgggcttgttattatatttacgtgtatcggcttgagattttctaccttgcatagcatacgattttttctctcggtgggtcata

SEQ ID NO: 224802 - DNA, 444 bp, Glycine max
  unsure (1)..(444): unsure at all n locations
gtgacctattatactcaagctataaaacaaatgcctcaatagtatcaaaattttgttaattangaagcatcaacaagaatcaagctcaggctattgtgcaagcaatcaatggggcaaaacacaccaaatgattatgatgatggatggctcaaattctgacaaaggtaaactcatcactttcaaattgagctttcaaaactatcatgacatgtataggataatcaaggatttcaagtcacaaaatgtcaagaacttttattttcaaaacaattacccatttcttgaacatatcctataattcaaagaaaaacatgcaaagtcgtacatgcacacaaaattgacccaaaatattaaactaagaatctgacgaaactaacaacattaacaaattaacacaactaacaaattaacaaaaccaacaaaactagcaaaaccaaagaacac

SEQ ID NO: 224803 - DNA, 293 bp, Glycine max
  unsure (1)..(293): unsure at all n locations
agcttataaagttcgatgctgagacgcttatttcattcatggagaccccganggttntggagccaggggagcggtactccacatattccaggttctgccatgctcatccagacccataggagcttgcattaaagctctgcatcccacggtgaggattcgctctgaatgctgagggtgtaccttggaagcttctgaggaaggacctcactacattagctcagacctggagtgtcttggcttattctaaccctgcgcccaccctccatacatttgatcttaatacggacattacc

SEQ ID NO: 224804 - DNA, 291 bp, Glycine max
  unsure (1)..(291): unsure at all n locations
attttattctcattctggttattattataccccctgttgacatgcttaagccatttcgcttaaggaatttctcgcttaacttanaaataaaataaatttccaccgaacatttgaattgtattatccattaacttcggttaaaataaattccgaccgttcgagcatgccgtaaccacgttggaaatcacaaagaggtaaaaaataatataataatataaaacaacatcttttagtacaataaagcggagaatcaatcggacgttttctctctgggaattctcattcttaatc

SEQ ID NO: 224805 - DNA, 419 bp, Glycine max
agcttctaaactaccccgtttctcttctcctttggcaaaatcaaaaagccaaagtacgtggtaagcaacacaaggcgaaagaataataatcaaatataactaaagttcacataatcattcataagtcaaaaccaaatataatctagtcataaaagactaagtgctaaatactgaaatgtaactaaagttcagaaaatgataactaaaaaggcatagccaaatacacgacttaaaataaaagataataataatctaaaactacgaagttggtggaaggtcgaagcaccgatgaagataactcacatcctcttcaagctgcgtgatacgggtatccattccttcaaagcgaccatccaaagaatcatagcattcgcccacataggtgcggaggccccgtaatttcgaaagaacttcattca

SEQ ID NO: 224806 - DNA, 460 bp, Glycine max
  unsure (1)..(460): unsure at all n locations
ngccatacctattcaaactcaaaagatgactntgttattttgaagaaggaaaggaaggaactttgggtcataccaattcttatttataagaatacctaccaatttagggatcccactcctccctaccttatggctttagctatctcagttgggcagcctgatacttccactattaggcctaaaaggggtagaattagggtagctactatgaaagcatttaatcattacttgtctactttctcttgcaatataagagcgaatatagatagcaatataaaatgtgacaaatcgttcactgaagataaagttgatatatagtgaagaataatatagtcaattgcttcctcaatggaaaacgccctttatagacctaagtaaaggattccgtatgggatcaacgtccgattctttgaaaatttgtagtctacactggggaataacgtatgtgtctcactctgga

SEQ ID NO: 224807 - DNA, 458 bp, Glycine max
  unsure (1)..(458): unsure at all n locations
agcttccatcaagtggtaaatatagctcatgatcttcaagtaggtgctccttaaacctccattaattatttgctntaccttttcttcgattgttgtttcttcattttttctccatgtatctcctcacatgtcttgtgataaatgtttttaacatgattatttagagtttccactgattaaacttgctatagaagctagatttgattttctatggttcaaatttcttgttcttgttcttgaaccatgaattgtgttgagtttaagttcctttgagttttgtcttgttattttttgtggctgaaacctataccataaaattcttacaaaaatattaaagtagaagaaaacctcaaaaatctagagtgacttgttcacctattgtagttntgtcatagaagtcatgtctagtcatgaaacttgtcacataagatntcttatgttgngcctgaaattttttt

SEQ ID NO: 224808 - DNA, 460 bp, Glycine max
  unsure (1)..(460): unsure at all n locations
nntacactgggcaatgaggggcaccgtgcattatccttaagtgaacataggggccgatcaaaagttctcacccatcgatgtttttaacaaaaaaaaggggggacaaaccctaggatttcaatcgattgattaaacatcaaacgactccattgccgtcactccaaaatggtcaaatgactaaatcaaacagaacacacactctgagggagttctcggagagatttgcaaaagataggataaggttgcatggactatcacctctttcaaaaggacagtcaatttgtgttttccaaaaaaaaaaaaatcaaatcaaaatcaaaatcacaaaatagggaaagaatgtcatgaacattgtacaactttccattacattccattgtttcatatgaagtccgcatttaccaaatttcacgaccaaggttgcatgcatctgcatccctaanaaatcatgtaactgtat

SEQ ID NO: 224809 - DNA, 465 bp, Glycine max
  unsure (1)..(465): unsure at all n locations
agctnttatatgatatactttctatacaatatatatatatatatatgaaaaactgagaagagatgatttggaccaataccattcaatcttacacataataagattaacttttctcacttgcgatctcatatgatttgtagaaagcacatgatgtgtagaaagtagctacttccagcaagaacacacaaaaaaactcattaagagggagaaaaatagaggaagcaagtgttgaaccctcctttntgtctctatcatgtgtgttttgactctatctatgcaataaaaagtacaaaaaacaacacacaaaaagaaagagagggataataagagaactagataagaccctctttgtttacgctaaatgtagaagcaagcttcatgatgaatcaagattgacccaatgagttctgatgataacacagatgatgacacanagctcacaagtcaagaacactttataataac

SEQ ID NO: 224810 - DNA, 434 bp, Glycine max
  unsure (1)..(434): unsure at all n locations
ctgatgatatggtcttcaccgacgaaaggatcaaagtgagttctttatagagacaaatctgatcatcatactttgataaatgccaaaaaaactagggcaagtgaagaggatgagaaggagggagaaacctatgttgtgactgtcattcttatacgaccaagtttcccaccaacccaacaatgtcattactcagccaataacaacccttctcattacccaccacccagtcatccacaaaggccatccctaaaatcaaccacaaagcctacctaccgcactttcaatgacaaacaccacctttagcataaaccaaaacaccaaccacgaaatgaattttgcagtgaaaaagcctgtagaattcacccccaaatccagggtcctatgctaactngctcccatatctacttgataatcaatgganccataaccccacc

SEQ ID NO: 224811 - DNA, 451 bp, Glycine max
  unsure (1)..(451): unsure at all n locations
agccttgagggtgcgtagcccaccatctctttatttatagtatcgataatgggtctaccatcacgatcatcgtctcgctttccatcattgggggtaccacctgngccgtcagatccctccaccttttgggcgtgttctttgaaagatccgtccncctttttgcaaatgttctgtagttgcatcctatccggaaccatatcaaaattgtactgatactgcctaacaaaggcaaccattaggtccttccaagaatggactccggaagattccaagttagtgtaccaggtaacagctaccccagtaagactttcttggaaggaatgtattagcaattcctcatctgttgngtattcccccatcttctgacaantacattttaaatggttcctgggacaaagagtccccttgtactcgcaaggtccacaccttgaacttggaggggatgatatgg

SEQ ID NO: 224812 - DNA, 470 bp, Glycine max
  unsure (1)..(470): unsure at all n locations
cgcttctacaatatgatccataaaaaagagtggtttgtatctttgctctttaaaaggtaggtgttgttttaaaaatcaattcaccctcttttggtttattgagttccatcgtctcttttcacaaaaatggagtgtttttgtgtcgtgtgtgtttttatttttagggtgtttttaataagtgtgtttgtgtgttttaattttactaagtttgtttttatttttattaactatttttttagttctttaggcttgttttaactttagtaaaattgtttttactaagattctntatttttactaagtttgctcttattttattaaatgctttctagtcttttaggcttactttaactttaattagtaaaattagttctactaagacctctctattttactaaggcttgtttcatttttactaaggggtttctcttagtcttttaagcttggctctacatttttactacattttt

SEQ ID NO: 224813 - DNA, 271 bp, Glycine max
  unsure (1)..(271): unsure at all n locations
caggcangcaagcccngnncggagccgcagcggagaacgatgtgtattgaatatctacgcgagggagagggacacagagctgttagaaactgagctgagtgaagagagacagaacacgcttctggttgcataaagaggcgctcctctctcctatgacttcatataagctacgccacatgactccatgtgagtggagcaaaaagggcccaccttctctagcgatcgtgacccatactcagccacacaaagcgacaaaaatctgaccttcgaa

SEQ ID NO: 224814 - DNA, 423 bp, Glycine max
atacaagaatgaagctgtgagagcgactagttatactagtggcctcagatatcttaagaagggggggttgaattaagatattccaaactacttccccaattaaaattctatttcactttttattcaagttataaattcccttaataatgaacttcttaaatattgattcaaataaaacaatttgaatatgaatataaagcaataataaacaaaggagattaagggaagagaaagtgcaaactcagatttatactggttcggccacacccttgtgcctacgtccagtccccaagcaacccgcttgagagttccactatcttgtaaattccttttacaagttctaaatacacaaagacaatcctttctttgtggttagaattcctttacaacaagagactcacgggctcttaatctctagagaat

SEQ ID NO: 224815 - DNA, 374 bp, Glycine max
agcttcaacattcaatatcgagcgttgcgatatattattggactgaatcacacatccgagtaaaaagttaatgtcgtttgaattatctcagagcttcggtattccatttcgagcgtctcgatatattacgggactcaatcagacatccgagtgaaacgttattgtcgtctgaatttgctcagagcttcggtcttcaattacgagcgtctagacatattactggactcactcagacatccgagtagtaagttattgtcatttgaatttgctcagagctaaggcattcaagtccgagcgtctcgatatattacaggactccatcagacacccgagtaaaaagtttttgtcgtttgaatttgttagagcttcacatt

SEQ ID NO: 224816 - DNA, 427 bp, Glycine max
  unsure (1)..(427): unsure at all n locations
ntgagcaaattcaaacgagaataaatgaggactcggatgtctttttgagtctcgtaatatatcgagaagctcgaaatggaataccaaagctctgagcaaattcaaacgacaataactttatactcggatgtcttatgnactcccataatatatcgaaacgctnaatatagaataccgaagctttgagcatattcaaacgacaataacctttttactcggaagtcggattgagtcccgttatatatccagacgctcgaaattgaatgttgaagctttgagcaaattcaaannnncattacntttttactcatatgctcgatagagccctgtaatatattgnggngnnnaggatggaataccgaagctgtgagcacattcaaacgacaataactgtttactcggatgtccgatagagtcctcgaatata

SEQ ID NO: 224817 - DNA, 437 bp, Glycine max
  unsure (1)..(437): unsure at all n locations
aactaagctgctacccaggagctccaatatgtgaacactgttttgtgtggccattcttggatggccttgattatctcaagagccacttggacgctatttctaccaactacgaaccctaggaaaactatattatctacacaaaaggtacacttctctatatttgcatacaggttgttcttcctaaagactgaaagaacttgcctgagatgtcctaagtgatcatctaggcttctattgtacactaaaatatcatcaacatataaacaactacaaatctacctatgaaatcccttaagacatgatgcataagcctcataaaggtgctaggcgcattagtgagcccaaaaggcatcactagccattcatacaaaccanacttggtcttgagagcaggtttccactcatcaccctctntcattctgatttggtgataccac

SEQ ID NO: 224818 - DNA, 402 bp, Glycine max
agcttctcttggaccttaagcagaattctattttatccttccagatcaaactgtctactcgcgattggtccctttcctctctccggagcttaagctcactgttactgccccacagagcccctcggaacttgttccggccatgttcttccctacgggcccttttggtctcttgttccaaggccttggcggtggctatatttacgtctctcagatcggcattctcctttcggatcctaagagctattgatttgaacttttctttgactgtttgggctttctcaagttctgacctgagggcctgcacctcttcgctctccttcgtaactatcacttccaccctcttagtggctctcaaattggggagccaatccagaccttgcgtgtaggctttcaaccacctat

SEQ ID NO: 224819 - DNA, 323 bp, Glycine max
  unsure (1)..(323): unsure at all n locations
tgcttctacagcaaccagtcaatcagtaggcgaggttgtatccgaatcanataaacatgaaaatgcagtaactaggaagtgatcctaggtcgtttcccaataaggaatgataaaccaaatgttcataatatacttgcagtaacagttatgattgcgggggggggggttgtcttgtatttgacctcaacaaccaatactgtatcctcgaattcaaacactacattactaagaccagaatgtttctaacgattcaaaaacactcactcgtcctgggccaatgataaataatacttatcacttacacacttaaatcgaccctatta

SEQ ID NO: 224820 - DNA, 435 bp, Glycine max
  unsure (1)..(435): unsure at all n locations
gcttacctatctatggcacaggattgttattctgcacaagctctgcctttctatgttgctcaatcagtagcaagtgtacttcattcgatatgaaattttgcttgggatatattaaacttaaagttgtttttatgttgtcatgtcaaacagctctgtaaccaggaatccatctctcacatgaaaccagagcagacagtagaatgtgttgcattcagacttggcacttgctggcattgtggagacaaagcagatgggacagactgtttggtttgtgattcatgtgaggagatgtatcatctgtcctgtattgaccctgctgtgaaggaaataccctacaaaagctggttctgtgccaattgtactgctaatggaattggatgtcgacacaagacttgtgtggtgtgtgaacggttgaatgccctgaacacnctggat

SEQ ID NO: 224821 - DNA, 326 bp, Glycine max
  unsure (1)..(326): unsure at all n locations
gacacataaaactcagctttagacatcattctctaaaaggggagctgtttttgtatttctttggcccagcattcattagatataacgtcattcatgtgctttggctcgatcttggaaagtagcgttgtgtgcttgagagaattccttgtctggactttgcccttaagatcaccaatgatctaggactcttgatgatattttctcagcaagtgtctatctggttctctaacttctttacgttgatcatccattggtgagttggacacaagttggttntgactggatgcaacaatagacttgacgatatcttcaattttcatctctgc

SEQ ID NO: 224822 - DNA, 318 bp, Glycine max
  unsure (1)..(318): unsure at all n locations
agcttgccacttaccagtagaaatgtttcttattgcataatgggctttgaagtttttaaatcttgatgaggctctatcaggggagaaaaggaagctgcaactcttggagttggaagaaatgagactaaatgcatgagtccttcaaattgtacaaagaaaaagtgaaggcttatcatgacaagaagctgctaaagaaatacttccgatcgggtcaacaagttctattattcaactcaagaataaagctgtttctaggcaagttaaaatctaaatggtctagaccattcaccatcaaggaggtcangccttatggagcag

SEQ ID NO: 224823 - DNA, 402 bp, Glycine max
ctgcggatttggcctttgccagagagaggatcgatttgttgtctgaaaaaaggcaaatttagtcatcctgcttggacgaatgagaaaactggggcaaatgaagagggtggggatgaaggagaagcccgtgctgtgactgccattcttatacgaccaagtttcccaccaacccaacaatgtcgttactcagccaataaccaaccttctccttacccaccgcccagttatccacaaagtctgtctgtcgcacttccaatgacgaacatcacctttagcacaatccaaaaacaccaaccaagatatgaattttgcagcgagaaagcctgtagaattcaccccaattccagtgtcctatgctgacttgctcccatatctatttaatagtttaatggtagccataac

SEQ ID NO: 224824 - DNA, 367 bp, Glycine max
  unsure (1)..(367): unsure at all n locations
agcttngctnctacaataagagagcattactttctgatttcgaacaacagaagctctcgagaaattcgaatggtcatgacttttcacacgaatgttcaattcggcgacataactcatgtacacgctccaaaatgaacagcggaagcattcgagaaatttgaatggccataacttctcacacgaaagtcctattgggggacataactcatgtacacgctcgaaattgaaaaacgtaagctcttcaacaattcgaatggtcataacttttcactcggatgtccgactcgcggacataactcatctaaacgctttgaattgaacaatagaagctctcgagatattctaatgctcattaatccacttgatg

SEQ ID NO: 224825 - DNA, 449 bp, Glycine max
  unsure (1)..(449): unsure at all n locations
tcaagcttctatataagctgaaccattttatcaagaaagacaagttgtattttattcagaaaattagagtttatctcttttatcttagtgagagtgattctcctaaattcttgagtgattcaagaacaccctggctgaatcaaaggactttcacaacctttgcgtgttgccctcgctggaaagagtgattctttccttcctttcatcttcacccttgttctttcaaaccacaatttcagaaaatccacctctgtccagaattatctcgtggccataactcccattttacgcactcaaattaagtgattcttgagcctaaattgactttcataacgatacctttcacctcgttgtggaatcacctcatttggagccctgtagcttcaggtattgccatttctatatttctgtccagccaccacttaacctacattntacaatcccattca

SEQ ID NO: 224826 - DNA, 363 bp, Glycine max
  unsure (1)..(363): unsure at all n locations
agctnctccatccatcgcgatcatcactgctttcattttgncctcttncctaactgcccataaccgaaagtattgctcaatcttggtatccagcccattggatcctcaccatcgaatatgggcaactctaaattcctacaccgattgccgctgtgcgctgccataccttaatcccctccgctcgcctaaactgtatgcacatttgtcgctggagaatttttctcccacgccactgtcaacctttggatcaatccttcgatcgagctcacccgcgattccactgcttcgcgatactcctccatcgatatctccatagcttccatgcatgtctccacttttgcggtcaccttcaccaccattaac

SEQ ID NO: 224827 - DNA, 245 bp, Glycine max
  unsure (1)..(245): unsure at all n locations
ggcaggtcggaccccttgatacggatctcgggtgcaaaattaaagaagaaacgaanataaattgagataagtttcagcctccttcattcattccacttattacatatttatactgaattctcactagattntgaatacaaatctttcataacagaattggttttggcgcctaaatgaattagttacttagtggagtggctacttagtggaatctatttcacgagctcatgtctcctaactccctt

SEQ ID NO: 224828 - DNA, 343 bp, Glycine max
  unsure (1)..(343): unsure at all n locations
agctngtaaactcgacatgtcgttttgttttagtataataangataagaggaagaattgtgataactattatctataccattgttatgatattatgaatgacaggatgaagtgacataaagtgcttagagagttcacttgtatgtgaaaaattttcaaaaagaaaaagacttatgttaacacgataatgaaaccagattaatactctcaaagaaaacaatattgtgtaaagacactctcggacaatttaaatattcttatttggctatattagtataaatcatcttctatccacatatctttttaatattatgctcttttgtgttcattgtcgttcgatatac

SEQ ID NO: 224829 - DNA, 417 bp, Glycine max
tttccctatagacacaactataagagaagttactatgtattatcaacataccctaggaactcactaagctattatttgatgcttcagtcttgacaacaactttggaaaccttaggggaggagttgaagtccttgcactatctgaaagaatcctccgtgacggagctgccttcagcattattaacaccaataaacttggtgggacaccattgatcactctcggcttctctctagcgtgattcaattgggtctaattgctcacaattcacgttgatcaattggctcagctgcgtttgcagagccttgtagctctcacacaagtgggtcaacattccggtcaacctcttgctctcacaactcagacgacgcaacatcttccaccaaaaatccattctgtccacgatatttcggtgtagaa

SEQ ID NO: 224830 - DNA, 469 bp, Glycine max
  unsure (1)..(469): unsure at all n locations
agcttctggtgggacatcttgacttgctntctaatctgacattcaccacagattctgccttcttctattttcagattgggaatgcctctaaccgcacctttgtccatgattttcttcatgcctcttaagtgcagatgtccaaatctttgatgccatcttctaacttcatcttctttggaggatagacatgtggaggagtagctggtttcttgaggtgtccataggtaacaattgtcctttgatctgctgcccttcatcagaacttcactcttctcatttgtcaccaagcattctgactntgtgaagttcacattgaatccttcatcacacagctgactgatgctgatcaagtttgcagtcagtcccttcaccagcagtactttgtccagactaggaagaccatcatgaactagctcttccattccaatgatcttttctttagagccatctncanatgtcacataacttg

SEQ ID NO: 224831 - DNA, 457 bp, Glycine max
  unsure (1)..(457): unsure at all n locations
agcttaaagtatgcccgagtcattcatccctatgagatgttgttgaagtattggtgatcagaattgccattccttggattatagggttgaaccaagctcatgcttttacaaaaaggttcatcaagtcaagttgaaatatggaagtaaccgtcttgcaaaattggggcaaaagatgaatcgagtcacatcactgcttcgtctactgccaaacatatttaggattattgatgtccttgttacttccagtttcacctgtcatggaccatgttgaaaatctaaattgattcaacctcatatcttgcgtaaaaattcgcaatcttcaactgtacatcattcgcatacatccatgcttttcattggttgcattgctcattgcattctttcccttaaaaataaaatacaataaaatacaatgaacttaatcattgntataaaaaaaaaaaaaaacacgctttac

SEQ ID NO: 224832 - DNA, 343 bp, Glycine max
agcctgctcgctaagcgagggtgtgagctatttctttactgttcgctaagcgagctgtacaattcttccaactcttcttcacgattgtttcttttagtttctgcattaactttcctctaaagcacttgagatgtttttcttttgacttctgctgataaaaaaatacaaggatattaatttcttcattattatattaaaaacaatagtaaagtgaaaaaattgcaatcattcttaaccaaaattaattatcaaattagctcagatttcattgtattactcatatcatcaaaacataccagatagtttcaaacaacatagactccatatttaggataatgaactt

SEQ ID NO: 224833 - DNA, 475 bp, Glycine max
  unsure (1)..(475): unsure at all n locations
ngatcaaaacaattatctaatcattccagtgcactcatattatacagttgctcattcaaatcattcgcaaacactcatttcatacaaaacaatccactgcatatcaaattcaactagttcactggtcaagcaagctttttgtacaagcaatcaaacaactacactacaattgaaatttaaataactaaaatttaaagaactaaaacataaagactgaaatttaaatgactgaacataaatcataaaaaaaatgaaataaactaaattgttcaaaatgcacaaatttaaatgtcctgctcttgtgattgctcttgtgcatgctcattgagatccaacacctaagcagctggtgaatcctgagagataggctgctctatctcagatgctggtgcggatggcatggaatcatcacgaatgggtgctggagatggctctggaatctactctgtgcaagtctcctccttctgaagcatgt

SEQ ID NO: 224834 - DNA, 462 bp, Glycine max
  unsure (1)..(462): unsure at all n locations
agcttctagagaacactacatgaagctgcctttgttattatgctgcgcagccttcgttaaccgttggatcatctcgaaattctgttntcaactttaccagacaattgtgcatgatctgaccgttgggatctatgagacgatgtctggagtgtgctagaagcttccgttcncgagagcatctcttatttaagcatttcacgcctttgctttcgtgtagcttatgaacaatgtcattccttgctctttctttcttccaaaccattttaaagntccaagaactcttctcatcacccacatccaccattagccaccacagaccatcattgttcttcattgagaacccacaccgagaggaacccttcaccgaagcggatcttccacttggcttgcgtccggtaaaacacaaacctaactgactttatttttttcgaggaacaggttatgctgttctgtagttatctg

SEQ ID NO: 224835 - DNA, 468 bp, Glycine max
  unsure (1)..(468): unsure at all n locations
tatatggcanagcttggtgtcccttatatagagagacattgtttttcactangttaattactatataccctgcattcattgggtctgaaataccaaaaataccaactcaatgttcaacaatgccttctttatgtcatcaaataccaatggaagtaatggaagaggcttaaaactacatcacttttatatgattcaatgttttccaagcttatgacaattaactaacctacacttatgtataatgagaggttctattataatgtgtatttaatataagcttctggaacagtatatgaaacatggatatgtcaaaatctccgacttaagggcaacaaagaacaaggaaatatattaactggtagtaaatacaagcctagtgcaaaatgagctactgtaattacttatacctattntctaagtgatctttgaagttaaacaaacacttttgagatgctcttttaattatct

SEQ ID NO: 224836 - DNA, 298 bp, Glycine max
  unsure (1)..(298): unsure at all n locations
agctntccggacttggtcttggacagcgaatggatcgttgtgggtccgaacaaaggcacatttagctatcctgcttggacgaatgagaaaactgtggcacatgaagagggtgagaaagatggagaaacccatgctgtgactgccatttctatacggtcaagattccaccaacccaataatgtcattactcagccaataacaaacctcctccttacccaccgctccattatccacaaggccatccctaaatcaaccaccaagtctgtctaccgacttccatgacaacacccctttagca

SEQ ID NO: 224837 - DNA, 310 bp, Glycine max
  unsure (1)..(310): unsure at all n locations
agcccgcggagaggacgtcttgggctttattatgtggncgcgacaaaatactcataactctgacaaagttatcgaaacttggctactacctaacaactgaatgtaatcttagcggtacaaacaaccccatataactcttgtgtcctatgtactcctacttataactacgagtttgatcttttttttaaatctctattcattagaaaaattcgctctcatacgctgactgcgcattttttttttttagaacatccgccatctgtcttatgcaacgttcctttactgtgcatactagacaaaagggctttaa

SEQ ID NO: 224838 - DNA, 94 bp, Glycine max
  unsure (1)..(94): unsure at all n locations
tctctactactccngacactataaaactcaacttatctgatncttgctgccaaagagaagaaatatttactcctacagggaagtattgtattat

SEQ ID NO: 224839 - DNA, 404 bp, Glycine max
  unsure (1)..(404): unsure at all n locations
agctntnttcatggctgtgtctcatattttattgaagtgtttatctttagacactcacaaatttcaaacacctatttgatatttttgttttttctttatctttatttttctatcaaatcatatcacctatcttacatatatactnttctctcttctctgtctcttactctctcaatgtgtcacatagcttatggaaatatatgtatatttattctatttaaatgataagcgaacttaataaatgataaatttaggtgttctctaaatattgaaaacaatgacatattattcaatctattattagtagttaggacaaacaatactactagaaaaaagatattttacgacgattagacctagaccgatgtagtaagtaaagtgatgacattcttgtacatagctgt

SEQ ID NO: 224840 - DNA, 455 bp, Glycine max
  unsure (1)..(455): unsure at all n locations
acgtgacctataaaactcagctggccataagaggtgaaaaattaagaaagttcttaccatttcatctcttgaaaatctacacccttgtggagtggatcccacctcaagagttccaatcttacatacggagagaagatcagtggaagactcaatgacatataagcatctttataggttgatgagtactctcttttccattcttccattctacttttgaccaaggatagttgaccatattcctcagaagcatcactgaaaatctcatcagcagcctgcagcaccaaatcactttgtgactgatatgcttggctctcactatcactctcatcagtgcttgattcaccttctattntatgatcatcccattccatggatgtgaccttattataaccaaatgctagtgacctcttgcgttgacaagcctcggccctcactttcatattcattcgtttctc

SEQ ID NO: 224841 - DNA, 408 bp, Glycine max
  unsure (1)..(408): unsure at all n locations
agcttgccacttaccagtagaaatgtagctttttcataatgggctntgaagtctttaaantttgatgaggctctatcaggggagaaaaggaagctgcaactcttggagttggaagaaatgagactaaatgcatgagtccttcaaattgtacaaagaaaaagtgaaggcttatcatgacaagaagctgctaaagaaatacttccgatcgggtcaacaagttctattattcaactcaagattaaagctgtttctaggcaagttaaaatctaaatggtctagaccattcaccatcaaggaggtcaagccttatggagcagtggaattatttgaccctcaatcagaaacttcagatagaagctggacagtanatggccagagattgaagctatgccatggtgggaacattga

SEQ ID NO: 224842 - DNA, 457 bp, Glycine max
ttgcgcgattggtctttgccagtgagaggatcgatctgtttctgaaaaaaggcaaatttagtcatcctgcttggacgaatgagaaaactgtggcaaatgaagagggtggggatgaaggagaagcccgtgctgtgactgccattcttatacgaccaagtttcccaccaacccaacaatgtcgttactcagccaataaccaaccttctccttacccaccgcccagttatccacaaagtctgtctgtcgcacttccaatgacgaacatcacctttagcacaatccaaaaacaccaaccaagagatgaattttgcagcgagaaagcctgtagaattcaccccaattccagtgtcctatgctgacttgctcgcatatctatttaatagtttaatggtagccataaccccagccaaggttcatcaacctccatttctccgagaatacgactcgaacgcaacgt

SEQ ID NO: 224843 - DNA, 326 bp, Glycine max
  unsure (1)..(326): unsure at all n locations
agcttctacttatgtggcagggcgggcttctcttaccttcttgnctccaacgcgagctttgaccactgttcttccttcccgcgatgcttcttttcatgtccgcctgagtgggcttatagcctaaaccatacttcccacgatttccttgggtatttatcaggctagttatgccgccgttgtctttgcctaatcccatcccgggttcataaccgttccccaacataactcgggccatcattactgctgcatcggacagacaaggttgcccagagagggagtccacggaggaaatgctgaccacctcaaaagactggaaagcagtttct

SEQ ID NO: 224844 - DNA, 455 bp, Glycine max
  unsure (1)..(455): unsure at all n locations
tctaaatgctntcattntcaaaatgtagactaaagaatcacatctgttgatgtgtaatcgattgcaccttaatagtaatcgattaccagtgattgattttgaaaaataaatttccaaaagtcacaattctttaagtgacttgtttctgaagattttttcaaaagtcacaactttntaagtgactagttttcaaaagagtcacaattttaaggtgactagttttaaagaaattgccaagagtcacaaactttaacttgagtcatcaagaaattataaatatgtgaccatggcatgaatctttcagtcatcttctttcaacatccttcaatcaatctttaaaatatctttcaacactttctcttccaagaaaaagtctttggtcagaaacttgtgctattcatcttntttattctcttctccctttgcaaaagaaaaaaggactaaccgctgaattc

SEQ ID NO: 224845 - DNA, 442 bp, Glycine max
  unsure (1)..(442): unsure at all n locations
catgaagcttaaaccaaacaactataatctatgtatctacaacccctcaatttagtggatcttcaaggtttgagaagtgaaaatgagaacggcgtaattttggagaaaactctcatctcacacaagtctataacattaatctaaacttgctcaaactggttttacaactaaaactcccccgaatcaacatttgacccctcaacaccaaatttaccctagaaatggcttttgctctcactctggacactcattatcctcatttgctcagccccagcttctccataacttctaaatgatattttaaattaggattaactcactgtaaccttcaattaccactaagtccagatatagcttttcacaccctcaaagctcanacttttcactcatatcactacattctacttttaacccttagttactttacccttatctctatcaa

SEQ ID NO: 224846 - DNA, 458 bp, Glycine max
  unsure (1)..(458): unsure at all n locations
tgtacggatgtaagagacatcttgttcgatcttgtttattcttgactccatctcattgaatcgcatgtccacttgtaactccaaagtatcaaaccttacaccaataaaggtttgaagaccattaaacctgtccaaaatcttttgaagaagagaggaatcttctccaccatgtaagtgtccttcttcatcaatggtttgagcaccctttttcacccaagagccatcatgctctttacggtaaccaaaggatgcaatcactgcagcgcctattagaaaggatctcttgattgtaacataaggttcataatcaagagggatgttgaagtgttgaagaaagagggtgactatgtgtggatatggcaatggagcatttaatcgcaatgccttatgcatgcgatatcgaactaagtgtgcccaatcaatttngttgcctttatgangagcccacataacaataa

SEQ ID NO: 224847 - DNA, 443 bp, Glycine max
  unsure (1)..(443): unsure at all n locations
agcttcagaccacagtaacatacaatctatgttgtcaacacccctcaattcaatgggttttctatgtttgaaaagtgaaattgagaatgagacaaatttgaagcaaactctcacctcacacaagtctataacatcaatttaaacttgttcaaactggatttacgcttaaaatctcaccgaatcaaaatttgactcttccacacccaaatttgccctagaaatggctcttggttcactctggtcatttgtttttctctctagcacagtccaagctttctcataagtcctaaatgacatttcaagctaggattaactcactctaacctctaaatactaccaattccagatttggccttccagccctcaaaaattcactcttttttcactcataacaccacattttcactttctgaccctangnntaatctaccattcatctctaa

SEQ ID NO: 224848 - DNA, 454 bp, Glycine max
cttctttggaccttgaacaggcaactaactcctctttcataaccatgccatatgctcgcgactggtccctttcttcccttcgcaacttgagttcactattgctaccccatagagctccgcgaaatttgttccggccatactcttccttgcgagccctccttgtctcttgttcaagggctcttgcagtaattgcattctcttcccgtaacccggcacactccttccgaacgtgtgtagcggccaacttgaacttctccttggcaagttttgcctttcctaactcgctattgagagtttggacttcttcgtcctcttccggtgcttcaaaactctctttgctgacgacttttaacttggcgagccaatctaaacctcgtatatgaactttcagccattcgtggtacccaccaatgatgccattacgaatgcctctaagctcttgatctttctttaa

SEQ ID NO: 224849 - DNA, 374 bp, Glycine max
  unsure (1)..(374): unsure at all n locations
agcttgaagaactntccaagaaagtcatcctatgaacttgaattccactcacttaaagttttattacagctaggctatgtaacaagagctactctttttcctaccttgactntntatccatataaaaatatgaaggtttttgccgagaaggttttaatgagacctcatcctacaaatattatcaatgaagaaatatttcaacaatcacacttatgtcattatattactccttttttaatattggtccccctagaataccctctttggctaaggttaaacttcattaatcataattagtagttccctcctgaataccctgttgaactaagggttaacttccttaatcataattaatagttcctctctaaaaactc

SEQ ID NO: 224850 - DNA, 425 bp, Glycine max
  unsure (1)..(425): unsure at all n locations
taagtttctctacacatgaacaagatataaaagaatgggttgcaccggaatcaaatgacataagggaatcccatttatgaaacatttaccttggattagatctttggattttgaagcttcaacactgttaaggataaagactcttcacatggccttcaaatgtccagtttggtcattcagggaccattctactccttcttgggatataggcaatctctttgaatatgccccttctttctacaggttaaacaggtcgtgcctttatcaacacaatttgaggagatgtgctttggcttaccacatttgtaacaagtgatctgagttgagaaactagtgggtttgctaccactaccaccaacaaaccncataacaacagtcttctgatggttggggagaatactatactgcttangaggggtcaagta

SEQ ID NO: 224851 - DNA, 463 bp, Glycine max
agcttatccttatggcctgcctccggacttttttctccgtgttatcccgaaagatttaagccaagcccctacttttgaggggcaacttccaccttatgaagactatcccgggcaagacgatggggaaggagatacccatcttggccccctgctccacctcaaagatccatcctcgcatgaaccaccccagccgaacatagtccgccatatcccggcctcacccacacccgtataacaatttgttcccttcgcagaagataagggaaagattgaagcgcttgaagagaggttaatagcagtcgaaggcctcggccattaccaattctcggatatggcagatttatgtcttgtgcccaacatctgtattcctcccaagttctaagtaccgactctgatagtacaagggacgacatgtccaaggggcatcttcggatgtattgccggaagatgggtgcgtattctg

SEQ ID NO: 224852 - DNA, 424 bp, Glycine max
  unsure (1)..(424): unsure at all n locations
tgttatttcctcacagangtaactgagcatacttgttttgtttttgtttgtgctctagttttttctgccttctacgttcatgggtacaatattctgaatatttgatatattttatgcatatgtcatactatgattaattttgaaaaaaacggtttttggttttgctctcttctgagttcaggggtatactattttggaaaattagaacagggttattaaaggaagaatctttatgcatatgtatgtaatatgattaatcctgaacaaagggtatatcgtttggttggtgggatgatatcgatggttcctaaatcatgtgctctatctattctttttcttcttttttaaataaaacgaaaaagatccgcgaatctatgcactattaccatgcaagagtctcttaacgatctaccttacaattaac

SEQ ID NO: 224853 - DNA, 368 bp, Glycine max
  unsure (1)..(368): unsure at all n locations
agcttcttatccaaggcactctcttggaggttaatctctttcttccatggcttattccctagtggatggtgcctcctcttacctcttctcctttgtcttccactgcatctccatggtggaaaatcaccattgaaggacctcatttaagctcaaagatccagcctccattgaagctccacaagcaagcttccatcaagtggtatcagagcacaagagcttcaagtaggtgctccttaaatcgccatttgttttttgctctaccttctcttccatagtctttgctcattattctcatgtatatcctcacatcgcttgcgctaaatgtttctaacattatttcttacattntccaccgattaaacttgcta

SEQ ID NO: 224854 - DNA, 435 bp, Glycine max
  unsure (1)..(435): unsure at all n locations
tgttcgcacatcgttcgcgtgtatgatatacactcgactttgtttgaagtanaggagaccttcaatcctataacgcaacgtggcggacaaaaatgggcagttaacttgaatggccattactgtcaatgcggaaggtattctgcgcttcactatccatgttcacacattattgcagcttgtggttacgtgagcatgaactactaccaatatatagatgttgtttacaccaatgagcacatcttaaaagcatactccgcacagtggtggcctcttgtgaatgaagcggcaattcctccttctgatgaggcatggacactaatccctgacccaactacaattcgtgcgaaaggtcggccaaaatcaacaaggataatgaatgagatggattgtgtctaaccatctgaccaccgacaaaaatgtagtagatgtggagct

SEQ ID NO: 224855 - DNA, 308 bp, Glycine max
gatgatgacaaaggtgatgaacaaatagctcaaaagatcagagaacaactcatgtgaatcaaagaacatctcaagtgaatgatgaacatgtcttgagtgtccgaatcaagaacaattcacgactcttgaggacagcctatcatagaacagctcacgtgaatcaaagaacatctcacgtgaatcttgaacaagtcaagagttcaagaatctagatgaattcatgactcaggaagaggcctacgctcaagaatcaggattcaagattcaagatctcaagaatcaagatcaggattcaagactcacgattc

SEQ ID NO: 224856 - DNA, 297 bp, Glycine max
agcttcttccgaatggattgaagagtcgtatttctgtttatcaagaattccttcacagcatcaattcttgaagtgcccaagagatattcgggaaatgcacaaggctctctaccatatgtaatctcatacggtgtagaccccgaacccacagtccaagatgagttatgagaccactctacccaaggaatgaatctttccaaattccttggtcttccatggacaaacgcacgcaagtactggtcaatcactcgattgagcaccttaacttgaccattagtctgcggatggtaagctgag

SEQ ID NO: 224857 - DNA, 479 bp, Glycine max
  unsure (1)..(479): unsure at all n locations
tcaagaattatggcctcatcaaactacatgtattcgcgatggtatattctatanatagacctcccatctttaatggagtgggttaccactactggaaaacccgcatgcaaatctttatagaggcaatagatttaaatatttgggaagccatagaacaaggaccttatgttccctctataatagccggaaatgcaacaatagaaaaacctatagcagattggactgaggaagaaagaagattagtacaatataatttaaaggccaaaaatattattacatctgccctaggaatacatgaatactttagggtttcaaattgtaaaagtgctaaggatatatgggatacactacaagtaacacatgaaggcacaacaaatgttaaaagatctacgataaacactttaactcgtgaatatgaactcnttatgatgaatgtacatgaaagtatacaagacatgcataagaggttcacacacata

SEQ ID NO: 224858 - DNA, 401 bp, Glycine max
  unsure (1)..(401): unsure at all n locations
agcttctacttatgaggcatggcggtcttctcttaccttcttgtctccaacgcgagctttgaccactgttcttccttcccgcgatgcttcttttcatgtccgcctgagtgggcttatagcctaaaccatacttcccacgatttccttgggtatttatcaggctagttatgccgccgttgtctttgcctaatcccatcccgggttcataaccgttccccaacataactcgggccatcattactgctgcatcggacagacaaggttgcccagagagggagtcacggaggaaatgctgaccacctcataagactgganagtcagttctaacgattcttctgcggcttccacataaggcatagaggatgggcagcttaccaagatgtcttccttccctgacacga

SEQ ID NO: 224859 - DNA, 401 bp, Glycine max
tatggaggaagcctcctaatgaagcttctagttatatctacatgaagctacctcggtaaaaacgctgcccagccttcgttaaccgttggatcttctcgaaatttggtctgcaacttcacaagacacttgtccatgatctgaccgttgggatatttaagaagatttctggagtgtgctagaagcttccgttcccgagagcatttcttatttaagcacttcagcctttgctttcgtgtagcttaagaaaaacgtcatttcttcttctttctttcttccaaagccatttgtaaagtcccaagcactttttccatcacccatagccaccattagccaccacaaaccatcattgttctccattaaaaacccacaccgagaggaactcttcaaccgaagcagaatct

SEQ ID NO: 224860 - DNA, 440 bp, Glycine max
tctaatcacctgagctgcaactgaatcagattggagatttttttctatcccgaagcttctcatgttatagattctagagagagaaaggccaagctccacgattttggccattcttcgaagagcttctgatgtgagagatctacagaaagaagggctgaatccagagagttctgagagatcttgctctgccaacacctatcgagaatggagcttgaaaaggaagtcgtctcgagagctcgagataagtttgcgagcgactgcgagattctagaggtggaggagacatccccactacttggatctcttcaaccctccacttttcttttctctgtgctgaaaggaagccccccagatatggagagctaaatcctctattgctcctcctcgcaggacctgacgcaacacctgatatctataaatgatgtcgatgcgccctatgc

SEQ ID NO: 224861 - DNA, 456 bp, Glycine max
  unsure (1)..(456): unsure at all n locations
tattacggacactatgaaactcagctanagtatgcccgagtcattcatgcatatgagaagttgtttaagtattggcgatcagaattgccattccttggattatagggttgaaccaagctcatgcttttacaaaaaggttcatcaagtcaagttgaaatatggaagtaattgtcttgcaaaattggggcacaagatgaatcgagtcacatcactgcttcgtctactgccaaacatatttaggattattgatgtccttgttactttcagtttcaccttgacaaagatgtcatggaccatgttgaaaatctaaattgattcaaccccatatcctgcgtaaaaattcgcaatcttcaactgtacatcattcgcatacatccatgctcttcattggttgcattgctcattgcattctctccttgaaaaataaaataaaataaaatataatgaacttaatca

SEQ ID NO: 224862 - DNA, 448 bp, Glycine max
  unsure (1)..(448): unsure at all n locations
agcttcatggtgaatcagaggtgattcanattcgttttgatgataataatgatgataacaaaagataatgacaaaggtgatggcaaaaagctcacagatcaatcaaagaacaactcaagtgactcaaagataaatcaaagaacaattcaagtgaatcaagaacaattcaagagttcaagataagaatcaagaagaattcaagactcaagaagaaagttaagagtcaagaatcaagattcaaggttcaagatctcaaaaatcaagatcaagattcaagactcaagattcaagaatcaagagaaggcttaatcaagataactataaaaagtttttctcanaaattgagtagcacatgatttttctcacaacatgtttaccacagagttttactctctggaatcgattaccagagcnaattgtttgaaaagtttcaattgaattacaacgt

SEQ ID NO: 224863 - DNA, 461 bp, Glycine max
  unsure (1)..(461): unsure at all n locations
tacggacctataaaactcagcttctaaggaggtgagcttanttatgagaagggtgtgtgtatctaatctctagcttctcaaggaagttttctcaaagaagcttctcaaggaagttttctcaagaaagcttctcaaggaagctacctagtctataaatagaagcatgtgtaacacttgttgtaactttgatgaatgagagtcttgtgagacatacttcaaagttccacttctatacctcttttattccttcaatttcgtgctcccccctctctctttctctccctctntcttttcctccattgaagcatcctctccaagcttcttatccaaggctcatcttggtggtgaagctccttcttccatggcttattccttaatggatggcgcctcctctcacctattgtcctttgtcttccgctgcatctccatgggggaaaatcaccattaaaagaccccattga

SEQ ID NO: 224864 - DNA, 375 bp, Glycine max
  unsure (1)..(375): unsure at all n locations
gcttgacaaactcgatggagatccattctttatctatnagaattaggttcagacttaattgtaaaaactaactcaaggtaaggattgatgtcacccctgcaagttgcgagatggacgtctcagttatgaactctgcaggattaggcatatttgggaggcttgataacagcctgataacatgtgacccaataggccaacaacaacccttattttgaagccatattaagaatcaggtttaggtcttactcaactcttaaaagctagtttgataggtgaaaaatgcccccttataccactagtctaggtgtgaattcctacacaatgctataattattttgcagtggtacataaaataatcatcctagacgtcaaaaa

SEQ ID NO: 224865 - DNA, 458 bp, Glycine max
  unsure (1)..(458): unsure at all n locations
tcttgngtagcaactntntatggttaagatatctatcgtttgcttgatattcttgatttattttatgttcacaaagacaaaaatggattgtgctcttagaatgagtttatggattaatcaatctagaaaaaactggcttctaggattggcttagttttataaggattatattaactntatttctagttgagatcttaatatactacctcctttcttatgtataagattatttttactcaattgtttgtccttttttttataagatttttttctaaaagtctgatgcattaattatttttatctataatatccttaattaattgagaaattgattgagagaaatgcttcaacagctgaagagttgattcagttaccaaatggaaaaatctctttggtgagtccttgagcctctagttatagtttctaaattttagcttgagctntttattatgttcata

SEQ ID NO: 224866 - DNA, 385 bp, Glycine max
  unsure (1)..(385): unsure at all n locations
agcttggaggattatggtgtacccatcacatgtggtctacgnggcggncgggcgatgatgcacaacaagctntccacattcacaatgcgcgcataaacccaccatccccttttgcccacctccaactgagctcacgtactcccacgtagcccatatcctcgnttctctcaacaccgggtacccatcaatcctcccaagctttcacaacatccaagcaaaacaacattcatacagcacaagctatcacagccaagcaaaacagagcaaaggcagaaaactctgctcaacacatcaaccanaatcacaagctttttcacttaaagaccacagttacaattccttcgatccaattcgttaaccggtggatcgaactcacaaatttact

SEQ ID NO: 224867 - DNA, 433 bp, Glycine max
  unsure (1)..(433): unsure at all n locations
tatgattnttcagatatggagattatagaaactaattgttataacatgaagctaatatgatacgacacatgatcgttcacctagttaaattttatcaattatcaagtgtttgctttacacctttgaaacctttccattagtgtttttaatactataataataacagtaagagtttgaagagttctttttttcaatggttacaaaaattctttgtcactttctaaagtgttatgctagtgagtgagtcaatcaaagaaaaagagcattttggtaactatctgacaaattcagagcctttttccaacatatgtccctgtttccctttcaactgtttgtgttaaaacatcaatctcaaagaagtcaatgtgcacgttcataattctgtctcaaccccaagcctattcactccttttaccattcccaaatgtattta

SEQ ID NO: 224868 - DNA, 203 bp, Glycine max
tacctatacttggttttttcttttatgttaaagtaacttagactataacttatttatggggaaccaagctagacctacctttgagaagttaagccagctaaagcattaacttgatcaattacccaataagctgaactccttatactgctatacacaatatacaacacaccggtcaatacatacaacttttctattaataacca

SEQ ID NO: 224869 - DNA, 228 bp, Glycine max
  unsure (1)..(228): unsure at all n locations
accaccaaancaacaacctncaggaaacatgcctcgttctcccttcccacaaacaaacaacggaccagcagggcgtgatcctccccgtatcattctacgctacaacaacagatgcatatgcaaggaaaccttccctcacctcattgaacacgcggacttccaagaggcgcacccatgccacctcatcccagcaatccaatgaccggcttcatgcaggaaccacaccct

SEQ ID NO: 224870 - DNA, 360 bp, Glycine max
  unsure (1)..(360): unsure at all n locations
tataaaagngaaggtangtacaaagagaggaggttatatttcttgataaagngctcagacgctacctgtacacgtcaagtctgtcaaacaaccctggttctcctgcatacggccattaaacaaagtcacatatgcactaggatagacggcctctattaaatattcattaatcaattgaaagtaaactatcagcattaatataacaagattattattaatcatacatattgcaccatatatactaacactcaactatatcagcacaaaaactgacatactatcagacacgacatcatattatcagcgtagactcacaccccttcttcctctcttcctattttaatctcccacatgcacaat

SEQ ID NO: 224871 - DNA, 362 bp, Glycine max
agcttgcacctcttcactcttctcttgcatgttatcctcttccccattaagaccctctagctgtgggagccaagttatcccttgcgttctagacttcaaccattggtgatagccgcctatgacaccattgctacttccccctagctctttatctttctatttcactttattccacgctttatggatcctcctaagtatcttcgcattagcttcatcgaaacctcccgcgatgaaaggcgcgatagtttccttcgatggcacacacctcatagggtcacctaactgtcttatggacaacacgagattacaattaatacaacccatcgtccctatcaaagggacatttgggatttctttacatg

SEQ ID NO: 224872 - DNA, 400 bp, Glycine max
  unsure (1)..(400): unsure at all n locations
ttagatagcgctntaaacactagagagaagtatttaattagtgcaaaaaactctatctaaaatattttaagaatgaaaaacaaaactaacatatcttacaaagactaaaatgaaaaaaaaaatagtaaattacattgacaaaaaaaatatttaagcctattttatttcttattgactatatttaatttttttttagatttgactcctctaaacggaatagacatgtaaagaaaaaaaaaggatatatatgtctatcattaatttaaaattgtttataaagattttaaattgaggttgtgatcacgaatttatcgcgttctttgatattgtgagaaattacggagaaatataattgatgtcatcattatgttcataaacatcctacaaaccttgaatggtt

SEQ ID NO: 224873 - DNA, 426 bp, Glycine max
  unsure (1)..(426): unsure at all n locations
agcttctatataagctgaaccatgttatcaatattctcaagttgtttnttattcagaaaactagagtttatctcttttatcttagtgagagtgattctcctaaattctggaaggattcaagaacaccttggctgtatcaaaggactatcacaacctttgtgtgttgccctccctggaaagagtgattctttccttcctttcataatcacccttggttttttcaacacccattccagaaaatccacctctgcccaaaattatctccgggccataacttccattttatgccctcaattaagtgatcttgggcctaaatggaatttcaaacaagacctttcccctcgttggaacacctcatttgagcccctgacttcaattattgccttttattttttgtccgccccacttacctccttttacatccct

SEQ ID NO: 224874 - DNA, 396 bp, Glycine max
aaatgcgaaaaatgaggaccctagggctgcaaactcgtcaatcccgtgggtatggctttcgaaaggcgggaaaagaagtctttgaatgtaataactgatgcaagctccattggagcttgtacgcctaggatcttcttcatcaatggattcctttgcttcttggaagataaatggcagcggaatggagaacgaagagatagatgacacgccactttcacgagaagatgagtctataggatgctcaccaccatacgaggccatggataagagcttggaggaagaatgagatgaatgaatgaagagggagagaaaagcacgatattttgtgctctacatgagctctgaaatctgatgtaatattcaatgataaagttgaataaatgccacacatgacct

SEQ ID NO: 224875 - DNA, 301 bp, Glycine max
  unsure (1)..(301): unsure at all n locations
agctngatgtgagaaagcgtggaagagtcagtcttctctacttttgtttgttgaccatagagtggtacctggagatatgtcgcggnggtcaggagaccttggggacgtcaggtggggcgctattgcccanaaccaagcttgactaatcccgacccaacccgggcatagtcattcaatgagaacctgtgacgtacctaaacaggcgagctcctggcagtcaaccaataaaagaacaaagtccacgaagcaaggaggctttgtggcggctggctaacttatgtatttggatggtatctggaaa

SEQ ID NO: 224876 - DNA, 413 bp, Glycine max
  unsure (1)..(413): unsure at all n locations
tcgagaccatctatcataatccatattatataatttgcaatcagctgctagggttccaagaaatcctgcatgcaaggcttgtgcttcaccaattgcttggccttggtcaacaaaattcacaatgatgcgtaactccctaggtaagctattgactcccctaactntcaccttaatattcttgatcgtttcttcagagtctttaacaataaaagaatttctcaataagaaaatgtaatatacttcatatgnatgatattacaaaaactaaaataaaatacaatacttgtatacctattgcctcaacagtccaacattgtatagactcacgcccaacaggatgtctagttgtttcatcttcttgtggaaacttcaaatgttgatacatgagaaagagggacattaccagttgggac

SEQ ID NO: 224877 - DNA, 197 bp, Glycine max
  unsure (1)..(197): unsure at all n locations
agcttagttagcccaaacaatgatgatggcaactgtcccactaggtcgnaaccatgttcggtataaatattcgaatatggtaagcttgtccaacaaatcggtgatctgcccaccacaattattatttgaaagatctaagtgagacacatgttgaccatttctaagtgatgatggaatctgaccgctgaaattgctga

SEQ ID NO: 224878 - DNA, 403 bp, Glycine max
  unsure (1)..(403): unsure at all n locations
atctcaattctgtatgatagtttcatttttgagacaactatngttcttgtgtctatgctaccattntcttcaacgtttactattaatagggcacaagcaaacaaggcacaatatgttggcaaaacccatataagtaagatactatagtaattgatcggtgcttcaagaaaaggacaaaagtacatttttgcgaatggataatcatgctcacattcaaaggaactactgatagacatggaaaataacaatcagtacccgtattcacccatctgaatcttctgattttgatgaataatatttaaattgatccgatatgaattcggacaaaaggcggataccggtatgagtatatattattacataccgtccgatcctgacccggactcttctctcacttaaaatt

SEQ ID NO: 224879 - DNA, 206 bp, Glycine max
cccaagcaccgcagctgcagctttccactaccgaaaggccctccacatttttgggttatttacaaagtacaaaaagcaagtattttggttgataacaagtgtaaaggggaacataaatcaaaagggtatttcactaaacctcacatcataaagaacttgctgagtaacgtcaaaagtggtcacgaaattgaagttgcttctgcggc

SEQ ID NO: 224880 - DNA, 420 bp, Glycine max
  unsure (1)..(420): unsure at all n locations
attcatgtaaataatattgtagagtgttatagtatgagtccaaacattaataagtgctagaggttgagaatattatggttaatttcatgaacatgtatatgttgtaccttatgaatatcattgggaatgttatgagatgttaaagtgtggacatgatattcgattgtgaataagtgaatgtgtttaacacttgatgttacattacatatattgtgagctatgaattattcaataaccggaccagtaattatgtgcagtgttaaagagaaagtgtacgttcctagttaggaaccagtgttaaattgtagcgcaattatgctaaacatgtttgaaacatgagtgtgacgtcgngatattgtataatacatgagcagtgcttatatatgaaatattgtgataactcgcgaaataatatcgttg

SEQ ID NO: 224881 - DNA, 344 bp, Glycine max
  unsure (1)..(344): unsure at all n locations
agctttttcaatcaccgacaaggtgtataaggtttttgaaaacgtctatgccgacggtatactgtnttttctttcatgtttcaattgcacctaacttgttttttttttcacagatagggcatgcaccatggaccttaacattgtatcccctcaaatttccatatgttggaaagtcattaatgggtcaaaatagcattgcacacaacttgaatgtctcatttcgatacccattaaacataacccctttgtcccacaactttgtcaagttttaaatcaagggaccgagataaacatctacggcatttccctgttatattgggccttgatatcatatcaacaacatc

SEQ ID NO: 224882 - DNA, 350 bp, Glycine max
  unsure (1)..(350): unsure at all n locations
attgtatgaataggttgatttatataatcaataaacatgatattnttagtacttttacaatcgaaaaatggctcacaaatgatgagaagcatctaagctgacgaaaagcataagtgtgagcctagctagaataagaaggatttacattatggagatatatgtatcgaatcaatctnagttaaatgtgaggagtacctgctgtgcgtgtctacaatatctaaggacaactagtttactatggaagctacaggtgctatgtttgcttccatatgcaacgaggtaagttgttttattattaattatttgatctactcaatattaataaggtttttgtgggcgctaatatatat

SEQ ID NO: 224883 - DNA, 190 bp, Glycine max
  unsure (1)..(190): unsure at all n locations
agcttggagagagtggatcatgaccttctcgctttttcaatctgctggcttaacgagcgnccgctaagcacaacactcctgggctaagtgcgaggaagactctgtaagaagattacctatactcgttcctcttagcacacctgttcatcttactaaacgcaccgcttcagttctattgcttaccgagaaa

SEQ ID NO: 224884 - DNA, 483 bp, Glycine max
  unsure (1)..(483): unsure at all n locations
aagcttgtttatcctcttctcgttaggtgcccatgtaagacctgtacagttgttcaacatggaatgcaccccctgaaagtatttgtgataatggggcgagtatgacggcacatcataatatttaattgtaagagttggtctatgttttcctagacactttaagaaaaaactgtagataggtaatagaagcttgatagcatgtgcaagaagtaacctgaaacacatatctctgatcagaactatccactgacaggacacccttcattctgtataggtcatctcctttatctttaatcactctctcangccaatcgtcaacctagaccatcattaacggacagtgagataaaaccataacaaaagcccaagatgtaccattaagcaattcataattaagacttnttgtgtcgctaaaaaaacgagtagcatacctcataagacaagattcctctgtctatctgcactgagacagtgatcatccat

SEQ ID NO: 224885 - DNA, 234 bp, Glycine max
  unsure (1)..(234): unsure at all n locations
agctttcatcttctcaatataaagcacataatcttgtttacatctatcgtaatnanctccccacccagctccattgagagttgtttcatcatctgacgaggactgcagaaaagaaaatcatgatcttaattaacaaaaagcaaaggacatccgatgatgactgcagacaagaaaaccatgatcttatataaccaataagcataggacatctgatgatgactgccgaaagaaaag

SEQ ID NO: 224886 - DNA, 462 bp, Glycine max
  unsure (1)..(462): unsure at all n locations
gttttcttgatatggctattctggttgagacacaaggtgatttgttggataacatagaggataatgtggttaatgctggtaactttatccatggtgggactaatagtctntactatgccgaccagatgaagaagaagaacagacaatggatgtgttgggatattgctgtggggctgattatactactcgtatgcatcattgcaatgttgtcttcttgacttgagcaatttggaaagggtggtttagagttacgagactgtaaagctactttcattttctctctaacagtgtcaattgatcttgtattgttgggagcagctcttgtaattgattcatatttgtcatgagaactacaatttgctgaatagaactgattttgttgatcgatactgaatacaattgattggtaacattcagtattctatttcttagtctgctgagatagttcgtttatctgtgctt

SEQ ID NO: 224887 - DNA, 401 bp, Glycine max
  unsure (1)..(401): unsure at all n locations
agcttgccgctagagcggcccgagtttctgtcctttcnttttnanacaanngatccctaggctcttgaccttgactcgatagaacctctctttaagcgaaggcgtttgacttgatcccatgttctactaaagtgaaacaaaatgggtgcgaataaaaactccgacttctatcatgggtggattggattgaaatatgcttttgatacagatgctatttatgaacacgggagcccgggtaattgtctcttcttagatacaacggtcttggggtgcaaagtgccccccatatgttttaagaaggggacaccgccccttcggtggtttgcacaaaatggcgactatgcaataccctcccctatgcttttcaaagggccacacgggaagttccttctatgccattt

SEQ ID NO: 224888 - DNA, 389 bp, Glycine max
  unsure (1)..(389): unsure at all n locations
actaagctcacccctccctttttagaactctggcaacatttttgnctatgctagctaaccaccacaccccgcctatgtttttgcataactactttgcaacaatttaaactataccttgccattattatttttaaactcctatggttgcaaataaactacgcgcatccaaatataattcaggaaactgattactaaaagcatgaatcttaaagaagagaaattgagatactaggctgcctcctagtagtgcttcttaacgtcttgagccacacgcatgaagatgatttgttgataacgggcctaacacctgctagtacctgtccctaagctttcgaatataggagatgacatcatgcagaaagtgtgaaaccaaccacaaaatacccata

SEQ ID NO: 224889 - DNA, 261 bp, Glycine max
  unsure (1)..(261): unsure at all n locations
agctngaatagcattatgcctgttntcnangtatatcgcaaatgggaggaccaatcaaagttgcagacaacgctaagtgcaggcctactacgctaagccccaaaactgtctaaaatttgaaaatttggaatttggctcaacacgaggttgggctaagcgcaatgtgttaaaaccaaacgtcatattgactcgcttagcgcggttattcgctaagcgagcattatgatgtttagcttaaaaacaaaggctctgggagttttt

SEQ ID NO: 224890 - DNA, 389 bp, Glycine max
  unsure (1)..(389): unsure at all n locations
ngactgtgaacctcattaccttatctgatgctntattcacaatacatacactgctcacacaaaatttccttaattatatatgcagaaatttcttcaatattggcttattagctatcacatgctagctggccgtttcataaggaggacttacctaaacaagttgtgaaacgctaagatattccgtttgtgcatagcgttatttcatatattaagcggatgatcatttcnttttccttcgcgtttatagcaacctaactngaatctgaagtaggcattgctatcttgaaactaagaatagtatttagaaatgatctgactagaaccatatgaagcttgattgtgaacctctttaccttatgtgaagctttattcacacaacatgcactgcc

SEQ ID NO: 224891 - DNA, 231 bp, Glycine max
  unsure (1)..(231): unsure at all n locations
aacacatcacaacttctgtatttgcacgtgtaagcaatctctgctagtggaagcccatctgatcctgttgaatatgaatgaatagttttgttcctggacagttaaattaatacttgctaagtatttncttattagcagactcacattcccacagtataggctgacttttttatattggttcctactatgcaattaagccaacaatgcttacatattctggcttggcttggt

SEQ ID NO: 224892 - DNA, 401 bp, Glycine max
  unsure (1)..(401): unsure at all n locations
catgcaagctngtgcaataactatgaaggcgtgcaatccttgtatgcgttattgaaacatttacttccactatataattgatttgctaattcattttggctttgcagaacattgtgcaatcatgggaactgagggtatctgcaattcgatatcatgcgagttcatataatttaattaaaggatgttggtgggtcctcattggaattataatgcaagttttttttctattctaaggaaaagcaaaatctgatacaaatcatctgtaaaaactaatgaaaagtctttgttgctcactttcacgtaccaaaagactgcgtacatattaaataaaatgaccantattattgaaaaaggtgggaatctgaaaatatgatatataaaatgcctttattttatttaat

SEQ ID NO: 224893 - DNA, 135 bp, Glycine max
  unsure (1)..(135): unsure at all n locations
tactcagctgtgaacgatcctggaaaaatgttttcnaactctnttttaagttgatttgataagaaccaatcacccccccttggttgaattccatcacttttttcagattgngaaaataaatgagtttgtcatgga

SEQ ID NO: 224894 - DNA, 457 bp, Glycine max
  unsure (1)..(457): unsure at all n locations
actcagcttaaaatactaaactaactggncgaagagcagagaacgatgattttttgttgtacaacggtcacgacacggatcacggagatgttactgaagtgcctcagccttgattcttcttcttctttatccttcttctcactaatttaagtgacaacctcttacaaatgatgctgaatcccttccctttagcccctcatgcctatttataggaaaatgaggggaggaggcattgcttcttcagaagtaacttgctagtctatgcgagctggttacttcatctctaagttttctaatgggcccaacggctggataatgtacccatagtgaccattntgccccattttgagtatttggcacatttcttccaaacgtcacaaacctcagattggcgaaattaacgttaacagttcactcggcggaagaatcaaatgtggccatgatcaccccggcaaat

SEQ ID NO: 224895 - DNA, 308 bp, Glycine max
  unsure (1)..(308): unsure at all n locations
agctntgagcggatctcgacaagggagggagcgcgttctatcattttaanccnnaggcnaggaaccagggtgttttgccttgtctcagcctgatgctttaagggcgacatacaccaacctcgaaatgctattggtatctgtcatatcctcgttaagcttgtcgatttatgaaacaaatatccttatcatatctatctgtgatgccgtaatttttatgttcctaactacaaatcaataataaactgcctttttatattagacaattcaatgactaattttccgcgcatctggggttactaaaataattt

SEQ ID NO: 224896 - DNA, 407 bp, Glycine max
  unsure (1)..(407): unsure at all n locations
atggtattccncatacgaaagttatttctaagtcaataaatgcttaaccatatgtctgttgaacacatatacatgacagttacactagaagagcgcacactgcacatcctgatactatttgctatatttcatgttttatgtggacatggaggaacgcatatgatcaatgctatctctatatcccagtattcttgtatacatgcatataagacaacatatacataaaatatcttctattagcagcaactatatgtctggtaacacatactgaaacatgctcaggactcataacagcttatcaaggactaactcttaacaacatacgctattatataatgacaatcgagtgcttcattacatttcttacatgccctttacacacaccattctttaattgagcttaagtg

SEQ ID NO: 224897 - DNA, 197 bp, Glycine max
cgacgacactgctggtgttatcacgatgacaaccaccttatagagtcaaagcttaatggcgcaatactactcatgtagtgcaggttatctagactgtgagaatacacgagggacagattattttcatatcataccgagacggtcagtataaaactcgccattgggtaacccattctacgacaatgcctattaaactc

SEQ ID NO: 224898 - DNA, 339 bp, Glycine max
  unsure (1)..(339): unsure at all n locations
agcttanaaaggacaccaacgacattatacaccgtaaaccaattacataaaacaatacaatcatgcaacaacatcataatagcaagaaatcattgaacacttcaacaaaaaaaaacaacttgaaagcgagaagaggaacacgaagaagaactgaacaagaagaacaccacttacctcgaagaagattttcaacgaacaagaagaagatctgaagaagacgaaggaccaacaaccaccaacaggtacaacctttaacacagaaaaagacgaaggatgagcggaagaggaacaacacccacaccaacggtgacagaaagagaaanagtcaatggtgagaga

SEQ ID NO: 224899 - DNA, 443 bp, Glycine max
  unsure (1)..(443): unsure at all n locations
atgtgtacacatgtggaactntgatgaatgagagtcttgtgagacacaactcatagttcaacttctctcccccttttcctccttcaatttcgtgctcccactctctctttctctctctctctctctttcttttcctccattgaagcatcctctccaagcttcttatccaaggcacattcttggtggggaagctacttcttccaaggcttattccctagtggttggcgtctcctctcactttttttcctctgtcttccgttgcacctccatggtggaaaatcaccatggaatgacctcattgaagctcaaagatctagcctccatataatagttacgagctagctttcaccatttacaaaaccttttcccatagacaacctctgttgctatagaagagagttacgacctctagatatcaatgacttaagataaatagttaactc

SEQ ID NO: 224900 - DNA, 304 bp, Glycine max
cgacgaagatcgacgagctgatgaagatgactacgatggatgatgacaatgtggatagggagatcgataggcagcatgtggccatggctgaccgcaagatggtggagctggtcaagctcaccactcgagcaatgaaccgaggtggcggtggtggtgatgctgtggctgaagtggcgttcgaaggggctcttgcggagtcggagagggtcatgactgctctggattgcatgaggctcaatacactaacggcgtgttggatggcttattcaatgcaccgtgggacttcttgcgtgcaatctgctat

SEQ ID NO: 224901 - DNA, 177 bp, Glycine max
  unsure (1)..(177): unsure at all n locations
agcttgcatgcgaggccatgtagattttcttaatgttaactangacaagagcgcgaccgctactatagtccattatggtgttcattctttaggattttctttgtttcttctgacagatgcacttttttattcataaaaaatctcctctggcttgagatctctcatattgattctctg

SEQ ID NO: 224902 - DNA, 407 bp, Glycine max
acctatgaaactaagctcgtaatattatggataattcgcctgttccattattctctttatgtcattagaggatacttcctcgatgacatcttatgtcttgaatggaattgccatgacaggattattgttactgtctttgatatttggtatttgatattgtgttgcgggaggtaattccgattggattaacttaccatccttaacttgccaatttgttatgacatttgttgttggatcacctatgatgtcttgtttccaagggtaatctatatcctctctgatggcataagcattgaaccaatccaagaacacgacattattatgactctgtcacatattcttataacttgtcttgtaattgttttctgtttgtacccttgtaatgatggaaaaaccattctctttga

SEQ ID NO: 224903 - DNA, 188 bp, Glycine max
agcctgatatgtgaatactatactgtttgctgcttttataaacacctatacggccgaaggctgataacatgatatttttcataatgaaaattaatcttgtttcaatatatacgtctttttttgcacatcattctgatatgtgtatccacaggttccacttgcaaaagaaaatggtgaagaacctgaat

SEQ ID NO: 224904 - DNA, 281 bp, Glycine max
cacaacaagtgtccacatccacaatgcgcgcataaacccaccatcccctgttgcccacctccaactgagctcacgtatacccacgtagcccatatcctcgtttctctcaacagcgggtccccatcaatcctcccaagctttcactacatccaagcataacaacattcaaacagcacaagctatcacagccatgcaaacagggcaaaggcataagactctgctcacacaccacacaatatcacagctgtcttacttaaagaccccagaacaattcctttgat

SEQ ID NO: 224905 - DNA, 261 bp, Glycine max
agcttctcaaggatgttttcttattaaagctcttatgtgaactacatagtctataaatagaagcatgtgtaacacttgtcgtaactttgatgaatgagagtcttgtgagacacaactcaaaagtcaacttccttttctttgtctcttccttcaatatccggaggccccctctctcttaccttcctctttttttcctcctctgagcgtcctctccaaccttttattcaaggctcatcttgggggggagcctccttcttcatg

SEQ ID NO: 224906 - DNA, 381 bp, Glycine max
cttgactcatcttctacttgaagtggcatctccaataatctttcttcattctccattccactgtcattgatcttcaagaagcaaaggacttcattgatgaagaagatccacgtctacaagctccatatggagctacatcatgtggtattagagcatcttcatctaggtgatgatcttttgcttcctctatctttatcgttggtcaattcactttaattccttgttcttcacgttattctctatgtatatcctccattgtcttgtggttcggtgctgcttagagtagattaacaaaatacaccgattaaatcatagatctacactgtctcttgcatttctatggttcacactttatagatctactcttgaatcatgcttttg

SEQ ID NO: 224907 - DNA, 103 bp, Glycine max
agcttcttatggatttttaacaatctatcaactcctttttcagaaccatgctatgtgctcgtgactggtccctttcttccttcgcaacttgatgttattattg

SEQ ID NO: 224908 - DNA, 370 bp, Glycine max
atcttcttcatcaatggattcctttgtttcttgtaaaatgaatggcagccgaatggataacgaagagagagagagaggagacgccacttcaacgagaagatgagtctataataagctcaccaccataagaggccatggataatagcttgggggaagaacgagatgaatgaacggagagggagagaagagcacgaaattttgtgctccaaatgagctttgaaatctgaattttaatattcaaatgatcaaagttgaaaaaaatgcacacacatgacctctatttatagcctatgtgtcacacacaattggagggaaatctcaatttcacttgaatttgtggaccaaactctgggagccaatattcacttat

SEQ ID NO: 224909 - DNA, 322 bp, Glycine max
  unsure (1)..(322): unsure at all n locations
gcatgcaagcttcctcttttcttcagttgccggggacgatctttccgtgttctaaactattggtngcgccgcgangnagggctgaggcaacgtgctgggtgccggcccttccgggatcggaggatagaactcgacatcccttcgagcatagtcttgagggtctttgtggactttttcgggctggtgaggaggctctttttcaaggactggagatgcaatatggcccgcatcgtcttgcaagacgggtggtgagtacttgggcggaaatctataagggaacacccttcgggtgattccaggtgagggctgtcttcgtgcccca

SEQ ID NO: 224910 - DNA, 438 bp, Glycine max
  unsure (1)..(438): unsure at all n locations
tgactatggtcttctatatgaataataatataaggatgctctnttgttcagccaaacaacattttttaccaacaaatcaacaatacattttcatgtacggcaaggtatgcatantttacaagcattgcagtcactaatgaatactactatacctttatcctttntattctaaaataaaatcattcattaatagagaaggacaaaagagtccatcattacagtcttatagaggttcgtcgagccaccaagtctttccacacacaattatggtaacacctaccaagtggtgccataacatgtgttggttaatcctatctcttntcttaagagataaagatcaaaagttcacagtctatgctaatngaatgtaatccttcaatttcaagagcaaatgtggacttctttactatnctaaagcatcacaaacaacttcaaatt

SEQ ID NO: 224911 - DNA, 129 bp, Glycine max
  unsure (1)..(129): unsure at all n locations
cctgaggcatgcaagcttaagccatnatacgactaaacggggtttcggagttttattcactcccgaaaagaacgacacgcgccgaattgaatgttaaagctttgatccaattttaacgaaaagaacttt

SEQ ID NO: 224912 - DNA, 277 bp, Glycine max
  unsure (1)..(277): unsure at all n locations
actagctaacatctacttgagcgttcgaatgtacgggacgtattatactttctattaaacgncatcggcgtcagaatcgggtcagatgttcaaaatcaatttcgagcgtcttcatatattttccgaaactcaatcacgacatccgactacagagttattcgcgtttgaactggctcagaggttcaacttaaattcgagcgttccgaatattacgcgctgaatctgacatcgagtaaaagttatagcgtttaattggctctagcttcacattcatttc

SEQ ID NO: 224913 - DNA, 323 bp, Glycine max
  unsure (1)..(323): unsure at all n locations
agctnnggattgggatcaatgcgatccctgtggattcctccctatttgnagnggaataaccaaaatctctcattcttctgatgaaggaattggctcaaaaccctctctctctcttgagggtgttgaatatttgttgatatgtgaggcaaaatgggtaagtttgagtttgaggccttctgttgtaaagagaaacaaactaatagtgctttatgtaataaagactactcattcaattatcatctcgtctttataaaaatatttaattatccttggcaatggaaattgtcaaatgaattcttccgaaaaacccaaattatttttgt

SEQ ID NO: 224914 - DNA, 407 bp, Glycine max
  unsure (1)..(407): unsure at all n locations
tctaggataaatgctctcttatgaccctatttcttgaaatcccagaaaaatcataatttctttgattagtcaggccacattacaagccaataaaggtccttagtgatccaccaagtgtaagcaagatagctttaactgagataaagtgcaaaattgggaacattaattgcatgtcgtacgaattntaaacactcatacaagacacttgtgcatagagagaaacactaaaaccttgtgaggaaaactgaggcaaaccaagctgatttatatctgctactaaccaattctatctcaatgtttgtttatgctntcattgtaagatcatggcaaatgcaagaattccacctaatggaattttgaaattgagttattactagtgttgggcattcgaaggcactctcatttta

SEQ ID NO: 224915 - DNA, 404 bp, Glycine max
  unsure (1)..(404): unsure at all n locations
agcttgtgattntaacgttaaggatgagatgggtattgaaaggtttacncatagcaaacaaacaaacaaatctttaattatataagagtaaataatcatgaatattttttagttgcttaagagggacaaatacagcaaactagaagcaacaagtaacacatcacatacctttttctgacttgaaccccggggagtgcaaagcaatgtctgggatgcccgggtcagaagagtggaggcgccatccataagtgatggttggagtagaaggtggaattaaaaccggaagaaccccagggcagtagaagaaaatctcaaaggcaaaactctttaaatataagcatttttttgaggacattggattggaggctattattggaaaaccctgccatttaagcctttcagtt

SEQ ID NO: 224916 - DNA, 395 bp, Glycine max
gctggtggtcttcttaaaagatcaacctcttggttggaatgttggacaagttgttttctttgttccttgatgaactggttccccgaatgattcctctagcttgagccctgtgtgaaattcctcccttggttgaatcccgacggtcctccttggctgtagccttggaatccgtggcgattctgagatcccatgtagttcacctccctggaagaatattcttgggctatgcattgccctggctcatgtgctccaccgtagatgtggcatccctctatttgcatgattgaagagtgagaaggactaccgcttgtaattgttgaacgggcttgctaagggtctacgtgagggcctctatttgtcgggtcaatagcttatattggccagtgtcgcatctt

SEQ ID NO: 224917 - DNA, 102 bp, Glycine max
atactaatgacatgcatcaacactggatatcataagaacaagtctctataactttctaactcacatatagttggcgccactcaataactatatgctaacact

SEQ ID NO: 224918 - DNA, 432 bp, Glycine max
gctgttttccatctccccttttgatatgacaccctgaatttatattacatgctcttactttcctagcgatcactcacttaattttcatattctcccccttctttttgagtttaagcttcacttgaaattaagttaattactcatgtgagttcttgatataatccctatttctctccccctttggcatcaacaataaaccaaagtgcgttacatatattaaacatacacaaatgactaatcatacacatgacattcattgtaaaatctaaaccaatcatgatgcatgacacatgactagatctaatatatataaaccccatagtcatataacataactcataattgttcagtcatactatgcaaataaaaaaatactaatgttcaatgtcaaataatatagccaatacagcgtagaaatcatgtctaatatat

SEQ ID NO: 224919 - DNA, 347 bp, Glycine max
  unsure (1)..(347): unsure at all n locations
agctngnatattctatttgagggcttcataggagtantaaaatttactcttagctatgctatcctccaattaagaagtaagaagttttatcagcagataaggagacaccaagaaatcctgattattcatactccaagtttgaaggtacaatccagagatgaggatgcaaaacttatagttctccaccaaatgttaggggatgcaaaacaatcaatcaagaacagagaaagtntggttaactttagaccaggaacgctgaccaacaaatgcaacttgtcgtatgatacagacncccaatttcaccttccaaccatcaataattcacatctttattgaactacattcca

SEQ ID NO: 224920 - DNA, 395 bp, Glycine max
  unsure (1)..(395): unsure at all n locations
ctaagctatgctggtttatttanattcctacgatcatgagcatatatgttgtcctgctatgacttcagaaacaaaagtgatcaaataacaagcagagatttaaaaggtactaggttgactcctagtagcgcttctttaacgtcttgagctggacacgtgatgacttgttggtcacggacctagtactttgcttacctatggctntggacttggtcgcctataggtcggccatgggtcgtaagcaacgctctaacacttttgtggatgagctgacgtgaactctaaagtgatggcggtacgtctgttgcccgctgccggccatccccaggctgctgtggtgtatcgccctgcgcctgccttgggagtggngacgcagtacttcttgatgaaagctc

SEQ ID NO: 224921 - DNA, 419 bp, Glycine max
agcttctggagcgtgtagacagagtgtacttttgtcttgacataacatttttagaggtatgatgagattcccatcctaaggaatcttcctaataagcattttgagatatcattatgccatcccttaatctcgtccggggactattgcttgatggcatgcaacccttgtatagaccgtttcgaagtacttggaccctttgttgcacatatgtgaatgcccgatacgccccggaatcaaaaagaacctgggtttgcatccctgaaattccctaccgccctcgaaataaaagggaagggggtccccacccttaaacccctaagcgagggaaccaaataagtattgtcaccattttggagttctatacctcttcgaagcctaaaaaagaaataccgatcccgagggtcctatctttaggaaaa

SEQ ID NO: 224922 - DNA, 374 bp, Glycine max
tatggatctgctagaactcagatggtgcttatggaattcttgccttcaattaacaaggtcttttctcttgttattcaactagaaggaccactactagaaaatatacttttcacactggttattactgtcttacaacattatctattaactgatattgaaactactgacgttaaaagtctctgcgttaacatcggttttttaaaatcgacgtatactaaattacacagcatcgtgtttctacaaaatcaatgtcgtatcataaaataataactaaaaacataaaatatgtagaaaaccacatcaatatttttttctatgaaaatcgatgtctgtgttgaatatgaattgttcactaaattttttccttttccaat

SEQ ID NO: 224923 - DNA, 211 bp, Glycine max
  unsure (1)..(211): unsure at all n locations
agcttcacaacttggcgctgtctagttacatcttcttgtagtnccatcaatcctcaaatggtggctttcactaatccacagtataaatgatggatctaacgaaataaatgcacagattgcaccacacactgtcttgtccatttgatttatcacacttagagtccaaattcaccaatgttaacagcaaatctattctgtgttaaggacaaaa

SEQ ID NO: 224924 - DNA, 145 bp, Glycine max
aacaagcccattcggcatgacccgtgatgaaagacgttacttttctcaacaaagccatggatgtaggcctctaagcgatgctcatttttaatactatggcaatgtcaacgaacataccgataattctaaccttacaacaatgttc

SEQ ID NO: 224925 - DNA, 284 bp, Glycine max
cacccggggccggacgccaccccttatagcccccagaaccatacggtcccaaactctttgtttttacacccattccatcttggcaaactctgaatccctccggtgtggacaaaaccccccaaaaaagggtgaccttcataaaggcttcttcaggggagccaactttttcgggaaccgtttaatataacctcctttccataaggacattggctcctccaaaaataaattgtttttttcctttcccaggacaataaaaccccccctctcaaaaatggccatttctt

SEQ ID NO: 224926 - DNA, 221 bp, Glycine max
  unsure (1)..(221): unsure at all n locations
aacaaccaccaggttttgaaatattggataagccaaatcatgtttataaatcgaaanaggctttatatggctcgaaacaagcccctatggcttggtacgagcgtttaagtaagttccttttacaataggactcttctagaggaaaagcggatactactctttctataaagagaaaacacatgataatttattagtctaaattatgtcgatacaatattttt

SEQ ID NO: 224927 - DNA, 309 bp, Glycine max
  unsure (1)..(309): unsure at all n locations
agcttgaatgtttattctttatactgncttntcttgctgncaactgtcaagtctgattctcaagttatgtaatatacacttatgcgtgttcattgtgtatacctctgaaataaactgaaatgaattagtctagtccttataattacattatctgccttgtaggatcattatttatcgacacggaaattgttaaatgataaaatcaggattttaattcttggatcattttgctcccaggaatggttcaaggatttaccaaaaaactgctgcattggaaaggctagattgcttctttgaaaagggaagtga

SEQ ID NO: 224928 - DNA, 326 bp, Glycine max
tatgcaatccgcggaaactaatattatataaaatgaaggaatcaaataaacatggaccactgaagctgactaacaaaattcctaatacggtggtaaatggttgagcagaattcccataagtatatgcttatgattagggttcgtcttggaaagagcagcaatcagatcctctgttgaaaaaggaagaccctgcctgcgagtagaataggctatgataagtgagtaaggaattaatatatgcaatcctcttacatgctcatgtgaaacttatgaataagcaatcttcaagtagaaatgctgaagcatggtggttcgaaacccacaat

SEQ ID NO: 224929 - DNA, 252 bp, Glycine max
  unsure (1)..(252): unsure at all n locations
cctgcggcatgcaagcttctccttccatgacttattctctagtggatgacgtctcctctaacctcttctcctttatctttcgctgcaattccatggctaanaatcaccattgaaggaccttattgaagctcaaagatccagcctccattagaagcttataagcaagcttccaacaagtggtatcagagcacaagagcttcaagtaggtgctccttaaacctccactatttttcagctttactttctcctcca

SEQ ID NO: 224930 - DNA, 390 bp, Glycine max
  unsure (1)..(390): unsure at all n locations
agcttgttgacagctgtatcaaacaactgggctgtttctgcattcntcctactctcatataaaaggcgtccacttctggtaatcaatgtaatgaaaagttttctctcattccagattattagaacaccttttcactctatatatatatctacacttagatttataacaataatggcagctgggcatattcaaacacaacctttgaatttccaataaccatcctattaatcgtattttgaaggttgaattcctaatataatgcatggacaccaaatttaaagtgcagattcaacttccaactttcaacacaatatancataaccaagctggaagttttactgtatagttattaattcacgtagctaaaattaataaactatcatggaaagt

SEQ ID NO: 224931 - DNA, 376 bp, Glycine max
tcctgcttatgcttggtccagcctacgcttaggcttggtcacacttaagcctgactcaaacaacgcttaagcttgataaagaatagcccattttccctactggtcatctcgcttaatcgtgaacaactcttcacttaaggtcacgacctcccagagcttcaaaaatgtagtttttcattgtcaatgggttccaaatcaacccaaataagaccccaatcatgtcatacatgtttccacacatgtaaaagacaggacctaaagtgttgatttatggagagctaactttctatgctcctacaacacatctaatggagaatactccatgaacatgcaagagcaagaaacataactcctccataccttggcttgaagcatg

SEQ ID NO: 224932 - DNA, 290 bp, Glycine max
acgcttttatccaaggcactctcttggaggtgaagtttctccttccatggcttattccctaatggatgacgcctcctctcacctcttctcctttatcttccgctgcatctccatggttgaaaatcatcattgaacgacctcattgaacctcaaagattcagcctccatagaagcttcttaagaaagcgcccatcattaattagcatgtaatccactcaagagactcagcaaaacaaccacccatgcatcaaaatacttgcttataaaataaaacttgaatttatattttt

SEQ ID NO: 224933 - DNA, 325 bp, Glycine max
  unsure (1)..(325): unsure at all n locations
cttctatggaggctggatctatgagcaccaatgttgtcctttcatggtgtttantcaccatggagacgcagcgtgaagcacaggagaagaggatatgggacgcaccatccactatggaataagccgaggaggaacgagcttcaccaccaagaattgccttggataagacccttgaagaggatgctttactggatgaaaagatagagagaaggggggagcacgacattgaatgaataaaagaatgaaagaactggaactttgaggtgtatctcataatagcttcattcatcagagttacaacaagtggtacacatgcttctattta

SEQ ID NO: 224934 - DNA, 294 bp, Glycine max
  unsure (1)..(294): unsure at all n locations
agcttggaggagctacctgtctcaatattgctcttcctttgccttgcaacattctttaaacttttgattgactttgatattcatgaagatcttataatttgttcctaaaaagccaattctatgtccttttgggcaatgtaatttgtcttgttaaaaatatttctatctttgattngcagacgaacattttgggacaagaggatctcacaggaggtcaaccggagatgcacttggggaggtattctttttagctgctaaccttaaaggcatcctctcaatttttgcgtgaattta

SEQ ID NO: 224935 - DNA, 204 bp, Glycine max
atcgcctcttacctcttctactttgacatctgctgcatactcatggcggaaaatcaccaattaggacctcattgaagctcaaagatccaacctccatagaagctccacaagcaagcttccatcatatcttctcaaattgcactaataaagacaggatctgctctaataacatgcaaaaaaagcataattggagagatttccata

SEQ ID NO: 224936 - DNA, 437 bp, Glycine max
  unsure (1)..(437): unsure at all n locations
agctnataagaacaaaattgccttattcattncttataatgcatgtgaattaggacgcatcaacaagaatcaagccaaggctattgtgtaagcaatcaatggggcaaaacacaccaaatgattataatgatggatggctcaaattctcacaaaggtgaaaacatcactttcaaattggagctttcaaactattatgacatgtagagaagaatcaatgatttcagtcacaaaatgtcaaaaacctttattttcaaaacaattacccattttttgaacatattctattattcaaagaaaaacatgcatagtcgtacgtgcacacaaaattgacccataatattaaacttgaaatccgaccaaactaacaacattatacatataacaccactaacatattaacagaacccacataactagcctaaccaaagaacacctcc

SEQ ID NO: 224937 - DNA, 437 bp, Glycine max
  unsure (1)..(437): unsure at all n locations
ggccgtccagctcgcncaggcgagctcagctcgccttgtctatctttgttgcttcctctaaaagcaacaaccttctggaggaatcttctggagggcctaagtgggcctgtgtgctatttacacccccatctttactaaatgcaccccccttctatttttttggtaactctttttccgtaacgttacgaaacttcacgacttttgtaacgatacttattttccttccgcacggttacgaatccttacggattatgtatatactctgttttagctgtcgaagaagttacggaaactcacggattgcgcataaacacctctattcgacttccgccacattacggaattccacggatcgcgcangcctgcttccttttgatttctgagacgtctcgatactccatntattgtgcaacaaaggacgccaagtatttaaagcg

SEQ ID NO: 224938 - DNA, 184 bp, Glycine max
agctgggtcaagcttaaggacatcttgacacatctatactcacgcttttatataactctgcatttaaggttgaggagtcgactgctatttacgatgtctaactctctaactaggacactggtcacatcaacgatttcctactcacgctccatctaccaagctatcactaacgggtgaataccaa

SEQ ID NO: 224939 - DNA, 377 bp, Glycine max
  unsure (1)..(377): unsure at all n locations
tactaagcttccagatccgatcgngaaggactnggaactgccttcantatttattaccagcacaacacggacatggctcccgatcggaaccagcttcagagtatgactaatcgagagcatgagtccattaaggaatatgcccaaagatggacagatctcgcagcccaagatcgaccgtccatgacgaagagggagatgatcacaattatggtagatactgtatccacgttctactatgaagagctgataggctacatgccagctaactttgcagatctcgtcttctgccgagaaaggattgaatccggactactaataggcaagttcgaatatgctgcccatatggcccccaacaacaacagaagagccccagtagt

SEQ ID NO: 224940 - DNA, 232 bp, Glycine max
  unsure (1)..(232): unsure at all n locations
taagcttgaaagatagatcgtaatgaatgttagtcatgttngaaancacgggggaataaaggtcgattaaaggtgatctagattccatagaatcagaacaagagtatttgagtcataagaaagcggacggcactttcctaaatgactatataactagcttaaaaacaaaattttactttacactagtggggactaattaaagtgtctcattatatgacattgaactaattaa

SEQ ID NO: 224941 - DNA, 276 bp, Glycine max
gtatgtcatcggctcactgtctctggatgacaaaaggtgcagaatacgacgttagtctctgcgtgtcaacaggctcgcttgcccctggatgacaaaaggtgcagatgacgacgttagtctctgcgtgtcaacgggctcacttgcctctagttgacaaaaggtgcggataaccatatggtacacctgcatgtcatcggaatcgccgtctctggatgacaaaaggtgcgatactaaaaatagtctctgcgttctttcactataatgcgaacatgcttt

SEQ ID NO: 224942 - DNA, 377 bp, Glycine max
  unsure (1)..(377): unsure at all n locations
agcttgaaaaaagggaccccgcttgttaatagttttaaaacagactttgatcnggaaatacnttctaaataggaccctttgacataaatctgcctcatagaaatattggtgtcccaatttaaaataataaatagtaagagaccctcattcccgggtttaacttatcctggttttaacctgtgcaacaaactagccatttttgctatacatgttttttttttctcttttttaatagaaatactgctcatcctttgaatttcaacatgaaaacacccactagggaaatatacaaaatggatctttatttattgaacatacaaaattttacaatctattcatcatttatatggtccacaggcttacatttttactaaaaa

SEQ ID NO: 224943 - DNA, 375 bp, Glycine max
  unsure (1)..(375): unsure at all n locations
tctcggctcatgctgngaacgcctctagctcaacacttcgtgcttttatggcacccacccagagggaagctccccaagttccaactccgaacgcgactcgaccagccggtaattccaacacgacaaggaacggccctccgaggccgttgccggaattcaccccgctcccaatgacgtacgaagatcttttaccatccctcatcgccaatcatttggccgtggtaactcccggaagggtcttcgaaccccctttcccgaggtggtatgaccctaatgcaacttgcaagtaccatgtgggcgcccctgggcattccatcgaaaaatgcttggcccttaaatacaatgtcaacatctaatggatgccggatggctgac

SEQ ID NO: 224944 - DNA, 336 bp, Glycine max
cagtcacctgaggcatgcaagctacgcttgtagaagttttgttacaccttcttgacatattctattttatgctggagtaaaacttaactttgacatacaacaacaataataataataaaaataccccattatggtgtatatacgagttattaggtaaggattgagcaattgagctaccacatggttacatcaaaagagagagtggtataatacaatgactgagccatcggggtttatgagaggtggttgatacatacggaaaatattcttgcttataaactataatccaactcttttacgtgatcctaacatgaggacaacatgcgaaatatgaac

SEQ ID NO: 224945 - DNA, 399 bp, Glycine max
  unsure (1)..(399): unsure at all n locations
cagtgcgcgagtctctctcncttataacccttcttccacttccggttcttntacgagatagatttctcattcgtcatggaacaacacattcactctctctctctntagtggatttttcgatttgattgacaaacacaacgaaccaaagttaactactttagagagagagagagagagagagagagagagagagagagatggagagtgaaggaagaagagaatgaggagagagagaaacaacagcatcgacgaggaaggtggagggtgctgagagaagatacaaatggataaaggatgaggaagtggggcaagtgtgtcgctgaaattagagaacccaataagcggtcaaggatttggctcggntctattctacccctgtcgtcgacgcacgtgcctacg

SEQ ID NO: 224946 - DNA, 387 bp, Glycine max
  unsure (1)..(387): unsure at all n locations
agctntcacttcgtcgtgtggtttctgtccaaatctcccctntaagcttggaactctagaacttaaatagtccccaagatttatatgcttcaatacttgccctaaagacaattgatgttgaacaaaaatttacggagtgcaatttcatgaataaagtagtagctcaaaaaaagaatgatcatttttataaagccaaagaagaaggaaaaccctagaaaatggacctaccttctaaccaatatttacaaagaaccaaccttctattttaacacaccaagaaatattattgaaacaataattgtctttcttcgttttgttaaccaaaccaaatttttatacaatatagctaattttaaaatgatatttttcaagagaggtagcaaaaaa

SEQ ID NO: 224947 - DNA, 370 bp, Glycine max
  unsure (1)..(370): unsure at all n locations
taatgacgccacatggaaggatcatttccgtctaccgttcatgtgtctagatgttggagcagctagctggacaagctatntattgtttcttggatggctactcgatgtataattagatagcagtagatcctgaagaccaagaaaaaatttcttttacatgccctttcggtgtctatgcttacagaaggatgtcatttgggttatgtaatgcccctgccaccttccagagatgtatgctagctatttttgctaatttggtcgaaaaatgcattgaggtgttcatggatgaattatcagtatctgactcctccattgaatcttgtttatccaatatggaattggtgctaaagccgtgtgtggaaactaactt

SEQ ID NO: 224948 - DNA, 418 bp, Glycine max
agcttaggttaaattattctaaacttacgagggattttgtaacaccctgatatatatatctatatattattagtaattatgttcgatgtttgattatttgtagcgttatttttatccgtaactattcttaggaggttaatttacttaatagaggggtgtgggtagaaaaagatctaaccttttcaaaaaagctcttgagaaagcttctcaaaaaactgcaagaaacttcttgaggaactacatgattgcctccggaaaatgctcccacccttcgtaatcgtggatcttcttcaaattggtctgcactttacaaaaccttggacccggttgacaatgggatcttcacaagatgcttggggggcccaaacttccgtcccagaagcattttatttaagcatttcacccttgcttccgggaa

SEQ ID NO: 224949 - DNA, 439 bp, Glycine max
  unsure (1)..(439): unsure at all n locations
ggtatcgtcttgtccaatataatcagttttcattcgcttaatcggnttacgattttcaatatctgatttcgatctatgcctgcggttaatgtaatgatttcaatttgtaattggagatagaagtatgctgatttttttcttttgttctcttcttacataacaagggtaaatttaggaatgtgatgagcttgaagtttctcgattggaaatcantctgtgtggcatttataatttgcattttatggatgtttgcattgcctctgaggatgagttgactgataaaagatgtggctcttttgagttgttctattcggagaagtattgacgcatgacactgacctgctatattaatatcccncattaattgggaactcaaaggggagtgtgccttatgtgcatttaatgctgaggtatgtaataatgttgtagttattatggc

SEQ ID NO: 224950 - DNA, 415 bp, Glycine max
  unsure (1)..(415): unsure at all n locations
agcttccattggtgagnttatgcttccctattcactctataattcactccccacatgtaagtgcaatttcccttggttatttggctctccattgatgtgttctggtgctttagatgctcattatttgcaaaattcgtgaagcaattcgcatctgaatccatgcttgttntgttgaattgagggtttgtgtgagaaagcattaagcctattgtggattctgaagcaatggggcatgccacattgtccccattctcttgcaatttgtgtccaaacctgccccccccaagtgctcaaggaaatgccctcatgatatatgaatatgattttgcgaaattgggatggcgggactgtttatattttgcgagacagcatatgagattcaaaatatgtgcccgaatgcatttcaaacttaaga

SEQ ID NO: 224951 - DNA, 424 bp, Glycine max
  unsure (1)..(424): unsure at all n locations
gcttccgcgaactcaacccacagcgagctgtttcttatggtttcanngnctgtccacagcccaatggtcatncataaaggacaaatctcgactggatcggacagataatgtattttgactttcttagctttgaagactgcacgatcgaatcttagaattccagtttatattacttaatcacacttgagtttctttttatactaaatacacttccgtgtacttcgtaatgaaatactagtaattaattttttctccttgaaagaatgaatatttgcaataacttaaaatatagcaactttaaccttttgagatgaagcccctatttttttttatttttggaaaaatccctggcttaatatgcttaaacccaaccctatataaatggaaaacctccctactttacagttcaacctttttcgttgca

SEQ ID NO: 224952 - DNA, 468 bp, Glycine max
  unsure (1)..(468): unsure at all n locations
ttcttctagtggaagtgggtactgtgaagttatccaaagccctgccaatcatgtgctacattatgccaagcatcaaagcatatcctacacccatgtcgctgcatccttgctggtgagccagttntattatgtcgactacgagatattggattggttacagctttattatactcttaaatgctgtgttacattgattatcaccctgtacattttaaatcatcttcattaactctggattcttctttacagattcagcaacattctattatttattaatcaggtcacgtttaattaccgtctaaacacttagttgtttaatatgtcaaattaaatgatgaacaaatgtctggatttcaattattttcgtatcacaataattattatggacatttatagtgaacagccctgctcgtatgaattgagataatgtgggagaccatactaaaaatctatctgtgtttctttgaa

SEQ ID NO: 224953 - DNA, 344 bp, Glycine max
  unsure (1)..(344): unsure at all n locations
agctngngattnncattgggcatgtatngagagttttctatgctgtctctacatatagaanacagccccatcaccccaattttgcaaaatcatattcattcatcattggggcatttcaccgagcacttggtgggcacacgtttagacataaattgccagagaatgggagcaatgttgcatccnccattgcttaaaaatacaacctagggctaaggccttttcattaaaatccctaattcaagaaaacaagccccaaagcaaaccaaaactgcctcacaattataaacacgttctcacaatctaaggcaccaaaagatggaaaaaagcacatcaatgggaaaaaa

SEQ ID NO: 224954 - DNA, 310 bp, Glycine max
  unsure (1)..(310): unsure at all n locations
atatataanaaagagagttcagagcgaaattatatagtatagcattcgatcgaccgcgtcttcaagaagtccatgtgacctcattctatcattccagaaagtttcgtcttttagagaatagtgagctatcacgaatacgatgttggacaaatggcctcagatatcttaagaaggggggggggtttaattaagatacaaagactattccccaattaaaatttcttctctctttcggataacaatgccacagggcaacccttccttgtgtcaagaatccctacaacagagaccacggtctttaatcctttca

SEQ ID NO: 224955 - DNA, 284 bp, Glycine max
agcttctcaaagggtgaatgccactgttgcacaatattaactatttgtgttgttcggtcataatggggttcactagttgtcttacgagactgggaaatatctaaatttcttagcgatgtcacagtatctgattgcttcacatggtgctctagcatggttttccacatagtggccatcctgcagtccataaaaaggccatcaatattatatgtgtcatgtgtgaggttctgacataatgtatctatttgattaaatacatccattagaattaatcatattaagtt

SEQ ID NO: 224956 - DNA, 338 bp, Glycine max
  unsure (1)..(338): unsure at all n locations
accacatcctgatgaaaagcagaggcaacaactaagcangcaattatgccttgccccaaggcaagtcaagttttggttccaaaatcgtcgaacccaaatcaaggtaatttaatttaaatttattaacttacccacatatccagttaatccatcaactccatttcattttctttaataattggtttttcttttgagtttaataataatatatatacatttatatatacacatatatgtaattggtntttgcaggcaatacaagagcgtcatgaaaattctttgttgaagtcagaaatagagaaactaaaggagaataataagagcttacgagagaccat

SEQ ID NO: 224957 - DNA, 332 bp, Glycine max
gggatccttaagcacctgggcagcaactactagggaaaatgggttgatctgtgtacggctgaccatactgaattactaatatatcagtgaaccttgctcccacattcaactaaattcaatcccgggaactgaaagaactctattcccttattttgcgtacactcggccttaataagacttggtggtattcgcacttcgggattgagaaattaactcacggttaactattttccctctttttctaaattggtacctttcacctctccttcactcatcttctcacctcagccttatcaggcttctatgggggagctgtcttgacattctccttg

SEQ ID NO: 224958 - DNA, 278 bp, Glycine max
cacttattctgactttcccatgctgtctctacatacataaaacagcctcaccatccctatgttgcataatcatattcatatatcactgttgcatttcatcgagcacttggtgggcgcacgtttagacatatattgcatgagaatgggagcaatgtggcatgccccattgcttcaggacacaacctaggcctaacgcctttctatacaaatcctcaatttcagaaaacaagcaccatagcataccatatctgccttacaaatataagcatgttctcaca

SEQ ID NO: 224959 - DNA, 416 bp, Glycine max
agcttcaagagaaggccaaactcctctctataatctgatttcaggcttaaataggaggctttattcgtgctcgtgcgcttagcgcaattctgaaccgcttagcgcgcattaatgaattttggcttagcgcggcttttcttgcttagcgaatggactaaaacggtgcacttagcaggatggcccttcgctcaatgaacaagcacacctcatccttcttttagattccgccttcccgtcagccgaggaatgtgcgctcaccggatggctcgcttagccagtaaattggcttacgagaggttgaaaatagaccttataacctcgccaattacctgaattgagaaaaatgattttaaaccccaaaatggagtccatgttttataccttcttacccaaagtattccacactccaataccct

SEQ ID NO: 224960 - DNA, 349 bp, Glycine max
  unsure (1)..(349): unsure at all n locations
gtacctctntcanacctatggctatcaatatatacgcctttaatccatgatgcaccaacaactattgcgtgctctacaacctgtaagtgtaaactttgagtcataactcatattggaagccacaagaccaagcaaaaatatgtcaccctggtaagaacaaattatataatcagctgcatttaacaagtttctcatgaccacactatgctntcccacaggcaaatggaacaccattgtccactagcatttcatgacttgcttacagactatgaacagtgtcaaaatgatgcaaagaagggatacgcactntatacttaacatgacatgtatcaatacaattttcatatta

SEQ ID NO: 224961 - DNA, 359 bp, Glycine max
  unsure (1)..(359): unsure at all n locations
agctngagaatggctttatgacaaatacaatnttctaacatatatactgggaatgaagatctagcatttacacgcataagagattgtgaattaatcggaatataatacaaccagactatatatatatatatatatacacagtgtggagcagctcaaaaacaggtatacataccagtaatgtttttatcccgcggaacataaaccaaaagtgcaaggcctatgaacaggaccatatagcgtttcagttgcgggaattaaaataattcgtaatgacaaaaacagtattcaaaaatgaacaaaacgacagcaacaacaccaccatatgaacgaaatgattaattaagaaaataattaccaac

SEQ ID NO: 224962 - DNA, 383 bp, Glycine max
  unsure (1)..(383): unsure at all n locations
actaagctagctacacaatgactaaactngtctatgtatttccaactctaaattattgtccccgctactcataagtgacaaggagaggtagacccttcgtgacaatcaatacacagagaaattacttcctaaacaaggaactcatcttcataaaatcttcatggatcacataattacgctctgcacgaattgctgtcattaagaatccaccattaaagttttgctcaacattcaattgtagaaaaaatcaccatatccatataaagaatgaaactgtctaatangatattccatagccataaaagcatacaaaatattgattgttaattntacaatttcattatcaccggagagaaaagcccatgaaataaaagctctttcat

SEQ ID NO: 224963 - DNA, 359 bp, Glycine max
  unsure (1)..(359): unsure at all n locations
agctacagttcactgtgcactctctttggggnagtctctctcttttggttcattggatgctatcgactaacaagggtgtgagtccctccactcttctaccagaagtaacttttggctcaccatttgtattctgtggaggcccacaaattatcaatgaactaggcctgtatgagagccaaatccactgtgggatgatgcatacagatattgtttccaggggcttctcctgcactacccaaaccatgtagctgaagcctttaagcgctaaacagctcatttgtgtcacttcctgtctgctgaaaaaggaagcataacttttctagtggttctaagtctacacatactaaaaaatattcaat

SEQ ID NO: 224964 - DNA, 388 bp, Glycine max
  unsure (1)..(388): unsure at all n locations
caaacaacacctttagtaaatgtcatgttattaaaacttttgtcttaacttaactggttatcaaattctgcaatgtatcaaattaattatattaattgtcacattaaaaattattttaaaactatataaaataaatccaaaaggttgaaaaattgatccaaaataaaccacgaaatgttattttggttagttcaaattcaatatgaaaataagtgctgatacttgataggtaagagtttgtagagaaataattctaaaattggtaagacttaattgatcatgtttcacttgtttttacttaactctctaaataattttctgnaattcttctattatcttcaccaaatacttttcttttccataatttaatttttctctctctatcaat

SEQ ID NO: 224965 - DNA, 304 bp, Glycine max
  unsure (1)..(304): unsure at all n locations
agcttataagaacannaatgcctcaatcatttcattattgcatgtgaattaggacgcatcanaaagaatcaagccaaggctattgtgcaagcaatcaatggggcaaaacacaccaaattattatgatgatggatggctcanattctcacaaaggtaaactcatcacttttaaattgagctttcaaaactatcatgacatgtagagaaaaatcaaggatttctactgtggcatttaattttggggtctaaggtggggtagtgaaatgagtcataccatgatggttcaatagaatttttacttaat

SEQ ID NO: 224966 - DNA, 377 bp, Glycine max
  unsure (1)..(377): unsure at all n locations
gccatgcttaaacgtgactaagcttaagtgtgggatagaccaggcttaagcgagatgacctacaaggaanaatgagctattgtatttcaagcttaagcatggaatgagtcaagcttaagtgtaaaacaagtttgacttaagtgtgaaaccttgcaaaatatgtatgaatgacttccaaatggatttgaattggaatntccttagtntataagaattatgagatgcataaatagggttctaacgttatgttatgagaatttacttttactaagtatatatgagttgagagttgaatggatttaagtatggatttcttgcactctaatcgatattgactgaattggagaccaggaggtcttgtgatccttgagaaaatg

SEQ ID NO: 224967 - DNA, 346 bp, Glycine max
  unsure (1)..(346): unsure at all n locations
agctnganaattgaaaccatcaaaccacacagaagtagtagtaatgtaccaaacatgaatggtttacagaatacaacaaaaatgatactttatctctctccctactctctttaatcccaatgacccttagatatgtaatacctaaaaccatacctgcaggaatgaagttgcaagaacaatgtctattgaatcgtcgaatctcataagatacaccacaggtaccttatcagcctgtcaaaaaagatgtgtcatcaactagattttacaagtttcaaattaaaagagcgctttattttattaatttatccttttctttattcccaactcaactaacagtaactattgg

SEQ ID NO: 224968 - DNA, 327 bp, Glycine max
  unsure (1)..(327): unsure at all n locations
gactatggcatcaatctagcgctaaactgctgagagttggaagccatcttcttcaataaacttatggcttcagtatgagtcatgtctccaagggctccaccactggcagcatctatcatacttttctccatattactgagtccttcataaaaatatcggagaagaagctgctccataatcatatggtgagggcaactgggacatagtttntatatcgctccagtacctcatacatgctctctccactgagtngtctaatacctgagatatctttccttatggctgtggtcctggaagcaaggaaaacttcttctaataatactctct

SEQ ID NO: 224969 - DNA, 273 bp, Glycine max
  unsure (1)..(273): unsure at all n locations
agcttctacgtattataggccaactctgatcaagtatctatggtctctacacgaacatatttcctctcttaacgttacgtctgaagaatatggccattgagggattaaatgtgtgtcttaaaagagtgtacttctttatgtcaagaaaccgctttgtcgttggagtgctgaacacttacagnggaaaccactttcttttgcatcatagcaggtctatgcagcagagcgctccttttaatggcgattgaggaatctcagagcctggattcatta

SEQ ID NO: 224970 - DNA, 366 bp, Glycine max
actctagctccatcatgaatgaagcggatactaatgagagtgtgctgagacctttcatgatggacttgatccttggcaaaacaaaatgcatgtatacagtggcaaataatgatagccatttttttgtggaaacccaagaatgctaattatacccttcatccaagttcattcctttactggttcttccaacgccatgtactctacctttgttatggataaagccaccatgggttgaagtgtaatctctcaactgagtagagtgttgcttcccatgtccttcatctcaaattcactaattagtattgacttctacctcctacattgcctacaaatctttagatgctatgagaatgtcatcaacatata

SEQ ID NO: 224971 - DNA, 55 bp, Glycine max
accgtaatgtatctgctacatcccttatctataaacaatgaatgattaaaaattg

SEQ ID NO: 224972 - DNA, 173 bp, Glycine max
  unsure (1)..(173): unsure at all n locations
gaacctgacnccggaccaagcacgggcagcaccgaagagaggagagtttaactccgcccaggcccccagagcgaccgcaatacgccgcgcacaacccggacccagacgggcatgccaaacaaccgacagccgaccacccgccaacccgcccggaactggaagaccaaacccac

SEQ ID NO: 224973 - DNA, 232 bp, Glycine max
ttataatacaaggatctttcgtgatctgttcctacgtatctacccatcctcatccatttgcatgtctacttctatatctttaaaacggcagatccgatgacgagtccctcgaaagtactaatacctgtgacccgcctatcgacttcttgcaagaaacaaatcatacggtacatgaatggaacgatgatgtgggacttccctcggcattagataggatagtctcccatgagga

SEQ ID NO: 224974 - DNA, 216 bp, Glycine max
  unsure (1)..(216): unsure at all n locations
agctntaaaacgggaaacaaagaggttccgaaaggattaacacggccgaaacaagtttcgaggggctctatggggtaaaaacaacgaccttatgctttgaagagccaagagagaccagtcaaaagctcaaggcatgatattgggagacaagttgaaggcttgccaaatgtccaaaaggagtttgtccgaacaattgggcataaaccaagaaaacat

SEQ ID NO: 224975 - DNA, 487 bp, Glycine max
  unsure (1)..(487): unsure at all n locations
acactattaaactcagctcacccccgaacatcacgcttggtacttgggagctcttanctctctaacaccagctactactccctcacccccactctctcacagaatatgccaagacctctccaccctatcgtcgtcgtgtaccacacttctctcattcaccctcctcttcctactcattctcctcacgggggtgggccacggttcggcatggtagtcgtggtcccagagcaaccaaatgaacatcaacgattacgcctctggggactccaagaaatgcgaggtgtactcaaagttcgtgaagctgagggttactccatatcatgtgcaaccattatttgtcatgttcaccaatcggatcggtgaagtctcntcctgtcgagtctttttagtctaattccttattgatgtgtttccttttaaaaaaaaaaaatgactatgggaacctgtgtaggactttatccttattgccccaaagtgagtgtctccc

SEQ ID NO: 224976 - DNA, 229 bp, Glycine max
  unsure (1)..(229): unsure at all n locations
anctngnncattcaatatcactgaggacggngaaccttatgttncccaagaacggactaatacatttgctatccaagtgacatggtctcgcaggcgaaaatcctcataatcatcctacggaagtccttattgttcgttccaccatgaagcttctctgatgtccaggaatatcataatcttcttaaggcttttcctcattctcttgaacgagtggcaaaagaatggttgt

SEQ ID NO: 224977 - DNA, 288 bp, Glycine max
  unsure (1)..(288): unsure at all n locations
ctcgcctangcgagctaggtgcttctcctgattcaccgtcttatggacgaatgatttggaaggcccaagtgcgcctaattgctcattgcactcccatctttactaaatacacctcttgctcttgtttggagatactttttccgtaacgttctgacactttacgaattttgtatcgatgctcgctctctttccgtaatgttacgaaaccttacggactacgtaatcctacctgtttttccttgcggaacgttacagaaccttacggattgcgcactaacacttcctttt

SEQ ID NO: 224978 - DNA, 297 bp, Glycine max
  unsure (1)..(297): unsure at all n locations
agcttatataacatattggtacgctcggtngcgcttcatataactcatcatcaggtggccagcgcccagtaataatgacaatgtgtatcatcgctaancaaaattgaaattcttacatgtccttgaatntgaacatcaccttctttacacaggatttgagcatttcttaaattatttgctaatcctaaacggatggataaataaaaaaatgcaaaaaaattaagatgatcacgggcataatggtcaaaataatatatcctatgcatctattaaggaagcgttacttgcgatgattgg

SEQ ID NO: 224979 - DNA, 402 bp, Glycine max
  unsure (1)..(402): unsure at all n locations
tgattatactaatctntaggaacttcacatgttacatttatttatgcataggcttaagttatggcaganaaagaataacaagagacttaaatcaagtgaaatgcatttggaacaaaggtaaagtcttagcttttaagtgagatatccacataagttgggagagttgttttctcaagttattttacgaagggcatgcaacattaagggactcagacatatttatacaatacagtggagttgatgacaaatatgatacttattggtaaatttacaagtggaggcaaaagaagcatcatagaggatgggcaatggtagagcagtcggaccaaatataatatctatcgaaatttggaaatgtctagttaagactgaacatagcatagttctattaatatcagaata

SEQ ID NO: 224980 - DNA, 408 bp, Glycine max
  unsure (1)..(408): unsure at all n locations
agctngcctaattaacctgaaattgagaganaattattattaaacacacaaaatggaagtactaagtatttattacctatacttaatggaaaatacttataacactacaaaataaccataaactggagaagtttgatacaatttacacaggttttatacacaaaagtcagtcatattcatcaactaacaatagggtgatgccaccttatgatgcacatgatattgactcaacaccttttgaagctgaacattacaaaaatgcaaaccaccatcactaatcaaaatctgaggcaccccaaatcgagcaaaatattcttctttataaactttaccacaaccctaacaatatttctttgggtggccacagcttccacccatctagacacataggcaacaccacaataatgt

SEQ ID NO: 224981 - DNA, 396 bp, Glycine max
  unsure (1)..(396): unsure at all n locations
caacgatgatgttaagaaaaaataagtttaatgcatatccgccaaaggcgagtaaagtaaaaagagacaaaagatctctcatatttacaaggaaggcacaaaagtgcaataaagattaatgaataagacaaaaggagtagatcccaacccccctaaaaaaattgaaatgaataaaagtacaagcaagacactcaaggttcttactcaatataacccttaaatactctntgagtctctctgatcgtttctttcatagccctcttacccatgaccacgttgcangcccaatatagcccatgtggatcaaggaatgacntaattttcttttaagttagaatatggaatggaacgcgcacacacttgtgactatngataaaaataataaataataatata

SEQ ID NO: 224982 - DNA, 218 bp, Glycine max
aaaacgtttttgagtttttgatgtttttcgacgacttaaagagaaatatggttagcataagggatacacgggcatttctaaacaacttaattgtggccataaaatcacataatggtcgcttttcattccgttaagacatcttccttatcttattttgaactatatattttttaccccctcattatgcttatttgctcaacaaaggataggaatgcatt

SEQ ID NO: 224983 - DNA, 408 bp, Glycine max
  unsure (1)..(408): unsure at all n locations
taaactaagcttaagagtactcgctaaatatttctaataaaagacgctgtcatgattttttaatctcaaaaacaaacacgaacaatatcaaaggttaatttacacgccattcaatactaaaaaaaatgttcttataatagatcaaagttaaacatggaggccactataaaaaagacaatntttctatagataatagacttattatcatataaataacttttgatctaaataaattacttatgattgcataatcaacatttattcttctagttcttataaaaaaacaaaataaaactcctctgctatacataaactacattctaaatctagatatttttacgagagacacgtcatgtcatattatacaantttctataacaaacaagctgtggtccatgtatacctacc

SEQ ID NO: 224984 - DNA, 274 bp, Glycine max
  unsure (1)..(274): unsure at all n locations
agcttgcctcanagagatccaggaaggataaagcttctgaaggatctagttccgctcccgaatatgacagtcatcgttttaggagcgctgagcaccatcaacactttgaggccatcaagggatggtcatttcttcgggagcgacgcgttcaacttagggacgaccagtatactaacttccagaggagatatttcgcccgcggtgggcataatggttacccccatggccaagttcgacctagacatagtcctcgagttttatgccaatgcttggc

SEQ ID NO: 224985 - DNA, 376 bp, Glycine max
  unsure (1)..(376): unsure at all n locations
gacgagattaanaatgaagttaccggcaaagtcttaaaagtgaacggtcaccaactcaagctttntcattagagcccccaagtggaggaggaatttgtgatgctaatattatgtgatgatgtgccttgaatggcacttgagaagattccttcctttttctttttatatgtngtctctttgtttgcatttcattacatgctcacaccgaggacaatatgcatttcaagtgtggtggaggcgtttagaaaaaaatagttggtntttgtttttgtttaatgtattacaatcttcgttgtatttctgttctatttattggtatttcttctatctatttttctgcatttgtatgttggttatggtttgtcgctattatctg

SEQ ID NO: 224986 - DNA, 188 bp, Glycine max
  unsure (1)..(188): unsure at all n locations
agctagaanagncagtataacgaagcataagcaactcatattgtatgcnatacgcttcccagaccgtatgtatgcttccctaccctgataacaagatccctccatgagattactcgaccactgacataaacgcatcccaaaagccttatccatgttcatacaccatgacccacacaaaaagatagcat

SEQ ID NO: 224987 - DNA, 334 bp, Glycine max
  unsure (1)..(334): unsure at all n locations
cagcttggggggcggnctttacctctntgtatatgttgggcgggatatcgccagncgagagcaactttgaatggcaatcccaaaggaagaactatttcaaaaatgggttttcctttgccggcagtcatttacccagccgaaaatttatctggtcagaagatcttccgctctctttccctggtttcctcgtattggatcggagaattaaattctgttcctcccttcgatctncttttctttttactcttctttccgatcttccgatcggggaatcctcttttttccttttcttttctatnctttcattccttccttccaatccttgattggcaat

SEQ ID NO: 224988 - DNA, 407 bp, Glycine max
acaataggcagagaacctaggtattgctactgcggattggcgtgatgataggtctatttgcctacaaatttgtgcagtataggagaaaagctgcatatgaggtgatgggccattgtgtatgcatggccaaaggtgcagccaaaacacttaaattaaaggtgactaaaaaggaacatatgtatctactttgttctaatgtttgtagagaattaatagctttcataagtcaatatggtaatgaaggtgaagttgtaagacataatgagagtatttttctacagtgatagctgtggcagtacaattgaagtggatacatggatctaccatcttgttgtgatttctcgcttttgagcaagagtgaaagtacagctatgaacctttttcgaatcaccataagtatggttttt

SEQ ID NO: 224989 - DNA, 175 bp, Glycine max
  unsure (1)..(175): unsure at all n locations
agcgcgtgaatncttatgggtgtattcatatgagtatacaaattttgttggcacgaggcattaagaaataggaaccattaaattctacaatttactgccctccaaaaagttttctcttattaacacaattatgactcttaaattctaagtctagtataagaaaactcttgataat

SEQ ID NO: 224990 - DNA, 403 bp, Glycine max
ccaaatatggtgccatgcatggagaaactcttctcagttggaatggttttccaacttagtattccttgtgtgttgactgataaagagggtgtggttcacattaggctttaattttctctgtctttggctttttttctttgtataaaaaaaaggactaaagtatctttttagttctttatattctaggtaatatttgttctatcctttatattttaagtttatgttcttgtaaaatataaagcttaaacattacaattagaatggggaagcatattcttattacccataaatggtgcgagcgcatatattttggtgcggcatgtaaattgcacacatagttgaaggaacttgctttctgtctcttaaaatagatggttcagactattttaagaacagattaaaa

SEQ ID NO: 224991 - DNA, 264 bp, Glycine max
  unsure (1)..(264): unsure at all n locations
gaaagcanaatgtatgaatggggccaaagtcatgcttatagactctaatatctggcaaagaactattgaaaagcatgacttttggaaaatcatgtaagagtataactcttaacttttcttaaaattgtcactgtaatcgataccacaaggtgactcaattacacaatcatttatgacagtcggactcttacaatggatttgattccacggtcaattacttgtatcgatactatatagttatcaagtcacttgcataccctaatt

SEQ ID NO: 224992 - DNA, 190 bp, Glycine max
agacagcacagagagatacagtgggtgggatagagttatgactacgatcgacaggagagctatagtcacatttcgagagtcacacggatcccatctgaccatcgaagggttaactccaggacagtgacaatcctacacgcgagctagctggagagaccataacgacgttatatactcttacttctctagg

SEQ ID NO: 224993 - DNA, 407 bp, Glycine max
  unsure (1)..(407): unsure at all n locations
agctnntatcactgcacccatattngttcttcacattaacaagacttaacaccactaacaacaaggtcaacgacctcttgcacctctgatacataaagcttattcgaatcactttccaatgtatcatacataggggcatgtgcttgttgaagagactcttgttcaagatcatgaatcatatcctctaatcaatcttccatttctacattaaccaattcaaggatcccttttgatgtctatcaattcaccatgtcatatccatgtcggaatattctttttaattccatcacacaaaagatggtctcgtatgccatccactacttcgttgccttcaatcaaaccagttaacaaggataaaaaaatacattctctttgatggactcttttggaggaaattccataattgg

SEQ ID NO: 224994 - DNA, 363 bp, Glycine max
  unsure (1)..(363): unsure at all n locations
aatggatcaattgcgtgatttgagtgaatcggaatgtgtagatcatgtgccttgaatgagcatgcagtcattaaaagagaaagaacatggaattaggatcatgactaaaaatgttagttgttttgtcagttttattgtgaaggaactcattagccgcaacccggtgagagtgtgatctttaattgtgagagaacgactaacattgagtaatgatttttgcatgaatctctgagtatggaatgaatgcatgaaattgaagatgatgaaggccatgtttggatcatagatagccacttagctaaaaagcttacccggtgcatgattgaatatcccntgcactcattntgagctaaaagtatgatt

SEQ ID NO: 224995 - DNA, 280 bp, Glycine max
  unsure (1)..(280): unsure at all n locations
agctngactaggctatttgattttatccttantttctccttagttattagncaattcggttaagaatgagatatcccaaagagaaaatgtccggttgattttccgctttattntactaaaagggatattcttgttattatattattattttatctctttttgatttccaacgtggttacggatcaaacggttgaatttatttaaccaaagttacggatcttacattcaaacgttcggggaatttatttatttttagttaaccaaaatgacttaataaaat

SEQ ID NO: 224996 - DNA, 315 bp, Glycine max
  unsure (1)..(315): unsure at all n locations
acatcagaccacttcaggtgctggaactactttatatggtctcgacggngcctatgcaagatgaaagccttggaggaaagaggtatgcctatgttgttgtggatgatttctccagatttacctgcgtctactttatcagagaaaaatcagacacctttgaagtattcaaggagttgagtctaagacttcaaagagaaaaagactgtgtcatcaagagaatcacgagtgaccatggcagagagtttgaaacagctagtgtactgaatactgcacatctgaaggcatcattcaggagttctctgtggcattacacac

SEQ ID NO: 224997 - DNA, 401 bp, Glycine max
ggagcacaaattgaggaagaaaagggagagatgttgaactttgagttgtgtctcacaagactctcattcatcagagttacaacaagtgttacacatgcttctatttatagactatgaagctccattgagaagctttcttgagaaaacttccttgagaagcttctttgagaaaacttccttgagaagctagagcttagctacacacacccctctcataactaagctcatctccctgaagagcttcctaagacgattccctaagaagccagagcttagctacgcctacctctctattagctagctctcttcttggatgaaagctgaactatctaccacccctatatagctagcttacctttgacaatacatgaaaaccaaaaaggtcttcttcaaactactca

SEQ ID NO: 224998 - DNA, 163 bp, Glycine max
  unsure (1)..(163): unsure at all n locations
agctgagtggcgtatattgaagatgtactcctngttgagagcgccacttatttacgaacaaagtccttttcaaataatgcaagtaaagaacttactctgaaacttgtcccgcacctaaaatgggataactttcttaacaaagatatgtgtttttaagcatact

SEQ ID NO: 224999 - DNA, 356 bp, Glycine max
ttattctttaaacatgtcaaaactcattatagatctaaatttgattagactttatataactcaaacttcacagaacatgctagttaataacactttcaaaatatatctaacgaggcttatataaaagataaaaacaataattgaatcttatatcatcatataatagaaatatcttaactttttttagagttaatcaaactaaaacatttcttagcgatatgaaattagtggcgttgaccacaagttcgaataacaaagtatatgatattctggcttattaattaacttactatatatgcagcacaaaattaacttaatattgaacaataagttatgagatatgttgtacgtacaat

SEQ ID NO: 225000 - DNA, 375 bp, Glycine max
  unsure (1)..(375): unsure at all n locations
agctataaccgancgttatagccgttatctcgcctattaaatgataaaatgaatttcaatcgatcatttgcgttgtaatctcgtataatcactgttaaaacataatctaaccgatcatttacattgtaacctcggttaaaccaaaaaaagcaaaataatattaaaatatcaaaatatctttgaataacatattaaaaaaaatcactctgacgtttttctttggatgtttccttgaatgaattgactaataccaaagtgaaactagactaaaataacttacatatcagctttgtcataaaaatacttaaaacccgtttagggcaacgccttaactgcctttttgctgtatcggtaacatgactggtcaaagcttaa

SEQ ID NO: 225001 - DNA, 449 bp, Glycine max
  unsure (1)..(449): unsure at all n locations
gacatcnntttgtaatgctgacaatctgtctagagatatgagtttntatttctcagcttattaagttcattattaacaaggatgcattctttntaaagcatgaaattttgtttaagcatttccttgtgtccttattctgaatcatcaagagttgtgattaacgattttccctttcttccaagtcttgaaaaaccttaagaagaagttttcatccactagataccttttcgtccaataatgttttgacttccacacaaacagaggcatcttatacactactaggctaggtggtttctagtacaaaatcaactaagtgaacttgaagagctttcttgacaacatttatttaatgttctataatctctagaaatgcgagcagagatagataagagtcgattggatcctttaattaactcatctctagaatcgaatattacctcttcagcatc

SEQ ID NO: 225002 - DNA, 294 bp, Glycine max
  unsure (1)..(294): unsure at all n locations
agcttttattggttcttggatggctactcgatgtataattagatatcagnagatcctgaagaccaagaaaaaatttcttttacatngcccttcggtgtctttgcttacagaaggatgtcatttgggttatgtaatgcccctgccaccttccaaagatgtatgctagctattntcgctaacttggtcgaaaaatgcattgaggggttcatggatgatttatcagtatctgactcctccattgaatcttgtttatcccatatggatttggtgctaaagcggtgggtggaaactaac

SEQ ID NO: 225003 - DNA, 451 bp, Glycine max
  unsure (1)..(451): unsure at all n locations
cttgtggctggttgtgttcgaatcagatgttattagaacgaaatcgaagaagaaagaaaggaagaggcacgggagaaatagagagagatatggaattaggcatagaagaagataggaaggaagaggcacgagagaaatggacagctgtagggtcacacgtcaatcttagaaaatttacaaaattccaattctgttaactgcaggggacatgtgtcaccacctggagcatggacacaatagacatttccatatacatctcatttataagacttagtatagactattacttttgaccaatttatatgcaattaagttactcgtagaatcgagtttgttcataatganttatctataatggtgagtggaattatcgattttgaaaaatactcgtatttgtagtattctatcattaaaanaattaaaactaatcttttatttattgtatgatatc

SEQ ID NO: 225004 - DNA, 271 bp, Glycine max
  unsure (1)..(271): unsure at all n locations
agcttatatcatcttcnagtcaagtgatccgtgcatccatggctttaaagagctcacccataaaagcttggaggtgacggagctctatgagtacttcagtcagaagagaagaggaatcatctctttgtggtggaggagatggggtaccttcattaagaataggcggtggccagtctcgtttgcgaacccactgaccatcaacattctttctggaaccaaagagaggaactgcatcggtcccaaggaagacgaccttttaccttaacatatg

SEQ ID NO: 225005 - DNA, 301 bp, Glycine max
  unsure (1)..(301): unsure at all n locations
ataaatatacctctctaatcaatcatgctctagtgacgtatgttgtttcctatatnacaaaaccacgatccctcgtcagatcgaatcaatccatgcttcatcctcacatccctcttgttggactaagcccaaattatacggcccttgtaggtttagaccaacttaaattgagtttcgttcgcagatccctcttgtaagactagactcagctcacgcaacgtacgaaagtttagcctaatttagcctaagcttcgtccgcagatcccttttgtaagactatgcctataactaacaacatttt

SEQ ID NO: 225006 - DNA, 335 bp, Glycine max
  unsure (1)..(335): unsure at all n locations
cgctntataagcgcgggtctgagagacaaaggtcatgtgttcgttatatgcgaagatgatgtttcgagtactttggatttggtacgaccatgccctcctgatttccagctgggaaattggcgagtggaagaacgccccggcatttacgcaatgagcataatgtaaacctttacgggtttaaaagctctatagttgggcctaggctttagaagttttccttttgataaggcttgtgtcttttggttttgaatttataatacaaggatctctcttaatctgttcctatgtctctacccattctcaatcatttgcatgtttacctctttttctgaaac

SEQ ID NO: 225007 - DNA, 159 bp, Glycine max
  unsure (1)..(159): unsure at all n locations
agcttccagatattgaaagctatatcctcngttgtatcttccttggaggtacttgatgtaaatacctgtatatctatttaatgatgttttgcggggccattgtgctatcagaacttcattctaccatggctttgccttgatcacgtagatgcatgtgtt

SEQ ID NO: 225008 - DNA, 435 bp, Glycine max
  unsure (1)..(435): unsure at all n locations
tatcctccatggctatgagnagctaactcttctcttctgnagattttatataaanaggnatncttccatgtaatcgntacatttttattcaataaaaccatgntatattatttctcttctatacctaatgtgcgtttatggcttgatcacctgcttgcatgaacctaattaattatntattgtaattggaaaattcttttgatttgtgaattggagagaacacctagtaatttttatgccttgggatagcagtatatatgcattccggtccctgactgttgacttcttttgcaatagtccctatctttttaaatataaaaatagtctctatctttacatagttttgtaaatagttcttgccgttaatttaaaagaatgtcgtagtaacgtgcattgtgacaatttagtgccaatagactatcacgtggaaattgt

SEQ ID NO: 225009 - DNA, 407 bp, Glycine max
atgttgcctatagggctcttactcgactagagcaagattgtgcataccaaacaagcatttgatgatgatatgtgattcactcaaaaattaattcctctctcaaaactccccatccaaattcactattgtgctacttcggatactctgtgcagtgttctagaaaactacggaaaatagtatccttgtgccatgaaaatggccaagtattggtggggtacctgtattcacatgattcacctgtatatgtatattgggtgaaatctttaatttatgtcatgctcttaaagtatctcattgaccaacaagtttttaccgcaactattatactcggaataagaatacaactacaactctattctttacgttgatcctatactacatagaagaaaaatatctagagtttaacc

SEQ ID NO: 225010 - DNA, 280 bp, Glycine max
  unsure (1)..(280): unsure at all n locations
agcttccatatagggtatcaacttggggtctctattttccncttcttctctcagctggnagatcactagtgctgagtccccgtacactttgagtaacttgacattggagtcaattgccacctgaacggctagggcgcacgcttcatactcagccatattgtgggtgcagtcaaaccccagcctggctgtgaaaggtatacattggntgtctggagagaccaatactgctccaatgacatggcctaaaacgtttgacgctccatcaaaccatacgaaccac

SEQ ID NO: 225011 - DNA, 430 bp, Glycine max
  unsure (1)..(430): unsure at all n locations
tcggaagaaagtgatgaggtacaagccctagaggcagagctgggtttagccctagtagtcgaagagaagttcaagtccatagccatcannagtctgaaagagtatgatgaactaagggacgtcaatatggccaccgctgaagccttggaacgagaaaccaagaaggcccgaaaggaagaacacgtgccagcaaagttttgaggggctntatagggcagcaatagtaagctcaagctccgaagaggtgaaaggaatcatcacgggtcaaaggcatgatcttgaaggacgagctaaaggcttaccttangtcgaanagaaatttgtcccaacagttaagcgagactgaagggaatatgtgggccgtcatcgatgagtgcaaagagaagttaaatctagcggcgactcacgagccaaggctagaggatgagta

SEQ ID NO: 225012 - DNA, 266 bp, Glycine max
agcttctcgcatctgcacatggaaagacttgattactgctttcattaggcagtatcagtataatattgacatggctcccgatagaacccagctacagaatatgagcaagcgggagcattagtcttttaaggaatatgcccaatggtggagggatttggcagcacaagtggcgccccccatggtaaaaagggaaatgatcgcaatgatagtggacacactgccagtgttctactatgaaaagctggtgggttacatgccttctagct

SEQ ID NO: 225013 - DNA, 471 bp, Glycine max
  unsure (1)..(471): unsure at all n locations
ctcatttctttcttatcattgaagggtttcgtgtcagaattttctcttctnttcttgaaactagggtaatcaactctcaaatgtccaggttggttacattcataacactctggaatagaagatgaatcttctcctcttttctctggttcgaagtttgatcttctttgatttcctttggttcttaggaatttattaaatctctttacaaagaaactaanatcatcatcttcttctatttcattcaagtcctctctgtcactttcttctagaattgaagataaggctttaagtgcgatccctttcttttcggccatttcttcatgttgattagtctcatagtctatttgtgtcctaaagcatccaanagagttgaagagcatgttgtgagactcttgatctgtaatgcagtacctttgttgccttcctgctaacatctcaacttgttatgaatctcattngaatatcttctat

SEQ ID NO: 225014 - DNA, 354 bp, Glycine max
agcttggaatgaggctcttcaacattgagcggattatggctggagagccacaataggaaacttggatcagatggatgaagaagttgaatttgaagctccacaagagcttgcacatcaatggagtccatttgagtctctcatgattcagaagatggatgctatgcttcacctccatctagagcactcagttgaagttctcaattcattggagaacatcactactcgggtggaagacatagatattagggtgacgcttacaacctcaacctttatgaagatgaagctaatcatggttaagggcttgcttctgcgtttgttggctattttgcttatggtctgttgctttggtggttt

SEQ ID NO: 225015 - DNA, 464 bp, Glycine max
  unsure (1)..(464): unsure at all n locations
tttcttggggctatgttagcggttgacggttttatatatttcataggtttaaattgtgtaaacaaggcctatgatggccagaaccaaccccgacggcggcagagtagagggggttccatggagttcaaagaagagaaagggaacctcgaatatgtgttttcttttttcggtaaatacacttcttcattnntttttaatttaaaatattataaaatataaatattatattatataatttttttaattggttttaaaattatctatttattaagttaaattctataatttactttataattttttaataaatgatatattaaaatacttattttattttattattaattacttaacatatttttaagttatatttttattaaatcaaatttttaatatattattttaatataatatattataaatataataatcttttatgtattaaattattaaaataaataaat

SEQ ID NO: 225016 - DNA, 210 bp, Glycine max
agcttatcatcttttgcatacgcctccatcttcctgtaatacattttcagatgattctttgggcaagtggttcctttgtacttatcaaaatctggcaccttgaactttggaggaataaccacgtcgggtaccaagcacaactctgccatgttagaaaaggcataatttcctcctccttcaatggccctcagcattctctctatatgataa

SEQ ID NO: 225017 - DNA, 365 bp, Glycine max
  unsure (1)..(365): unsure at all n locations
ggtagaatgtattcggagtttggtcaaagcttataatgtcaaattagagttatgtgcagatcggtttagtccttttacccaattagaaaaaccttactcttgttggccatttatcttaactccatataatctcccaccctgtatatgcatgaatagggaatttatgtttttgacagtcttaattctacgttcgtcaaatccaaagcacaagattgatatgtacttgcaatcattgatagatgagttattgtaccttatggaatgatgacatattaacttatgggatgcctgcacgtnggatgacgacagggacacttggttatccatatgtatggaacaacaaacgcattcacaataataactat

SEQ ID NO: 225018 - DNA, 217 bp, Glycine max
  unsure (1)..(217): unsure at all n locations
agcttcatgatgatgaatcaagttgtttcaagtagttttgatgatgacaaagatgatgacaaanagcccaagagaatgatttcaagattgagtcaactagtttcaagaatcaagagaagtttgatttcaagattcaagagaagatgaattcaagattccagagaagaaatcaagaagacttccctaggaagtattgaaaagaattttcaaaaacaaa

SEQ ID NO: 225019 - DNA, 424 bp, Glycine max
  unsure (1)..(424): unsure at all n locations
tctatataagctgaaccatcntatcaataaacacaagttgagttttattcagaanattagagtttatctcttttatcttagtgagagtgattctcctaaattcttgagtgattcaagaacaccttggctgtatcaaaggactntcacaacctttgtgtgttgccctcactggaaagagtgattctttccttcctttcatgatcacccttgttctttcaaaccacaattccagaaaatccacctctgcccagaattatctcgtggccataactcccattttacgcactcacaataagtgaatcttgagcctaaatngaatttcaaaacgagacctttcacctcgttttggaatcacctcatttggagccctatagcttcagttattgccatttctatatttttgccagccaccacttaacctacg

SEQ ID NO: 225020 - DNA, 364 bp, Glycine max
  unsure (1)..(364): unsure at all n locations
actcagcttctttaactcacttctctgaattgtcgctttctcttctctctacttttcattccgctgccattcatttccaagaacaaaggaatccattgatgaataagatccaaggcctacaagctcgaatggagtttacatcacttcatcttttgtagtaactgtgataattctcttttctctctctttnttctctcaattggtcttcattcttcttcatcttttcacttctgttccaccattntttttttaatttgagtgaactttcacattgaaaatcatttgtagtaaatgtgataattctattttcattggtttggtgaattgtattgatgcatttaaacttgaattgtattttgttctt

SEQ ID NO: 225021 - DNA, 297 bp, Glycine max
cctaagcaggcgagcttctggcagtcaacatataaaacgaacaaagaccacaaagcaaggaggcttgcgcagtggctggccagctgggaactttgatagatatgtgggttatggcctctggtaatcaattaccaagggtgggtaatcgattacaaggcttaaaaatgaagacaaaaggctaagatggtctctggtaatcgataccaaggggtgtaatcgattaccaggcttgaaaacgaggtcaggaaactaggggagcttctggtattcgataccacgggatgtaatcgaatacca

SEQ ID NO: 225022 - DNA, 293 bp, Glycine max
ttttatccaagctatcttggagggaagctccttttccatggtttattccctaatggatggcgcctcctctcacctcttctcctttgtcttccgctgcatctccatggtggaaaaccaccattagaggacctcattgaagctcaaagatccagcctccatataagctccacaagcaagcttagggccttcccttggatctctagcccaatctacttggagttttctacccaatgcccttgcggggtaggattgcttcactatggccaggaagatcctaagagcaggttattact

SEQ ID NO: 225023 - DNA, 216 bp, Glycine max
aattatatcatgttcgctgtcattatatcatacttcttcttatgaacagcatagaacaaagagaatgatgaaactatataaacaatattatatatagggatgacacgaacattataaagaactatctcgcgatagaaactaattgagtgagattagtctctaatcttgaccatatatgtactaagggccactacttatgagcagtccatgctccac

SEQ ID NO: 225024 - DNA, 414 bp, Glycine max
  unsure (1)..(414): unsure at all n locations
agctnnttagtctcggctgatgaagatgatttcttttctgtttcatgcactcctctaatgacaatagcatcacttctggcactaaattgctgggtgtttgaagccatcttctcaattaaatttctggctttagcaggggtcatgtctccaagggctccgccactggtagcatctatcatacttctctctatattgctgagtccttcataaaaatattggaagagaagctgctcataaatctagtggtgagggcaactaccacataatttttaaatctctcccagtattcatataagatctctccactgagctgcctaatgcctgaaatatcctttctgataaccgtggtcctggaagcacggaaatgtttttctaagaatactttcttgaggtcatcccaactcgtgatggacc

SEQ ID NO: 225025 - DNA, 204 bp, Glycine max
  unsure (1)..(204): unsure at all n locations
gaaactcacgcttctcagatccggtcatggaaagactgggcaactgcctttatttgcttttccantacaacacggacatggctcctgatcggaaccaacttcagagcatgaccaagtgggaacatgagtccattaaagaatatgctcaaaggtggagagacctaacagcccaagtcgtccacctatgactgaaagggaaatgat

SEQ ID NO: 225026 - DNA, 423 bp, Glycine max
  unsure (1)..(423): unsure at all n locations
agcttagtgtggctgacttaactcactatgcattntanctatgcttacaatgttgagaatttatttttcttttattttctaccaagtatatgagaactaatttgtataagtcaattgtgaagtgaatggacagggacttntgctggtgttatcattgaagcgtgaaaatattctctgctagggttcttccttgaaccgtttgatcatatcaagaattgctcaattcttatggcgatcctcaaggattatcaaacatctttttttgtggcacctatcttggtcttcctttcacatattctgtttccttgtttaatttccacaatgctaattctatatgaatttcttgttggcttatatctcatattgctaacctttttcggggtttttggcttaattatgttttaacgttcccttcacctattt

SEQ ID NO: 225027 - DNA, 419 bp, Glycine max
  unsure (1)..(419): unsure at all n locations
ggggaggattgatggtgacccggtgttgttataaacntttatatgggctacgtgggagtacgtgagctcagttggaggtgggcaacaggggatggtgggtttatgctcgcattgtggatgtggaaaacttgttgtacaccatcgcccgaccgccacctagtaccacatgtgatgggtaccccataatcctacaagcttgagatgaggaattgttgaagggtgaaacttcctgcttttattgttgaccacagagtgtgacctgtagatatgtcgcgggggtcaagagaccttggggacgtcaggtgaggtgctattgtccaaaaccaagcttgaccaatcccaatccaacccgggcatatttggtcagtgagaacctggtatgatccttaacacgcgagctccttgcattctactgataa

SEQ ID NO: 225028 - DNA, 369 bp, Glycine max
  unsure (1)..(369): unsure at all n locations
agcttaaagtatgcccgagtcattcatctctatgagatgttgntgaagtattggcaatcagaattgccattccttggattatggggttgaaccaagctcatgcttttacaaaaaggttcatcaagtcaagttgaaatatggaagtaaccgtcttgcaaaattggggcaaaagatgaatcgagtcacatcaatgcttcgtctacttccaaacatatttaggattattgatgtccttgttacttccagtttcaccttgacaaagatgtcatggaccatgttgaaaatctaaattgattcaacctcatatcttgcgtaaaaatgcacaatacttcaactgtacatcattcgcatacatccatgcttttcatt

SEQ ID NO: 225029 - DNA, 304 bp, Glycine max
  unsure (1)..(304): unsure at all n locations
ggaacatcaaactaagctgaagggggaacccacatccagcatttataatctggnnaggcgctactaccagtgcatcatttttctccgcattgggagccacttgaccgccagggctctcacctttggggcgatctttgaagaattggccctttgccagtctttgtgatcatcggaccttaaaatttcgatctgctacaaggaacataggcttcaaatgactaaaggtccgtttgaccagaaagttcccgcaatttttgagatgtcacattctatttgggtgccccttccgaaactttaaaggttt

SEQ ID NO: 225030 - DNA, 390 bp, Glycine max
agctggaccaatgcggacgcacccgggtatattcagaccgtgggaacctgtgatgtacctaaacatgctagctcctggatgtcaaccgataaaagaacaaagaccacaaagcaatgacgcttgtgtggtggctagccacctatggatcttgagaaatatttggaatatggcctctggtaatcgattaccaagggtgagttatccactacaaggtttaaaaatgaagacaagaagttaagatggcctctggtaatcgattaccaaggatgtgttatctgttaccatgcccacaaatgggatcaagaaagagagagggcttctggtaatcgatctccaatgatgtgtaatcgaataccacgcttcaaaatggagacacaatgtcgggaggcc

SEQ ID NO: 225031 - DNA, 360 bp, Glycine max
  unsure (1)..(360): unsure at all n locations
nggaaatgcattagtgcacctattttgaattttctatgttgtacccacatacataaaacagcccttctattctaattttacaaatattatattcatatatcatcggggcgtttcaccgatgcacttgtggggcgcatgtttggacacaaattgcaagagaatggggacacatttggcatgccccattgctttaaaatacaacataggcctaaggccttttcattcaaatccttaactcaagacaacaagcataaaaacaaagccaaactgccctacaaacataagcacattttcacatattggagctccaaatgatgaagaaactatccactgggaagctaaaacattaagattgaatct

SEQ ID NO: 225032 - DNA, 152 bp, Glycine max
  unsure (1)..(152): unsure at all n locations
ttgtatccaatgctcacatactgaagtcgatcaccactttagtttttcaganaactttgacaacaaacacatctcaccattcgttggttagatggccatcataggcttatatatatgtgactagagacacggagttagcacgaggattcaag

SEQ ID NO: 225033 - DNA, 386 bp, Glycine max
  unsure (1)..(386): unsure at all n locations
tgcaagcttgcccagngagaagggcagaggatatataatttttctagcgtgagaaacacgattttcactcttcatactctccaaactttcgtcaaaaaccataacatctccttctccaccacccacgaccaccaatggccacgactagccaccttgcttgtcgccgaaccaccggatggtgaggattgctttaatcatagcagaatctttagaatctacctcaatgatttggtagagaatagagctctcaacccttccttcatggtttctttgaagtaaccatgactcccttgtcttctcctagttagtttgagcttctcttaatatctcttgtgatttgggcatcgcaataggatgtttttacactcctttgaaaactttgaaat

SEQ ID NO: 225034 - DNA, 404 bp, Glycine max
  unsure (1)..(404): unsure at all n locations
tgctaagtgnttgtgtaagtgattctagcatcttagcttgcagcttgttctgtgccaatagtgcatcttgngaagaaagctctaacatgcttctttntgtggttacgtgagttttatcacgcagaatagcatgatcactagcagccatgttctctatgagttccattgcttcttcaagagtcttcaatttaatttttcctccaacagaagcatccaataactgcttgaactgcagtctcaaaccatcaatgaaaatgttcagttgaatcggctcggggaatccatgagttggtgtcttctgcagaaagctacagaatctcttaagcgcttcacttagggattcatctagaaattgatgaaatgaagaaatagntgccttgccttcagctgtctttgattctggg

SEQ ID NO: 225035 - DNA, 361 bp, Glycine max
  unsure (1)..(361): unsure at all n locations
agcttncctnttcaatgacgagcgttttgatgtattacgggacacaatctgacacccgagttaaaagttattggctgttgaattagcttaaaacttctattttcaattacgagcgtcttgatattttacgggactcaatcggacatccgaataaaaagatattgtccgttgaatattctcagagcttatgttttcaagtacgagcgtcctgatatattacaggactcaatcggacatccgagtcaaaagttattgtcggttgaatttgctcatagcttctgttatcaattaccagcgtttccatatataaccgggactaattcgacattcctgaaaaaattatttgtcgctgaaatttttc

SEQ ID NO: 225036 - DNA, 373 bp, Glycine max
  unsure (1)..(373): unsure at all n locations
ntgagcanattcaaacgacaataactngtgattcggatgttcgattgtgtcccgtattatatcgagatgctcgtaattgaaaacagaagcactgagcaaattcaaacgacaataactttttactcggatgtccgattgtgtcccgtactatattgagacgctcgtaattgaaaactgaagctctgagaaaaatcaaacgactataactttttactcggatgtccgattgagtcccgtgatatatcgagacgctcgtaatggaaaatagaagctctgaccaaattcaaacgacaataacttttgactcggatgtccgattgagtcccgtaatatatcatgacgctcgtaattgaaaacatgaactcttaaaaaa

SEQ ID NO: 225037 - DNA, 401 bp, Glycine max
  unsure (1)..(401): unsure at all n locations
agctctagncgaccatagacggtgcgctttgtgactgtccaccaatacgtgcatctgtgcattcatcgcatccagcaacagacgttgagcgccgtccaactgatgatactcgtcaccaccaccacctgctccagccataatttaacaggaaaaaaaatgcgccataaaaattattaaggtttcaggacctcacaacactctactcacgtgtttaactcttagatggtagtacactcgcgtttaatgctctcaataggccaatgtgtagtgtattcccttttgccttttaccactcgggttttctcttaagttcctggatggaccaaattatacacacaaggcattattaaataataggaaagacactattatgatctcaaccgatttatttggccaacaac

SEQ ID NO: 225038 - DNA, 397 bp, Glycine max
actcaagctggaaattgaacaacggaagctctcgagaaagtcgaatgtgtttaacttttcactctgatggccgattcggggacataactcatctagacacttgaaattgaacaacggaaactctcgagaaattcgaatggtcataacatttcactcggatgttcgattcggggacataactcatctagacgctcgatattgaacaacggaagctctcgagaaattcgaatggtcataacatttcactcagatgttcgattcggcgatataatatatcgagacgctcgaaattgaacaacggaaactcttgagatattcgaatggtcataacttttcacacggatgtccgacttgggaacatatatttttgagatgctccaattgaacaacggaagct

SEQ ID NO: 225039 - DNA, 425 bp, Glycine max
  unsure (1)..(425): unsure at all n locations
cctgaggcatgaagcttttaagcgcgggctgggagacttttgcaannggtcctttatacgaagatgatgttccgagtacattagatttggtacgaccatgccctcctgatttccagctgggaaattggcgagtggaggaacgccccggcatttacgcaacgagcataatgtaaacctttacggttttaaaagctctatagttgggcctaggctttagagtttttccttttgttaaggctttgtgtcttttgttgttgattttataatacaaggatctttcttcatctgttcctacgtctctacccattctcattcattggcatgtgtacactcttttctgagacggcagatccgatgacgagtcccccgaggtactaattcctgggaccacgctatcgactttgagcaagatatgaatcaaacgg

SEQ ID NO: 225040 - DNA, 343 bp, Glycine max
  unsure (1)..(343): unsure at all n locations
tgcacatctanganaagctaaaaacaagnatttgtgtatttttatattctttcaacaagaagtaataggtataacatgatatgtgttcctctaaaaaaacatgatattggtactatacccaaaagtaaaaaagatctacttgatgtcatgctctcgatagtaggtgaaagatagtaattacctattatggaaatatttcaataaaaaagtatttaaggttttagtttaatggaagcaatatcggaaattaattagtatgaccaaatctgccatctatatatatatatatatatatatatatatatatactataatgataatcgttggtctttcataagaaaag

SEQ ID NO: 225041 - DNA, 200 bp, Glycine max
tttctgctgagaccttgataggagagttctactttactgttggctaactctagagtctaagaaattaaagtccccgtcctgaaagatgtatgattgaatttacatcatgggatcatattcaatgtgctgttgtgtttttttttctttagaaaaatggtcatgttgcatggctggaggaggaatcgtaatggactcttaat

SEQ ID NO: 225042 - DNA, 399 bp, Glycine max
  unsure (1)..(399): unsure at all n locations
tcatacggccattacaggcttagcaagttctatgtttatggcatgaggctcngaaaaccttcatcacttctcatgggttcatcaccaacaaaagtgacccttccctcttcatttatgcaactggaaaacaaaagtatacttccttgtatgtgtggatgatttactattaacaggtaatgacaataactttctccatgccttcatcataactctttgtgataagtttgcactaaagaatgagggcaaccctcactatgttctcggggtcaaattcattgccaccaaacattgtatttttctctcacaacacaattatattcatgagatctcggagaaatttgatgtgaaggggagaacctacatgaaccccctatcccctcaccacactcatttcatata

SEQ ID NO: 225043 - DNA, 402 bp, Glycine max
  unsure (1)..(402): unsure at all n locations
agcntctcatgggagctaccgagtctattaattgaagcctgcggaacacttgttggaactttgatgaatgagactcttgtaagacacaactcaaagatcaacttctctccctttttttcttccttcattttcgggctcccccctctctctttctatccctctttcttttcctccattgaagcatcctctctaagcttcttatccaaagctcatcttggtggagaaactccttcttccatggcttattcccaagtggatggcgccttctctcacctcttctcctttggcttccgctgcatcttcatgggggaaaatcatcattaaggacctcattgagctaaagatccacctctataaagcttacaagcaagcttcataagatgagtgggggagaggagagaa

SEQ ID NO: 225044 - DNA, 348 bp, Glycine max
  unsure (1)..(348): unsure at all n locations
ggactntggtttagacatgattgatacattttnttgagtcttgtangatttgatttgggcaagattggatgagaggaagtgtggttttcgaaatctgcactttatgcagaattttgctgtgaaattgtgcagtagaattttgcataagtgcagaagaatgctatgtatttgctggttgtggaaagagtaatgcagaatgagttctggatgtttactagtagatcccaacggtccaaatgtagacttatgtactagagacttccagtaaaattttcgagtcgatccaacggttaacgaactggaacgaagggaatgttactgaggtctttaagtgagaaaagctgtgat

SEQ ID NO: 225045 - DNA, 380 bp, Glycine max
  unsure (1)..(380): unsure at all n locations
agcttaccagcataagaagccatgtaatatatctngaaggtaggagaaaatgagtggagggagaaagagagaaggagcacaaatatttatgcctcaaatgaggtttgaactttgaagtgttattctcaaattatcaaagttgaaaaaatgcacacacaaggcctttatttatagcctaagtgtcacacaaaattggaggaaaatttgaattcaattcaaatttcacttaaatttgaatttgaatttgtggagccaaaatttcactaattattattagtgagatttagctatggctcagcctactaatccaaatcaagtccaagattatccactaaatgtgcttatgtgtcatgaggcaagtaaagcatgaaggacatgca

SEQ ID NO: 225046 - DNA, 321 bp, Glycine max
  unsure (1)..(321): unsure at all n locations
tcatgatgatgaatcaaggatgattcatgttgttntgtttatgacaaaaagcccaaagagaatgatgtcatgattgagtcaacaagttcaagatcaagattaaagaaaagacatcaagaagaatcaagattcaagagaagatgaattcatgattcaagagaagaaaccaaaaagcaacaagtcaagacttcataagggaagtattgaaattttttttttcaaaaaccaaacatagcacaattttggtttacaagaaaagtgtttccaaatttttctaagttaccagagtatttactctctagtaatcgagtaccaattacc

SEQ ID NO: 225047 - DNA, 409 bp, Glycine max
  unsure (1)..(409): unsure at all n locations
agcntaggttgtaccgggttctttgtatatactgtttaaccccaccgacgntaccccactacattccgggactgaccagcaacgaagcatgtgacaacctaatccacaactgccaagagatccacaggaaactgtatcaacgattgatgaaagcacatgcagtcatgaagcataacgccgatgttcagcgcgaggacatttcattcaccgtgggccaatgggtgtactgtaaactccgtccataccgtcaacgttccgtagcaggagctcctcattccaagctttcaaaaagatacttctggcccttacaaatcatagcacgcataggccacgtcgcgtattgtctcctactttccgataaggcacgaattcacaccgtgttccacttgtttgtcctccgtgctcacac

SEQ ID NO: 225048 - DNA, 194 bp, Glycine max
  unsure (1)..(194): unsure at all n locations
aagaagcgntactgccgatccacanaaaaaatggaaagtcttacagctactttttgtttgtaaaatgaagacaagttcacttccacatggggagatgcacctaatgaagtttcattgaattttcttctataataacttaattattgttcccttatatgacgtgactcatttacccggagagtctcattgcattg

SEQ ID NO: 225049 - DNA, 244 bp, Glycine max
taacaccacagcggctatgcttcaggggacttttgttctaaaacatctggatccaaacacacagattgcaacctaatggaagagctatacatttcaccttcattatagacacgcagtcgctcaaaactagcacgacctgagatgccagccaatgtcactgtaagcgcatgataggcttgccccttacccaaaagcgacagaatgaacgagtatgacagcgagatcttgacatgcatcggcctgg

SEQ ID NO: 225050 - DNA, 297 bp, Glycine max
cctacctataaagaagctgtgaacacttgtgtactttatgatcggaagcttgtgagaccaatcaaagttcaacttctctccttttctccttaattttgtgctccccctctttttctctccctcttcttttctccttgaagcatctctccagtttttatccaagctcatttggtggtgagcttctcttcatggttattcctagggatgaacctctctcaccttttctttgttttcctgcattcatgtaaaaatacccttaaagacccttgacctcaaatcagctcattaaccctcagc

SEQ ID NO: 225051 - DNA, 400 bp, Glycine max
  unsure (1)..(400): unsure at all n locations
gcttgccacccagctcgcccaggcgagcatggntgctttgtgcttctggaggaatcttctggagggcccaagtgggcctggttgctatttgcacccccatttttactaagtacaccccctgcccttttttttggtgattctttttcgtaaagntaccgaaacttaactaattcgtaacgaaacttggtttctttccttaatgttacggaaccttgcggattacataatcatcccctttttgacttacgaaatgttacggaacctcactaattgtgcaacgatgcttccatttgatttccggtgagtcacggaaccttacagattgtgcatcaatattttcttttgttttccggcatgtcccggaaattcacaaattgcctaatgatgggtgccaagcacc

SEQ ID NO: 225052 - DNA, 360 bp, Glycine max
gacactcagaaactcagctttacttatgggcgggcgggcttcttaccttcttgttccaactcgaactttgaccattgttcttccttcccgcaatgcttcttttcatgtctgcctgagtgggcttatagcctaaaccatacttcccacgatttccttgagtatttatcaggctagttatgccgccgttgttttttcctaaacccatcccgggttcaaaaccgttccccaacataactcgggccatcattaccgctgcatcggacaaacaaggttgcccaaagagggagtccacggaggaaatgctgaccacctcaaaagactggaaagcagtttctaacgattcttctgcggcttccacat

SEQ ID NO: 225053 - DNA, 384 bp, Glycine max
  unsure (1)..(384): unsure at all n locations
ccccatgtggaatatgcttacaatatagcngttcatattaccactaagngnnctccttgggatgttgtttatggntttaaccactcactcctctngattttttgactatgcctaatgtttctgtttttaagcataaagaaggtctagctaaggcggactatgtgaagaagcttcatgagagagtcaaagatcaaattgagaggaaaaataaaagctatgcttaacaagccaacaaagggagaaagaaggtcgtcttcgaacccggagattgggtttgggtgcacatgaaaaaagaaagtgttcccgaacacatgaaataaagcttaaccaatgtgagatgaccatttcagtgcttgaaagaataatgacattgttacaaagttg

SEQ ID NO: 225054 - DNA, 361 bp, Glycine max
  unsure (1)..(361): unsure at all n locations
tctctctgggttccttgttgaaccaatctcagactanctagtttattcttgtggcgtctaccctgacttatcttccttcactggaagtggcatcatccaaatctccatagcctgtatcaagtgattcgctcctagtcaggatcacatcacatgaacaacatgatcatgctgcaacacactgaaattaaagcatcctttgaaacaagtgcacatgtggttggacatgtttctaaagttactttatacaagaggcttcttggcatggtttcaaggtatgttttaaatcaaattgttgctgagtttgagcgtgtacattatgctggcaagaatccttcttcttgttggtgtatcatgagaacta

SEQ ID NO: 225055 - DNA, 430 bp, Glycine max
agcttgaatcggatatccgtgtgaaaagttatgaccatttgaatttctcaagagcttccgttgttcaatttcgagcttgtcgtcatattatgcgcccgaatcggacatccgtgtgaaaagctatgaccatttgaatttctagagagtttccgatgtttaatttcgagtgtatcgatatattataaacctgaatcggacctcagtgggaaaagttatgaccatttgtatttctcaagaccttccgttgttcaattctgagcgtctcaatatgtgatttgctctaatcggacattccggtgataagcaatgaccatttgaatttctcaagagcttccgttggttaatttcgaccctctcgacatattatgcgcccgaatcggccatccgtgtgaaaagatatggcatttgtattctcgagagttccgatgtt

SEQ ID NO: 225056 - DNA, 363 bp, Glycine max
actcagcttatatatatcgatacgctcgaaattaaacatcggaatctctcgagatattcagatggccataacttttcacacggatgtccgattcgggcgcataatatgtcgagaggctcgaaattgaacaacggatgctcttgagatattcaaatggtcataacttttcacactgatgtccgattcaggcttataatatatcgatacgctcgaaattaaacatcggaaactctcgagaaactcaaatggtcataacttttcacacggatgtccgatttgggcgcataatatgtcgagaggctcgaaattgaacaaccgaaggtcttgagaaattaaaatgggcataacttttcacaccgatgt

SEQ ID NO: 225057 - DNA, 444 bp, Glycine max
  unsure (1)..(444): unsure at all n locations
agctngagggtcttgatattgaatgaatttattagtagtttttatttatatataaatgataaatatcattattatattataatgttgatgaaaaggctgaggagcttccataaaagggctgtataatgattcaaaaagcttaatagccacaagaaatctctatagagctatttttcaataattcaagatgtgttcattgcataaaactcagtagaagggtcgctagggacttcagataatagaggcttccatttctaatagatgatgggttgttcgtacggtcacctgttgccacttggttgttgttagagtggtgtttgctgagcactttcttacttagtcattgcaacatagggttgttataacactggtgtntgccgagcttattctcacctacataatttgaatctgtaaactcttaattcgcgaaattgaattcaatta

SEQ ID NO: 225058 - DNA, 221 bp, Glycine max
  unsure (1)..(221): unsure at all n locations
cttgtgaagcttctaaggaggctagatctttgagctttattgaagtcctcaatggtgattcnccaccatggagatgcagtggaagataacggagaagaggtgagaggaggcaccatccactatggaataagccatggaagaaagagcttcaccatcaagagagtgccttggataagaagcttataaaggaagcttcaatggaggaaaagacagagagagag

SEQ ID NO: 225059 - DNA, 446 bp, Glycine max
  unsure (1)..(446): unsure at all n locations
catgcaagcntgacgataatagcaacgctatagaaacataaactcgggagaggattaccaagtatgccatacaaggatgacttactttgtgaggcatgtcaaaagggaaaacaaatcaaaaactcttttcaagtgaaaacattatttccacctcaacacatctaaaagtgttacatcttgatatgtttggtctaactagaacaacatccataagtggaaagaagtatgaacttgtcatagtggacgactactctagatgttgaattagagtgtttgaagatttgaagactagtcttaagatcttttggctttaataattttgcactgccaaacatatttctaaagttatggaatttgtatcggatgttcttacacttaagcatgttgagtgctttacgctttgcggctatcaaacatgaaaagaataaaaagcttctatgaagcat

SEQ ID NO: 225060 - DNA, 232 bp, Glycine max
ttttggaccggcctgaagagcattagtggtgtctatctgtaacccccaaatcttccaaatactcactaaagactcgcttggatatcgatgaaaggctgatacgacttgttttccttcagcagacttggactctacgaatgattacttacagacttttccaaccacttcatttcgagtaataagactgtcaccttaaaatgaatggatccatacttttgccattccacacaaa

SEQ ID NO: 225061 - DNA, 337 bp, Glycine max
  unsure (1)..(337): unsure at all n locations
tccattgggtgagttttgcttcccttgtcatgctntaattcactccccacaagtaagtgcaatttcccttggttatttggctctccattgatgtgttttggtgctttagttgctcattttttgcaaaattcgtgaagcaatttgcatctaaatccatgcttgttttgtggagttgaggatttgaatgagaaggccttaggcctatgttgtattctgaagcaatggggcatgccacattgcccccattctcttgcaatttatgtccaaacatgtgcccatcaagtgctcggtgaaatgccccaatgatatatgaatatgattttgcnnaaatgggatg

SEQ ID NO: 225062 - DNA, 406 bp, Glycine max
  unsure (1)..(406): unsure at all n locations
agcttaggaacccaagcttttagtttcattgcaaggaaacatggcttatgtctaaaatctaaattttggttttgaaagtggaaaggcatgaaaattaggacatgattgagagaatttttactaggatttggctgccccatgagggttactttgcatctgggtagcatggaaaatacctttcaatggtatgtatatatgtgtgcgaatataggtagcatggaaaacaactttcaatatatgttaatatatggaataaaatgccttgaaaagtgtgaatgagtcgcaaaaatgccttttaacatgtgcgtatttgaggataggtagcattaggagccttttagaanatgtacccatgtcaaaaagggcctgaggacgcttcctaaatgaatatatgatggcatggaat

SEQ ID NO: 225063 - DNA, 371 bp, Glycine max
  unsure (1)..(371): unsure at all n locations
ctcagcttctcatgattttgttagaacaatttatttttatggntnctcctaaatcttgtaaatatttattggtataattcgcctgttccattagcctcttgatgtctntagaggttacttcctcgttgacatcttttgtcttgaatggaattgccatgacaggtttattgttactgtctttgatatttggtagttgatattgtgttgcgggaggtaattccgattggattaactcaccatccttaacttgccaatttgttatgacatttgttgttggatcacctatgatgtcttgtttccaagggtaatctatatcctttctgatggcacaagcatgaaaccaatcaagaacaggacattaattttgactc

SEQ ID NO: 225064 - DNA, 376 bp, Glycine max
agcttcttacatgatagacattcctacagtacctaaacacaagtttgagggattttttcacttttaagcttacaaaaaaagctttttcttttttcaaatgagagaatatagttaaacatgattttaacaaaaacatcttttatatagtttttgtgtaagttttactacaaacttaatattgagaaatatttttaaaaattaagtttatatattaaaatgatctaatatcaaatttccgaactcatttaaattttaagcacgcgtagtaggtctaaaaaaaagttgtgattagtatgtagcggaaaactaaattcaggggacattcttatgtttcatacgcccgagattgaactctatgttaggcccgagacaatta

SEQ ID NO: 225065 - DNA, 454 bp, Glycine max
  unsure (1)..(454): unsure at all n locations
tgctatatgtatattgtgcatgactttgtttcaggatgtgtgtgttcatcatttactcggncggnggaaattagagcatacaattcagtcggttttttactagtcaagacagcatccaattgaaccaaaaaagaaagtatgttcaatggattaagtgtaaattacttatgtggattgatgttataccatgcttgcatcaaaagcgtagccttttttgagctagagtttcactatgcaaaaaactagggtcgatgcctattagactaataagttatcctaatcttggacctgacttctctggtatccccctgttggttcttgaaaatcacacaattttaaattggagtctcatataaatattaatactcaattagctgacaatatcggattactcaaaaaagaccacagagagtcatttgtcacgctttacaaaaaaatcatgctaatggaccaa

SEQ ID NO: 225066 - DNA, 437 bp, Glycine max
agcttaacaaggcgatgagctatttcataatatttctatccctatcacaaaacttgcctcacccatatccttcatttcaaagttattagagagaaacttcttagtctcatgaagaagatcaagatcattagttgccagcaatatatcatcaatatacaggattagaaaaataaccttactcctactgaccttcagatatatacattgattaacaatatttttcttaaatctaaaggaaataatggtatcattaaacttcaaataccattggcgggaagcttgcttaagaccatatattgatttctttaatttgcacaccatgtgttcatttccttcaactaaaaaccccattgggtgggcaatataaacattctcttctaaatctccattaagaaagacaggtttcacattcatctaatgtagctccaagtcataat

SEQ ID NO: 225067 - DNA, 338 bp, Glycine max
  unsure (1)..(338): unsure at all n locations
aactacgctanaactggttaaaattagtttaaactcgtttctaaaatcaaattgaagntttataaaaagaaaaattgagttttaaattcaaactgatgatttatggtagttaattttttattagatttttgaaaaatgaaatcatgctaaccctaccatatggcaaacgatatacatataatacacacttcaaacacatgcttaataattcagtgactattacataccccggttttcttcaaaggtgaacatttatcttatcaanaggagaaaactgcgttaatagttagattctgaaagagagaagatcgttgtactacaaggatcccctgtttgcg

SEQ ID NO: 225068 - DNA, 385 bp, Glycine max
agcttgccacccagctctcttagtcgagctaggttgcttcctccagaaagcaggagaacttcctggaaggccctggttgctatttgcaccccattcttactaaatgcacccccttgcctcttatgctgattctttctccgtaacgttatggaaacttacgaattacgtaacgatacttgttttccttccgtaatgttacggaaccttacggattacataatcgtcccttattttccttccggagtgttacgaaactttacggattgtgcactaacacttccttttaatttccagcatgtcacgaaactacacggattgtgctaaatgctttctttgacttccacatgtctcggacttacaaattgctaacatgggtgccagtact

SEQ ID NO: 225069 - DNA, 401 bp, Glycine max
tgaaggcaaactggatgcgttgttcaacttgttaacctatctggccttgaatcagaaatctgtacctgtcgcaagggtttgtggtttgtgctcctctgctgaccaccatacagacctttgcccttccatgcagcaacctggagcaattgagcagcctgaagcttatgctgcatatatttacaatagacctcctcaacctcagcagcaaaatcaaccacagcagagcaattatgacctttccagcaacagatacaaccctggatggaggaatcaccctaacctcagatggtccagccctcaacaacaacaacagcagcctgcttcttcctttcaaaatgctgttgggccaagcagaccatacattcctccaccaatccaacaacagcaacaaccccagaaac

SEQ ID NO: 225070 - DNA, 382 bp, Glycine max
  unsure (1)..(382): unsure at all n locations
agcttatcattctatctctcanaaagtatgaaaggaagttcaagagatgcaggtaaagcatacccctagtagacaaatatttctatcttaccttcatgtagacatctgtatctggatcaggtgtaatatttgcttctttttctcttctgaacacctctgctagcaaatctgcagaatgtgaaataattttagttaaaacttgatttttcatatgaattttggctcgatttccaaattgcagctctgtgggctaaccataaggaggcccaactccttggactcatgctgagaaggccagggtttctctgactgtcatttctccaatatgaagatcattttgacttacaaactcaattatcccatgaccattataagtcacctt

SEQ ID NO: 225071 - DNA, 329 bp, Glycine max
  unsure (1)..(329): unsure at all n locations
ttcgctcgcttcaacctttcttcaccaactatgattgtctctttatacctttntccggttcatcaattttcttttcctatgaactcaccatgttttgcaacagactccatgaagcactatcttaataatacaatatggcaacatatcttaacacaaaatgtgaggatatcctaagtgtatcaatacagaaatactttcttgaaataaagcacaggtatctatgccataaccacttcaccttgagtttctcattctcacttctgagcntttccaacaaagcattgtcaacaacttgaactttctgtatgacaggcactctctctgctgct

SEQ ID NO: 225072 - DNA, 415 bp, Glycine max
  unsure (1)..(415): unsure at all n locations
tacatctagattacacaaattaaaaatttgtggtctgtgcctcaaaccaagtattcacttggtttatcaattaccatttttattattaggaacattgatactatgtattatttaaaagcttagtcttgattctcaacattaagcatgcttcaaaatatttctcataaaactcaaatttaaatttatactaaatactgttgtattgtgttatatatcgtatgacattactcgttgaatataattacttttcgtttttttctttttctttcattttgtagttttgatatagattcatgattggtttgtgtgtacatcaantttttttttcttgcagaaagtttatatcaaagacgccaaaattgcctttattttatgaaagaatataggagggagctatgtggaaagggatagtaac

SEQ ID NO: 225073 - DNA, 406 bp, Glycine max
  unsure (1)..(406): unsure at all n locations
tctgcgttntaaaaatcatataanaaggggttaaacgttgnatccgtatccgagccgtattggagtcgtgtctagccttagaaagtcgtatctaagccgtatcccagccgtatcttgtattttaaaaaaaataaaaaaaattggatactcctaggatacgtatccgtggagtatcggtgtcggatacgggtacgacaccgatacttttccttttttcacgtatccgggcttcacaggtgatcctttagaatgatgttccttttcagaggaccttccttccccatagttggacaaggcttggccacaattgtcttcatcttgttggtggcttgcacaaaattacaacgtagggaagatgaattatttgaataaccaaacacanctgaattttgctccttatcaacta

SEQ ID NO: 225074 - DNA, 433 bp, Glycine max
agcttatatatatatatggctcaagatgattaccaatcatcatctgaatctcaatcctgaacctagagataatagtttctcgggatgttaacttcacaaaaaggacatgcacttacttgactcagttgactgatatgtacaataacagaacgagcctcgaggtgatggttgtgagcagtttaattataatactactccaatatctttggtcctttcgatagaatgaaaaaaaagaagtaagttaaaccttattttaatgtgtatttattttttttcctttccactcaaacaaataattaaaaattaaagatataatactaattaagaaataaaaatggaattctcttattaaaaaatgtcattaataaacttttactgtgaattctaatatatttttaatacacaatttaatatatttattctaaatttctaa

SEQ ID NO: 225075 - DNA, 376 bp, Glycine max
  unsure (1)..(376): unsure at all n locations
nttctcacgggataataagncgagactctctcttctttttctatgcattatctctacccacacacgttaaaagaaattttggtcttattataaagtgctgcaaaaaagaaaaaaaaatgatactaaatcatgcaatttgttaaattattattctccaccttccaacaaaaacaaaaagcaagaacgctntgtccttctctgctgtcgntnttatttacctgttgtgaataaattgagtgtatgcgtatggttcgattatattattagggtttatggaaaattttgaaaaataggtgattatttttcacaaattgtcttaaacaagcacttcttataatgatataaaagggaataattatatataaagattttggga

SEQ ID NO: 225076 - DNA, 373 bp, Glycine max
agcttctagccaaatggacttaccttgaattaattcctttgatagccctcttgagccttgtttccctttccttgttttgaagctcactacaagccttaagtgaaaaaccatgatattaccatatccttaaggaattttggagctttggaattgttttgggaataagtgtggggggtttttgtttcattggacaacttgttttgttgcctatgcttcatgatgtattttgggccatacttgatatacattgtatattggttaaatgttggacatgctgaatgaaatgttgtttctcaaaggcaaaaaacaaaaaaaaaattcaaaaataaaaaaaaacaaaagaaaagcaataagttgagtgaataagatctta

SEQ ID NO: 225077 - DNA, 375 bp, Glycine max
  unsure (1)..(375): unsure at all n locations
ntgataccaactgaagtacctgaaacacactagaaggtggggggggtttgaatagngnganggataaaactttgtcattcaaaaactttgaaattttttctcaacagctattaatggtcgacaggtttcatccaaggggttcacaaacactttgaggctaaactagtttatgaaacttggatacgataatgtagaagttaactatagaaatgaactaattatatagaagctgtaaagaaaacacagaggttttatactggttcacccaactcttgggctacgttcagttctccttcaaacatgcagggttccactaattcaaattttgattcaaacaagtttcctttatgcccttcttgatcaacaagtactttt

SEQ ID NO: 225078 - DNA, 445 bp, Glycine max
  unsure (1)..(445): unsure at all n locations
agctngtctctacagaagaaagaaacaattattttagtatattcattgcagataattctttgcaatgatcaagaataattatgaaccaatcaatcttgaagcataaattgaaaattggtcccacatcaagtaacagtccaagtaacttacaggatcttcaagtgttgtaattgagacagaaaatcgggaacttcatcctttaagctattatttgataaatccctggaaagcaaataattaagttgcccctttagatatatttaaatcttgacacatgtaccaaatgacatattgattgttgacacataatacaaagcaaaaaaataaattaattaaaataagaggttttttctgcaggtctcatcattattgaatcaggaaaaataaaataaaataaactcacaaattctccagcatggtgagattaaaattgaagggctatctt

SEQ ID NO: 225079 - DNA, 392 bp, Glycine max
  unsure (1)..(392): unsure at all n locations
tcaagcacagatgctgttactgagggtatgttnnttttttttttttaaattataatatgtagngattcctgttatgggtcaacattggagtatgtagggttctatttgtttgcatggtaatggtaggattaaatgggcaacaaaggtatggatgggttgaaacttgaaagtcaagcttcttgctaataaggattctagtgatattttgtgactgctccaagaaagtggctattgaaactgatctatatagtgaatttagtgccaatgctcttgtggtgtaatggcaatggtgttgcatttgggacctgtttattaatgattttctattgaaaagatgggagaataatcttggtatagtctactaagcgtcatttttggaaaaaagttttttt

SEQ ID NO: 225080 - DNA, 378 bp, Glycine max
  unsure (1)..(378): unsure at all n locations
agctttgagccaaaatcctgactttcataaaccttaccctcggaagcaaaaaagaatagaagggaaatttccaatcaaagaaaagagaaggaaaatttccaatgaaagagaaaaaagaaaagaaaggaaattcccaatcaaagagtgggagaaagaaaaaagaaaaggaagaaaattcccaaccaaagaatgggagaaagtaaaaaaggaaggaagctcctggtcgaagaaaccagaaaaaatgtgcagagaggtctntggaccaaacgatatctgaacagtacagaatcgtcactaaatgaacaaaaaggaaggaaaggaaaccacgaccttaaatggtcttctccctttaattaccaaccaaaatcccgtgcgcta

SEQ ID NO: 225081 - DNA, 387 bp, Glycine max
  unsure (1)..(387): unsure at all n locations
ngtagccattataatagaatgagcatgtttttttaagtatgactgacaatgttagttagcttgtcagattgattatgaaggaatgcattaactgtatcctggtgagagtgtgatccttaaattttgagagaaacgactatcatttagtactgatttttgcatgaatctttgaagtatggactgaatgcatgcaaatgaggatgatgaaggccatgtttgattgtgatagccacttagccaaaatgttgaccatgtgcttgaatgaattatcccttgtacccagtttgagctgaatgcattattgattgattgaaccctgagcctatacagtgttatcttctactaccttgacttcggntgtaggagagcatcatccacaggaagcat

SEQ ID NO: 225082 - DNA, 377 bp, Glycine max
agcttcaaagttgtcaaaggacctagttttttatccatcacattattcaaccccccttctagggggtttcaggtacttcagttggtatcaaagcttggcttctgggttgagctcttgacagagtagaagaaagaaaattcctgaaacgatggaagaaggatttgctatcaacaagcctcccatgttcaagggagccaactatgactactagaaggaaaggatgattgccttctttgattctgctcacattgataagtgggatgttgtagaaaaaggcaatcacattcccctagacactcagaagaatgtaatccccagggacaaatggatgaatgatcattgtagcgacccacctcgttgctacgatattactaact

SEQ ID NO: 225083 - DNA, 381 bp, Glycine max
  unsure (1)..(381): unsure at all n locations
tagccctagaagggatggaccttntcatgttttggagtggtataataacaatgcctataggttggacctcccagaagagtatggagtcagcaccacttttaacatttctgatttaactccttttgcaggtggagctgatattgaggaggaggaactaacagatttgaggtcaaatcctcttcaaggggaaggggatgatgcaatcctccctaggaagggaccaatcactagaaccatgagcaagaggctccaagaagattgggctagagctgctgaagaaggccctagggttctcatgaaccttatggtagatttctgagcccatgggccaaggttgggtccaattatctttgtacatattagactangatgtcanttata

SEQ ID NO: 225084 - DNA, 420 bp, Glycine max
  unsure (1)..(420): unsure at all n locations
agcttatgcgcatgttgccttattaacgttcacttgcggaagacatcctattaaccgaaaaaatgcacccatatacaatcaaggcagctttgttacctatattatttacacgtacttccaaggtgttattgttacttgcatcacacacatcttcttggctaaattcacatacatgcatactccaaacatttggggtaccaaaaattgcacatgtgcacatcttggtatttctaatacctatacatacacaaacttcatgatgaatcttgactatcttcacaaaaaggtgctatatttcatgctcttttttcaagtntttgctacttaaagccggatgcaaattcaagcatattatcctttgctgactaaaattgtattcaaataaaacgtatatattcttttgaatatgttttctcacat

SEQ ID NO: 225085 - DNA, 358 bp, Glycine max
  unsure (1)..(358): unsure at all n locations
tgggcattcaatatcctgatgagcgtgttttatatgttttctagactggactaatacatttgctgcctaagttttatggtcttgcaggtgaagatcctcataagcatcttaaggagttccatattgnttgttccaccatgaagccccttgatgtccaagaagatcatatctttcttaaggctcttcctcattctctggagggagtggcaaaagattggctctactaccttgctcccaggtccattgtcagctaggatgacctttagagggcgttcttggaaaaattcttcccttcatctacgaccactgccatcagaaaagacatctcangcatcagacaacttatatggaaaaactt

SEQ ID NO: 225086 - DNA, 407 bp, Glycine max
  unsure (1)..(407): unsure at all n locations
agcttccattagtacatcgtactgctttttattgtgtacttggagataaatgcaaaatgttgctgaaattttatcaaatttaacctaaccaacttaattggtacgtaacaatcaagtattaaaaatgtcttcctgaatgggatagggccatacctattttatcaaaaaagtgagatnttgcatacatgtgggataacctagttagtatcacagaacaagaaaaatgaattgaacttggatgaaagcatcacgcataagtgaccagtatgagaatgtggttgaataattcttgcaatttatgcaacgaaatgcaccagtgatgggtggaaaatatttttgttcatgtgttaaatgtgcaaatgggagatgattagtagtcaatgacgtaagatctcgtctatatgtga

SEQ ID NO: 225087 - DNA, 414 bp, Glycine max
  unsure (1)..(414): unsure at all n locations
tgtaggattatggggtacccatcacatgtggtactatgttgcggttgggcgatggtgcacaacaagttttccacatccacaatgcgcgcataaacccaccatcccctgtagcccacctccaactgagctcacgtactcccacgtagcccatatcctcgtttctctgaacaccgggtccccatcaatcctcccaagcttccccaacatcaaagtaatacaacattcaaacagcacaaactatcacagccaagaaaacagagcaaaggcagaaaactctgccaaaacaccaaccaaaatcacagctnttctcacttaaagaccccagtaacaatttcttcgttccaattcgttaaccgttggatcgactccaaatntttactggaagtctctaatacataagcctacaatttgacc

SEQ ID NO: 225088 - DNA, 390 bp, Glycine max
agcttgtagggttaaagtcccacgattgtcacattttgatgcaacaattgttagccgtggctatatgagacattttgccaaacaaagtcaggttagccataactcgcctgtgctttttcttccatgccatatgtagcaaagtcgttgatcctgtcaagtttgatgagctggaaagtgaggccacaattatactgtgccagttggagatgtattttccccctgttttctttgacatcatgattcacttgattgtgcatctggtcagagaaatcaaatgttgtgatcctgtttatttgcggtagatgtacccggttgagtgatacatgaagatcttaaaagggtatacaaagaatatatatcatccaaaagcatctattattgagaggtaca

SEQ ID NO: 225089 - DNA, 156 bp, Glycine max
  unsure (1)..(156): unsure at all n locations
tctcccattcagggtctttatcgtctggatcagaatcttaagctttctccaagtggncatggtgcccttgaccgagaaaccacaactccacggaagcagaccacgaaagataattcttccagttaagttttgcagtggtgatggttggagtcccgg

SEQ ID NO: 225090 - DNA, 387 bp, Glycine max
gcctcttagtgaaatatttttgagattatgatctatgtcaaagatagttccatatgcagttttgtcaagatcatggcgaaatgaggacctgcaaagtgtataccaaaatctgtctcaatcacaaatttaagttgggggaatgttagaattcagaagcaaccttctttggtcattgcacattagaccaacatatctattgcgggctctatatattttgaagaagattgcagtatgctctttgagatcctttgaagctaaagctaacaaaccaaatggccctattatgccacttcttgatgcatcttcttggctacagagtagatggggatcaactccatccggatcaagaaactcggcactttgtagcttatgtagctcaaacaacac

SEQ ID NO: 225091 - DNA, 384 bp, Glycine max
  unsure (1)..(384): unsure at all n locations
gacactataaaactaagctattgacgaaaaagcttgtttagactttcttttattgcgnctngcaacctgtaaattaaatataaaagtactgaaaacataaagaaatgtaaatatagatcaaatatgtcaactaggattgtcaaaattagccacataatcaataatacatacaacaagcttaagaacataagccatattctcatccttgctagtgcttacactctgttctatatgttttttggtgacaatgggagattaaaccgagatctataaaatgaccaaacctcaccactacaaacataaagagaacaatttagttaaaacagctgtcaagatgaactcgaccatcaaggatctattctagtacaagcaacactcctccca

SEQ ID NO: 225092 - DNA, 333 bp, Glycine max
agcttcgtagtgcgtatgcgtttcgttcttccaaatggcggattccgacagtcccagcggcggctccacgccacctcaacaggaacaacaacccaacaagtacgctttcaccaagcccctctctctcgcgggtcccaccgacgccgatctccagcgtaacaacgaattggacaaggttaggttattggtttatttatttccgattcgtctcatctcatctcatatacaatttgtttaactaaccccgcgccttcgcgtgaaacgaaaacctaaagtcgttttgttttgttttgcttcagttcttgctcgattcggggctctacgagagcaatg

SEQ ID NO: 225093 - DNA, 331 bp, Glycine max
  unsure (1)..(331): unsure at all n locations
ngcatcagtataacccttcagtttaattcatagtctctataaatgaggaattggtctttagttcttcttaagtacttaagtatggtcttaaccattttccaatgttcttcaccagggtttgcttgatattgactagttacacctaatgcataagcgacatcaagatgtgtacaagtcctggtgtacatgatagctcccactacactagcatatggtactctacttatgcgttttctttcttcaggagttgttggacaatatctcttactaagagtaattccaacacctacaagcaaatagcctcgtttgaaatatccatgttatatctctt

SEQ ID NO: 225094 - DNA, 386 bp, Glycine max
  unsure (1)..(386): unsure at all n locations
aatncactcnccacaagtaagtgcaatttcccttggttatttggctctccattgatgtgttntggcgctttagatgctcatcttttgcaaaattcgtgaagcaattcgcatctgaatccatgcttgttttgttgagttgagggtttgtgtgagaaggcattatgcctatgttgtattctgaagcaatggggcatgccacaattgccccattctcttgcaattgtgtacaaacgtgcgccccccaagtgctcagtgaaatgccccactgatatatgaatatgattttgcgaaattgggatggtgggactgttttatatatgtacagacagcatatgagaattcaaatatgtgcccgaatgcaattctagcttacgaacccaactttt

SEQ ID NO: 225095 - DNA, 415 bp, Glycine max
  unsure (1)..(415): unsure at all n locations
gtagacgagaactatggtgcgacagtgaatcttctttcnctttcactttntnngctggagaaaacagataaatgaagctatcgctgccgtccattcttaaataaaactcagagatctagataatcttcggtcaccggttgcaacaagaagacggttttcttaagcaagcgtgtggcgtaagcttttatcgacggtcccatcgtgtctgtccgcagaaatgacattgatacttacgctcattttccttaagcccgattgagcagaggctagacctccttgttcgcgattgaaagagagccttctctgtttaccccgtgtataacctcgacaagggtgggttatccttaaaggattggtaattgcatttcacgtcgggtaactgccggtatgcctactctcgagctcaggtatttac

SEQ ID NO: 225096 - DNA, 372 bp, Glycine max
  unsure (1)..(372): unsure at all n locations
caactcgcccaggcaagcgaggaagcttgctttcttggatgttacancnnggaaggcccaagngggcctacttgctatttgcacccctctgtttactaaatacaccccctgcctttttttgctgattcgttttccgtaacgttacagaactttacgaattctgtaacgatacttgctttccttcccgaatgttacggaaccttacggattacgtaatcatcccttttatggctttcggaatgttacggaacctcacggattgtgtaacaatgcttccttttgatttccggcatgttacggaacttcacggatcgtgcaacaatgctctcttttgaactttggcatgttatagaacttcacgtatcgtgcaac

SEQ ID NO: 225097 - DNA, 426 bp, Glycine max
agcttattcatcactgcctcagcaagaggttataaaccccttggtggctcccctatcgcctttccttctaaacacctctagttagacacttggttatacataattgcttggctgacatctgctcccctccttatctcctcattttgttgacagaaaatgtcttgtgcctgtaatgcctcatctgcaaccctctttgcttcctcattctaatggcataggaagtcccgggctcttaatgcctcatttgctattctcctaaaatccttgccttttctcctcatctccgccatcaaagtttccaacatcaatggtacaacgggaatccccaatgtggaatggttgttcattattccactcattctggcaaagaaacaatgcaaaacaagggcaatgggaaaagtttacccgagcccctaatggggccaa

SEQ ID NO: 225098 - DNA, 356 bp, Glycine max
  unsure (1)..(356): unsure at all n locations
tgaagaagtcttgtcttctacatgcgcaactctcttgattgatatntgtatngatcggggnattatgtgttgcatcttagtctctatcatttcacatgtgcatcctatatcatcatgtaggagtaagaagaaaagtttctaaagttagaaaatntcttatgaagttaacaatctctattttaattgattgcaagctgatcataaattgattacacaagtgtttgtagcttgcaaagaagtatctcgtatccgtttaattgattacaagcttatcgtaatttattacacaattatttttgaggcaatgattgattctttcaggagtctctactattatcaattacgaggcgatatga

SEQ ID NO: 225099 - DNA, 319 bp, Glycine max
  unsure (1)..(319): unsure at all n locations
aactacgctgtaccgagncnngggaaaagacgtagagttgtgaatttgaanggcctggcactatatagagaactatactgttaagaaatctaaaactaataacatcggttgtgccctaaagactttaaatatcatgattacgtaataaaagctatgtgggaattgtataatttatgtggatcattgccccgaatataaaaagggggttaataatattatggtccgactataaaatatcttttaaatctaatcttctgcttatactagtctggaataaaaactaacataccttacaagtaacgtaataaataccacgaaa

SEQ ID NO: 225100 - DNA, 330 bp, Glycine max
  unsure (1)..(330): unsure at all n locations
aagcacctgcacgctgcagcttccgancggagggagggagggtgttactccttttttgancgaccatacaaagccggttcgtctgtctaatccgcactactccatgtactcgaggtgaagacagccgatgtggagggcgatttccttgtaaagctccttagactacacttggcccatttcgtccccgtgggacacccttgaactgctcttgccatcttttgctatcagagacgacatcttgatgatgaatctatctcctctctcatctaaaacagaaaccaatgcctagttttctactctggggcgcctctctctctatctttatatact

SEQ ID NO: 225101 - DNA, 406 bp, Glycine max
  unsure (1)..(406): unsure at all n locations
ntctacgcgaatcactaagttcacacggttttcgactttatcggaaaagaacggaagccttacggaagtgttctggatttgattttcattttcttttctcttccctttcgccaatgttaagtgagatacgcgtacccaaggtttttggaaatttaacggaagctctacggaagccacggaagccccgtaaaccatttttcaaaaacgtggaagagcttgccgacaagttgctttctccttaagcaacccaacttctaaaatgtttcggaagggcctatattccaattgctatttacacccctatcttgataagttcacccccccttttttgtgtctttggctgttctctttacgacaccttacgatactttacggattcccgaactacgtccattttctcttcgaa

SEQ ID NO: 225102 - DNA, 412 bp, Glycine max
agctggaggatgaggggacttatatttgtggactaagggcggtcaggcgatggtcacacaagtttttccacatccacaatgcgcgcataaacccaccatccctttgagcccacctacaactgagctcacgtactctcacgtaacccatatcctcgtttctctcaacaccgggtccccataaatcctcccaagctttcccaacatcaaattaatacaacattcaaacagcacaaactatcacagcctataaaacaaaacaaaggcagaaaactctgctcaaacaccaaccaaaatcacagcttttctcactttaagaccccaagtacaatttcttagttcaaattcgtaaccggtggataacttcaaattatactgaagtctatatacaaaagctacttttgagcgtgggatt

SEQ ID NO: 225103 - DNA, 276 bp, Glycine max
tcatcgaggcgccactctgactgcctggtctctccacactttgggcgtactttttgaaagatctgtgccccttttttaaacatgtgctatatgtgcatcctatccggaaccatatcataattgtactgatactgcctaatgaatgcaaccattaggtcctttcaaaatggactcgagaagttccaggttagtgtacaggttacacctacccagtagaattcttggaggaatgatcaccaacctcattttttgcatgccccctcttcgatatcattt

SEQ ID NO: 225104 - DNA, 372 bp, Glycine max
ggatccttaagtcacctgcggcatgcaagctttgccacctctgtcagaaaaccaattgatctttaatgcgccaatgccttaatgtttctctctttaaaaaaatcgaaagatcgtttaatggtccatgccttaaatgacctttcattcaatcaaaatatattttgcaaaaaaggataaaaacaatttacccaacgtttatttctcaaagaactacgtacgtcaaatttccttatcacaattgagggatacgtatgagcaagggaaacacccttgtcgaccacaaaaagataaaatatacaaaatgcctgaaaagacataaaaaaggcctcaaagaaagaagattaaacatatcgatgcatatttgcacacctt

SEQ ID NO: 225105 - DNA, 331 bp, Glycine max
  unsure (1)..(331): unsure at all n locations
gacaccttcaaactaagcttcatcagnggcgcatgcttttacattggcattttgaaagaagganncggctcggtggatcaaccacctcgacatagaaccacctatttatctaataagttatgacaaagtggaacgattggcttgactttacaagctcgagttgggaagcagtgaattgggggtgataggtatggggggggagagggaaatatggtcaactgagaaagaaggtgataccacacgtgggaatatgggtatggtgggttgggtaatgaccgntggcctggttctaatggggtgggtgaacggaatacaattctcgtatttgatc

SEQ ID NO: 225106 - DNA, 438 bp, Glycine max
  unsure (1)..(438): unsure at all n locations
agctntntggagtagaaacatggttacctctcattttatttcaaaaaggaagtcgtatctagtcaaggtctaagagaccatacaagtttcctaacgattntatgtgggccattaagtctaccatatgctgacaatagccgagaagcccatgaatctcttcgggggcggagtaagtgtctgccattgccttggccttggctaacaatcggggaagttcttgactcccgttcaaggtaagagcaaaccgatccatccacatggttgcctcttggtgtaaagagacgatcacccttcctctagcctctttttccgcgtatacttgggcatattcgtccgcaatcatatgctcgtgggccgcggctagacctaactctttttgtacctggcgatgatagctagcatgttggtctccgtctcgcataaacggtgagacaagct

SEQ ID NO: 225107 - DNA, 285 bp, Glycine max
ttacaagatagttcttgtatatatgcaatttttgaaatgaagtattatcaccttcatacacatgaagcccactggcacattgagttctccagccctttggaaaattaccttcccaactatatttgtcatctgcaagaataaaacagaaataaacagcccttgtaacaaaaaatttcttaaatccagtattattcaaatcttgtgtttgttgccaaacatatttatagcctttattatggatatcctgtttaatcatccatagacttgtcaataatataattgtga

SEQ ID NO: 225108 - DNA, 423 bp, Glycine max
  unsure (1)..(423): unsure at all n locations
agctatgcagatttggttttcgtcagttttatgatcaacgcgggtccganaagaggcaaatttaatcatcctgcttggacgaatgagaagactggggcaaatgaatagggtgaggatgagggaaaaacccatgctgtgactaccattcctgtacggccaagtttcccaccaacccaacaatgtcattactcaacccttctcctaacctactgcccatttatccacaaaggccatccctaaaatcaaccacaaagcctacctaccgcacttccaatgataaacaccacctttagcataaaccaaaacaccaaccaaaaaatgaattntgcagcgagaaagcctgtaaaaatcaccccaattccagtatcctatggtgacttgctccatatctactttgtaatcaatggtaccctacccctgttt

SEQ ID NO: 225109 - DNA, 371 bp, Glycine max
  unsure (1)..(371): unsure at all n locations
ntaaataggctctaaacccgcttcgttgcacttagcgctacccttgcgcttagcacgagtaagtggatttgaacttagcgccgatcatgcgctaagcctggctgaagacaaccgctgcacttagcgcactgatctcgcgcttagcgcgcggccttgatattggtgctatgccagattctctgtcgcactaagcgcactgaagctacaattagcatggactacgcacttagcctataaatggtgagctgagcgcaactaccacttatagcacttcaagatttaacctcatttaacctgaaattgaacagaattcatcattaattccaatggatagtattctagagataactttaactgtaaacaagatttat

SEQ ID NO: 225110 - DNA, 357 bp, Glycine max
  unsure (1)..(357): unsure at all n locations
agctgggaacagacaagctgaatnttatgtcctctnaaggacttagtcaaaatatctgctggctgatcattaaaaccaatgaactcagagacaatctccttggacagaagcttctttcgaatgaaatgacaatcaatctctatgcgcttaatccttacatgaaaaactgggtttgaggcaatattaaaagcagcctgattatcacaatacaacttcattggctgctcttcacaaaacctcaattcctgcagaaactgtttaatccacatgagctcacaagtaaccatagccctagatcgatattcagcttttgtactggaccgagcgacaactgtctgttcttgctttccaagaaat

SEQ ID NO: 225111 - DNA, 403 bp, Glycine max
agctttaaaatttgaattaaaacattcaataactgttggtaatcgattaccatatatgtgtaatcgattacacagtgcaaattttgaattcaaattttaatagctgttgtaaatcatttttggccactggtaatcgattacatcctctggtaatcgattaccagagagtaaatctcttgaaaaagactttttaacttaaatttcttggccaaaccttttgctacttcaattatgaattcccttcctatttaatatacccttcctaagactctagagtttgtcttgatcatccatcttgaatatctttaatttctttgtcttgaataaagctttgagaagcatgtgatcctttggcatcatcaaaacattcagcttgatcctttgtctacataaaaatcagata

SEQ ID NO: 225112 - DNA, 435 bp, Glycine max
  unsure (1)..(435): unsure at all n locations
acgttgganaaggttttgganaaaggaaggagatttgtatgcatttttccaaggctacacgaatcacaaaggctgcaacactcaagtacttctgctctcgggaaaggaagcgtttctcacatgccaaacttcttttcaccgatcgcaacggtcagattgtgttaatctgtcttgtgaacctccagaccaaatttcaagaagatccaacggttaagcaatgcacaaggacgcttttacccagatgggttcaggcagcttccttgagaagctttctcgtgaggcttcctcgagaaacttccttgagaggcttctttgagaagctagagttttaactacccacacccctctaataactaaactaacctncttgaaataaaacatggatacaataacaccacaaatataatccaacatcanatataattattaataata

SEQ ID NO: 225113 - DNA, 337 bp, Glycine max
  unsure (1)..(337): unsure at all n locations
gcttgaaatgaaaccatcaacccttttattattgtnnagcaccaaacatgaatggtttacagaatacaacaaaaatgatactttatctctctccctactctctttaatcccaatgacccttagatatgtaatacctaaaaccatacctgcaggaatgaagttgcaagaacaatgtctattgaatcgttgaatctcataggatacaccacagttaccttatcagcctgtcaaaaaagatgtttcatcaactagattttacaagtttcaaattaaaagagttctttattttaataatttatccctttctttattcccaactcaactaacagtaactatt

SEQ ID NO: 225114 - DNA, 450 bp, Glycine max
  unsure (1)..(450): unsure at all n locations
tcttagtctcagatgatgcagctgagtttgtagctaccttatgcactcctctaatgactatggcatcatttctagcgctaaactgctgagagttggaagccatcttctcaattaaatntatggcttcagtaggagtcatgtctccaagggctccaccactggcagcatctatcatacttctctccatattactgagtccttcataaaaatattggagaagaagctgctccaaaatcttatggtgagggcaactgggacatagttttttaaatcgctcccagtactcatacaggctctctccactgagttgtctaatacctgagatatctttccttatggctgtggtcctggaagcaaggaaaactttttctaagaatactctcttaaagtcatcccagctcgtgatggaccttggagcnaggtaatacagccagtcctttgcactccctc

SEQ ID NO: 225115 - DNA, 435 bp, Glycine max
  unsure (1)..(435): unsure at all n locations
agctngaagaaaggatgtgaaactaaggtttcttgaanatttgatgtgaaactacaacttatatgaagcctatttccatgaaaaaagttgaatagattgaaacatcacagctgcatcttggttcttgtttgaaattgagatttcttttgattatctatcttctctatatatatataatagtgaaattcacttaaacaaatattgaccattgatcaaaacttcaattttataatagcattgattatatgctctttttttgtaacatatgtatttaatgaagaattaaactactaacaataattttatttaatatcaattttgataataaaaaataatttagagtaatagcatattatttattatgcaattttcataattaaatgttaattttgataatctctaatattaagtacgaacaataaatattatattatt

SEQ ID NO: 225116 - DNA, 370 bp, Glycine max
  unsure (1)..(370): unsure at all n locations
tgggctggagatatatgaatggtatccttctcaagatgggctntgataacaaatgggtgacttggatggagatgtgcgttgaatatgtggatttccaagtgttggttaatggagagagtacatgaccaatcttaccagagagagggctcatacaaggggatccattgtcccattatctntttatattatgtatggagggtctcacctctgtactaaacaaacacgagagaaagagatcttcatggtatcaaagtgtgtaggggagctcctattttcacacacttantttctggctgacgatttcatctttattttgaagggccctcaaaaaggaagctganattnttcatgatatccttggtgcttttga

SEQ ID NO: 225117 - DNA, 338 bp, Glycine max
agcttgaaagcaaattgaagtatgggtgcttcatataaatatactatatttttggcatagtagaaaaattaagaaaagaaaagacaatatgcctcaactaaaacaaacaacccagtccgttggcctcttcagccccaaaagcctttaaacactgtagtgctaaagctttgcaaatagaagacttcaaggaatatttttcaccaaaatacaaaggttggtgtaatatctgacgatgggtgtaatggaacagaaaggtatgtaatgggacaaaatggaattaaattagcataccattctgatatgaacgaactttacaagtaagaaacagtggagataac

SEQ ID NO: 225118 - DNA, 187 bp, Glycine max
tcgagaaaaagatggcctcagcaaattccttatttccataagggaattctatcaatagacctccaatctttaatggagagggttaccactactggaaaacccgaatgcaaatttttatcgtggcaatagatctaaatatctgggaagccatagaaataaggccttatatacccaccacagtagaaag

SEQ ID NO: 225119 - DNA, 453 bp, Glycine max
  unsure (1)..(453): unsure at all n locations
ttaagcacctgagctgcaactatgcgcatacttcttacgaacgtttcttttcaagacattcttataactaagaaaaatgcacccatatacaatcaaggcaccttcgttacctagattatttacatgtacttccaaggtgtatttgttacctacatcacacacatttcctttgctaaattcacatacatgcatactctaaacactttggctatcaaaaattgcatacgtgcacatcttggtatttctaatacctatacatacacaaacttcatgatgaatcttgactatctacacaataaagtgctacatttcatgctctntttttttcaagtgtttttactacctagagccacatgcaaattcaagtatattttcttttgctcactaaaattgtattcaaattaaaagagtgttttgtaatgtatctctttacataacatgcaacatatttat

SEQ ID NO: 225120 - DNA, 157 bp, Glycine max
  unsure (1)..(157): unsure at all n locations
tcttttggaccttgaacaagcaatcaattcctctgtcagtactctgctatgngctcgcgactgggccctttcttcccttcgcaacttgagttcattattgctaccccatagagctccgcgaaatttgttccggccatactcttccttgcgagccctc

SEQ ID NO: 225121 - DNA, 376 bp, Glycine max
ccatcatgctggccctatatatataaaacaatctcacaatcccaagcttacaaaaccatgctcatatgtcattgaggcatctcaccgaatacttggggggcgcatggttaggcatgaataacaagagagtgggggcaatggggcatgccccattgcttcaagatgcaccctatgcctaaagccatcccctacaacccctcaattcaaaccaatcaagcatgaaaacaaaccaaattgtcccacaaatagagacattccctcaatttagagcaccacaagaaaaccacaatacaccaatggtgatgcaatcctccctaggaaagggcccattccaagaccatgagcacgaggctcagaagatgggctacactgctga

SEQ ID NO: 225122 - DNA, 331 bp, Glycine max
  unsure (1)..(331): unsure at all n locations
tagctacgaacccctataatagctgagttcacccccatttcangnatacatgaacataaacaataagggcctactacaaacactactcaaaatgccctgaaataaaaggctaaaaccctatactactacaatggccanaatacacggcccaaaagaagaaaaaacctattctgagatttataaagaagagtggatccaaccttgacccatgggctcaaaaatctaccctaaggttcacgagaaccctacggccttctttagtagctctagcccaatcctcttggagtcttctatccaatacccttgggggtaagagtgcatcatttcatgt

SEQ ID NO: 225123 - DNA, 411 bp, Glycine max
  unsure (1)..(411): unsure at all n locations
agctngcccagagaatgagtccattgatgtaatgcttaccacctcaaaagactggaaagcagtttctaatgactcctctgctgcctccacataaggcatagaggatgggcaactcaccaagatatcttccttgcctgatacgatgaccaaatgtccttgcactacgaatttcaacttttggtggagtgtagagggaacaactcccactgagtggatccacgggcgccccaacagacagctttagggggggttaatgtccattatttggaaggtgacttgacaggtgtgagggcctatctgtactgggagatcgatctcttccctaacctcttcgcgggtgccgtccaaagcaccaactaccattgaacttggctctaagtggaggctttgaatggaaatttgtccaagtgc

SEQ ID NO: 225124 - DNA, 355 bp, Glycine max
  unsure (1)..(355): unsure at all n locations
tctcaaggaagnnttctcaagagagcttctttggaagtctcctantctataaatagaagcatgtgtaacacttgttgtaactctgatgaatgaaagtcttatgagatacacttcaaagttccacttctttccttcttttattccttcaatttcctgctccccccttctctctttcttttcctccattaaagcatcttcttcaagcttcttatccaaggcaattcttggtggtgaagctccttcttccttggcttattccctagtggatggtgccttccctatcctcttctcctttgccttccactgcatctccatggtgaaaaatcaccattgaaggacctcattgaagctcaaa

SEQ ID NO: 225125 - DNA, 385 bp, Glycine max
agctgggagcggccatgagtaattaacatttgtactttataaatataaaacatttaaagctttgggggttatggtggtgtatgtgctgcatgattgaaaatctgtgaagttcatatggatcgttatggtactgatttcaagcttaaattcagggagttatatatgtttcttgtgtattttgatgattaaaaacttactaaatcattaccctaagggtatgtgaccaaactatgcatttttaagtgcttataacatgcatctgtgcctcttctctgaataattatccagaacgaattacttgctatatgtatctgtaacatgttatagttggataatgatgcttgaaatgggcaaatgaatagcgttgaagaatctgctgtcatga

SEQ ID NO: 225126 - DNA, 325 bp, Glycine max
  unsure (1)..(325): unsure at all n locations
caagcttaggtgttgacccgctgcgatgncatattcttcaaaaccccaccgacgttaccccactacattccgggactgaccaccaacgaagcagttgacaacctaatccacaactgccaagagatccacaggaaactgtatcaacgattgatgaaagcacaagcagttattaagcatatcgccgatgtctagcgcgaggacatcttattcaccgtgggccaatgggtttacgtcaaacttcgtccataccgtcaacgttccgttacaggagctgctcattccaagcttttacaaagatacttcggtccctttcnaatcataacac

SEQ ID NO: 225127 - DNA, 437 bp, Glycine max
  unsure (1)..(437): unsure at all n locations
tgtacaatngnngggacacctntgtatagtgatattgtttataaattacngaaagaagatttactgccgatccagaaaacaaatggaaagctctacagttactttttgtttggtaaatgaagacaagttcagttccacatggggagatgcagctaatgaagtttcattgaattatcttctataataactcaattatgtgcttctatatgaggtgactcattttacccggatgattctcattgcattgagattgagttttctttctctttatctgctaagttataaatatgatgactgtcaaaaatattttcctagggaagctttgatgataaacaacaaacatactattcttgtggactttatcctaccactacatgattattcaactggtggctgtttactacttcacagtgttctaatggctattcctttacttt

SEQ ID NO: 225128 - DNA, 353 bp, Glycine max
aagagcttcttatataaagcatcctatagtatattttgagttctgagccccacaatgatacggagtaacccatacagaataattaaaaggaattgataactaaaatagaattctttcattagggatgttgttcttctttttaatattttaaataatacttatttttcaattataaagattaattttaattttattaatattttaaaaaataaataaaattttctatattttaaaataaattcaataaatttagatttttaaattaaaagatgatttttaaataattatttttaaatcacaataaattacttgcgaaatttattctgcaaaaaattcacaggtatttcatgcga

SEQ ID NO: 225129 - DNA, 346 bp, Glycine max
  unsure (1)..(346): unsure at all n locations
tacgctntgatgatatggncttcaccgacgaaaggatcaaagtgagtctaaaaagaaacgaatctgattatcatacttttataaatgccanacaactatggcaagtgaagaggatgagaagaaaggagaaacctatgttgtgactgccattcttatacgaacaagtntcccaccaacccaacaatgtcattactcagccaataacaaaccttctccttacccaccgcccagttatccacaaaggccatccctaaaatcaaccacaaagcctacctaccgcacttccaatgacaaacaccacctttagcatagaccaaaacaccaaccaagaaatgaattntgcagc

SEQ ID NO: 225130 - DNA, 392 bp, Glycine max
  unsure (1)..(392): unsure at all n locations
agctntacagcagattttagtaatgaccttctaacctagaattaaaataccttgatgccattaacctagggaattaaaaaaaaacttaatggctgactgtaactgaaattgtggcaaccaaaagtcacccccaacagccaacaagtcagccaccatttggtctcccaaaaggctgatgcctaggttgccaattgggcccttattacaacttgaactaaacctactaaagcccttttagttgattaacccaaaacatatttttggtcagccaactttacaaagattgggacattatttagacaaactaaacactctaaaattgagacaaagtggtgccatttaatcctcctccatttgggccatgatacaactcacaaccttggacttttctc

SEQ ID NO: 225131 - DNA, 368 bp, Glycine max
gtacgtagctcatcgactacagattgctacatacaacgacagagatctgtatggcgatttgcataagagcatacaccacatactcttgctacacgtgcctatttctgattaatggcggatctgagctactaagctgaccaaggcatcaagttttgcctcaggctttttatttacaatatatgaagatgaacttcgtgccacctcatgagactcctttaacgacaatagcatcatttcttgcactgaattgacgcgaagaggaagccatcttcataagacaaaatcgtacctcaacaggggtcatatcaccatgagctccaccatcggcaacatcaagcatactgctctctatgttgctaagtccctta

SEQ ID NO: 225132 - DNA, 319 bp, Glycine max
gcttgaagagaagaatgagtaaacttttttatgagaaaggtccatatccaattgtagaaaagatgatgagatccactcaataagtaaatgttctgcatattttaaattgtatccttgaatgctgataatgctgcaattatatcccaaaaaaccagaggcttatcatgacattgatattggtttaaagaccatatgatattggttccccaataagttaattctttctccacataactggaatttccttcaatgtaacatgaaaagggagatttcagctgaacatccacttgtagtccaccaatccaaaagtattcaatag

SEQ ID NO: 225133 - DNA, 463 bp, Glycine max
  unsure (1)..(463): unsure at all n locations
tcactctttggtcctcctcatagttgttgcatgagaaatcatgctctatnttcatctcccactccaagtaggcctccggatcattctttcctttaaagggaggaatgttgagtttaataccatcaattcagttttgtctatgaacaccatcattccctcttctccttttttcttattcattatgatctttgttctccatttgatccaacctctcatggagcgcatcatcttgttgtttcattaacctctccaaatattgcatcaaagcttgcatttggaattgcgaaagcccccctccaccattaggatttgttcctgccatctcacacaaacaaatcaaacgtaacaagacaattatagctggtggttgaatacctcacccactcaagtgtatcacacaattatgggctttctccaatgaaacactcttgccttttaccactctaantccccttgagtctta

SEQ ID NO: 225134 - DNA, 406 bp, Glycine max
  unsure (1)..(406): unsure at all n locations
agctgctagnttcaagctatgaaccactatccgcttgtattcacaaaggtactaaaatcccaaatcccaataacctctaaaaatagctcacatatctttatttcttggtgtcaaaactagagttattttggatgtaaaagctaaataccttggttgtgtagtcaaagtagttaaataaccccacattataatgcaatacttgatccctatatgttatattagtacagcaaagcagctgctacaccaaagcaaatagtttctatataacatgctcaaaactaaagtactaaaatcaaaactggacaaacagatatagtaagaattttcttctataaattttaatgtacantttgtaacatgctacatatgaatattccaaagagaacaaatgtgtggcactcttaat

SEQ ID NO: 225135 - DNA, 426 bp, Glycine max
  unsure (1)..(426): unsure at all n locations
actcagcctttggcaaggaagaagaagaagttcanagagattcttatatcaatgtgtgtaaagtgttgcaaaagaattgttgaatgaatatctctaatacanatccagtgctgttttatagactcttcatgtctggtcaagagaaccattagaagagttataacctttagaagaacctaaaaaccatttggaagagttacaacttttagaataacttgaaaactattggaagagttacatnctttgattttgttcagatactatcactggtaatcgattaccaaatcagtgtaatcaattacacanagcttttttgtgaaaggatgtgactcttcacaagttaaattgaattccaacgttcaaacacactggtaatctattaccanaccatntgtaatcgattacaacattttgaaatccattgga

SEQ ID NO: 225136 - DNA, 399 bp, Glycine max
ctgcagctgcttttactcgggaaattttatttctttccagaacccaagttgtctcctgatcatgttaatttattcaccatatcaattctttgccatgttctttgttgaaaatatggggttttatgtatacgaagaaaaaggggattaatagaactgaaaatttcaaattattaataacttggtctgaagtgaataataaccggctaaattatgaatatattttggggttaaattatataagaatttgaaatttttctcttctaatttttccttttagagcaaataagtggtacattaacatcatttaaatttttgtgcagagaataataaagtgatgaatttatgatgcttatgggtaaaataactttagtaacgaaaccaactatttttgaatcctac

SEQ ID NO: 225137 - DNA, 343 bp, Glycine max
  unsure (1)..(343): unsure at all n locations
tagatgttccaccttattaaaccttaatttcttcaaattattaacaagctcattggtggngcaaatccaaagagaattgacaatcactttaacacaagttttgacctttatttcaactaacaaaattataagatcactcaacaaatgtggcgccctctactcttcttggaacatgatgcagatgacaatctgaagtttcgccacttgtaacttaggcctaaattcaaatagcatggataacacttgttgaagatcttcctttgccttctttgctctagctctcgccataggtcctccaagtctttctaaaggttccttacccttattacttgtcatgccctca

SEQ ID NO: 225138 - DNA, 381 bp, Glycine max
  unsure (1)..(381): unsure at all n locations
ttatgtgggcgggatatcgccagtcgagagcaactttgaatggcaatcccaaaggaagaactattcaaaaatgggttttcctttgccggcagtcatttacccagccgaaaatttatctggtcagaaaatcttccgctctctatcctggnttcctgtattgatcgggaattattctgtttctccttcaatctttttctttttactttcttccgatcttcgatcgggaatcccttttttccttttcttttctatctttgcatctcttcctttccaatctttgattggcaattcggggtttagcattcgttattcgctctcccctaaggccatcaattcgtggactccaaactcaatggggaggatgcatgaatgacacgcatt

SEQ ID NO: 225139 - DNA, 358 bp, Glycine max
taagcctatagatgaagacaatcctattaagaggtggttcataaacaccaagtacttcctgcaggacaattggcagagaacctaggtattgctactgtggattggcgtgatgttaggtctatttgcctacaaatttgtgcagtataggagaaaagctgcatatgaggtgatgggccattgtgtatgcatggccaaaggtgcagccaaaacacttaaattaaaggtgactaaaaaggaacatatgtatctactttgttctaatgtttgttgagacttagtagctctcataggtcaataaggtaatgaaagttgaagtacttagaacataatgagagtattttttttacagtgtatagct

SEQ ID NO: 225140 - DNA, 401 bp, Glycine max
agcttacaaatctgttttaaatccaagccttattataaatcaaatcaaatctagataagatacgataagataagataagatctagatgaaataatatctagataagatcaaatctaaataatatctagataggataagatctaattttgtagaataaaatagtctgtcctcttcaaattcaagcccaattctggattcaagcccaatgcttcattaattcctgagcttagattaaaaacatcaaattagctgaatgggctcaaataataaaactgcctaattaatttgataattaaaattaatcagtacttaaaatggtgcacaaagggtgtcgcaacctacccttcggagggagggcgacgcgagactcatgggtgcatcttccatgaaaggaaaatgtg

SEQ ID NO: 225141 - DNA, 384 bp, Glycine max
  unsure (1)..(384): unsure at all n locations
ctaagcttgcctaattaacctgaaattgagagaaaattagtattatatacacattatgaaaatactaagtatttattacctatacttaacagaaaatacttataacactacaaaataaccataaattgggagagtttgatacaatttatacgagttttatactcaaaagttagtctttttcatcaattaacagatatctgtgaagataatgacgttcctgtaatattgagaaggccattcatgttaactgcaagctgcatagttgatatggggagaaagaagctggagttgggctttgaagatcaaaacactgattttgatttatttgntgaagacaagcctgcttcataacaaaatggttgcttacaggtaatggaagtgggt

SEQ ID NO: 225142 - DNA, 376 bp, Glycine max
gggcttggaagtcatagtctttgcacttgaataattggactacaaatttggactttgcctttgtaattattttaattaaggagattagaaggacctaatcaagaaccatcctttctttctgagtagccactatacatattagtggaagtagttagttactttattttgtacaaaaacatatttaaaaacttgttttgcaagctttaggatcaaactctttttctctttttttctcaataggttttcatttttcttcctcttttcacttatgttctttctttttcttgcacaaaattcgttgctctcttttactggtgatgatcattggaagcctaacactcaatcaatccaaggatctcactcaagcaagaaaaaa

SEQ ID NO: 225143 - DNA, 356 bp, Glycine max
gtattagtctagactgacgagggctcacggcttaatagttcacgctaccacatacaacacaggagcctgagtacttagagagatatcctcacctacatcaccttgtctagggaagagacccaacactttctacctattgttgtcaactattactcgcatttattgtgggtaccatagaattagcttatgtctattgttaaccatcaattgtcaatgtttgctccaacaatgccctactactgaataaaactctatctgataagcaggatccctgagttcgatactcggatcactccatgttaatgttaaatactggatgacccggcgcgctcttctgtgttcatctcccttgatat

SEQ ID NO: 225144 - DNA, 387 bp, Glycine max
agcttctaactattatctacacgtcgggaattatctgcaaaggctataacagcccctacaaacaaggacccacaactacgctccactcctataaatatcaggttccatcgaactctctactcatctgcttacctctcgagctcacacacacatctgctcaccactcgagcttacacacacattcgcatatacttacttatttctcctaactcatatgttcacttgagcgtcagagtccttttttttttgtcccccctcttgtcctcttgacaaaggcatctctcaaagccaacatgtgaagtccaagagccctcttcagccacgtccaccctaacatgtgctagctctagaatttgtaagaacataatcaaaaggtgaaatcttcat

SEQ ID NO: 225145 - DNA, 451 bp, Glycine max
  unsure (1)..(451): unsure at all n locations
tgttacagcttagtatttgtttgtcctaccaagtcactattgatgactctatacaaatcaaacagatttgttgattgttggcacaatgactaattcttaatcttcttacaaacatataaatctcaacacttagtcttttctctcaaggtgttatgagagctttttagaactatacagaaatatacaaaaagctttttacaaaaagaatttgaatgaaagcatgtaagtttgtgtccatgtgttcaaagcttctagtatttataggtcttcttcaacaagtgtttgtcgtctctaaatgaaaaatttcttcacttgagcttgtatttgaagattgtggtcattggagcatttaatgcttacattaaatacatgtacaccttcatgcnntgaaaccgctcttgtgagcttcatgtnatcactntatagaaactactgcttaatcagacatgtt

SEQ ID NO: 225146 - DNA, 448 bp, Glycine max
  unsure (1)..(448): unsure at all n locations
cggatcttaagcaccgcggctgcagctgagagtcagacttttttttttacagtctcaaaggactcgtctatagaccactctagtaagaaaaagtgaaagatagatcactgagcaggctacaaaggatccgaagcttagggatttaagtgaaatagaggatgataaccctttgataatcccaaggaagtgaaaagcagaacaagaaaaaccaaagaagtagaggcctgatcaaccaattatcacatcctcttttccaaagaagagaaagataagacctagatgcaagtccttaaccctaaaggaacccattaagatcccatccttcattgtctcttgttcgtctgatagtgaggcaactccaactcccactccacatccatccagtccaccaccagtgtagaccaagaagcctacatatncaagtttccattgcttgggatcacatgga

SEQ ID NO: 225147 - DNA, 359 bp, Glycine max
  unsure (1)..(359): unsure at all n locations
ntatctcttagatctttaagtgcagatgttcagganaatgatagatctcatccagcgcaagttgttgcagcccagatacgcaaactactatataaacatgaaggctgcacgagttctgtaccaagtccgggattgaagagttgttttgtgagttntgggacttgagtgttttgtgagccaccttgatgtcaccctaacatcaagtgttggacctgagtgtgtagagttgatctctatttgtcagagagcaatctctggtgtgtatttgatttaattgtaaacaccggagagtgattgatagggagtgagaggggttctcatatctaagagtggctcttatgtagaggttgcacgggtag

SEQ ID NO: 225148 - DNA, 379 bp, Glycine max
  unsure (1)..(379): unsure at all n locations
ancttgcttgagaagcttctatggtggcttgatttttgaacttcaataaggtccttcaatggtgattctcagccctggaattgaaacaaaagataaaggagaaaaggtgaaaggaggcgtcatccactagaaaataagccatggaagaagaagcttcaccaccaagagagtgccctggataaaaagcgtaaaaaggaagcttcaatggaggaagaaaatgagagagaggggggcgtgggaattgaaggagaataaggagagaagttgaactctgaagtttgtctcacaagtttctcattcatcaaagttatgacaagtgctacacatgtttctatttatagtctagcacatgggaagcttctttggaagctagaaaagc

SEQ ID NO: 225149 - DNA, 386 bp, Glycine max
  unsure (1)..(386): unsure at all n locations
ngaccttgtggaattccaccattctaccataattacgcctttatcttgtagacccattgctggtaggctctccatcgtccaaattttgttagcttctaaggttgcaatttctcttgacttcgaatctctccattgtgccatttttcactgcttcagtcagaatagcttcgaggctcaactcttcaagtctagattaacaatctaacagctcttttaaacttatttcaaggtcgatggaaatttttatcaaaatgagttcttatttggtcgtgttttattaaataagtctaaaagtctttaattaaaaataacccacccaagtataattacaccctcattcaaccataacctctcatatatgataggtcaaaaatcatcccaccaca

SEQ ID NO: 225150 - DNA, 342 bp, Glycine max
  unsure (1)..(342): unsure at all n locations
cgcggcntgcnagcttgaatatgagtgaatgagtctnngatcntctatgctcgatngaaattataatctccggtgacctttccttaggttataggagagcattatggtttaagacaaatttgtcccaaatttggaggaatgtgttcgagagattttgattgcaggaaggaaagcaacaaccatagaaaactatatatagtaccagtaatcataagctgctaaaaaaaagagatgaaaatttcaagaataagtgaagcttggtgtgtgctgttgcttgagttgaatgcctattatgcttgtggcatatcaataaaagctgggaattaaagaagaaggtgatct

SEQ ID NO: 225151 - DNA, 332 bp, Glycine max
taatgcttaaaaacagaaacattaggcatatgcaaaagatcaagaggagttagtgggttaaaaccataaacaactttcaaaggagaacaattagtggtgctatgaacagctctattgtaagaaaattcaacatggggtaaacaagcttcccaagtttttaagttcttcctcaaaactgtcctaagcaaagttcccaaagtcctattaacaacttccgtttgcccatcggtttgtgggtgacaagtggttgaaaataacaatttagtgcccaacttgctccacaaagtcctccaaacatggcttaggaacttatagtccctatcactaacaat

SEQ ID NO: 225152 - DNA, 231 bp, Glycine max
tagacctcgatcggtatgtctttgacgtctcactgcattatttcgacaattctgtgaataaatttgttcgccagatggctaacggatcctggccaaaaatggaacatccaattctgtccattcaaacgtcgaggcgctaccacaaaaacctagccgattatttccaatttttatgcacactcaaaaggaaactttcctgccgtaacacaacattatcggtcactgagcgtt

SEQ ID NO: 225153 - DNA, 360 bp, Glycine max
gataaaatgaatttcaatcgatcatttgcgttgtaatctcgtttaatcactgttaaaacaaaatctaaccgatcatttacattgtaacctcggttaaaccaaaaaaagcaaaataataataaaataatcaaaatatctttgaataaaataatcaaaaaaaatcaatctgacgtttttctttggaggtttccttgaatgaattgactaataaccaaagtgaaactaagactaaaatcaactcacaaatcaagctttgtccataaaaatcacttaaaaacccgtttaaggccaacgccttaaacggtccttcttgcttttatcggttaacatggacaagtcaaaagcataaaatcagcatgt

SEQ ID NO: 225154 - DNA, 460 bp, Glycine max
  unsure (1)..(460): unsure at all n locations
tatagttcagatcanaagacatctttgtgtaatgctgactatctgtctttatatatgagntnntatttctcagcttattaagttcattattaacaaggatgcattctttttaaagcaagaatttttgtttaagcatttccttgcgtccttattctgaatcatcaagagttgtgattaacgattttccctttcttccaagtcttgaaaaaccttaagaagagtttttcatccactagataccttttcgtccaataatggtttgacttccacacaaacagaggcatcttatacactactaggctaggtggtttctagtacaaaatcaactaagtgaacttgaagagctttctttgaaacgattatntaattgtctataatctttagaaatgcgagcagagatagataagagttgattgatcctttaattaactcatctctagattcgaatattacctcttca

SEQ ID NO: 225155 - DNA, 377 bp, Glycine max
agatagcagtagatcctgaagaccaagaaaaaatttcttttacatgccctttcggggtctttgcttacagaaggatgtcatttgggttatgtaatgcccctgccaccttccagagatgtatgctaactttttttgctaatttggtcgaaaaatgcattgaggtgttcatggatgatttatcagtatctgactcctccattgaatcttgtttatccaatatggaattggtgctaaagcggtgtgtggaaactaacttggtgttgaattgggagaaatgccatttaatggtccaaaaggggcttgtcttatgccacatgatctcgtcccaagagattgaagtggataagacaaacattgatgttattgagaagttacct

SEQ ID NO: 225156 - DNA, 475 bp, Glycine max
  unsure (1)..(475): unsure at all n locations
tgaagcgganataaaatgactntcttgtggctggttgtgttcgaatcttattagaagagaaganaatagaagaagaaagaatggaagaggcacgggagaaatagagagagaaatggaattaggcatagaagaagacaggaaggaagaggcacgagagaaatggacagctgtagggtcacacgtcaatcttagaaaatttacaaaattccaattctgttaactgcaggggacatgtgtcaccacctggagcatggacacaatagacatttccatatacatctcatttataagacttagtatagactatactttttgaccaatttatatgcaattaagttactcgtagatcgagttntgttcataatgatttatctataatggtgagtggaattaatcgatttgaaaaatacttggtattgtagtatttatcattacaaaaaattaanactaatttttatttatttatgattcattg

SEQ ID NO: 225157 - DNA, 428 bp, Glycine max
  unsure (1)..(428): unsure at all n locations
ctgagctgcagcttgagcaattaaacgaaaaactgtgactctttgtccganngngccccgaaatatatcttgacgctcaaaattgaaaattgaagctctaagaaaaatcaaaggacaataacttgttgctcggatgtccgattgagtccaataatatttctagacgctcgtaattgaaaacaaaagctctgagcaaattcaaacgacaataacttttgactcggatgtccgattgtgtcccgtagtatatcgagacgctcgaaatagaaaactgaagctctgaaaaaatcaaacgacaacaactttttgctcggatgtccgattgagtcccgtaatatatcgagaccctggtaattgaaaacagaagctttgagcaaattaaacgaccataacttctcactcaggtgttcgattgagtcccgaaaata

SEQ ID NO: 225158 - DNA, 270 bp, Glycine max
tcataagagagtcaaagatcacattgagaggagaaatattagctatgctaaacaagccaacaaagggagaaagaaggttgtcttcgaacccggagattgcgtttgggtgcacatgagaaaagaaaggtttccggaacataggatatcaaagcttcaaccaaggggagatggaccatctcaagtgcttgaaagaatcaatgacaatgcttacaaagttgagctgcctggtgagtataatgttagttccaccttcaatgtctctgatttatc

SEQ ID NO: 225159 - DNA, 397 bp, Glycine max
  unsure (1)..(397): unsure at all n locations
agctnggagaggatgcttcgacggaggatttatttatggagagaaagaaagaggggggagcacaaaattgaaggaagaaaaagggagagaagttgaactttgagttgtgtctcacaagactctcattcatcaaagttacaacaagtgttactgatggaagcttgcttgtggggcttctatggaggctggatctttgagcttctatgaggtcctttaatggtgattttccactatggagatgcagcggaagacaaaggagaataggtgagaggaggcgccatccactagggaataagccttggaagaaggagcttcaccaccaagatgaaccttggataagaagcttggagaggatgcttcaatggaggaaaagaaagagggagagaaagaaagaggg

SEQ ID NO: 225160 - DNA, 379 bp, Glycine max
  unsure (1)..(379): unsure at all n locations
aactaagcttatacaagaatatnggtagaaagagggcattcacttgtcagaaattgtagtgaaaaagggaaggagaaagtctggaataagggtagaatgagtggatattggattaggtgagagaaaacgggtccttgaagaacatgtttcatttggatttacctcgtgtttttttcccagatcagagaatgaggcttgcataatttagtgtgcatcagatacattttaccaaattatggagtgtcttaaaaatagtatattagaatgtatcgttagcatttctcttactggtttaaccaggaacagcaatacacctttagctatttctcttactgttttaaccaggaacagcaatacacctttagcgataatattattc

SEQ ID NO: 225161 - DNA, 410 bp, Glycine max
  unsure (1)..(410): unsure at all n locations
agcttctcagacacatgtttaaagaatttcttttggagnctctgctcacacgtctgcacattgaggaagaggcacacagacaagatcagaaagatgaagtgttggttgtgtctcacaacaacactaaaaggaagaacacaggtgcagttctgaagcctattggcaaaaactttaagaatcagaaccgcaatgtgagcaatacctccaaccgcaacaagaaccccccaagggtccaacatgctagacaacatccacttgccaagaataatcccggtgagtcattcctctgctacaattgtggcaaaccgggacatatggcacgtaaatgtagaaatccttcaatgacaggtgctccccaggctaacatgactcaagagccatacatagctgtgataactgagatcaatatg

SEQ ID NO: 225162 - DNA, 414 bp, Glycine max
  unsure (1)..(414): unsure at all n locations
ntanaattagaataactatcaatatagaggtcagatntgtttaaagccaaattntattcatttaaaatgtctcattgattcattagcaattaaatgattcattgattcacaaattactaaagaagctntgtcatctttttttcatactcatcctcaacatcttacacttgaagaagaatcatcccttgattgagacatttcaacaaacatcctataagcaaccaaaaaaaaataggagaaagagaacacaatgacataaggctacataaacacaagactgcattcaaacaccaaacccagcatccaccaacaccaataccttcaaatgccaaanaacaaagaatcgggagatagagaacacacttatatgatctcaaacatgctnntatacattccatatataantaatttaaa

SEQ ID NO: 225163 - DNA, 427 bp, Glycine max
  unsure (1)..(427): unsure at all n locations
agcttcagccctaagcaagctactcgccttggttagctctaacncacctgggcgagcttcccctgcactaaatggcattttcctataaatagccatgcaagtgactcccactcgttttctccttaagagacgaacatgcttttatcgattttctttcaccgtctcattgtaaggtaggttgtgacacttgcgtatatgggcctttctagttattagtatgtgtgcattttgaatcatgcgagctaaactctgcccaatgattgacatcatattttcattgtaaaccaaagtatccttttctaaggcttattttagatatgttctaaaacttctatgattctgtcgaaatatctagaaaatatctcantttgctcaatcacaagggaatctctgtatgagttagcaagttcagatttgcgagtgatat

SEQ ID NO: 225164 - DNA, 458 bp, Glycine max
  unsure (1)..(458): unsure at all n locations
tcaggctgtacaattgcttcacattgttgcacagaaggtcttatgtctgngtggnggtcggcagaagagaataaaccacagagtctggcgacaggtgtagattnttgattcatggccagttggataccacgttaaccaaggcatctagtttaccttcaagcttcttagtctcacctgatgaagatgaattcgtggctacttcatgcactcctctaatgacaataacatcatttctggcactaagttgctggaagttggaagtcatcttctcaattaaatttctggcttcagaaggggtcatgtctccaagggctccaccactggcagcatctatcatacttctctccatgttactgagtccttcataaaaatattggaggagaagctgctcagaaatctggtggtgagggcaactggcacatagnctcttaaatatctnctagtatttatataagctc

SEQ ID NO: 225165 - DNA, 360 bp, Glycine max
  unsure (1)..(360): unsure at all n locations
agaccaaagaggggtagagggaattaactttatagtacnnaatataccacaatctttaaaacttaaaatttcaatatctataagcaaagcccacattttctggaaaacacacctaagatatatttttattgtcatgaggtaaacacttttggtgttttccaaatcatcgaaccatatataaaacatactcttaatgcgtgaatattgttagttcaagaaaattttacgctcgaagaaaatgaaatacaaaattgtttagagttccaagaaaattccattatcgtgataaaaaaaaagcctataatttaacttttatgttacatatataaacatactataaaaacaactaaatacactttt

SEQ ID NO: 225166 - DNA, 418 bp, Glycine max
  unsure (1)..(418): unsure at all n locations
ctggaattcatgctcttatagaaatgtttaatgctagattttacactgatctgaccttgttagcaaatgttttagattctccctccacctcgcatctcanagcatctgtgttgatttcatccaacaaatcctctgcatccaagacagcatctttcaattcttcaagccattccttcactacaggatcagtgatctgcttctcttcagcatcattaagaacagcattaagtgccaacaacttcatcttcaactcatccaacacataaacattcagctntctgctggagaagaaatctcgaaactctcttgaagctatcttttttattaagatctcaacagaagcagagatacgtgcctctcccaccatagcttaggccatntcttctcttgtttgcaattggacaaagcactgaactct

SEQ ID NO: 225167 - DNA, 278 bp, Glycine max
  unsure (1)..(278): unsure at all n locations
atgagcaacatggaacaacctaaggctaaagctcgaagctcaaggaaaagtttgaaggggatttaaaaaatatttaggctattacatgcccaactcctttgagtggcatttgtattggttgataacttgattgtggcatcttagtacatttcatagctgttttacatcatgcatcattatagtgtgtgcgaaggaaattttctaagttagaaaaatnttttcagaggcaaaaactctttgttttaatcgattacaaagttgttgttatcgattacaac

SEQ ID NO: 225168 - DNA, 305 bp, Glycine max
  unsure (1)..(305): unsure at all n locations
attcctaggatcatgagcatctatgtgtgtcctactatgacttgagaaacaaaagtgatcaaataacaagcagagatntaaaaggtactangttgcctcctagtagcgcttctttaacatcttgagctggacgcgtgatgacttgtcggtcacggacctagtacattgcttacctttggctttggacttggtcgcctattggtcggccatgtgtcgtangcaacgctctaacctttttgtggatgagctaatgtgaactctagaggtggtggcggtgcgtctgttgcccgctgctggccatccca

SEQ ID NO: 225169 - DNA, 257 bp, Glycine max
tgcatagccagggtgcattatcacatagacgacctaccagcgaatcattgtaatcctctccctgcgccacaggctagcttgactttaacaaaataccacaagatgtacaatctgatgctcacgatcttggattcattcaaccggctaggataacataaggaagctgtgacattatggcattggactcgcacgacacatcatctggatgccataaccacataagagacacgaggcggatcccactgtggaacgcacct

SEQ ID NO: 225170 - DNA, 394 bp, Glycine max
  unsure (1)..(394): unsure at all n locations
gacactatgaaactaagcttctanatctctataacatatgcagattgtcattgaattaattaaaacacanganaaggaaaaactacaatctggcttgcaagcgatgcaacttcagtttaaagaaactaagttgttacttaaaaaggagcgtgaggctgcaaaaagagaagctgagagagcgcctttcatacaagaggttcctgttgttgaccatgcctttgtggaaaagctcactattgaaaatgagaaactcaaggtgagctgattttgggcataatatctcatctgcactggaataaaggctttattatttggcataccttgaatattctcacattttttgggaatatagagtgcgcatttcttactaataaattngagcttcctggagttt

SEQ ID NO: 225171 - DNA, 382 bp, Glycine max
  unsure (1)..(382): unsure at all n locations
agctgtaggatgatgaatcaagatgatttttgttgttntgatgatgacaaagataatgacaaaaaacccaaagaatgagttcaagattgagtcaacaagtttgagtttcatgagaagaaatcaagaagattcaagaatcaagagaagtttgatttcaagattcaggagaagaagaattcaagttccaagagaagaaatcaagaagacttcacaaggatagtattgaaaagatttttcaaaaaanaaaaaacaaacatagcacagttttgtttttcaaaagagttctctcaaaattttctaagttaccagagtttatactctctggtaatcgattaccagtttcctgtaatcgattaccagtggaaagtttgatttcaaaagc

SEQ ID NO: 225172 - DNA, 407 bp, Glycine max
  unsure (1)..(407): unsure at all n locations
taaaggagcactcanactgtgtgtatttacccncaagatttatactccacgaagtttgttcgagcctctccctcttgattcaggttcaacccagaaaatactttaacgcatactctacctacaaactaagaaatacacataactactcagttcttttcaaaatctcaattattttcaagatcattttaactcatcgagtcccacatggagcccatcacanaaatcgtcgtgcattaactcatttccccttaaagagttttacagttgtgtgattgcacaattcatagcccacaactcaatgcatacaacatcttagtacacatgtatctcacaattcaacaacgtatactcaatttatcacatacacacantgttaatcacaatgtcataatctcaaaacattgtat

SEQ ID NO: 225173 - DNA, 419 bp, Glycine max
  unsure (1)..(419): unsure at all n locations
agcttatttttaaaagttaaaattagcttctatgagaaanaattaagaagaaaaaatgaaatgtctaagtttaaagtaacttgtgctaatttgtaaaaaaattctcatataacttttctaataataagaaagtttttacaaattagtttatccataaattaattttaacttctgaaaaatcttattattttaattcttttaaaagtatttttagatatacttaccatgatggataatatatcaccaatattgtgcaataatgttttaatgtatttagcagggcgtaagagggatgttagtttcctcaccaatcttccaggtgcatccaaaaagctaaaagttttcaatgttgatctcagcaaccctgagagtttccgtgaagcaatcgaaggatgcattgtggtgctcccactactact

SEQ ID NO: 225174 - DNA, 371 bp, Glycine max
  unsure (1)..(371): unsure at all n locations
cgcttggcattatagattaggtcatgtgagtgattataggctataagaactacataaacaaggattgatcggtaatgggaattatcaaaagctaagtttttgttaacattgtgtatatggaaaacaaaagagagttagtttccataatgcaactcacacaactcanggtatcctagattatgtacactctgatgtttgggggccagccagggtaccttcattaggaggagtaaaatatttcataactntcattgatgattggctatgaaagtctggacttgttcgttgaaacatgaaaatcaagcttttaagtgtntcnacaatggaaattgcttggtgagaattaaactggtangcatgtgaagcttgtc

SEQ ID NO: 225175 - DNA, 130 bp, Glycine max
  unsure (1)..(130): unsure at all n locations
tccatcagtaatnccacacactttttcgccttccagagtcgancgngnccgatggcacgcaaagacaaactatggtcattctacactntgngtcaaccaagaggaacgaattcgacagtatcacgatgat

SEQ ID NO: 225176 - DNA, 312 bp, Glycine max
ttatcacaaatatcatctacctctcggcattgaggggccacttgagctgccatgtctctccacttttgggcatattctcttgaagattcatgccccttcttgcacatgttctgtagttgcaacctatgcataaccatatcagaatgatcctgatcttgccaacgtaggcaaccattagttttccagaatggactcagaggtccacttatgtccagtacagctcccagatattttttgaataatgtaccacaatgtacttttgggattccccaccttcaacacattttaaagtctgggctatatcccctcact

SEQ ID NO: 225177 - DNA, 403 bp, Glycine max
ttttacttatttttttatctaaaaaaaaaactaattgtcctgactcggaaccaaatctaacttttcaggtgtaactggggtgctcgcttttggttaacttcaatatggttactttgtcttgagggttaacaccatgtttagctcttgctcttgaaggttaaactttgctgctattgtttcgaatgtctcaagcatttgcaattctgtaccaatgtaattccaacatgtttcattgtctatttttctactctgattgctcatcccaagcttgaaaagaaaatacagctggaattgttgacttcacctctcatctttcaaggtgagtgtgttacttgtctcctaatcagtactaatcactctgtaggtcaaccccattgtgtcgtatctgaatgtgaaatccctc

SEQ ID NO: 225178 - DNA, 296 bp, Glycine max
  unsure (1)..(296): unsure at all n locations
agagacctagcaagcgagcttctggcagtcaacagataanaggaacaaagaccacanagcaaggaggcttgtgtaatggctggccagctgtgaactttgattgatatgtgggttataggcctcttggaatcaattaccaanggtgggtaatcgattacaaggcttataaatgaagacaagaggctaagatggtctctggtaatcgantaccaaggggtgtaatcgattaccaggctcgaaaacgaggtcaggatactaggggagcttctggtaatcgattaccacgggatgtaatc

SEQ ID NO: 225179 - DNA, 124 bp, Glycine max
  unsure (1)..(124): unsure at all n locations
gccttaccttggatctctaacccaatctacatggagtattctacccattgcccttgagcgtangattgcatcactatggccaggaagatcctaagagcaggctattactggcttaccatggaaa

SEQ ID NO: 225180 - DNA, 524 bp, Glycine max
  unsure (1)..(524): unsure at all n locations
gtgtccttaagcacctgcagctgcagctacaattgtttnatccagcctttataaaatttttctagataagataagataagataagatctagatgaaataatatctagatgagatcaaatctaaataatatctagataagaataaaattggtagaataaaatagtctgttctcttcaagtccaagcccaattctggatttaagcccaattgcttataattctcctgaaattaaattaaaaacacaaaattaatccactaggcccaaatgataaaactggcataattaattgacaattaaggctaattagtaattaaaatggtgacaaaaagggttaagaaatatgagaaaatgatgacacatcaaatcccctcacacttatgcctttgcactctggggaaaataaaanaaaacaaagcaagggacatattcagagacatttaagagatacatacagacacaacaacaggtacatatttcttaatgaatctcaaaggaatgaaaaaaatgggtaacatctaacatg

SEQ ID NO: 225181 - DNA, 483 bp, Glycine max
  unsure (1)..(483): unsure at all n locations
tgcggcatgcacgcttgaatctgaagctgaacacaggcagcttacttcccaatatattatgataaggaagaagctgcaacaagatttttggtcagcagcccaagctcacgagtctttaatgaggcagaaggctagatcgcgttggattaaggagggggtcagatatctcgatattttcacctggtgattaactcccatcggaagttgtagctttttccaacagagatttcaagaaactatgagcagcataccagttttgaatggcacctcttttcaagaaactatgttctttggggaggctactatgaaaaatgtcaagacaatcaaattgattttgagggcttttgaattgtcatcacgacttaaaataaattatgggaagagcagctatggngtgttgggccaatctatataatggagattgacgttgccagtatctgtattgaaaatcatcctctgctttctctatttggaataccatct

SEQ ID NO: 225182 - DNA, 350 bp, Glycine max
  unsure (1)..(350): unsure at all n locations
gagatctaggaaggataaagcggctgaaggacctctttcttctcccgattatgacagccaccgttntatgagcgctgagcacatcaagggatggtcatttctctgggagcgacgcgtccagctcatggatgacgagtataccaacttccaggatgagatagttcgccggcgttgggcatcactggttacccccatggccaagtttgacccagacatagtcctcgaattttatgctaatgcttggcctacagatgaaggcgtgcgagatatgcgatcctgggtgaggggtcagtggatcccgtttgatgcggatgctcttagccagttcctgtgataccctttagtgctgg

SEQ ID NO: 225183 - DNA, 383 bp, Glycine max
  unsure (1)..(383): unsure at all n locations
agcacgatactgaacgaataaaagagggaacgaagtggaactgtgtagtgcatactcataagactttcattcatcaaagntacaacaagtggtacacatgcttctatgaagagactatgtagcttccttgagaagctatgttgagaaaacttccttgagaagcttgtttgagaaaacttccttgagaagctagagcttaactacacatacccctctcataactaagctcacctccttgagaagctgccttaagaagattccttatgaagctagagcttatctatgcctacctctctatagcttagtcacctccttgagaaagaacctagagctagctcacacgctctatatagcttagctgcgccatgacaacaacatgaaag

SEQ ID NO: 225184 - DNA, 336 bp, Glycine max
tcttatattcaactcttgaaggttgaagaagtaacttgaagatagacacataaggttaaacaaaattatgaatatctttattaacttttctgctcttttgcttaatacatgagtacagtagcaaatgttgatcttttccatattcaaaattttcatatatattacacatatgagaacatgttaccacaacgaacaaattgatccctacatcattatttgataaattcgtactaaactcttagtctacaagaaaaattgtgtgtggcacatatctacgtctataaatgacccgttattggggaaatcatttttctttcatattgattatgtgaaaac

SEQ ID NO: 225185 - DNA, 338 bp, Glycine max
  unsure (1)..(338): unsure at all n locations
aactagttccgctccggagtatgacagtcaccgctttaagagcgctgtacaccagcagcgcttcgaggccatcaagggatggtcgtttctccgggagcgacgcgtccagctcaaggacgacgagtatactgatttccaggaggaaatatggcgccggcggtgggcgtcactggttactcccatggccaagtttgatccagaaatagtccttgagttttatgccaatgcttggccaacagaggagggcgtgcgtgacatgagatcctgngtaaggggtcagtggatcccgtttgatgccgacgctatctgccaacttctatgatattccgttgttgttg

SEQ ID NO: 225186 - DNA, 323 bp, Glycine max
  unsure (1)..(323): unsure at all n locations
atatctgacaactaangcagntgaatttgtgctattctcttgtccctgctgttgccaagtatatcgagggctctgattacaatatatgcagagttttgtcttagtggactcacgtatgttcattttatttcgtactattattttcaacagcatgtaactttgtcaaattgctagaccaatctactgttttaatgaacttgtaatacaattacacaacagatcttaataatcattcccagcatctacttttcgtatggggtcttcgctataatgaaaccaagacantttacttacatcatcttaagaataacattatatatgca

SEQ ID NO: 225187 - DNA, 483 bp, Glycine max
  unsure (1)..(483): unsure at all n locations
agctagttctttatcaacttataaacgactttataagatagatattccaattggagttatacaaaatttaatttaatatataaacaaacctttaaatatatattctatattacatgtggtatattctagatggaaatcaaaattatcacattgttgttnttatgttntcttatgcccctagctttttttttatgtacaataatcacattgatgtttaaatttaagatttcattcatattatctcaaaatccatcacttggctgactccagtaattgcctaggcctgtctggcatagttaattattgtagttctgtcctaataaataaatcaatgtagtaatattcgttctactatatatagtngttattcttctaacattatattntataattctagncgtatggtaaagacaaagaatgtcacctctctataaagagtcagaatanngtagtatgaaatgaagttaatnttaatacaagttt

SEQ ID NO: 225188 - DNA, 439 bp, Glycine max
  unsure (1)..(439): unsure at all n locations
gctcattagatgcactcttcttctctntaagtatactgtaatagctctttgtgcaacagttttaaagttatctctcaaaatagttaaaaaattaattaaaagttaaaaatgaactaataaccaatgataactaataattaaaagttaagaattagcttattaaattataagtatttaataaaaaaatattatgatttacctaatgaagtaacaagaaaaataaataaatatattaaggatgaatatgtaagacaatataataaattaaaagttagtatgttaaaaaatattaattcaagtggtgtttcataaaatgctaataactaataaataattattaataaaaatatgtaccaaatagtcaactaaatgtttcaacgagttaagaanagttaataattaacttacccaacataacctatatggaaatacacatatg

SEQ ID NO: 225189 - DNA, 400 bp, Glycine max
  unsure (1)..(400): unsure at all n locations
acaataaggctaacacaagaatagactccacgtaaataaaaaaaacaatatatttataataaattaaaaccacttgcttgttcacatcaaaaatatanaataatcaatatctcatctcttaattaagataaaatatctatacttataatcgatattatctgataatgcaaagattaatctaattattagataatattatttagaaatattccaacatatttaatatgaattcacatatttaattaacatctgagtaggttataaacaacaatgacaagcaagtaataatttaagttatgaatattaaattgtcacgttctggagtatttgttttctcattgcagcatataccattcaaaaagcaatggatttgcagtggtcgacatgtaaatgatgtgat

SEQ ID NO: 225190 - DNA, 423 bp, Glycine max
actgatggagcatactccttgtgcacgtgatcaaaatgcccctctgcacccaggctataagagagatgaccatgttgcatgccagcaactggggaagaactaccctctcttgagtacatctcagatgaataattggaatcttctgcatttccaccaaattggtgtggtacattatccgaacttgaatgccagcttgaatccgcatgctcattatccttcttatgatctctcaaagataactgctcaaactggccaccttcatccatatctttacctgcggaatcatttgcctgttcatccgcaatgtcactgccagcagcattcacattttcctttggaggactctcaagaactggttccacaccactattcttcatttcacgactatcagatatgtttgtctcttttgttcttcctcttctt

SEQ ID NO: 225191 - DNA, 337 bp, Glycine max
  unsure (1)..(337): unsure at all n locations
agctggtcatatgatctatatgctccatcttgagggggagtgttgaatatcttttggggtttctaaattagatntgtatgcatcattactaaatattttttccttgttttagaagtcagcagacatatactagactatgctgtcacatagactaggctaggctgtcttttccccctttctctctcttatgctntgtactctataaatngtaagctgaaacatgaatatcaagagtcatgtgagtgaaatttcctcacacttaaattcaagtataagttaaaagtcataataccacaacaacaacaacaacaacaaagccttatcccaataagacata

SEQ ID NO: 225192 - DNA, 469 bp, Glycine max
  unsure (1)..(469): unsure at all n locations
ctgatgatcgatacaacagtcaacagctgataatgtgaaagctttatagcactgcaacgattcaacatgcattgaaaagacacaagtttattttccaccgacgctggtagtcttcgaacacattgacattttgttgcacgtaacataccatgacgagattgcaaagcatggccatatatataataacttgcatgggttggaagggtatcacactctaattaagggcacttgcgtctgccaccgtgggtggtgagactggcataacagggacacacttcttggttaccggaagttcccggtggcacgcagttgcagcgtctgcagcaagttccacatgctctgtgacacatgcgtngacgagatgctaaacggcacctcgcagcacatgcagcattacaatctgaaatcaattcatcattcaagttagtaattagttcagaatctaattcaattaaatcatatcaatata

SEQ ID NO: 225193 - DNA, 314 bp, Glycine max
  unsure (1)..(314): unsure at all n locations
gccgaggcgcttccgtaacgtttccgtgagtatttacgcgaggattctcgaccgttcttcaagaatcatcgntcgttcctcgttttcttcagtcttcaacgggtaagtacctcaaaccaagctttctaattcattctatgtacccgtggtgggccacatnttgtttcatgtatttntattctcggtntcatttactntttatacccncttttgacgtgcttaagccatnntattaagtcatttctcgcttaatctaaaaataaaatataattccaccgatnncgttgaatggatcatcccgtaatttgggtaaa

SEQ ID NO: 225194 - DNA, 390 bp, Glycine max
  unsure (1)..(390): unsure at all n locations
taaaatgaaaataaattggtgaaaggctcaaatgatggccgagctctgaacctcaaaatggaaatcattattattattcctaccctactatttcttttttccattttgaacaccaaattcggttcacttaaaaaaaagcctgtgatgtaatttagaaatatttatgaaccaaaacataattgagagaacaagtaaattttgtagaggaaaaatggagcaggagaagggactaaaaataaaacttacatctttccgtgcacagaatacacgatatgggcggaaaatttctttggtttgctcatcanggtcatgacaaacaagtgcactcggcttcgcatgcgcaatactatttgcccctgccccttgcatcaacgaagtcactaaaatatc

SEQ ID NO: 225195 - DNA, 374 bp, Glycine max
  unsure (1)..(374): unsure at all n locations
agatctgcagattataaataagttntctatgtgtgaaaaacacgattntcactcttcattctctccaaactttcgtcaaaaaccataacatcttctcctccaccacccacgaccaccaatggccacgacgagccaccttgcttgtcgccgaaccaccgcatggtgaggaatgctttaatcatagcagaatctttagaatctacctcaatganttggtagagaatagagctctcaacccttccttcatggtttctttgaggtaaccatgactcccttgtcttctcctagttagtttgagcttctcttagtatctcttgtgaattgggcatcgtaataggatggttttacacttcctcttgaaaactttaaaatga

SEQ ID NO: 225196 - DNA, 480 bp, Glycine max
  unsure (1)..(480): unsure at all n locations
atactcaagcctgctaagtggttgcgtaagagattctagcatcttagctagcttcttgttctgtgccaatagtgcatcttgggaagaaagctctaacatgcttctttttgtggttacgtgagttttatcacgcagaatagcatgatcactagcagccatgttctctatgagttccattgcttcttcaagagtcttcaatttaatttttcctccaacagaagcatgcaataactgcttgaactgcagtctcaaaccatcaatgataatgttcagttgaatcggctcggggaatccatgagttggtgtcttctgcagaaagctacagaatctcttaagcgcttcactganggattcatctagaaatcgatgaaatgaagaaatagttgccttgccttcaactgtctgtgattctgagaagtacttcttcagaaaattctctacaacctcttnccaagtctttaagttgtttcccttgaaaga

SEQ ID NO: 225197 - DNA, 429 bp, Glycine max
  unsure (1)..(429): unsure at all n locations
agcttagtgaagatgatgaatttgtagttgtatttcacatttctttgctagtgtataaaagggctggggagaggtttggtatgactgcagcaacgaaagcaaggactgaaatatctcctggtaagtggaaaaattcacttataaatgtgaatgattaattaataatatgtgtaaatgctaatgcatatgaatngcattctacagctgagtggtggaaattgtatggaggaaaaacaccatacttgcaaaccattgctattaaagttctaagtttgacttgtagctcatcaggatgtgagcgtaattggagtacctctgagcatgtaagtaactaacattcatgtttttttttaaattatgaaactctagaagctgaaattgatactaagtaactaacattcatgtttgttaaattattatagattcact

SEQ ID NO: 225198 - DNA, 478 bp, Glycine max
  unsure (1)..(478): unsure at all n locations
gctttggagcgagccttgcctctctatggactatggagtggacgtttggtgttttatntatagcataggcttacattactcttttgaaagaatccacgccggatatgccatgtcattttctctttttctttcccttcatttttcaagtaaatcttagacaaaaatatcttccatctctccgctttagtatttctatcctacatttattttatcatattctataaagtatgtataaatggcgaaaattaattttcgttaaaaaaaaatccatttcggccattaaatataatgtggtgataaattgatctgtacataataaagaaatcaaatttaatttgacaatatgtataaagaataataaattgatcttatcgataaatatgtgaaactattctggctgagatataatatccaatgacttaattaacaataattcatattttctgaaacatatgtgtattaagtataaatttaaaat

SEQ ID NO: 225199 - DNA, 245 bp, Glycine max
  unsure (1)..(245): unsure at all n locations
gctccttaaacctccattatatttttttctctaccttctcttccattgttgnttcttcatttatctccatgtatctcctcacatgtcttgntctaaatagtgttaacatgattctttagagtttccaccgattaaacttgctatagaagttagatttgattttctattgtttcaaatttcttgtccttgttcttgacccatgatggtgttgagtatagttcctttagttttgccttgtatttttt

SEQ ID NO: 225200 - DNA, 365 bp, Glycine max
ctgcagcttgaggtggattcttagctttttaaataccggcgtctttatgaatgaataccatcattagcttctatgctgccagtgactttggagcaaaatcgtgccctcataaagaaatttgaagatgcttctcgaactctttgatcatcatgatcaatacctaaagggtggactcttgaactttgtcgatggattggtaaagatagtgttaaatcaattgtgtttgagacaatgagagacacagtgtgaagctaaatcaggtgcctacttttgtcgttgattcgatttggtatgttatcctccataatcaatctttgaggcctattccgcattctgataaaaaagctagaggagagcttgtaatg

SEQ ID NO: 225201 - DNA, 317 bp, Glycine max
ttcaccaacaggcttgggacttgttaatgtttgttcacatgatcccgatgatgtcaaaaagaatctacatggccgattcaaacgacaaacatttgcttcatgaataattgaagattgctccaacaaacaaagccttcgttcaagattcactaaagaccatgccttgccttaatacatagcgcttcatgacatgcaaggctctggtaatccgataccaggaagtgtaatctgattccagatgacatggtcgagaaatagctgtcgacaaaggttttgaatttgaatttccaacatgtaatcgattaccatcatcggaa

SEQ ID NO: 225202 - DNA, 353 bp, Glycine max
  unsure (1)..(353): unsure at all n locations
agcttaataagcatctctctctatatatatttataataataataataataataataataataataataataataataataataataataataataataataataataataataataataataataataataatttagaatcttaaacccaatttatggagccatattacaacaaagcattgtttagagcacaacatttnttttaaatgtcaatagttaataaatgtcaatagaattaactgaaaaagctagtttacgagggtagctgtggcttcaactacaatcctcttcgactctttgtgaagagtgatagaagaacaccaaacacaggggcaattacaagggaggatgcat

SEQ ID NO: 225203 - DNA, 493 bp, Glycine max
  unsure (1)..(493): unsure at all n locations
tatgcgcatatttccttacgaacgttcacttgcactttacngtctattaactaaganaaangcacccatatacaatcaatgcagcttcgttacctatattatttacatgtacatccaatggtgtattgttacttacatcacacacatctccttggctaaatttacatacatgcatactcaaagcattttggggtaccaaaaattgcacatgtgcacatcttggtatttctaatacctatacatacacaaacttcatgatgaatcttgactatctacacaataaggtgctacatttcatgctcttttcaagtttttactacctaaagtcgcatgcaaattcaagtatattttcctttgctgactaaaattgtattcaaattaaaaggtatatatttttttcttggaatgtatttcctttacataacatgcaacatatttatatatatgttgttgtgagacattttgactacanaatatatatgtacatacatct

SEQ ID NO: 225204 - DNA, 293 bp, Glycine max
  unsure (1)..(293): unsure at all n locations
gccccttaaataacaaaaaaacatataggttagttgtgttgcactaccacaattccattacttcacatagagcacaaatgaaaatctctattgccgcgtttttcttgttccctgtgtcatcctcggtaaaacagattggaaaatatatcatctcctctttatgataaacaaaaaaccacacatattaatgtctcgagcaagatcgctttcggtttgtntgatctcacggcatctgttctggacctaactaaccatatatataaagtttacgagggagagagacagccatagat

SEQ ID NO: 225205 - DNA, 427 bp, Glycine max
aaaaatactagactagtacgacctattcgctcatcaagtctcatttctgattccatttgcttttgactttgggtgttgattcctttacatgttgaacaagataataaaatttctaacctgaatgtaaagcttctcaataatagaattagcgagtgcgtgattaaatgaactctttgatatgaaaagaaatttcatatatgtcaagataaggtcaaaccgcgttatatgcctgctttatcattatcatatatgtgaagacaattctgaagagcatatatgaaagagcttgcatacactgttaataaattgatcgtatacgaaaggttcgatttatgtatcacattcgtttgttgttccctctgaactttatgctatatattgagatgggagaagtatatgcatataccaactgaattactgctatcac

SEQ ID NO: 225206 - DNA, 451 bp, Glycine max
  unsure (1)..(451): unsure at all n locations
agctagctagaccttagctactaaagccttatagangaanaacattnntcctatatcattgtcgggtttaagcttcataaactcttattcaacacaaccatcattgacgtaaattggttgacggtaaaaaaaatcaactaaaactttgtaacatccgatggcgtcaataattgtattccttaagacatctagcgacatgtgatcacttattgtgatgacttgaggaccactaggacattcacacaatatcccttcagatgataaaattatgtcatcattgcaatacacaagaacagatacactctccatgttttaagcaatataatgaatatcaagtaaagatgttgagttgcatcaaatctctactaatgggttatatagatgatctattggtctctcatgacctataccatatcaatagttgagatagcaccaaaaacataaatggttt

SEQ ID NO: 225207 - DNA, 400 bp, Glycine max
gaacatgagattatcatcaaagctggcctttagatctgatcttcagagagcatctgacctgtatttgagccactgcaatgataggaaacatatgatcagatggggcccacttcatttgaagtgaaagaggaattccctatgaatctagagtctaggcactgactgcatgatatttgtaccccatcataaaggtctgacaaacattacaagtatttttgagcttctatatccgggtataagcagctagtgacctggcttgttaacattttaatgacactatacttaaaactatatgtgcaacatatattactggaaaggttagaagcaatgtaaggtccattaacattgttggtctccttgcccatttaccgatggacactgctgatgttacttcttatga

SEQ ID NO: 225208 - DNA, 346 bp, Glycine max
  unsure (1)..(346): unsure at all n locations
agcnttattatataccattatatctaaggtatttcctaaacaaaaatcaagtgaagaaacttcgctcaaaattcccattgaaaaaccattatttatacctttcaaagttagtgagaaggcttaaagataaattacggaacttagaaaaactatatccttaattgaaggcgtaggtgacaaccatagtgaattactaaacaagattggtagtttacttaaagtcattccagataccccccaagcctcataaaatacttccaaaatggtaacaagaagtaccttcaaattaatcaatgttattaatgaagatagtgaccaaaactcagataacacaactgatatagga

SEQ ID NO: 225209 - DNA, 278 bp, Glycine max
caacaagatcctgtggagattaatttatctcaccctcatttgtcacaagatagtgacatggagttgatggtaaatatttgtcacaacttgtcttaacctaatttgttgcagcactccatttttatatattacaattattcatgtttggcatttgcatgtaggtccctacaactattgttccaccaatagcaaggaataagcttaccataacaagagccaaacaaaggaaggttgctgattaagatgatgcattataaagaaaactgaagacccatttt

SEQ ID NO: 225210 - DNA, 474 bp, Glycine max
  unsure (1)..(474): unsure at all n locations
ntanggtcttaagatattcgatggcatcatcattcattgaatctttgtccgtctaagtaagagacatacaagacaaaagtatagaattaaaacaagtacaaaaaaagtatagcatattcagaaaaggagggggaagggattatgtatatccaaattccaaaccttattgcaatgtggtatgagctccttcaatatacgcatcctcttgttgatcttatctcttcgcttctgccaacatccacaacaagatgttactaattaatctaataatctccaagttactctntctctaataatctcctacattatgtccctcaccctttcacataaattatgaacttctgcattcctacttctcttgacaccggtgccttcccaagcaggcttttccttcactacatcttctggttcttcatcattctgcaccaagtttatcaagcttcatgagacctgataacaatgctatgcttacta

SEQ ID NO: 225211 - DNA, 431 bp, Glycine max
  unsure (1)..(431): unsure at all n locations
agtcacctgcggcatgcacgcttagtgaagatgatgattnntgtagttgtatttcacaaatctattgctagtgtataaaagggctggggagaggtttggtatgactgcagcaacgaaagcaaggactgaaatatctcctggtaagtggaaaaattcacttataaatttgaatgattaattaataatatgtgtaaatgctaatgcatatgaatttgcatttacagctgagtggcggaaattgtatggaggaaaaacaccatacttgcaaaccattgctattaaagttctaagtntgacttgtagctcatcaggatgtgagcgtaattggagtacctttgagcatgtaagtaactaacattcatgtnntttttaaattatgaaactctagaagctgannatgaactaagtaactaacattcatggtttttaaa

SEQ ID NO: 225212 - DNA, 416 bp, Glycine max
  unsure (1)..(416): unsure at all n locations
acctgcggcatgcaagcttgacgagagttacatgccgagcattgtttccatccgtgtccgtgatggttntcacaacttgaaggtaaatgtntattntattggtttgggtttgattgcgatgattatgcttaattatttggtgttgactctgggaacagttttaggagattaagactgtggaactcgtgaagccaactgggtggatttatctatccttgtctggagctgatcctaggtaagtacaatgcttcttttgatccagtttttgttggcttaagtttgtatccaatttttggtgtttggaggcgtggatttttgttttcaacgaaattttgtgggcatgttttggtagatcttatcatagagtgaatatgacttagttacttctctttcatttatccccaccacaatccaca

SEQ ID NO: 225213 - DNA, 442 bp, Glycine max
  unsure (1)..(442): unsure at all n locations
catcggcgacaggatcgaagtgggtctttttaagatgaanaatttataatcctggtttgatgaatgggaagcctgcggcaaatagagaggatgagaatgcagaatgaacccatgttgtgactgccattccttcatggccaaatttcccaccagcttaacaatgtcattactcaacaaatatcagcacttctcattacccaccaccctatcatccaagaacccacaatcatccacaaaggccacccctaaaccagccacaaagcctacctgccgcatgatcgaacccggcaagtgcatcggatcatgcaagtagtataaaacggtaagaatcgagtatcaaactctcggtgaactcgtgttactcggtaaagctatattcagtgaatacgtgtctcggatgataagatatgtgtggactatgaacaggtatgtatactaacta

SEQ ID NO: 225214 - DNA, 367 bp, Glycine max
  unsure (1)..(367): unsure at all n locations
aaactgtgttcccatcaattatacttccactgttgccacaagttatggcaaattatcgtatgctgtaggaaccaaatactaatttaatatttgaaactatatctttgatcagactcgtaagcattcagaattctttgttaatcaattacccattgccttccctactgtgttgtgtggcattatgtngagtcagcatcccaatatgttaaactacactgactctgtgatgaaaagagaatctcctctatccctgcattacatattgtttgaagagacacatgtcccatacatagtctcgacatcatggagagctgctgcttcaggagatgtgtcactgatgctttgttggttaactcaagacacatgc

SEQ ID NO: 225215 - DNA, 398 bp, Glycine max
ttatggagcttatcacaagagtcgtaattacacttacatgtgctctatctaataatgaatacaataagctctatatgcttaaaacaaccaaagagatatgggactcactaagcattaactatgaaagcacagaatatgtcagactctaaaaggttgcagctctgaccatactccatgatagatggaaatttatggatgacatgtttgggagattgcatggtcttctaaacaatctataaactctgtgccaaacgctcaccaatgctcaaataaacctaaaagttctagacaactgtcctaaagtgttggaaccatagacaacatttatgacacctataacgatcacatggaatgtaggaatcaaaagtgtgtacgtatgaactataatttgaaatgac

SEQ ID NO: 225216 - DNA, 434 bp, Glycine max
  unsure (1)..(434): unsure at all n locations
agctntgatctaccaccaccgccaccacctttattntagtttttctcttattntaatattagtagtactttgatttccagccgtgtatttcgctatattattatgacatttgaacaatttagtaactctttatttgcatggtgtgtttgaacaattatgaattatgttatatgactatgtgattnttctatatatttgatctagtcatgtttcttgcttcatgattagtttatatttctccatgattgttgtgtgaatgattagttgtatttgtatgtttcatacttgttacgcactttggctttntgttgatgccaaagggggagagaaatatggattaaatcaagaactcacatgagtaataaacttaaatttaagtgaatcataaattcaaaaacaaagggggagaatggaatctatgtgagtgatcgact

SEQ ID NO: 225217 - DNA, 384 bp, Glycine max
  unsure (1)..(384): unsure at all n locations
ctataaatagggggagaagtgaagtagtatagagttcatacccttatgcacttctctctctctcgaaatcgctgaggaaaattagttccgtgaagaatattcaagccgaggcgcttccgtaacatttctgtcagaaattacgcgaagattctcgaccgttcttcaacgttcatcattcgttcttcggtttcttcagtcttcaacggttaagtaccttaaaccgagcttttaattcatcctatgtacccgtggtggtccacattntgtttcatgtattgttattctcgttttcatttactgtttataccccctgttgacgtgcntaagccatttacttaagtcatttctcgcttaatcctaaaataaaataaatgtgcaccgatc

SEQ ID NO: 225218 - DNA, 275 bp, Glycine max
ataaaggtggacaactccgcaacgataacaacacatataattagttgatcaacttggatatttaccttgactaataacagacattgataaaggagcttttttgacgactttctgctaaaaaaacttctaacgttatataaacacaatctacttcgtattatatttacacaacttcttagctgtgatttatgaaacaaataacagctcctatattgtgcaccctccttcactttgtacagaggtataaggcgtagtattaagtaatgatttattaa

SEQ ID NO: 225219 - DNA, 427 bp, Glycine max
  unsure (1)..(427): unsure at all n locations
agcttgtagttaaaatnttttttatatacttctaattaatattngaatgtctattcctttattaatatatatgtgaggggcagagggtgtcacangtgcagctcggggaggaagtaatgttctacttcactttntgtctcttactctcaaaacttttggcttctcaagttatgtgggttttacttaatggttaataagaaatctttgtaatgtttgttgcttgctgcaattcctaatgttggagtgcacctaacaaaaaattgtgcaatacattagtgatcagagtgattgaattatggttgtacacgctagggcatcgttgtngtggcaacacttggtattntgtattgcaacgcccatgtatatctattacgtattaggctaaaccctatagtataagttctaaatacatgcaatatggctatgt

SEQ ID NO: 225220 - DNA, 488 bp, Glycine max
tgctaacccatggcagctcctaatatctctacattttgtgtttgggccattctcagatggccttgattatctcaaggtccacttggaccccatttctaccatctacaaatcatatgaaaactatattatctacacaaaatgtacacttctctatattggcatagagagtgtttttcctaagaactgatagaacttgccttagatgtcctaaggatcatctaagctcctactgtacactaaaatatcatcaaaataaacaactacaaatctacctatgatatcccttaagacatgatgcataagcctcataaaggtgcttggtgcattattgagcccaaaaggcatgactagccattcatacaaaccaaactgggtcttgaaagtgattttccactcatcaccctctgtcatcctgatttggtgataaccacttttaagatcatattttgaaaatatatcggcaccatgcaactcatcaagcaaatcat

SEQ ID NO: 225221 - DNA, 356 bp, Glycine max
tacaaatgtggtatacccgatagacactatatgtagttctgtttgagtggtcaggccacataaacatggctcggtggcagacaactaatgctcgcaatgacgatggagaccaatgtgacgctcgacggatatggtcacgcgttgtgtgcgtgaactccatgcgctcgggccctgcgagaggcttggtgcagtggtgaacatgaatcagctgcacatgtggacaacatggaggtcttcggcgatgaccacgggtactggtgacccgtgataatcaaacaggtcgctggggacacctgggcacaggagagaaataaatgtatgctgctgggacgtgcaagcgaatgagctgaacttac

SEQ ID NO: 225222 - DNA, 421 bp, Glycine max
agcttgcttctacaatctttcttcttttgttgatgacaactctgaaatcaagaaacacatacacacactttttcctagtcgaccactcacttaattttccattctcccccgttgtttttgagtttatgcttcacttgaaattaagtaaattactaatgtgagttcttgatttaatccctatttctctccccctttggcatcaacaaaaagccaaagtgcgtaacaagtataaaacatacatacactactaatcattcacaagacattcattgaagaatataagccaatcatgaagcaagaaacatgaatagatcaaatatatatatataaaaaaccacatactcatatagcataattcataattgttcagtcatatcatgcacataaaagaaatactaaattgttcaatgtcataataata

SEQ ID NO: 225223 - DNA, 473 bp, Glycine max
  unsure (1)..(473): unsure at all n locations
aaaactaacttctgggccattcgcaagcaatatttttagttattttaccaatggaacactactcttaaaacaatatatgtgcgtacaatcctcgctcccatataataccatacactcaatgtaatatntaagagcatagccttatgccacatatgttcacttacagatacagttcacatttgtcacatagaaacatgcctatgcaactatagaataaatgcgaacccatgatacaatcatagggtatgcgttcatctaacctatgattattgtaaacatgtacttccaagtgtgtatgttgttatttacatcacacacgcctccttggctgaatttacatacatgcatactcaaagcattttgtggtaccaaaaactgcacatgcactcatcttggtattctaatacccatacatatacaaacttcacgatgaatcttgactacctacacaataaagtgcctcatttcatgct

SEQ ID NO: 225224 - DNA, 433 bp, Glycine max
  unsure (1)..(433): unsure at all n locations
tacggacctatgatactcagcttatgatgttgaatcaagaatgattcatggagttttgatgatttcaaagatgatgacaaanagaccatgagaatgatttcaagaacaagattcaagaatcaagagatgtttgatttcaagattcaagataagatgaattcaaggctcaagataagatatcaagaagacttcacaagggaagtattgaaaagctctttcaaataacaaacatagcacaattgtgttttcaaaagagtgtttctcaaaattttcttagttaccagagtctttactctctggtaatcggttaacagtgacaaagtttgatttcaaaagcttttaactgattgtgcancgttccatttgatttcaaaaggggtaatcgatacaagatattggaatcgataccagtgatctgacggtgaattcaaat

SEQ ID NO: 225225 - DNA, 439 bp, Glycine max
  unsure (1)..(439): unsure at all n locations
agcttgaccttggttcaaccccgtaatccttagaatggaaattctgatcgccaatacttcaacaacatctcatagggatgaatgactcgggcatactttaagcttatgcacggaaaatgtaattatgataatgagatgcccgaagaaacaccatttcctagttaaccatgcattaggtaccatgttcaattattntttaaagtgaaacgggtttatgatcccaacatggttggctcgtggtgctaacacatgaaactaagaatgtagtgtggaagttcacgcttcccccttttttgtttttggtttgtagaggaaaacacaaggatgagcanacatgaaaacaaatgggatgcaatnttgcagatcataaagtttgttgacgcatatgcatgatgatgccatgactcatgcataatgtgaggggcggatatgataacgg

SEQ ID NO: 225226 - DNA, 421 bp, Glycine max
  unsure (1)..(421): unsure at all n locations
ggtagaacggctagacatgatatatgtcatggtgttggtttgtccagcggttcaaggataaaggaatgtcctacattatttccatgacacgcgtgcaacaatgatgatttagaaattgtatgcaaaactggtcatgcatgcacctttgtggacactcaagcatcaagttttgtggttttctgacactagggctcatgattcattgttcctattttaagtcaacccagtgtttccaaaacatgctctgttatcaattcatgcattcatctaagtccatgttgggtgttcgggaaaattgtacagcattcaccctttatgtgtatacatnatttttcaacaaaacccttttgtgttttgatcagtgaatctttttcaaagaaagagctagagtttatttcttttcgaaagcgtctttgctttt

SEQ ID NO: 225227 - DNA, 262 bp, Glycine max
cagtttgaaaccgtcagcaattatgacacttgcgcttaacgagccctggctgctaagctcaccaaagatgacgtccctcggtaatcccccaagaaattaaatttaaaattacctatgtgcttagcgtagaggcctctcttagcgtgtgtttcatcagcttggcgcttagcatgataaccttgtcagcctaaccatcttgttgcttcctgcacccctgaaatcaatatagacaattggtgggccttttttttttacaagaaat

SEQ ID NO: 225228 - DNA, 423 bp, Glycine max
  unsure (1)..(423): unsure at all n locations
acctggtgttagagaaattatgatatgggctacgtgggagtacgtgagctcaattggaggtgggcaacaggggatggtgggtttatgcgcgatttgtggatgtggaaaacttgttgtgcaccatcgcccgaccgccacctagtaccacatgtgatgggtaccccataatcctacaagcttgagatgaggaagtgtagaagggtgaaacttcctgcttttattcgttgaccacagagtggtacctgcagatatgtcgcggnggtcaggagaccttggggacgtcaggtggtgtgctattgcccaaaaccaagcttgaccaatcccgacccaacccgggcatagtcagtcagtgagaacctgtgatgtacctaaacaggcgagctcctggcagtcaacagatataagtaacatagaccacaaagc

SEQ ID NO: 225229 - DNA, 424 bp, Glycine max
  unsure (1)..(424): unsure at all n locations
agctntacacttaagaaaaatgatatgccatttactgctatatgctnnttattaatggtgttaggctgctgatttaaggcacaaattaaaagaattaattgctaattaggtcacactaacaattaattctattgaggttcacaatatcttttttttttgttgatttataccacatgtantttaattgaagataattatatttaactcagacaaaattattatgattaaaaaagaacattcacatactaattgatttacgtgcttaatggtattaagtttgactctattatgcatatatatatagtgtcctaactccaagctttatgaagcataaaaggtagagtcaacgttgggatgtcttttattcggacaacacaacaaggaatgataaggttagtgagagctataattgtgaacanatgat

SEQ ID NO: 225230 - DNA, 413 bp, Glycine max
agtttgttagaacttcttagttccatttcacgtgtttatactctactcgcgtcaatttgatgaaaagcaggatatcatatgatgggttatagtataaaaaagtaatgcctgcccaatagaattgaaatctggtaatgttgcagagagcattatccaatgaatcatatacatttctttatataggctaatccaattcttacttgttcttcggtgatatatatgtttattcaagttcttctggaaaactttggatctttaaataaccaaagataatctgcattgcagctctggaacaccaatgagcacgacgacttacaggtgcttgtcataatatctcgtgctccagtaaagtgatgtgcttctcttatgttcatacttactaacaagtgatagggaactcttgtccagctctt

SEQ ID NO: 225231 - DNA, 435 bp, Glycine max
  unsure (1)..(435): unsure at all n locations
agcttggaaggatgcttcaatggaggaaattatagagggagttaaagagagaggngggagcacgaaattgaaggaataaaagagggagaaaagtggaactttgaagtatgtctcacaagactctcactcatcaaagttacaacaagtgttacacatgcttctatttatagactaggtagcttccttgagaagctntcttgagaaaacttccttgagaagcttcttagagaaaacttccttgagaagctagagcttagctacatacacccctctcataactaagctcacctccttgagaagcttccttaagaagattcctaaagaagctagagcttagctacacatacctctctaatagctaagctcacctccttgagatgagaagctagaacttagctacacacctcctataatagctaagctcacccncatgac

SEQ ID NO: 225232 - DNA, 446 bp, Glycine max
  unsure (1)..(446): unsure at all n locations
aatatgcatgtgttttatgtcgcatcaacaagaatcaagccaatgctattgtgcaagcaatcaatggggcataacacaccaaatgattataatgatggatggctcaaattctcacaaaggtaaaatcatcactttcaaattgagctttcaaaactatcatgacatgtagagaagaatcaaggatttcaagtcacaaaatgtcaagaacttttattttcaaaacaattacccatttcttgaacatatcctataattcaaagaataacatgcanagtcgtacgtgcacacgatattgacccattatattaaactgaaaatccgacgaaactaacaacattattaatataacacatctaacattataacataaccaacataacatgcataaccaaagaacactcccgcgcatacttaaacaacacattgtcctcaatgttgcacaatta

SEQ ID NO: 225233 - DNA, 496 bp, Glycine max
  unsure (1)..(496): unsure at all n locations
catgcaagctngcactcaatgtagatgtgaccatattatntctcccgaaggactnttttaatgtcacaagggatatacataaccaanaattgactacaaattataaaggaggtctcttttgttgtcaggacaacttacaatgcaagcaaatagagggttttcaaggtccaaggagaatggtttccttaagatacaaaattagttgggttgattggaacatataccanataccaattaaggtttacatactcgattcgaccgacaaagtgaggtcaaatggttccaaaatacttcatgattgtctagtagaataagttttcaagacagtactttatgataaaacaatatactcttcaatcttattagagtgagtgaacaaaagtaaatcttaattccttgcaagcagagtataccattccagcaactggtggtggtggtgaatcttctcatgtccaaaagaaaacatccaatggaaaaggaagtatctaattatgca

SEQ ID NO: 225234 - DNA, 369 bp, Glycine max
  unsure (1)..(369): unsure at all n locations
gcttgttgctcgtgtgtgatgaatcatgtagaggggttcgatggttacctatattatagtatcggagcgcgattttcagtccttggttgtatgggctgttatagcctttgcagataattcccgaattgtagataatagtcaagagcttatagataatattagagataaacatttggttataaataaaaggtagaagataattgtaccttctaaataatgtgtggacttatagataattaaatacctaccaacatataagatatgtgaatanaatcaaatatgagtaggttagagataacactgtaantggagagctcgactgctaaaggtcgtgctcctataacatggctaacatggatgatggacacg

SEQ ID NO: 225235 - DNA, 312 bp, Glycine max
  unsure (1)..(312): unsure at all n locations
ggaacctgcatcaactggcaggggcaggcacacttccacaccacacccttcanaatctatcacgcanatatgggcctctgatgcaccttcaacttggtgaaatttctgcagtggttgtgtcatcctctgacatggccaaggagataatgaagactcatgatcttaattttgtgcagaggccagaactcctttgtcctanaatcatggcctatgattcaacggatattgcctttgctccatacggtgattactggagacagatgaggaaaatatgtacgctagagcttctcagtgccaagagggttcagtctt

SEQ ID NO: 225236 - DNA, 450 bp, Glycine max
  unsure (1)..(450): unsure at all n locations
taagcacatggatacggtattattgaagtagatgatttttcttgcatttttattatatttattattaatgctattattgtaatggtaagtctttgggtatggctttacgatatatatatatatatatatatatatatatatatatatatataagcactgctgatttggctccatgtcagcatgcatgcatgccaagcggatgatacgagaattctatgggttatgtnntgaatgtattgacgatgatggttccaggagggttcaaattactatggtcattcgcctgttcctcttggtgtgaataaattatatatacttctatggttctctattcgtatgtgaaaagctctataatttctttagcctttctctcaattccacacgtaaagtttatgatgccgctaatatattcatcacaatttatatatcttatgttatattgcgtaataa

SEQ ID NO: 225237 - DNA, 354 bp, Glycine max
  unsure (1)..(354): unsure at all n locations
aagacaacngatatgaattttgaaaagaaaatattataaataaacaaaactaaccatgttggatggcatgtgcttaaatctgtgataacagtagtaaaaacaatcttctttaatagacccttagaacctaaaattcgaagtggaacgtgctgcatcagtggatgcacactgattattatatctggctgatatttcattaggcctttagcaacctcgctgtaaaaagagaaaaagatatttaactgtgacatttgatgtacatcatatttgagaagagatacacatgcacaagaaagtatgtttctgaaacatggaatgcagacnaagtcanttatgttttctaatattaacaca

SEQ ID NO: 225238 - DNA, 442 bp, Glycine max
  unsure (1)..(442): unsure at all n locations
agcttnaggattaagaatttagtgaagtaatatnnttccaatcttcactcacttttccctttacttcttatctctttatttaattcaattcacacttttcccaatcttcatcttccctttgttgctnttgcattgcaaaaatgaaatgcttccatatgattggaatgaatttagggtcaattccacttttctcgaattcccttcttagcttgccaccatcgaacaccaatcgaattcctatgccctctcttctcaataatcaatcttcactcacttatccatttatttattcttaattccttgtacaaaaacacttcactcacaatcaatcactcttcacactcgctccatttttgcaactagaaattgtgcaatcactctntacaccccaaccaaggccgttcttgatggtttcacattccctcctctctgatcttctttt

SEQ ID NO: 225239 - DNA, 474 bp, Glycine max
  unsure (1)..(474): unsure at all n locations
tctcttcctcggacttatggattctactagtgttttcattatacactagatggggactggccactatgaagtgtggcttggacttagagtactatcggtactatgaaattagatttgagaatgcaagattgagataaaagtcgtgtattcatatgtagagctaataattaaatcgataaattacaaatatgtgctcttgttgtagaaataaaattttgaatgacaaacgggtactcttgacttgaacccaatgatgcactgtatatataatttaaggcaacttgattgacagcgtcttgttctgccttctcaatattgcggtaatctctggtgtgtgaacgttttaaggtanggccatgtccattaataacataacatgattatggttaatgtggtttctttctcagttgaagtagttggttctggaatctgtcagaattataaaaataaatgattaaggcttatgggaattgt

SEQ ID NO: 225240 - DNA, 446 bp, Glycine max
  unsure (1)..(446): unsure at all n locations
atcctctaagtcacctgcngcatcaagcttaaagccaggttgtggtntattttactttngatatccngngtccacacctttgctggagatgaaccaatttcttcatctcccagagtgttattccaattggcactttctttcttcaaatgaccaagctcgctcaacaaatattcagcattgatgtaatggcattccctccgagttttccagaaaaggagttccacaaacaagaggngtgtgctttctcatttctttagcatctttatgaccaaacaagtagagaaaaggatcaaaatgtatggacatcaatgctgaatttatagacaccttgaatctataagatataaagtatagaaaacgatcataatggtagtaaatcttaattggtatgctcatatttacatctgaataactatacatgcatagtccttgcagggacatcaatg

SEQ ID NO: 225241 - DNA, 420 bp, Glycine max
acagagtaatccgataatgtcaaagaattgtgtgttgaaaaagcataacaagactctatgtgattgagttaaagatacaatctttgcaaatgagaatgcttcatatacattaagaaacctattacatgggcctaaataaaatgttataacttggcaaggatacgacataaacaggtattcattgtacacaaaagcacaatatgacataagtacaatgcagaacaactgggtcaccctaagggctgaatctcaacactttgcaagtgtcaatgacaccaatccctgtgtagcttccatcccttacattgcgttcattgatgaaatttggaagcttaactatgtgaaatctacggtatgtgttttcaaatgtaaatgggttgacagcaataaccgtgtgcgcaccgatgatataagatttac

SEQ ID NO: 225242 - DNA, 354 bp, Glycine max
agctagggatggaatactatttgttgtttatgaacaaaagcgcaaaacggaatcaataaatgcgaaaaaggatgaccctagggctgcaaattcgtcaatcccgtgggtatggcttttgaaaggggggaaacgaactttttgaatgtaaaaacgccccccctttcgtcattattataattaggtgcaggggtggctcgcccaggcgagctaacctgcactatttttttttttttctttttttttttttgaggggaacattaaccatgtacccttccttctcatggataagcattgttgctaacttgaacttacttaggttacaattatgcgttgatacatattttattattactc

SEQ ID NO: 225243 - DNA, 401 bp, Glycine max
tttttcaatgtacaaacatgataacgcttggctgtgtgttctataccaaatgacgatcaacatatacttccttattgataaagccattcaaaacggcactcttcacatgcatttgataaagtttaaaatccattttggatacaaaggctaataacattctaatggcttctaattcggcaactggagtgtgaatgtatgcatacaggattgtgatgatgccaaataataatccaacaaggctgcttgataaggataaacactgcgtcaagattaatacaagattgcttcaatatacaaagccttgcttcaagattttgtatagatcaagccttgtcttgaaacaaagggtttcaaagtcatgcaaggctctggtaatctattaccaggaagtgtattcgatt

SEQ ID NO: 225244 - DNA, 420 bp, Glycine max
  unsure (1)..(420): unsure at all n locations
agcttttctgtattcttatcccacttctatttatagtattggtaactntataagtctacatcgagtattctcaactctntaggttagtattcttacatcattagacgtaatcctgaaaaagagtttgaaaatgaaagttttcaaaggttctacgaagaaaatgatatttttcacaatttctcaacaccaagaacaccacaacaaactcttagagataggcttagcatgagctttgtaaatggatgagttgaatctcttagtgttataacaaagtgcccaatggacctatcattcaaaggatacatagttattgtatgtacacttcatgtgatatgtcatgtccaatgtattggtggtacatattatttttatgtacataattattatttcattaatatggtttggtgaaagaggggtttg

SEQ ID NO: 225245 - DNA, 487 bp, Glycine max
  unsure (1)..(487): unsure at all n locations
tacggaccttagaatactaagcttaatgtcactctntntatatacatcttgaccatagtcatatatacctgccttatctgcagacatggcatagaagccaggtcaagataggaataatttattcatttgaatatgccacggtggaaattatagaaccagaacagctgtctaaacattagttaaatgaagaggacaaataacaaatgcatgtcaagggattaactaataaatgcagatacacaacactgttcttgttttatagacttcacctaatactttcaactgataatcccagttgagggtgttagatattaattagaaaaataataataacaaattctatgaggcttaaattgtggaagatgaaagttgtaaggttgtgagttacaaagtcttgaataagcaattatgtgagtatttagtattcttgaataaacanattatgtgaatggtcactctattctagtataaataggggatcatactc

SEQ ID NO: 225246 - DNA, 463 bp, Glycine max
  unsure (1)..(463): unsure at all n locations
agcttgtgtttatttgatttgtgaatgggatactntaagcaaactttcanaatcaactccttttaccatcaaattaattctatttaattctaaaaattggcactactctactatgattaggaaatttagaatcattgtgtttatcctctatattataacatggactgaaaattctctagtacatgtttatttacaaaagtaaactgtttatgtttttctcctgtttttccattgaaatcatgtacataaattcaccaattatgaatttatcaagcaaaaactgttatggaagccacgagagaactggtaaaaaagctcatactactctactactattattagtaacttaaaaatggtatcattctcccattgtggagaaatcttgtaatggtttatattaattgattctgtcgataacatatagggtgttatanattggtaactagcccatactaatagtaat

SEQ ID NO: 225247 - DNA, 418 bp, Glycine max
  unsure (1)..(418): unsure at all n locations
cgatgggactggccagctcaagaacattttagtatctgctgcttcangcggtgtaggtcactacactgttcaactagcaaaactatggaacacccatgtcacagccacttgtggggctcgcaacattgactttgttaaaggcttgcgatgaggttcttgactacaggactccagagggggctgcactcaagagtccatctggtaggaaatatgatgcagtgataaattgtacaactggaatatcttggtcaacttttgatcctaatttgactgaaaaagcggtggtagttgatttaacacctaatgcaagttcattgtggactgctgccgtgaagaaaattactttttccaagaagcagttggtgccatcttttgtaaatgtccagcgtgagggcctggaatatctacttcaattaat

SEQ ID NO: 225248 - DNA, 359 bp, Glycine max
aacaattatccagcacagctccaagatctgccaaaagagagttacttggagacggttatgagccaaaattgctgcatggtaaatttcgatgagcctatttaattacactatttttactatttctttttaaaaataagtgaggtgatttgttggaacttggaacgtgctgtgatgtccctttatttgcctgccccagctgaatttagctttcattggttataataaaatacgagacactctctctgacacttatcacattattttatgaggaatgctagtgacactctctgaattctctttcacactctcttttgattgctgaatttgtaaaatcataattttggagcgccttatattat

SEQ ID NO: 225249 - DNA, 385 bp, Glycine max
  unsure (1)..(385): unsure at all n locations
acatagaccacacactcttgcaacaggtgcagaattctgattcatggcaagctgagntactaagttgaccaaagcaatcaagtttccttcaagctctttattttcagtagatgaagatgaattcgtggccacctcatggactcctttaagaacaataacatcatttcttgcactgaattgttgggagttggaagccatcttctcaatcaaattcctagcttcagcangggccatatcaccaagagctccaccactggcagcatcaatcatactcctctccatgttgctaagtccctcatagaaatattgaagaaagagttgctctgaaatctggtggtgaaggcagctcgcacacaatttcttgaatcttttccagtactcatac

SEQ ID NO: 225250 - DNA, 175 bp, Glycine max
agaaacaattcaaatttcaatcagagggccaggacaaaagccccacaaccaaaagtaaaaacaaaaaaagaagaaagaaaaaacgaagaacataaccaacgcagaccagaaacaaaagaagagcaggaaaagaacaggaacacaaacaagaaaacaccaagaaacagagacggaa

SEQ ID NO: 225251 - DNA, 506 bp, Glycine max
  unsure (1)..(506): unsure at all n locations
agcttaaggagtntaagtttctcctttaactcgattagcttttagttgtgcacctccctcgatcacacttggttgaccaactgtctgaaattgttttcttccatccaaaagttgaaaaacttgaatggtttaggcccccattctttataattcttatctaataaaatccatgagtgatctgatatcttacgtgagcctactctttgtctttttactttccacaaatcaatcagatcccttgtaataagaatatgtctaggcaaattctacactctccatttaggctaatccaactgaaaatcttcccaattatagaaacatcacacaaatccacaactaccacanaatcgttaaattgttgtatatttgatgcatagactcgaacatttctacttacccttttctttggcctcanaatggaattaaatgatgaatttctgacaccaaaacaatataacagtatatgtaatntaaaatatgtactaaccttagctcttatcataacg

SEQ ID NO: 225252 - DNA, 460 bp, Glycine max
  unsure (1)..(460): unsure at all n locations
actaagctgtttaatcatattagatcgtgcaactgcatacttattacatctctccaataatgtgaatccttcanggtgtgtcatgtatacttcctctttcaactcaccattaaagaaaagttttttcacattcacttgtcatatctcataatcatagtatgctgctattgcaagtaaaatccgaattgacttgagcattgccacaggagaaaatgtttcgtcataatctattccttcactgtgacgatatcctttagcaacaatgcgagctttataggtctcgacctttcatctgcttcaatctttttcttgtaacccatttacacaattgttttatatcttgaagctcaactaaagccatactgtgtgatctcattgatctattcagattcatggtttttgcattattgcaattagctctatggctcttatactcttaggcatcatatatgataaccta

SEQ ID NO: 225253 - DNA, 461 bp, Glycine max
  unsure (1)..(461): unsure at all n locations
cttcagtcacctgaggcatgcaagcttatgctgcanacatttataatagacctctttagcagtanttccaacaacaacagaataattatgatatttcaagcaacagatacaatccaggttggagaaatcatccaaatttgagatgggcaagtcctccacaacaacaacagcctatccaatctttccagagtgctgctggtccaagcaagccatatgttcctcctccaatacaacaacaacaacaacagtagtcacaacaaagacaacaagcaactgaggctcctcctcaaccttccttagaagagttagtgaggcaaatgaccattcagaatatgcaatttcagcaagtgacaagagcctctattcagagtctgacaaatcagatggggcagatggctactcagttgaaccaagcttagtctcaaaattctgacaaatggtcttcacaaactgtgtaaaat

SEQ ID NO: 225254 - DNA, 448 bp, Glycine max
aatgttgagctcctctgtcagataattgttatctaggagtcgcttaagaaaccgatgcgttcgttgcttgttgccaagctttcaattcccttaactggggaagagagttgttccatggttaggatggatgtgaggcttgaaatgtagcttgagttgagtatcaaaaccacaaacaaccatattattagcactaaccaatcgagggtgcttacagttgtttctcctcaaaagaaatagcatgttagagataaaattatggacaaaacttagatgtaagtttttttaagtaatcttagtgttgttctccaattggatttggagtgtcacttcagtgatatgtataatgaaggtttgtatttgttgggaaatacctaagtcccacattggctaatagttaggcctctcacattattcattctaagatggtatcagagccagttctgatcac

SEQ ID NO: 225255 - DNA, 430 bp, Glycine max
  unsure (1)..(430): unsure at all n locations
aagcttaccgantagtttcatcggagattgatcgaagngggnnngaaaagaggcaaattngattatcttgctctgatgaatgagaaagctgggacaaacgaagagaataagaaggagggaggatcccatgccgtgactaccattcctacatggccaaatttcccgcaagctcaacaatgtcattactcagccaatatcaacccttctcattacccaccaccctagcaaccaagaacactcaatcaaccacaaaggccacccctaaatcagccacaaagcctgcctgctgtacatccaatgccaaacaccacccttaacacaaaccataacaccaactagggagggaattttctagccaaaaagcctatagaattcaccccaattccagtgccctatgcttaacttgctccatatctactcgataattaaa

SEQ ID NO: 225256 - DNA, 352 bp, Glycine max
  unsure (1)..(352): unsure at all n locations
gggcttatcgtgcggataagacgctcagtgaggtttgtctatatanaagctgcaactcctgctgagctgggctctgggccggcttatctaaaatgacgcatctagggtacaaagaagtatgtgcttagctgataatgactcgcttagcactcacattgtagcaaggaattcagcttatccgccatgactggtgcttaccttcatgaaccccattctagctggaaaagctgaacttggcatatacaactcgcgttaagccaaagtgtataatgggctgatcaattatgctgcatctgtaccgaattcagactgtaatgaaattggctgagctcaaccttggccaacttatcag

SEQ ID NO: 225257 - DNA, 345 bp, Glycine max
ttcagaaacaagcctcttgaagaattgtgacttttggaaatggatttttcgaaatcaagcacttgtaattgattaccattaaagtgtaatcgagtacacatcaacagatgtgactcttcattttgaattctgagaatcaaaacgctaaacacactattaattgattacaagtattgtgtaatcgattacaccactttcaaatgatttaaaactgctgaaagttgaaatctaacattttaaaacacgcagaatcgattactaccttctgcgtatcgataccaaagagtaaactcttcgggatgatctgtgaaactcttgtgctctcaagtcaaaaactttaatact

SEQ ID NO: 225258 - DNA, 462 bp, Glycine max
  unsure (1)..(462): unsure at all n locations
agcttagtgaacttggaatctgtncaatatatcaaactgcgagagttccagtagcaatactacagagttttggagaactgacccatagggaacctttgtctacatggatcctgaattccttgcctcaggggaacttactccaaagtcagatgtttattcatttggaatcatattgttgagatggttgactgggagaccagcattgggaataacaaaggaagtgaaatatgcattagacactggaaagttgaaatccctattggatcctttggctggagactcggccattgtgcaggcttgaacagtggctcgcttggctttgagggtgtgtgatatgaatagaaagagccgaccggatctttattcagatgtctggagggtactcgatgcaatgagggtctcttctggaggtcaaacttctttggattaagtctgangggctttacaccttctcatatttat

SEQ ID NO: 225259 - DNA, 485 bp, Glycine max
  unsure (1)..(485): unsure at all n locations
ntaatgaanagtcttaatagtctgtataatagtattttatgtttttgaaaganacganccatagataaatatgttattataccaaggatatgatacatgtttcaaggtaaagagagtcttcataaagctaaagctgttaggtgaaggcacataaatgattttaatatctctaatagttaccaagggaagaacaagctgtgaaacaaaacaggaagctgcaaacttcaagaaacgtgacgtttggtaaattggatcatagaagacattatgagtacagaggaaactacagcaacaatgcatattgtgccaaagcaaaacagacctgcaaaggtgttcctgtcataacatgcgcctttgacaacgatatctatcaagatcacgagctagaactgaatctctatccttcattctctgtgcttcatcaatgatgatatactgtcaatcaatctttgaaagccttgcccggtcatacatgatgaactcat

SEQ ID NO: 225260 - DNA, 441 bp, Glycine max
  unsure (1)..(441): unsure at all n locations
agcttgcgttcacaagcatgtattanaanctcttacgaanctgttacagnaactaagctaaggcagaaccggagggccaacataacaacacgatagaagttnttntttctntttgggtaagcaaccatagagttatttgagtacagatgtatctgaatccaatgtaattagatgtaggtgttatccattgggagaaactcttatatgattatgcacccaacacgtcacttttgagcacttgtaatcataaaatagtaagttatatttggataaacttttcttaataaatacgtatagtaagaaaaaacaagctattaaaatgagtgtgttcacattagttaattatgtacttcaactagcttttataaagattctatcatttaacttctttaaacacatggtttaacttatgtataaaatgagcttgtgttaatactaagc

SEQ ID NO: 225261 - DNA, 449 bp, Glycine max
cttaaatactatgctgacatatttgtgactgatcactagacctttcacttctcgacaccattcataaacaaagggagttatgtgtgcaccaattacactgtttaataatactgtgaactggactgctaataatacagtagaaaaatctgttatacagcatatgttgttaaattcttgaaatcggctaagtatatcaaatagcatgtaaagtttgagacaagaatacatggaattgggggatttaagagaagtacattatattttttctaattgaattgctgttcggtacaacatacatgtaacttgtgaatgacaactctggtgatgataagtttgaagcggtcataatgttttgcatgccgtataggttgtaaccatgcagcatgatgatgaactctgggaacattaattcaagcaatgcattcagaaacctgacatggtattatcat

SEQ ID NO: 225262 - DNA, 458 bp, Glycine max
  unsure (1)..(458): unsure at all n locations
ggatcctganagtcacctgcngcatgcaagctagatcaaaacaatcttctattcatcttattccattcaatncatacattttcccaatcaaatcattttcaaacactcatttcataccaaacaagccactacatacaaagttcaaccaattcattgttcaatcaagctttttgtacaagcaaacaaacaactacactactgaaatttaaatgctgaaatttaaagaactgaaacataaaagctaaaatttaaatgaaataaatcatagaataactaaaaataaactaaagtgttcagaatgcaaaaatttaaacatcctgctcctcatgtggctggtcttcattaagatctagtgctggagttactgttgaatcctgtataagctgctcacgcttcgcaactggtgaagatggttgggtctggtctagagaatctccctctctggtgctactggtact

SEQ ID NO: 225263 - DNA, 447 bp, Glycine max
taccttgtgaatgaatggcatataccttgcacccattttgttctgtaagtatgatcatttgattgaatcttgagcctgtatagtgttatctccttctaccttgtcttagattgtaggagagcatcattcataaaaggatattatgattcaaagcaaatttgccccatatttgggggagttcactgcgtgaaagcttctaatggttaggtaataatagcacacatagtaagtaataatgagataatatatatatttgtctgtaagtatcttatataaaatgtgtgtgttgttaaatgagaaaaagataagctaagtacttataggaatgtaatagaagttgggaataattatagaaagggttaatctaaggatgaatgctctcctataacctaagctcttgcattcaagaaaaaccatgatttgttgcagccaacctcattacaacct

SEQ ID NO: 225264 - DNA, 399 bp, Glycine max
  unsure (1)..(399): unsure at all n locations
agcttgttattaccagtattttttggcctgtcaaatcactgctggctctaacataaacagaaaagatntgtttgtttgattacacaatgactaacattatatcatcttacaaacgaataaacaatttatgcacttagtcttttctctcaagaagaacaaagtggtttgtgagtttttntaaactttacaagaaattacacaaagaacttttacacaaagaatgaaataatgagcgcttcaaattgtacttcatatcttcaaattttntggtttatataggtctctatcaatcaagtatttggtgtctctaaatagacatatttcctctttaagctcgcatctgaaaaaatgtcattgggcttcgatgacgtactttttatgttgagaaccaattttatc

SEQ ID NO: 225265 - DNA, 346 bp, Glycine max
acacttgatactagcttgaagaactcatggggggtgatgttaaaagaggggcacacatgaagaaaaaaggaaaattgacttgaaggtgctataagttacatcataaagtgtacagtgtacaatattttattatagctagtactaactaaagaaatactctatttcatgtgaattaaagaaattcaaggattgccaagcaattacatattcaaatatgccaaacatcttactattctttaatgcccgaagaaggtggattacacaggaaagatatgcaagatatgccagaatgtctaaaattgccaagctttactattctgaaacagaggggactaccccccatact

SEQ ID NO: 225266 - DNA, 508 bp, Glycine max
  unsure (1)..(508): unsure at all n locations
gcttaagaaaaagatggcctcagcaaatttcttatttcctataaggaattctatcaatagacctccaatctttaatggagagggttaccactactggaaaacccanatgtaaatttttattgaggcaatagatctaaatatctgggaagccatagaaatagggccttatatacccaccacagtaaaaagagttacaatagatggtagatcatcaagtgaaagcataactatagaaaaacctagagacagatggtctgaagaggatagaaaacgagtacaatacaacttataagccaaaaacataataacatctgccctgngaatggatgaatatttcanggtttcaaaattgtaagagtgctaaagaaatgtgggacactcttcgattaacacatgaaggaactacagatgntaaaagatctanngataatgcactaactcatgagtatgaanntattataatgaatgcanatganaatattcaaagcatgcanaagagatttacaca

SEQ ID NO: 225267 - DNA, 404 bp, Glycine max
  unsure (1)..(404): unsure at all n locations
tttctttatctggtgatgccaagagatggttgtgttcattcaagggcaacaatttaaagacctgggatgaggttgttgagaagtttctaaagaattttcctagaatctaacaactggagagtgggaaaagttgtaaatttcttcattccatcaatttcccgatgaatctttgagtgaggcattagaaagattccgtaacttgctatggaatactcccactcaaggtttttaagagcctatacagtngaacatcttcattgatgggttatggccgcagtcaatgcagttactcgacgcttttgcgggaggaaaaattaagttgaagacacctgaagaagccatggtgttgttggatcaagtggcctcagaataattaagaaggtgtggttgaattaattattaat

SEQ ID NO: 225268 - DNA, 329 bp, Glycine max
  unsure (1)..(329): unsure at all n locations
gtcacctgaggcatgcaagcttgtgactcacagtcatgctaagttgttttctgcccttctaacaatatggcaaccattttgggggacanatgaccagtggaggacttctacccactggtggaagttctaagctagttaacaagatgtnctcacctgctggtaaaggtaattgtggtggtggtgcttttgctattgtttctacaccactcaggtgtgggaagtgtggccggcttgggcatattgctcgtgagtgcacaaatagaaaggtggcttgcttaactttcaggtaagggccacctcattaccaattgcccacatctaatgatgga

SEQ ID NO: 225269 - DNA, 341 bp, Glycine max
gaacctattccagaaaaagtgacagatgaacatcacagtgctctgttctgatgaaatgaattctttgatactatctctctataatatatataggaaatcacttaaacaatattgaccatgatcaacttcttttattatagcattgattaatctctcttttgaacacagatttatgaaaataactcctaacataattattcatatcattttgaaaaaaatacacagaggacacatgtattttacgcactccaaataatgtatttgataatttaattaagactaccataaatctatcatattatgagatttcatgaaaggtgttctctaaaatatacaattta

SEQ ID NO: 225270 - DNA, 465 bp, Glycine max
  unsure (1)..(465): unsure at all n locations
ctgcagctatccttgattttgagtttagagttgtgttgctattataattctacgagatgatcgtgtgatggttagcacatgagcaaatagtgatgctaatgcaagttctcaaagctgcttgcgattgaagtagatgtggatgatgaagatgggataagatccctccttttgctattntcttgtagaatactcatagtgatgactagcttaggacttaatgatatatacttatgtgttgagtgcttgtcctctaacaaggggattctttttagtatcgtatatgcttatatatatgtacgttttgtaaaggcacaaggcttagtaccctcatgatataatgatgtatattatgttattgagtgtatgtatatgtgttatatgtgaagaaaatacattactatctanttttataggacttctaatgtatttagatattaaatcgataacagaggtggtatcgtacac

SEQ ID NO: 225271 - DNA, 407 bp, Glycine max
  unsure (1)..(407): unsure at all n locations
tcatgatgactagctaataggaccttctcttgcatctctagcctaatcttcttagaatcttctatccaatgcccttanggggtatgattgcatcagttaaggttgggatcccactcctaatatgtagtaataaaatcaatgataagctctcgatagccctactcttaaatgtttgctagatataactagccaatagtgttgaagtagtctgcaatacgtatctggaggccaactggatagagagcctctatggcgagtgtcatgagcaggtagaactcaagggccttcagctcattgtactattgcatgcatgcttatggcactggagtttcatatagcatatgtgcctgcggatggacccgatcacgtggagaaggatgtggtggtggtgatgattgatgatggtg

SEQ ID NO: 225272 - DNA, 473 bp, Glycine max
  unsure (1)..(473): unsure at all n locations
atgcaagcttcaaagtagataatgaagaggctttatgaagatctaatattngacctccaactcttagaacacatcaaagtttaaacattcaggaacttgcttatgcatgtgacatgtaataaacttcagattaaaccaagtttttacctggattntgtcatgaattctcaagcgcacctgtattctagctgctccatatacattcataggaagttaatgccttttcagtctgcagaattggatacttaaatttgtttaaaacttacgcttaggtgacacttaaaaacccatgttcaagttctttcatcaggaagttagtagctaacacatgctgaaccaaatattctacatattcttccaggttggcctttttttttttatgggatgctgtggtgttgtattcaaagcagacacatctcaggtgtttgagcatctagccattgcaacaactgtgtacttatgagtcatacaac

SEQ ID NO: 225273 - DNA, 455 bp, Glycine max
  unsure (1)..(455): unsure at all n locations
ctatatcccgaaaggtataattgtgttatgggagagatatctgagtttttactgtncgagggagatatcacccttacgagctgacaaataccttttttctttttaattttaaacgcaattacctacccagaatgggaaagaagatatcaagtaagaatttttaagcataaatgtaaaattgtaatttaagcaatatactcatatcatcatgaatgatcagaattaaaaaattatgctaaccacaaaatcaatttaaactaaataatatgcattttttatggtagtcatgatcatttaaatataacttaatattctatatttattgatgccatttttcattagaaatagaaagactttcttttgatatattgttctctgatataattgactaagatttatttcaaatctcaatttttacgatgaaattatactaactttaatgaccatttataatg

SEQ ID NO: 225274 - DNA, 420 bp, Glycine max
  unsure (1)..(420): unsure at all n locations
atcctctgagtcacctgcngctgcagctgaagagttatagttctccgctcctgatccgagncagatggcagcattcctctattgatttctttnttttactacccctgtatttttcccttgtgtcaaagggaatttgttattctccaaaccttntataatttcttctcttgatgaaattattcttttaaaacacttggccaaccccaaaagagaaagaaaaagtttccactttgaagaaaaaatttatagacaataatttaatcagacaaacctttttcanaagggctttcacacgatcatatgcttctcgaaggagtttcacaacctgcagaatagatatagaagtatgaactcttattttgataaaaacaacaattcttagaagaaggaagcatatatcgaaacatgatatttcaggta

SEQ ID NO: 225275 - DNA, 388 bp, Glycine max
tgggttgcctccatagagctgctgcttaatgccattaactagtctctcttacctcattgagtgatcttaagctttggtcattactttcagaacctcttgacctccttccattacatgtgagcatacattgcgttctagaacaagctcgtgttcaacaaacaaatcacagtcaatcttatgatcttaaaacctatctacagctctctcttgcccatacaactatgtagcttgcgaccaacatgaatggccttcccaatattattgggatgactgaatctccaaagatatccattatcacaataatttgaatggaagataaaatggtttactctgaccaacacatattgattaatacatatggcctggtaatggagcggtcagtcattgt

SEQ ID NO: 225276 - DNA, 409 bp, Glycine max
  unsure (1)..(409): unsure at all n locations
tagctgcaaacaagctgctttgtggaagcttcttagcccgtgtggtgagtcatgaagacttcctnctgaaggatgccatcgaggaaggcattattcacatcaagctgctggagtttccacttatgagtaatagcaagagtcagaagaattctgacagtaacaagcttgattataggtgagaaggtctcattgtaatcatacccaagtctttgatgaaagcctttgacaacaaacctgactttatatttgttaactgtacgatcagggntttcattgaccctgaagacccatttgcaaccaatgggagacctggaaggaggtaaaagtgtgcatgaagctctttccaaagatgccatgacgtattgcatccaacgagatgatgaagaacgacactagaaatcggtgattg

SEQ ID NO: 225277 - DNA, 450 bp, Glycine max
  unsure (1)..(450): unsure at all n locations
agctagagatgngaacctctccatttcataatagaacactggtaatgtgtctactatcattgttatcatttctttctccgtcattgagggaaccacttgggctgccaaatccctccacctttggacatattctttgaaagatctgtgccccctcttgcatatgctctgtagntgcatcctatccggagccatatcagaattgtactaatactgcctaatgaaggcaaccattaggtccttccaagaatggactcaagaaggttccaagttagtataccaggtaatagctaccctagtaagactttcttgggagaaacgtatcagcagtttctcatcttttgcgtatgcccncttcttccgacaatacatctttagatgggtcttggggcaagtagtccccttgtacttgtcacagtccagcaccttgaacttatgaagggtgatgatatt

SEQ ID NO: 225278 - DNA, 411 bp, Glycine max
tgctacattgatgcatcctgactatggcatcttcgtttatgtctcttaaattctggaggcttaagctctctatgcaagataaagatggtgagagtactacacctctattaaccaccctgatcaactttgtgaaggatgtttacttagcaagaaattcataatgagttttccaaatgagtcatactcgagctaagaagccactcgagctaatacatgctgacgtctatgggccaatcaagccaagctcactaagttaaaaaattatttcctccttttcattgatgatctttcaagacaaacatgggtctatttcgtaaagcataaatcagaagtcttttctgccttcaagaagttcaaagctacagtggagaaagataatagtcgaaatatcaaagccatgaggattgaccg

SEQ ID NO: 225279 - DNA, 343 bp, Glycine max
  unsure (1)..(343): unsure at all n locations
agcttcatggtgagtcgaatatgaacccttggntgcactctctattctccttctgtgaagcaatacagagaanataaaaacaagggtgtgaacattttcttttgcacaaattataataacaatgcagaaatttagaaggcaataacaacaatgctattcaaagaagatgaaaacttaccttcggcagccaccgctccatatataaaaatgaaattatcaagctatatagaaaggggtttgaaataagagaagaaaataaaaagccttagttccttatgtacaagtgagagacgagggttttgcaacaagaatacaacgtcacttgactctatgtcgcactcac

SEQ ID NO: 225280 - DNA, 454 bp, Glycine max
ttattgatcgacacttatagtgtgattgtgtgttctgtcaaacttaattctcccaacatgaaataatattattgatatttgctgtccagggaatcttacaactcgtatgatatgcaatctcaaccgtttatcataactctaaaattgcattatgctgaaagattaattaatacattacctttatacataatggagaagaattattaagaattggtatgtatctatataaatatataaaagctaaagctgtaattatagagttgccagcttcttcctctcttattttctcatctcttatcattctaattaactcttctctacaatacattatagcatattgatgttattagtagataaatgactttcttaaatatgctaatagatgtcggattatctagtcgtgcatatgaagtcttcatgtgataatttgaaattcctctcacatgataattat

SEQ ID NO: 225281 - DNA, 418 bp, Glycine max
  unsure (1)..(418): unsure at all n locations
agcttttgttattgtctctcaaaagatcttccncttcattgcctggtgttaaagttagaccattatattcctgaactgaaccatcctctatattactggagggcagaatgctattgcttctattattgacgctggtctccaagcgttccatcatgcgtgacacagttgcaatccctgcattaacttctcgcctaacttcagatccaaggtcagacatagtgttgttccgagagaaccatctctccttccaccctcttgtgctcttggaaattgactccttgtatctgaaagacaagaaaaatagaagttcaaattacaatgggagaactcctcaattgtactgcaccacacccacttgtgacaaggatagtccactaccttgttgatacagcattctagttaaatttcagagattctg

SEQ ID NO: 225282 - DNA, 433 bp, Glycine max
  unsure (1)..(433): unsure at all n locations
cctaattgtaacttgattatatgcagattgtcatttgtgnattttgttataaaatgaggaaagcacttcttgcgcagttattaactattagagatacaattctcacaatatggagtttactttaattttaattataagttatagccatctattgagttcttagtaataggtaaaatcaccctctcccattttctctttttcttcgattatctataaataaggctattttcccttactcccctacatgaaaataaaaactcaaaatcatgttatttcaatactattaaaacaacctttctggctatagtcaccaaccatgatctcttgggcatgaacagaataaataccattcaaacaacatgctgttattttataaggtcttgactatataatatacacgacaatagttagagtatttacanacatttatgac

SEQ ID NO: 225283 - DNA, 467 bp, Glycine max
  unsure (1)..(467): unsure at all n locations
cagctgcagctnacaatccgtacaccacactctctctatnataatgttgttagntctgttaatccaaattacatgtcacatgcttagttaataaaaattttggacacaaatgtcattgtctttttccctttagattccacaaactttagactaatatcattgccaaaaaccaacgtagatcacaatcccatgttcaaatcanaattcatatccatgtaacaatcataaaacaatccaactaaaatagcaaagattcaaaatttactaataataaactaaaaaaaaatcccaacatcacaaattgtatcagagaacataagcataagaagaagaataatgaccaaaatcttaaacaatacccttgcattacccccaaaggccataaccgtgaagtgaaacaactcactgttgctacatgacgtcgattcaaccaacattatggaaaagattcaaatttaattgaaatc

SEQ ID NO: 225284 - DNA, 432 bp, Glycine max
tcaataaaaatcatattatttgtcttagtcaacaagtctatgtacattcatgaacttaggaaagggggagattaccaagtatagggaaacttcaacttactacctacataaatagtgcagatacactacaagctataccataagctaacaaaaatggcattgtcataatattaattattaaatttcaactcacctctagttgcgatcgcttgtagtttgattatttttactagtaaaaccatctgtaagtgcctaaattaaaagaatgctttttcttcataaaatatcatatcatagttaaatctttgaataaggtgaagtataaaatcatacctcttgatctatagcttctaagacttaaattaatcgtggatcttttgtaaatcgcatcttaatgacaacaacaagattgtcaagtgaattctctaattt

SEQ ID NO: 225285 - DNA, 476 bp, Glycine max
  unsure (1)..(476): unsure at all n locations
tgaaactgatgacctcatatgtgtatccttnttcttgattcctttgtacaattgtctttgattacctgatgaccacaccccattgaagtttaacttaatctattcatgtatatnagtggttcttggtcatcagtatttgcagtttattttataactattctgttgngatttgatgtgaatatgcctggggattgctaaggttactgcttgatgatggaaggaattatagtatcatgtgaaaatgatttttgttttttgttgaanaagttaattcttaagttgttgagagaggaatgagagaacaagagaacaaattcatgtctgactctgaattacacggctgagcatatatttatattatgcgtcataaatagaagaatattacaaataattattagaatatacacttatcctcattaacataattgcaagattataatctgccctattgacaatagtactataattatatattt

SEQ ID NO: 225286 - DNA, 481 bp, Glycine max
ctaagcttcatcccaatgtcttatctacatttcgaagacttcaatgtcttcagttcttacgctttcaacacactacaatgtctttagtcatttatgatgtcaaaagactactatgtcttcatttacatcttaaagacttcaatgtctttagtcatttatgctttccaaagactacaatatcttcatttacatttcaaagacttcaatgtcttcactcatttatgctttcaaaagattacaatgtcttcattgtcatttcaaagttgtcaatgtcttcagtcatttacgctttcaaaagactacaatgtcttcatttacatttcaaagacttcaatgtctttagtcatttatgctttcaaaagattataatgtattcatgttcaatgcatagttttcaatttctgtagtcatttatgctctcaatagactgcaatgtcttcatttacattcagagatttcaatctcttcagtcatttatgct

SEQ ID NO: 225287 - DNA, 276 bp, Glycine max
  unsure (1)..(276): unsure at all n locations
aaagcggnttctattgactcctctgcggcttccacataaggcatagaggatgggctgctcaccataatatcttcctctcctgatactagtaccagatgccctgtcactacaaatttcgacttttggtggagtgttgacggaacaactcctactgagtggatccacgggcgccccaacagacagctgtagggagggttaatattctttattcggagagtaacttgacaggggtgagggcctatctgtactgagagatcgatctcttccctaacctct

SEQ ID NO: 225288 - DNA, 448 bp, Glycine max
cgcttatatatatcgaatatgaacaacggtagctctcgttatattcaaatggtcataacttttcacactgaggtccgattcacgtttataatgtatcgatacactcgaaattaaacatcggaaactctctagaaattcatatggccataacttttcacacggatttccgattcgggcgcataatatgtcgagaggcttgaaattgaacaacggaagctcttgagaaattcaaatggtcataacttttcacacggatgtccgattcgggcatatcacatctcgagacgctcacaactgaacaacggaagctcttgagaaattcaaacggtcataactcttcacacggatgttcgattcaggctgataatatatcgagacgctctaaaataaacatcggaaactctcgggaaattcaatttgtcatcactcttcacaccgatgtccgatt

SEQ ID NO: 225289 - DNA, 462 bp, Glycine max
tcggatatccgtgtgaaaagttatgaccatgtgaatttctgatgttcttccgtagttcacattcgagcgtttcgacatattatacgcccgaatcggacattcgtgtgaaaagttatgaccatttgaatatctcgagagcttcctatgtttaatttcgagcgtatcgatatattattagcctgaatcggacattcgtgtgaaaagttcttaccatttgaatttgcgagagtttttatgtgtaattccagcgtatcgatatattatacgcctgcatttgacactcgcgtgaaaagttgtgaccatttgaatttcttaaaagcttcgggtgttaaattctaaactctagacaattatgcgcccgaattgacatccgtgtgaatagtatgaccattgatttctcgagagttcgtggttatttgagcgtttgattttatatcccgatggaccattggaaagtatgac

SEQ ID NO: 225290 - DNA, 424 bp, Glycine max
  unsure (1)..(424): unsure at all n locations
tgcaagcttcttcttgtttctctccccattagattccaacatntttcttgagcacttcattgagaggtgctgccaatgtgctaaaatccttcacaaatcgtctataaaaacttgctaagccatgaaaactcctcacctcggtcacagacttaggtgtaggccattcttgaatagccctaaccttctcctcatcaacttgcactccttntgaactcacaacaaaaccaagaaacacaacatggttagtacaaaagatgcatttttcaagaatggcatacaattgttcttttctaagcacagtcaagacagattntaaatgatcaatatgcaaatcaagtgaagtgctatagataagaatatcatcaaagtacaccacaacanactttcctatgaactctctcaagatatgggtcattaatctcat

SEQ ID NO: 225291 - DNA, 422 bp, Glycine max
  unsure (1)..(422): unsure at all n locations
ccggtccattttacgaccgatgctgtctattgttttctgtgcaatccctgaactaatttttgatgatgacgactatgaactgttcggttggcttcatccggtgatgctttttggtatacctcgactggtaatctttcttggccgatgtcgcatcggattattttcgatcaatgtttgtaatggagtcttttctctgttgaggtcggttacanttttgtttgcctattcaattaccgcagtccaatgtcacccgaaatgaacgtcggttgagtgtgcacaaaataccatatgcgaccttgacggaaaactttttgagcgacaatgaataagataacatcctcgatggtacgaataatattattggccgacgctgatggaaaataaaaacattgcacaatgtctggcgattaacaaacattctt

SEQ ID NO: 225292 - DNA, 417 bp, Glycine max
  unsure (1)..(417): unsure at all n locations
tactcgcaccaacatanattagaggtttaaggttgattgtagtccctgaattttcgccaatttgagtatctcttttaggttttagttcctatgtgttcactcatgtgggtttttagtcccttccgtttacatattggtccctatatnttccactcatttggatnttggaccctgtagttttctactcattaaggcgctgatccctgtttacaatgatggattgatcctttttagttntaacttattaaggtaccagctcctaagggaccaaaaccttcatggttggaatatatgaaccgtatcccaatatagaatatatagatgtatatgtatatataccaggactnnatccaatgattgaaattggtgggatcaaaatcctgttaaacctaattcaaatatcaaagaaacatggtt

SEQ ID NO: 225293 - DNA, 347 bp, Glycine max
  unsure (1)..(347): unsure at all n locations
ccgatatgntgatcattgtgtgtgtactcgagaatgctcatcctttgctcgaattancaatataagtgtcaacagatagtcattgtttgtatcccttcctttacttctcctcttcttcccttgagggttaagagaaaggtggaacacaataaatccgaaacaggtcttggtctttccattgtgttctctacccgggtaaacctctctgctaatgctgaggtttgaataattcccagccattgtgtaataatagttgacgcagggaatgtggagtgcttgggtgctattagcatacgccaggtgagtaatatacctttaactcgctgaggtaataaatagataatatc

SEQ ID NO: 225294 - DNA, 274 bp, Glycine max
tatcaatacacctcctatcgttaatggagagggttaccactactgtgattccataatgcaaattgttatcgaggcaaatgatctgtatatctgggaagccatagaaataggtgcttatatacccatcacagtgtgaaagagtttgaatatatggtagatcatcaagtgaaagcataaccataaaaaaacctagagatagatggtctgaagaggatagaaaacaattactatgcaacttaaagaccacaaacataataacatctgccctaggaat

SEQ ID NO: 225295 - DNA, 468 bp, Glycine max
  unsure (1)..(468): unsure at all n locations
gatcttaagcaccgcagcatcaagcttaggtaatcgattttattgattgtttctgaataaatcaaaagatgtaactcttcgaaaggttnttgactttttcaaattggttntaagttnttctaaaagctataactcttctaaatggtcctcttggccagacatgaagagtctataaatgcaaggctttgattttcttttcaatacacttttacacttatttcatacaatcctttacaagccttgaatctctttgaacttcttcttcttctttgtaccaaaagctttctaaagttttctggttttctaaaccttgaaaacttgtgttattcatcttttcattcttttctccctttgccaaaaagaattcgccaaggactaacccgctgaattccttttgtgtctctcttctcccttttccaaaagaacaaagggactaaccgctgaattcttttatgtctcccttctccc

SEQ ID NO: 225296 - DNA, 451 bp, Glycine max
ttctcaacatcctcagtcatctgctattactcggccgcgcatcgcgcggtcacgatgttgtaagcactgagagtgattgttatgccatatcagaacttggcacaaagctcatatgtttccaccccgccaggaaaatcaggtagttggactatttggtgctgtggagaatcagaactctctgagcatagcctttgcaggcgaaaacatttggacagtagtggaaactgaacaacatcaacaattcaacatgaaccaatatgtgacaaaacaataatgaatgaacaataaataaaaaaaagatacaaaaagtttcttaaaatataaaaatggactgagatagaacttgaagagttctatcattggtaattgggtattctcaagtgtaaaagtttcaagaagcataccttgtgaagaaggtatctagttaccttcacttgaattatgaagtcac

SEQ ID NO: 225297 - DNA, 487 bp, Glycine max
  unsure (1)..(487): unsure at all n locations
agcttagctacacacacctctctaatagcttagttcaccttcttgagatgagaagctagagcttagctacacacccnctataatagctaagctcacccncatgacaaaaaaacatgagaatacaaaaaaaaagtccttactacaaagactactcataatgccccgaaatacaaggctaaaaccctatactaccagaatggccaaaatacaaggcccaaatgaaggaaaaacctattctaatatttacaaagaatccaaccttgacccatgggctcaaaaatctaccctaaggttcatgagaaccctaggaccttctttagtagctctagcccaagcctcttggagtcttctatccaatacccttggggggtaggattgcatcatccnctccaccttggaaaggattngacctcanatattgaggttcttcatactctaggctccttccctcgacacctggaaaaataataaanacatatgtattagt

SEQ ID NO: 225298 - DNA, 462 bp, Glycine max
  unsure (1)..(462): unsure at all n locations
ntccgcatgacttacggaaagatcttagagttgaccttagcttatgtatccatagaagccattgcatcactcacccaatactacgaccaacctttgagatgcttcacattcggagacttccaattagtaccaaccattgaagaatttgaggaaattctatgatgtcctctcgggggaagaaaaccatatctttcatccgggtgtctcccctctttgagcagaattgcaactgtggtcaatgattcagcaagatgtttggacagcatataacagactcggaacggcatagcgggcctaccactgatgtacctataagacaaggcgaggtgtatggccaatcaaggagattgggtcccgtctatggatgtgttagctntgactaattttggggtcgtcttctttccaaacgtggacggtttggtggacctagcagcaatcgacgctttccttgcctaccaccat

SEQ ID NO: 225299 - DNA, 475 bp, Glycine max
  unsure (1)..(475): unsure at all n locations
caagcttagtatttctttnttacttcctatttcatcaccgggttgagtttcctttatgggtgtgctactggtttgaagtcctcttcatggttgatgttgtgcatgcatatggatgggctattcctttgagattggagattttctatcctaaggcttgtttgtgcttctttggaagctccactagtcttttttttttcctttttgcgcaatgtgatactaatgatggctggtttctcatcctcgccctctaaagagacatatttaaggtgaggaggcaaaggtttttctttaatcaaggttcatggattttctatttttattttccagcactttgtttaaggaatctaggtgctggatgcattcccccagctcttgattatgctccggtgtgagggtttccacgacatttgtaaagcaagatctaaatggtgtggtgttacaatttgtggagtntctcttttattattcatcatta

SEQ ID NO: 225300 - DNA, 459 bp, Glycine max
  unsure (1)..(459): unsure at all n locations
ngctatctcgtacatgagttacttgtgatattgtatctaatttagtaaatgctcctgaagaagtatagcaagaattgtataaggtaagtctaatgtatttgtttaaatatattgcaatagtcaatgtaacacgtactttgtaaagtttttcatttaccattttcagcaaggaaaattttacaaacagttcaagaagaatggatgtgagcatgactatgagatccttggtgaaatattcaattccagcacaatttataacaggaaagttaagtcaagcttctactcaagagccaccaacctctaatgatgagagagaaatggagggaaactttctttccatatgtggttatgttgatgccaatgatgatgttgatggagactacataagaacttgacaaaaaaaaataaaactacatcttcaagtgagcatcaacgtatagatacatgagattctatgtt

SEQ ID NO: 225301 - DNA, 436 bp, Glycine max
  unsure (1)..(436): unsure at all n locations
agcttaacttatcataattctcatcatnttatcaatcattgggtaacatcactcgtcctaaggatttaatcacaaaatcatattctataccttcacattaatcacatgttcataacaaaacatctcaagtagaacacaacatctctcacacacaattcattacccacgatcacgtagcaagtcacaatgatcattagacagacgttatgcaacatatatactaagactgaatcctatattgaatgtggtatcttgtcagtgaaaaataacactatggcacctaggagtacataatataatacaccacacaatgggtaagcaggtcactcttatcaaaagaaatcataaggtgatcaatcatgggtattctggttagcgtgaatgctctaccatatgagacaacatagattataggagcactcaatcagtgttttac

SEQ ID NO: 225302 - DNA, 388 bp, Glycine max
  unsure (1)..(388): unsure at all n locations
tgagtgagtcaccatagaatgagtctattgtgttaacacatccttgtaaccctactatcactntgtatagtggaagaatctccatattggagaattataatcgtgtgctcccattactacttctaattactaagtgcctatcttaacttcacgaagcgggaaagtccgagttttcacaacaaagtctgtatataaaaatacttcatgcatgtatgtgtacattatggaaaaatactgccaacaccttatgttgggggaaatgtcttataaattatgaccaggacctgcttataggtaggtgtagctttggagtgtcgatcacaaatgttaaattgaaaattttagttatgtaaatttgagtctagtctatctattctggataaatgta

SEQ ID NO: 225303 - DNA, 462 bp, Glycine max
  unsure (1)..(462): unsure at all n locations
agctttatgattgaagatatganagattatagagagagagagagagagaaagtggcgtggaaaattgaaggaaaaaagggagacaagttatactttgaagtgtgtctcataagtttctcatttatcaaagttatgacagatgttacagatgttacacatgtttctatttatagcctatcacatgggaaacttccttgagaagcaaggaaggtagcttccttgataagctagaggggggctactcatcacacccctccaatagctaagctcaccccatgacataatacctgacaatacaatgggaaacttccttaagaagcaaggaaggtagctttcttgggaagcaatgaagaaagtcttcttgagaagctagagggggctactcacaccccttcaatagctatgctcacccctataccacaatacatgataatatatagaagtccatactacaaagactac

SEQ ID NO: 225304 - DNA, 123 bp, Glycine max
atcaacttctaaataaaggctctcacgacgcaaggagattcaacacatgtccatgtgggatataagccaattcttaccaaatggatatcatttgttgctcaactctacacctctatcaatgca

SEQ ID NO: 225305 - DNA, 425 bp, Glycine max
  unsure (1)..(425): unsure at all n locations
aatatattatagccatttttttaatggaatttgattcagtttctggctttcaattataaaattgaactaaactaaattaaaccacacgctctcattataccttttgaaatatggcttactcaattttttcttcttttaaatttctttatatttggttctctattatttactgtacaggtgcaagtttgaagcaatcttaaaaaattagtctaaatcgagcaaaacanaatctcgcatctatcatgtcacaaatntaagtccatacttatctttttggctgagataaatgaaaatttctctttagattttatctagtcttaaacattacttttagaattaataaactatttggtatataaaattgaatcttgcatttaaaatagataaggacacgctcataaaattatttgcttaaagctcttatt

SEQ ID NO: 225306 - DNA, 393 bp, Glycine max
  unsure (1)..(393): unsure at all n locations
tcattaagtggtgtagatgaagatgaacaatcaccatagccacacaagtcgaatgaatcgccctacaaaatgttggtgcaacggcattgcctccgtagaaaatactatcattgatatggtctctatgtaaaaaagaaggtanaccccagcaactccttcgaaatcttatactttggttttggtggtcggggataattaaaaatttcccaaaacggatggttcacatgcaattttaaatacttttttagtggggcttatacgttgttataaaaaaaatcttactttaatgtgcacatgtaatttaaattacttataatagataaaagacttatataagcaatagtccttatgagttgttaatatttgattaaatatcggaaagaaatatgaaat

SEQ ID NO: 225307 - DNA, 489 bp, Glycine max
tcttcagtcacctgaagctgcagcttaacattcaatgtcaagcgtctcgatatattacggtatctaatcagacatccgagtaaaatgttattgtcgtttgaattggctcaaagcttcaacattcaatttcgagggtctcgatatattacgggactcaatccgacatccgagaaaaaaattattgtcgtttgaattggctcacaggttcaacattcaatttcgagcgtctcgatatgttacgggactcaatcagacatccgagtaaaaagctattgtcatttgaatttgctcagagattcaacattcaatttcgagggtctcgatatattacgggactcaatcagacatccgagtaaaaagtattgtcgtttgaactggctcagaggttcaacattcaatttcgagcgtctcgttatattacgggactcaatcagacatccgagtaaaagttattgtcgtttgaattggtcagagattcacattcaattc

SEQ ID NO: 225308 - DNA, 279 bp, Glycine max
tgtctttttgagtctcataatacaacgaggacactcgaatggaatgttgaagctctgaggctaattcaaacgacaatgactgtttactcagatgtctgagtcagtcccgtcatatatcgagacgctcgaatgcgcatgttgatgctctgaggctattcagacgacactaaagctctactcagatgtctgttggaataccggtcatatgaagacgctcgatatggaatgctgtagctctgagacaattgatacgacatcaactgtgtactcggatgtctg

SEQ ID NO: 225309 - DNA, 485 bp, Glycine max
  unsure (1)..(485): unsure at all n locations
gcaagcttgtacacgtctganacctgatgaacttcatagcctcttattctgtttattntaaaggtgattccaaattccaattttatatgtaattcagattcagattcagattcgcttagcttagctataaatgaatttgttgagtaaaattatctagctggagaaagctactccttatttaaccgatgattaactcaattattgcatctaaacttaattaccagaagacaaaaaacaatcaacatttgtattgagaagtatatatcatgctctaccaaccaaaaataaaataaaaaacaagccgagtgcaaattaaattcgtgtcaaccccaacaaggatattcttacacaggtacgggatgagtgtgtaattcaatattatttagaannatatgatcgcttctaaaaaactcaaataaaaaattggtctaaagacagatatgtgattatagttacatggcaagaagggaggcaaataagttatg

SEQ ID NO: 225310 - DNA, 416 bp, Glycine max
actcagctttggcggtttgatttggatatcccttaacactttttgtatcgttcaattggatacatccaccgcttaatatccggaccacacatccgaatttccctcacaagatgaacaatgatgtgaaccatgatgtcaaaaaatgatggtgggaaatacatctctaactgacaaatgacaatggcagcctcattctccaagtcatccaatagatgacgattaatgactgtactacatatggcattaataagaaagcacagacgggttatggcaactctaactttgtcaggcaagatgccgcgaatcgcaacaggcaataattgttgcattaagacatggcaatcatgagacttcaagccaaccaacttaagatcattgatggcgacaaggctcttgaatattgaagagtatccttg

SEQ ID NO: 225311 - DNA, 422 bp, Glycine max
  unsure (1)..(422): unsure at all n locations
tctaccggtgaaaaacattgtttccagcgcttgtataaaattgcgcaatgtcggctgagaaacatcagttggggctgtttaactaccgatgctggctactgttttttctattccacccctgaataatacttggacgatgtcgatttggaaatgttcgatcggagtcatccggtcatgctttcttttaagacctcgatctgtcatcttttcctggccgacgtcggctagcatttttttcgatcaatatcggtgaatcatgctttntgccaaggtgggctaacgttntcgtggctgatgaaatgagagcatgccagtgtcggccgaaacacaatctcgcacgagaaaccctatccgacctacattgtatattttgtaggcaataccgaacagcataacttcgtctaccataaagaaatattatc

SEQ ID NO: 225312 - DNA, 472 bp, Glycine max
  unsure (1)..(472): unsure at all n locations
ngccttgccccttgatatatntgatggactcatggtcactatgaatgacaaattcactgggataaaggtagtgttgccatgttttcaaagcccgtactaaggcatacaactccttatcataagttgaatagttaagggtgggaccacttaactgttcactaaaataagcaattggatggccttcttgcatcaacacatgcccaatcccaacatttgaagcatcacactcaatttcaaaagatctttgataagttggcaacgcaagtatggtggcattagttagcttttgcttaagaacattgaaagcttcttcttgtttctctccccatttgaaaccaacattnttcttgagcacttcattgagaggtgctgccaatgtgctaaaatccttcacatatcgtctataataactngctaagccatgaaaactcctcacctcggtcacggacttatgtgtagaccattcttgaat

SEQ ID NO: 225313 - DNA, 415 bp, Glycine max
  unsure (1)..(415): unsure at all n locations
agcttgatgtgtgtacccaccattnttcatagaagnggatgtggttggggcaaaattgaggtccctccanagtgttttgcaggggtataccaccaactgcttgtccttcagtggcatatctgaggcaagggttgaagttggctagattgtgctggggaatttcatgtgtctcccccatgggttgagagacatatgcatgatcagattaaggttgttggctctcaatgagtatgggagtggagttattgacattctcactgggagtgtacgccacattgtgtggtgtatagttgggaggcaagccatatggtgggaaggcatgcttgtttttcgcactaaatgaaggtcgcctgtacctcccaactctttgccttccaaacctaccatatttgaggtcagatgatttattttggtg

SEQ ID NO: 225314 - DNA, 376 bp, Glycine max
  unsure (1)..(376): unsure at all n locations
tccatcatgagtggatnggaatgattatatatttgttttgatcaagctngnagccattagaagagaatgagcatgtggttggaagtatgactggaaatgttagtcagtttgtcagattgattgtgagggaatgcattaatcgtatccagtgagagtgtgatccttaaattttgagagaaacgactatcatttagtactgatttttgcgtgaatctctgaagtatggactaaatgcatgatattgaggatgatgaagaccatgtttgattgtgatagccacttatccaaaaagctgaccatgtgcttgaatgaattatcccttgtacctagtttgagttgaatgaattattgattgatggaaccctgagcctataca

SEQ ID NO: 225315 - DNA, 397 bp, Glycine max
  unsure (1)..(397): unsure at all n locations
ggatcttaagcaccgcggctgcaagcttctgngaagctgtgttacacctgttcaatagctaagctcacccccatgccaaaatacatgaaggaagaaagcttccttgagaagcttccttgggaagaaagtgttacacccctccaatagctaagctcacccgcatgggaacacgcatccctccaatagctaagctcaccccccanaatacatganaatacaaaaaaaagtccatactattgagactactcaaaatgccctanaatacaaggctaaaatcctatactaccaaggtacccttaacttgtagggtagggtgcgattatattgtanggtaccatacgaacctaaaatggccaaaatacaaggcccaaaagaaggaaaacttattctaatgtta

SEQ ID NO: 225316 - DNA, 400 bp, Glycine max
  unsure (1)..(400): unsure at all n locations
agctntacagcagatttattaatgaccctcttacctagaattaaaataacttaatgccattaacctagggaattaacaaaaacttaatggctgagtgtaactgaaattgtggcaaccaaaagtcacccncaacagccaacaagtcagccaccatttggtctcccaaaaggctgatgcctatgttgccaattgggcccttattacaacttgaactatacctaactaaagcccttntagttgattaacccaaaacatanttttggtcagccaactctacaaggatagggccattatttagacaaactaaacactctaaaattgaaacaaagtggtgtcatttagtcctcctccatttgggccatgatacaactcacaaccttggacttttcttcttgaaact

SEQ ID NO: 225317 - DNA, 464 bp, Glycine max
  unsure (1)..(464): unsure at all n locations
agcttatgaataaactcctatttggtaaattcttattgaataagcatttgattgagttgttactcaaacatgttcttaataaatatcatttctggctttttggaaatgtatacacggccccatgcaactgttgaagtggaaatatcagaagatatgcagcttgtgcattctgatttcaataggtaagaatctctcaattacttggctttctttctgtaagagtaatgatgttatcttgcccatgtgctctctgaaagtgactctaattctttcgaatcatatattcaagcatcagtgatactattatggtcaaacagaggctgcgttgctaaatacatgtgtcattttcagagcatctttgttattataacttnttataattcacaatcttcttctatgtatgcttacttcctcttctgttttctctgagcactcctttgagctgatgatgatactatgttctc

SEQ ID NO: 225318 - DNA, 484 bp, Glycine max
  unsure (1)..(484): unsure at all n locations
gtttataattcttacaagttgagcacgcctacatattttaattctcatacttgatacttctacgagttaactattccattgcatcatttgtatgcaccttctaatgttctgagtgttgtgatattgtaactatttcaaaactttaaatttctcggtctattattacattngaaatcttaaaatatttataaatgaattctgtaagagtgtacaaataagctattaagaggattagactcatgtgcatataaatgtgccaaacttgtctattttaatgcatatccatctatgtgcccgcttagcatatgatagtagtattagacatcattaactcttctgcttctgcttatttttaaaaatcacaataaatgttaagaagcctcgtttgaaaatagatatttgttttaactaaactatcttactgtcttaatcagttccaacttaatgctattttatattatcataatctctatcggcagattat

SEQ ID NO: 225319 - DNA, 430 bp, Glycine max
catgcaagcttcgcacttgataatggagacacaatttcagcgctatgcaatgacattcatggagctccgaacaatggtggagtatggaggattgccttgagggtccgcacttatgctttcatgaaactcagctccaaactcgaaaatggaggacacatgaacaaccctaagcaatagcattcatgtggcttcggaacaggataagaatggaggattgccttgagggtcctctcttaggcaatcatgaaactcaactccaaactcgaaagtggagaacacatgaacagccctaagcaataacattcatgtggctccggaacaggacgagaatggaggattgccttgagggtcctctcttaggcaatcatgatactcaactccaaactcaaaagtggagaacacatgaatagccctaagcaataacattcat

SEQ ID NO: 225320 - DNA, 467 bp, Glycine max
  unsure (1)..(467): unsure at all n locations
acacttaaatactaatcttcttaacaccccatttctctaccaccttggctacatataatttccaaagtgcatggtaaatacaacacaatagcattcatgtaagtcaatataacatggaaacactataaccaaatataatccaaacattcataaggtaaataaataatccaaacattcataagtcaaaccacatttaatcctaagcatataatgctaagtaccaaatattgaaaggtaatgaaaatccagataactaaaagatatagccaaatacacggcttataatgaacgataataataatctaaaaactaagaaggtggtggtggtggtggaagatcgaagctctgacgaatataagtcacatcctcttcaagttgggtgatgcagttatccatgccttcaagcgaacatccaaagaattgaatcgttcaccaacatangtgctgatgcaccgtaactcttaaat

SEQ ID NO: 225321 - DNA, 441 bp, Glycine max
  unsure (1)..(441): unsure at all n locations
agcttccgttcccgagagcttttcttatattatcacttcagccttaggtttcgtgtagcttaggagaaacgtcattccttcttctttctttcttgcaaagccatttctaaagttccaagcactttctccatcacccacggccaccattagccaccacaaaccatcattgttcttcattgaagacccacactgagaggaacccttcaaccaaagcggaatcttccaacttggcttgcggtttcggtagagaaggaaaaccctaatctgacctttcgttttcttcgagaggctgctgtggaatcgaagagcaaggacaaaaaggaatcttcaagtgacacgacgaggaatccacagggtatctcacgatagggaaggtgagtntatatagaaattaccgtcttacaccatagtcaggggcatggaacctaactatgaggatat

SEQ ID NO: 225322 - DNA, 432 bp, Glycine max
tctttgagaaaacttccttgagaagttagagcttatctactctcacccctctcataactaagctcacctccttgagaagctttcttaagaagattcctatagaagctagagcttagctacatatacctctctatactcacctccttgagatgagaagctagagcttagctacacaccccctatatatatctaagctcacccccatgaataaatacatgagaatacaaaaaatatctctactacatagactactcaaaatgcctcgaataacaaggcgtaaaccctatactactagaatggccaatatacaaggcccaaacgaaggataaacctattctaatatttacaaagataagcgggctcatacttatgccatgggctcaaaatctacccttaggctcatgagaaccctatggcctgtccttggatcta

SEQ ID NO: 225323 - DNA, 439 bp, Glycine max
  unsure (1)..(439): unsure at all n locations
agctngtgttccaagggctataatcgcattctggcactcattntatattcttcatgttgtccctatacatataaaatagtcccacaatcccaagcttacaaaaccatgcccatatgtcattgaggcatttcaccgagcacttggggggcgcatgttttggcatgaatagcaagagaatgggggcaatgtggcatgccccattactccagaatgcaacataggcctagggccatcccatacaaccncctaactcacaccaatcaagcatgaaacanagccaaaattgccccatagacttgtgcacattcccacaatttagagcaccaaaagaagaccaaatacatcaatggaaagctagaaagctaaaggatgagatacttactntgatggagtgagtagcacactaagaatggaagcancaagcacaaaatagtggcct

SEQ ID NO: 225324 - DNA, 478 bp, Glycine max
  unsure (1)..(478): unsure at all n locations
tcaagccagtgccagactctcgtgcatacagaggtcttttcatgaaaaactccaaaactccttgcaaatctgatttcaggcttaaatatgtggccttgttcgtgctcgtgcgcttagcgtacgttagtgatttttggctcaacgtgtttctctcgcttagcggatgagctgaagcggtgcgcttgatgacctatagcagtgcgctcagcgaacctgacagctcatcttcttctggattcttcctcgtgcttagccactgagtgtcgcgcttagtgaatgctcgctaagccagcatattggcttagcgagaaggtgaaaacaacactgttgccaatttgcctaattaacctgatactgagagatnatgattattaaacacacaaaacagaagtataaattatctattacctatatttaacaaaaagtacttataatattacataacaactataaattaggaaagtttgatcaaaaacac

SEQ ID NO: 225325 - DNA, 480 bp, Glycine max
  unsure (1)..(480): unsure at all n locations
agcgacctgcggcatgcaagcttatatcatcttcgagttaagngatctttgtatncatggcattggagagctcacccataaaagcttggaggtcacggagctctatgagtacttcagtcttattagaagnggaatcatctttttgtggtggaggagatggagtacgttcatcatgaataagcgcgggcaagtcttgtttgcgaacccactgaccatcaacatcctttcggtaaccaaaggaggtaactgcatcggcaccaatggaaaacgaccttgtaaccttaacatatgggttatcatccaaaggaacattgaaataatgaataaaaagagttacaaggtagggataaggcatatgtgcattggcccgtaatgccttatgcatccggtgtaacgacccgcctcgttactacgggatccacactctaatattcgataagttcaatatctatacaaagaactcccttaatttttattatg

SEQ ID NO: 225326 - DNA, 482 bp, Glycine max
  unsure (1)..(482): unsure at all n locations
tatgcatataaatatatgtcgatattcatgatgctctcgtgtcggcgttgnaacctaaattactaatcctcgatccctcgtcagatcgaatcaatgcaagctgcatcctcagatccctcttgttggactatgcccaatttagacggccctcttaggtagagaccatcttaaatcgagtttcgttgccagatccctcttgttagactagactgagctcatgcaacttacgaaatgttagcctaatttagcctaagctgcgtccgcaagatcccttgtgtaagactaggcctagactaagcagcattattgtaacaacatagtgaaaaccaatgctgaatccgcagatccctcttgtaagactaagcttcgatcctactgtaatcaagatctaaggcaacagtatatctaccaatgctgaagtgatctaactatgcacacaaatggatgatcagacgaatagcatacatacatttatcatttga

SEQ ID NO: 225327 - DNA, 445 bp, Glycine max
  unsure (1)..(445): unsure at all n locations
agcttcaaggtcactaggaacaccaaatagtgtcttgttctccatgggaccttgagaatgaacccaggcttggttccaaaaattgacagaattcccatcaccaatttgccactctaggtttgcagcaacatactaacattttcctatttgtgacaaattcccctcctagtatttgacccacgcataaggaaatcaacattaggcacaatagaatcaccatacctatattttttttcctaaggatatgcacccacaaagagcctctattaacacacaaaaacaaacctaatttcaccataaatgcaacattgaaattgatggaaccctaatttgcggaaccaaattttagcataaacaaactggggaagctatttgggactctctacaattggtgaatataanaaggaaaaagcggaattagaataggagatgacatgaacaatgt

SEQ ID NO: 225328 - DNA, 396 bp, Glycine max
  unsure (1)..(396): unsure at all n locations
tgctctattcaatggagttgacaagaatatcttcatttgttcaacacttgcacagtggccaaagatgcatgggagatcctgaaaatcactcatgaaggaacctccaaagtgaagatgtccagattgcaactggtggccacaaaatttcaaaatctgaagatgaaggaggaagaatgcattcatgacttccacatgaacattcttgaaattgccaatgcttgcactgccttgggagagaagatgacagatgaanagctggtgagaaagatcctcagatccttgcctaagagatttgacatgaaagtcactgcaatagaggaggcccaagacatttgcaacatgagagtagatgaactcatttggtcccttcanacctttgagctangactctcggat

SEQ ID NO: 225329 - DNA, 58 bp, Glycine max
ctaagctgcatgcctgaatcgctctaaggactccggaactttcttttttctcctatat

SEQ ID NO: 225330 - DNA, 441 bp, Glycine max
agcttacaaatctgtctccacccaacccatatatatcttagtatctagataacatcagacaagatcacatctagatgaaccaatctctagatgagatcaaatctaaatagtatctcgataagacaaaatttggtagaataaaatagcctgttctcttcaagtccaagcccaattctggatttaagcccaattgcttataattctcctgaaattaaattaaaaacacaaaattactccactaggcccaaatgataaaactgcataattaacttgacaattaaggctaattagtaattaaaatggtgacaaacagggctaagagatatgagaaaatgatgacacatcaaatccccttacacttagccttttgcactcttgggaaaataaaacaaaacaaagcatgggacgaaatccgagacattcaagagaaacaaacagaca

SEQ ID NO: 225331 - DNA, 231 bp, Glycine max
ccaccctctgctattggagggggatcaactgtgctagcacaatcagagacggaggctatcattctgatactatacataccgcggcagagatacacccgtgcctctgttgagagactagagtggatcatgctcaccaacgtgaccactcgtacacagatataaaagacgttgctacttagcaacattctgtccatcgaccgtaatgccgaacccccctgcaatgtatcacct

SEQ ID NO: 225332 - DNA, 255 bp, Glycine max
tgtgtcactccgaccatagtctgcacccgcggtacaaaggcttctttgtgtttcttagcaagccttcatacatagtggcatcgtgttgctcataagactcttggccatggtcacgaatcatatcctccaagcgatctaccattactacatcaaacggttcagattgagacccactctgcctgtgtgacaattcaccatgccatatgcacgtcatgaccttcttcttaatcccgccatcacatccatgcccttata

SEQ ID NO: 225333 - DNA, 393 bp, Glycine max
  unsure (1)..(393): unsure at all n locations
attttaggtattatgaatttgaaggaatcacaattttcttcctatttaaactagatggttaatgtgttttttaatctttttcttcctcctttgacatcactactacaaggatgttagttttttttttctcatgttcaagttttattatactaagttgttatcatacttttgtgaattgtgtgaggattggaagtgtgaacatgtgtacatgtgaggctaagacgagtgtttgcatgagtgcatgtgtgtgtagcaaatggaacgtatgcttatactttcattaacaactaattattggatgttcacatgaaaaacacatcaatctaactctcttgatgttttcttctttaattttaatattagttttattaaaaaatatacatcatgtntata

SEQ ID NO: 225334 - DNA, 438 bp, Glycine max
  unsure (1)..(438): unsure at all n locations
agctctgatgaataggctctaccgacttatggatcaaagngagcccaaacagaggccaacttgatcatcatactctgataaatgccaaaaaaaactagggcaagtgaagaggatgaggatgaaggagaagcccgtgctgtgactgccattccaatacagccaagttccccaccaacccaacaatgtcattactcagccaataacaaaccttctccttacccaccgcccagttatccacaaaggccatccctaaaatcaaccacaaagcctatttaccgcacttccaatgacaaacaccacctttaacgtaaaccaaaacaccaaccaagaaatgaattctgcagcgagaaagccttagaattcaccccaattccagcgtcctatgctgacttgctcccatatctatgcgagaattcaatgggaggcataaccccaacc

SEQ ID NO: 225335 - DNA, 405 bp, Glycine max
  unsure (1)..(405): unsure at all n locations
gtttctacctttccgattagggaatctttaaatctattatttctaatatctctaaggcacatcaaaactgctgcatctatgcccatatcaattaagggcttgatggctacttgaacacaatcgatgtgtaaatgtttgtacttacggctatattcataaattgatttgtttgaaagtaaatggaattcttccnctatatnctgtcctagaggaatattaatttctactgttctgattatataatcaaagttatgtttttctttaattgtttcacgaacatacagtgtatcctgagagatttctggaatgttccagtcatccatgttttgatttatatctttgaattagacttcctcatcgaagagattgtgttttggggcgacctcctgggtcttggtttcatgc

SEQ ID NO: 225336 - DNA, 141 bp, Glycine max
  unsure (1)..(141): unsure at all n locations
gaccccgaccccggccccgctccngcgcccccnccccagcaggcgatgtgtgacctgacacggacaaagcacgcgggcacaaagccaggcaggaatatcaacccaccagaccccgcagggaacccgaaaaacccggacaaa

SEQ ID NO: 225337 - DNA, 363 bp, Glycine max
  unsure (1)..(363): unsure at all n locations
ntcaccaaatcatataagacaaaggcattcttgcnatctgcttatatatcaccccaaacgtcaaatatctgcgcctatataattaaccttgtcatcactggcacgtggaggaatccttctccatggcgcaatactaaaagtatattgccattcattctacacaatcagaaaccgctaacatggtcagatattacgaaataataaaacctacctcaaatagcgcgaagacattgacattgtcacaaaccgcgaagacacaatcaaaaaccaaaaacattgtcatctacaataacagagcatcataaacgataataataaacgatcataaaccttcctacgaagcgcgaagacaatgccgcagat

SEQ ID NO: 225338 - DNA, 375 bp, Glycine max
  unsure (1)..(375): unsure at all n locations
agctnngaacncggatactcgatccatatatgtcttttgtcctgcttaagttcactaacaacagactttcatctccatgtcaggagggcccattctcggactgaagcttctagatcccctcgccgaacttctcgtctcaggcatgatctcgaaagctggagctgaaacacgtcaccagaggtacctatatctctccccctacagcttatctttgctcgcacgctcgactaatattgaaactatttcctctaccctggtggatacatgtcaaccacattttgaaacctaacctaaacaaatgggaactaagcgtgaccctcatacaaggatacaacaaaatattgaacaaacctatgctagacatagatgacatgt

SEQ ID NO: 225339 - DNA, 464 bp, Glycine max
  unsure (1)..(464): unsure at all n locations
tactaagcttatgatattgtaattccttctactaattggggtattttattcttttattaattncttttataataaactcaccccttgcaatttgtgtaccgtgtggttggtacttgtgatgatcatgaacctttggttgtaggagcagaatgacaacaatagagtatgagaagtgagattattttgtggagccggcgagccgacgtgatgacgttgggattattttgagagagagttgtcgtttgttaatcaactcctccatagctggttccataattctttgttttggtgaattggggatgtaaatcacaaatttacattccattatgtgaatgatgtgtactgaattactatacctatatatatatatatatatattcatttacttaagtactggtgcattggttggtgaatgtatatcgagaacaaaattactttcatttttcataagccaattaatagag

SEQ ID NO: 225340 - DNA, 383 bp, Glycine max
  unsure (1)..(383): unsure at all n locations
ctaacgaacactgagtccttagaagaatggaaatcctgactaagttcccgaatgtgtaaagaatacaaaattacgtcatgtcatacatcttgtattaactgtgacatttaagaatcaatttgacattaaagtaagctttttaagaattaattcaaaattaacttgtaaacntcattgactacttcgtcatcaagatatatacttgagataattgtcacatcttttacatattcaaagactaaatcataattttcattcttctaaggtctaacggcgtttatgatttgatgtccgaccatcaaaatcaaggctcatcctcatagatatatctatcctcatgtttaacaaatcatcttgaaagttgaggtaaccataacttctat

SEQ ID NO: 225341 - DNA, 506 bp, Glycine max
  unsure (1)..(506): unsure at all n locations
actcaagctgacaaaccagtgcctangtggactagttagaatcaaagttgagttgntgtgtgtaaaaaattatgacattcagaaatgtactttagaaagtagagtgactaaaacagaaaatcaaggaagtgaattcttatttactctatttattatcgacatgcttgtattcatggttaattctaatacattagttaggaagttggttaccctgattagctttataagctcgattgtatccttgtaaaatgatctttctcattttaatacaattttatttttaagttctgtaatttttctctaattatttcatctctcttgagctcaatcatgtntactaattactaacaatatanaacggacagagcagtgttgatcaatctgattatatgacacatcataacatgtagaanattagaaacaaaagtatttggttgatgtgtttntcatgaaacccacatatttgttccactatttttatagagctacatcttttcattaaatca

SEQ ID NO: 225342 - DNA, 419 bp, Glycine max
  unsure (1)..(419): unsure at all n locations
agctcggagaggatgcttcaatggatgactatattatggtgacanagacagacggcggagcaccaaactgaacgaagaaaaagggagagaagctgaactttgagacgtgtctcacaagactctcattcatcaaaggtacaacaagtgctacacatgcttctagatatagactaggtagctcccttgagaagctctcttaagaaaattttcttgagaagcttctttgagaaaacttccttgagaagctagagcttagctacacacacccatctaaaaactaagctcacctccttgagaagcttccttgagaagttagctacacacacccatctaaaaactaagctcacctccttgacaaaatacatgaaaatacataagaagctcctactacaaggactactcaaaatgccctgaaatac

SEQ ID NO: 225343 - DNA, 500 bp, Glycine max
tagaataagtgctaaagtaagttgtttacctagatgcactctggcttggtgttactcatgcttaattggttctaaggattattctgcagttatgaatttggatgattgttgaagtttttgaaattatttagttagttgctactaaccttttcagggcaacttcacctccatcatttccaatagaggtgtttgttcactgtgacggagagacaaggtctagaagactttgatattatatcaataaaaatgaagggaaggggagccatcaccaattatgatttgaatagctacgaggtgaatggcatcatgaagagtaagattacaacatcaatgtatggatcggttactctgaagagagaaggaatcgacaatgaaactgaagcatgttcccttgaaatgaagagtaagattacaacatcaatgaatggcatcatgaagagtaagattactacatcaatgcatgcatattagaatgaagacaattatttcaacacgaaata

SEQ ID NO: 225344 - DNA, 458 bp, Glycine max
tctagaacgaccgcagcagcaagctgagatgagaaggttgaacgtttatttttctgctcttatcgcggaccacagagaggtacccggagatatgccgcggggcgcaggagaccttggggacgtcacgcggggtgctattgcccaaaaccaacctcgaccaatcccgacccaacccgggcatagtcggtcagcgagaacctgtgatgtacctaaacaggcgagctcctggccgtgaacagataacacgaacaaacaccaccaagcacggaggcttgcgcgagctggccagctgtgaaactcgattgatatgtgagacatggtctctggtaatcgattaccaagggtgggcaatcgattacaaggcttaaatatgacgacagggggctaagacggtctctggtaatccactaccacgggatgcaatcgaccaccacgcttgaaaaccgagccaagacgct

SEQ ID NO: 225345 - DNA, 361 bp, Glycine max
cctcccactaatacatagagggactaattagaaggaggggatgggccttgattacgcccatctagtctacccaattaaactaattacaccccacaactcaaactcacagcctaattattcaagtgcagaggttctgacttcccaggcgacattgaccctcacaatgacagatatagcccaagcttatttgtgtcgaaattgaatatctttttttttatctttctagggactacatatatgctccatttggagttatgtagtttcctataggccctacacaaggcagataggtcaagttagcacagaaattcaaaaataagccacaatatcaactagctcaatatttgctagacaaaactaa

SEQ ID NO: 225346 - DNA, 362 bp, Glycine max
  unsure (1)..(362): unsure at all n locations
tagctaaacctacttccaacccagccccattggtacatgcagantaaggagacaaaacagacaattttcccatatacaattgcatcagaaacttgttatcagtctttacattaattcacataatgacagcaaaaagttactgacaccaagactcaaccttgtaaattaacatgatctcagagtgaagttcatgacatgagagagaaaagtcaaaaagatcatgcatatgtaaatgtatataattacattgatgaccacgtctaccgtggaccacctttataggtgatttacggtggcccactttttcaatcccttggatcatcttaagtcacggaatatctacatttacatacagacttttc

SEQ ID NO: 225347 - DNA, 447 bp, Glycine max
  unsure (1)..(447): unsure at all n locations
ntaagaaataaaattatagatatggatactcatgttcttgtgtggcttgttatgactcccaatagccgcttctttaatcaaatatagaattcattgcagaaaagagtcaatacctcaagatataaacaagcaatttggacacattttgaaaccctgaatgcataatcaataaccctgataaaataaatgaaagtacaaatcagtaaaagagagacattttaaactttggctgaattataattataatagtttacaccagagaataaatatgggaggtaagaaattctgagacctcattcctaaatcaaggtcaataccactgagcatntgagctgctnttgaccattgcttctcagattcataaagcttagcaagtttctctctaataactaanacctatgataannaaaagtggccattagagtaattgaatngagtcaaccaaat

SEQ ID NO: 225348 - DNA, 485 bp, Glycine max
  unsure (1)..(485): unsure at all n locations
actaagcttgcggattagctttcatcggcgaaaggactgaatttggtttgtaaagaacacaacttgatcatcctactttgataaatgagaaagctacggtcaatgaagagaatgagaacgagggaggaacccatgttgtgactaccattcctacatggctaaatctcccaccagctccataatatcaatactccactaatatcagcccttctcattacccaccacccaatcaaccaaataggctatccctatatcaggcaaaaagctcgcctgccgcacatccaataccatacacaaaccataacatcaactagggaaggaattttctagcgaanaagcctgtagaattcaccgcaattccggggtcctatgctaacttactctcatatctactcgataattcaatggtagccataacactaaccaaaggtcctcaaccgtcattttttcgaggatatgactcagacgcaacatgtgcttacaca

SEQ ID NO: 225349 - DNA, 476 bp, Glycine max
  unsure (1)..(476): unsure at all n locations
ctcaagccaaggccagattctcgtgcatgcttaggtcttcttattaagaacaatgccaaactccccttaaagaatttgatttcaagcttaaataggcgggttggtccgagctcacgtgcttagcgcaaatataaatcgcttagcgcgcataagtggatttcagcttatcgtgcttctctcgcttagcggatgagctgaagtggtgcgcttgatgacctggagcggtgcactcagcgaacctgacagcttatcttcttctggatgattcctcgcgcttagccactgagtgtcgcacatagcgaatgatcgctaagctagaagattggcttagcgagaaggtaaaaatagcatttttgccaatttgcctaattaacccgaaattgagagaaattgattattaaacacacagaacagangtttaaagtatctattacctatatgtaatagaaaggacttatcatattacgaaacaacta

SEQ ID NO: 225350 - DNA, 329 bp, Glycine max
ctatgattaagctctgatataataagagcttgctgaacaactgcttaaataagttgctacccaaatttgtacaattatatttatatattcagcggcagctatctgtgtgtgtttgccattggagatggagtcctatgcaattgataccggttcatttcacatttatgttattttgttttctagaaaaaaataacgaggggaatggagggagtctggcaagaaaagttggttgcttataggtgtttgggtaagcactaatgtggcaagatatatttctttagggttatgatgctaccaaagctctcgaggcaacaaatggaactatgcta

SEQ ID NO: 225351 - DNA, 446 bp, Glycine max
  unsure (1)..(446): unsure at all n locations
agcttgcttctacaatctccccctttttgatgattacttctctgaaatcaagaaacacatacacacactttttcctagtcgaccactcacttaattttccattctcccccgttgtttttgagtttatgcttcacttgaaattaagtaaattactaatgtgagttcttgatttaatccctatttctctccccctttggcatcaacaaaaagccaaagtgcgtaacaagtataaaacatacatacactactaatcattcacaagacattcattgaagaatataagccaatcatgaagcaagaaacatgaatagatcaaatatatatatataaaaaaccacatactcatatagcataattcataattgttcagtcatatcatgcaaataaaagaaatactaaatngttcaaatgtcataataatatagccaaatacacagctagaaaac

SEQ ID NO: 225352 - DNA, 434 bp, Glycine max
  unsure (1)..(434): unsure at all n locations
accagtggaacactactcttaaaacaaaaatggcgtacaacctcctnccataaatacaaacatcaatgtaaatttagagcaagcttatgcacatatttccttacgaacgttcacttgcacaagacatcctatcaactaagaaaaatgcacccatatacaatcaaggtagcttcattacctagattatttacatgtacttccaaggtgtatttgttatttacatcacacacgcctccttggctgaatttacatacatgcatactcaaagcattntggggtaccaaaaactgcacatgcgctcatcttggtatttctaatacccatacatatacaaacttcacgatgaatcttgactacctacacaataagggtgctacattcatggcttttttcaagtttttgctacctaaagccacatgcanattcaagcatat

SEQ ID NO: 225353 - DNA, 312 bp, Glycine max
agctcttgtccagttagctgattgtagtcatattatttacataataactgataaatcaccgggtgcagagtggatagcattttgcaaagacaataatatccagctggtgtggtaatttaagcacacgttgtcaatattatttgttcctgcgccttgaaataaaatgatgataaagatgcggcaagtgaatttgccgcaattgctacctttttagcaaatccgaggcacctaatggaacaatatgatcaaattggcgcaagactggaccgcttgcctttggcccggtttcattatcgtatatttggtattata

SEQ ID NO: 225354 - DNA, 299 bp, Glycine max
  unsure (1)..(299): unsure at all n locations
tatacgataatgaaaccgggcctaggctagctttccaatcttgcgccaatttgatcatattgttccattaggtgcctcggaattgctaaaaaggtancaattgcggcaaattcacttgccgcatctttatcatcattatatttcaaggcgcaggaacaaataatattgacaacgtgtgcttaaattaccacaccagctggatattattgtctgtgcaaaatgctatccactctgcacccggtgatttatcagttattatgtaattaatatgactaanatcagctaactggacaaaagct

SEQ ID NO: 225355 - DNA, 427 bp, Glycine max
  unsure (1)..(427): unsure at all n locations
agcttgtnggagaatcaatatactagattatatgtgttctatccntccactatacactcatttgtacatgaagtataaccccatgcccagttttcatgttctaatttattcttctcaggacgagcctccaagtgaaagaaagattatcaaattatgtgaatatgctgctaaaaacctctttcggattccaaagggattcttattattttattttgtttctgtaccgctagtttcttttttagacaaagaagatgaaatcagatctgcttgaattagctggatccgctgttgaagttcactatttccgccctttctgatagatagcacaatatcttgaagaaaggtgctacaaataactcagatctgagcacattaaactggtcaatattatagcggaatccttccacaatgtgctttccatttgtaa

SEQ ID NO: 225356 - DNA, 453 bp, Glycine max
tgcctaaatcggcacacaacaatgcagaatgaaaatgacgaaaattcacgggcgcgatctattgagagaagagaagaaacgaaggaaggattctataccatcgaaacgctcttcgaagaagacattggcggaagcgatggacaagagagagagaagaaagagagagcggaggtcacggcttcgcacccgaaacgccatcgtcaacgacggaacgacagagctagggatgtgtagaaatgaacgtgagaagttcgaatttgagtgagtgaggctacctgttctatatagcggatctaattgctttgggttttcagtggagtggacaaatttggaaattgaggtggctcagtcctacgtggacacgatgtggcagttttgaaccatagtggttatgtcacgtacgtcttgattgtcattgatgttgcgtggcactatctcattggtaatactaca

SEQ ID NO: 225357 - DNA, 298 bp, Glycine max
  unsure (1)..(298): unsure at all n locations
ctcctgatgaatgacagtcttgcgagacatctttcccagttccacttctctcncnnnnttattccctncaaaancgcctccccctctctctttctctcctccttctttttccccatagaagcatctcttcaagcttcttatccaaagctcatcttgtgggtgaagctccttcttccatggcttatcccctagtggaaggngccctctctcccntcttctcctttgtctaccactgcatctccctggcggaaaaccatcacttaaggacctcattgaagcttaaagatccagcgttcat

SEQ ID NO: 225358 - DNA, 457 bp, Glycine max
  unsure (1)..(457): unsure at all n locations
tggagtagaaacatgggaccaactcatgttatttcatattgaatttcgtatctagncaaggtctgagagaccatacaagtttcctaatgatttctaattatgtgggccattaagtctatcatatgctgacaatagacgagaagcccatgaatctcttcgggggcggagtaggtgtctgccatcgccttggccttggctaacaagcggngaagttcttgactcccattcaaggtaagagcaaaccgatccatccacatggttgcctcttggtgtaaagagtcgatcacccttcctctagcctctttttccgcgtatacttgagcatactcgtccgcgattctatgctcgtgggccgtggctagacctaactcttcttggtacttggcgattatagctagcatgttggtctccgtctcgcataaacgctgagacaagcttcttttggaccttgaacaag

SEQ ID NO: 225359 - DNA, 441 bp, Glycine max
  unsure (1)..(441): unsure at all n locations
agctcttcttggtgggaagatgcactctatctcttataacggcatgatcactancagatatattctcaatcaattcacgtgcctctattgggattntcaactgtatcttccctcctgctgaagcatctaacaattgctgggtttgcagtctcaacccatctataaacatgttcaattgaatcggctcacagaacccatgtgtggaagtctttcttaacaaaccctgaaacctctccaatgcttcactcaaggactcattacggaactagtgaaatgatgaaataacagcttccccttctgcagtctttgactcggggaagtatttcttcataaatatctcaacaacttcctcccacatcttcaaattggtacctctgaatgaatgaagccacttcttggcttctcccgccaaagaaaatgaaaataaatcgagcttgatgg

SEQ ID NO: 225360 - DNA, 391 bp, Glycine max
  unsure (1)..(391): unsure at all n locations
tgaaacttcttgcttttattcttgaccatagagtggtacctggagatatgtcgcgggggtcacgagaccttgnggacgttaggtggggtgctattgcccaaaaccaagcttgaccaatcccgaccctacccgggcatagtcagtcagtgagaacctgtgatgtacctaagcaggcgagctcctggcagtcaacatgataaaggaacatagaccacctagcaaggaggcttgtgtggtggctggccagctttgaactttgattgatatatgggatatggcctctggtaatcgantaccaacggtgggtaatcgattacaatgcttaaaaatgaagacaagagactaatatggtctctggtaatcgatntaccagggagtgtaatcgattact

SEQ ID NO: 225361 - DNA, 428 bp, Glycine max
agcttgtacgaatataagagacatcttcttctttcttggagatctttgactccatgtcatcgaatagcatgtccacttgtaactcaagagcatcaacctttcaccaacaaaggtctgaagaccatcaaacctatccaaaaccttttgaagaagagaggaatcttctccaccatgtaaatgtccttcttcatcaatgggttgagcaccctttttcacccaagagccatcatgctctttacgataaccaaaggatgcaatcatagtggcaccgattaagaaggatctcttgattggaacataacgttcacaatcaggagggatgttatagtcgttaaggaagagagcgactaggtgtggatatggcaatgtagcacttaatcgcaatgccttatgcatgccatatcggactaaatgtgcgcaatcaattt

SEQ ID NO: 225362 - DNA, 446 bp, Glycine max
  unsure (1)..(446): unsure at all n locations
actaagctgttcttgatttttctaggtgtgaacaagcttattctttatctngnncntcgnntaactgtattgggcgtgcggccacgatcaacaaagtacttgcgacacctactatatgttgatttgaccaacgctgttatcggtatgttgcgacaatccttcaaaaccttatttatacattctgagaggttagttgtcatgtgaccatatcgacgtccttctctatcataagccatcgtccattattcctttgaaatgcgatcaatccatgttgctatggctggactcagttgacggatattttctaaatcttgatgaaaaatgtgcttgcaaggagtgtatcctgcacataattagttagcaacaacaatcttaagtatatatgatacttatattaacatgaccatcataaatgagatcctacccaacttctcaacacttctttt

SEQ ID NO: 225363 - DNA, 307 bp, Glycine max
  unsure (1)..(307): unsure at all n locations
gttgggggcgaaatcaagcccctccaaagtgctttgcatgggtataccaccaactgtttgtcctttgatggcatatctgaaggaaggctccaagtcggctagattgtggtggggaatttcatgtgtctcccccatggattgagagacatgtgcatgactagtttgaggttgcctgcttttaatgactatgggagcggagttatcgacattctcactgggagtgtatgccacattgcgtggtgtataattgggaggcnacccatatggggggaaagcatgatttggtttcgcactatatgagggctgt

SEQ ID NO: 225364 - DNA, 460 bp, Glycine max
  unsure (1)..(460): unsure at all n locations
tctcaggctcaaatntctagccaacctctagatcttatcatatttgttttacctaattctgccgattcaggaaagccgcctcaaactggttctcaacagattgctgtgcatcctggacaggtataaataaataaatacatgtgtgtgaatggtttgaggttatatggctctctacatatttttccattattttctgtgggtgctaagggaagaatgtgggaagcaatgcaagaattagatgttctggattgaacttgcatcaaaatataacaaanaggaatgcatcctttttttatgacaattttgtggatgctagagaagaaattacgacgacaatttgcctgagataagatcctgacatagatagtgtacttatgaacaagatangtntatttcttctgttaatgacaactaggaaattggcttttacttaacctgctggcatatatattgttcacca

SEQ ID NO: 225365 - DNA, 414 bp, Glycine max
  unsure (1)..(414): unsure at all n locations
ctgcagcntgccaactcttataatgatgaactgnnnanatcttttttattcttgaacggccttcaacgtctaatgaatactctgatctcgatcgtcttaatccatttctataatccaacgcactaagacaaacgtccagagaagacattaccacccccatagaagtattgcgctacatcaaaacttcatattctctttcacatgttcacattgcacacagaactctattgacaaccccggccacatgtgctactgatgaaagatcttttctacaactaaaattacctcctgagcgcgaaaactcctccagtgcacacgtcatcacagatcccacgaattgcaactctggacaacatcctctgcttgaacacacaactgttcgagacagcacaagcttataatccaagcacaaac

SEQ ID NO: 225366 - DNA, 419 bp, Glycine max
  unsure (1)..(419): unsure at all n locations
aactaacttaaagctcgcctctttggtgagaaaattttattgctnngaagaggctggagacatgacatccctcaaaagtacctttattgagaagtacacgatggagggtgatagagagctaggaaagctaaagcagtaaggggtctggcatcatcatcactaatgttaaggagaacttggaacgcttatgttctcaataaatgatcgcagttgttggagaactacacattgatcaacagataaaatgaaggattgagttgcatctatgtcaacccctctgccttaggaggaagcttgcctcacgggaagtaagaagtgccattaaacagaccttggattaaactaagaactaagtctcaatctatttgccgagattaaccatgatgaccatgaggcaaacatgagatcactgtccctat

SEQ ID NO: 225367 - DNA, 437 bp, Glycine max
agctctgctgatttagttttcgccatcttatttatcgaagtgggtctaaaaagaggtaaatttaatcatcctgcttgaacgatctaaaaagatggtgggctacatgtcctcactttcatagggctacacgccctcacctttagagggctacacatcctccccttcataagactatacgtcctcgccatcagagggctgcacgtcctcgtctttagagggctgctcgccctcgccttcagaggactacacgtcctcgccatcagagggctgcacgccctgctcttcaaaggactacacgtcctcgccttcagaggactgcacgtcatcaccttcagaggactacacgtcctctccatcagagggctgcacgccctcgtcttcataggactacacgtcctctccttcagaggactgcacgtcatcaccttcagaggact

SEQ ID NO: 225368 - DNA, 436 bp, Glycine max
tgcagcatgccagctagtcaaggaagctacctagtttattctataaacacgtgtaacacttgttgtcactttgatgaatgagagtcttgtgagacacaactcaaagcgcaacttctctccctttttcttccttcaattccgcgcccaccctctctctttctctccctctttcttttcctgcattgaagcatcctctccaagctccttcttccatgacttattccttaatggatggcgcctcctctcacctcttttcctttgtcttccgctgcatctccatggtggaaaatcaccattaaaggaccccattgaagctcaaagatccagcctccatataagcccctcaagcaagcttccatcaagtggtaatcacagcacaagagcttcaagtacgcgctccttaaacctccattaatttctttgatataccttctct

SEQ ID NO: 225369 - DNA, 467 bp, Glycine max
  unsure (1)..(467): unsure at all n locations
tattacgtgacctataaaactcaactttctttataatcaacctgtatattgactaacaattcttattgcatattcacattcttggtctttctttgtctaacatacatacttgctcaaactcatgaaaaggaacacaaactccatcacaatcatgcattcaatccaaaaatcaattcataacaccaattttcacaaaaggacaaaagtgtttcactgcaatatcatcaaagtcaagttaaactgttccatatgcttcanaacaagtatactagctaaccacaaacaaaataaacaacagtgtatataaacattaaccaaaatcactaaaaacaatgtactgaaactataatcattataataataatccaaaaagcatttgcaggaaattagaattcctatgactagtcctgagtgtcccgtgtctgaacatcctnctcatctgtcagatgaaagtactgagtagctgg

SEQ ID NO: 225370 - DNA, 337 bp, Glycine max
  unsure (1)..(337): unsure at all n locations
agctntccatgctctgctggctccacgttctattttctcnctccgcttnttcagttgtgggcatgctacaagaagtgggaaccaaaacttcactgacaagtgggtcatttgtgctcaaaacattatataccacngatgatgaacttgatgaattggatccaccactttctgctcttggcatggatgactcatcattcttgtccaaggaactatcttagggaggccgcaaggttgtacgatacgagctcttgcgagaagctgggaatactactgcacgatgttcctatcaatgtgtcctttccttcatcttcctgatatactcatgcgttttaatatc

SEQ ID NO: 225371 - DNA, 484 bp, Glycine max
  unsure (1)..(484): unsure at all n locations
tcgaagagaatggtacaagaatatttggcacatagntaacctctcgttagatgctaattaatggataatggctttcccacctttagataagataacaaaaataaaaactaagccagacgaatagcaatgaaatggaatggggaagagatgcttaccgcagagtgcacaggttgttggagaaagacagaaattaagtcattgattcgatcattaagtaaaacaatgagatttttttttattgctgttgtttagctttaccaaaaatccattcataaatgccttgactgtgcatgtccatgaatccatgcgagacccaatgattctgttaatcgaagacaattactatgcctctgtgtactcaagcccttattgctatgtttatgngtctcacgcacgtcttttattggtctgtctctatgtctcacattcttattggtccgcttactcctctagtccctcatgatgtgaaatcacatacagttcc

SEQ ID NO: 225372 - DNA, 467 bp, Glycine max
  unsure (1)..(467): unsure at all n locations
tgtgaacacaatntatatannatacaagaatacgagtttaatttactctaagaatagcngaaaaaatttaaatctttattataacaataataatgaacaattaatatttatctagaagaattagttaaaacataaaattacatattaattacaatataaaattaaaattaacattaaatatcatcttctaaaaagaggaaagccctattaaaaaaaatcaaaattacaaaattagaagaaattaaaataaaacaataattatgatcttttacctactttcttttctatattattttcaccccattttctttctaatgtctctttgactttctctttcacactatttattacatgtatattcttttctctatacctttgttcattctttctaagtctcttctatttatatacaacttacctctcttattacatgtgactgtcatcaattatgaaatttactcttcatc

SEQ ID NO: 225373 - DNA, 410 bp, Glycine max
  unsure (1)..(410): unsure at all n locations
atcttcttaatctcacctgaggaagatgaattcttgtttacttcatgcactcctctaatgacaataacatcatttctggcactaagttgctggaagttggaagtcatcttctcaattaaatttctggcttcagaaggggttatgtctccaagggctccaccactggcagcatctattatacttctctccatgttactgagtccttcataaaaatattggaagagaagctgctcagaaatctggtggtgagggcaattggcacatagnttcttaaatatctcctagtatttatataagctctctccactgagttgtctaatgcctgaaatatcctttctgatggtcgcggtcttggaagcaaggaaacttctttctatgaatactctcttgaggtcatcccacctcatgat

SEQ ID NO: 225374 - DNA, 452 bp, Glycine max
  unsure (1)..(452): unsure at all n locations
ttctatcagcaaccaaaaaacttgtaagtaaactttctcttcttatgaaattgagattcactcaacgaaacaaactatatatgtggtacaataatacaaaggcattagcaataattcggaatacacatttaccttgtgtttggattagaaatttccacaattcaaggaatttgaaatgtctagaatttgaattgcattgcatttaatttccttccattttcaaatgctnntgttggataaatcaattcacatttctttcattttaaattctttgtttggataggacaattcactctcctccatatgcanaatttcacatttatattttaaatcgatgaaattttaatattaaactttatagacaatatacacaatctaattgtgaaatattaatcaacaaatattttcaatctttaatagtctataaatataacatattgataaatttaact

SEQ ID NO: 225375 - DNA, 442 bp, Glycine max
agcttgtagaacaccaaagatgtaagacaaatttttgaaagaagtgtcaattttgaaacaataagagctaatatacaatcagatacctgaaagtgataatttatgttgctatgatccctaacaatgtataattagtccctgttagattacatttatctttacatgatcttgtatatattattacacaaaaacttatgattctgattgatatgtaattacctaataatcagtaattgattgatatgtaatcaatattgattctgatttctccattataaataaagatgagatgtggtcatctaagacacaaaattacagtaaaactaaaacactgctatatggtatcaaagcttatgttattcttgacagaggaataacaaaattcgttctccacaacctactgtcccagatggacctctctgctagtcatcctatccagcaa

SEQ ID NO: 225376 - DNA, 413 bp, Glycine max
  unsure (1)..(413): unsure at all n locations
tttaaccttgacttggtagaacctcttgaccggttgatttgttcccatgcttgctaaagtgagacaaaagctggtgcanatcanaactccgatatctcatgggtggaatggatgaatgcatgaaagaatgcatataacacagatgcaatctangaatgcggtggtccggggaattcgtcctcttcttagacacaacgtctatgggtagcaaagtgccccaacgtacgtttttaagaaggtgacacggaccctccgttggtttgtttacagaagggatcaagacagaacccatatgcgatgcctatgcaaaagacacaatgcgggaatgtacacagtatgacaatattcactgaacantaagcaaagggtatatgatacttatgcatggcagtgtgaaaaatggcacgcaacgt

SEQ ID NO: 225377 - DNA, 440 bp, Glycine max
  unsure (1)..(440): unsure at all n locations
agcttcattaccccaaatgcaacacattttttgtgtgtgtgtgngtgtctccctaacttcccctcttgctattaatgtattggctaagtttggacatccgtgaaaaattgaagccataaacttccaaagaaccacccttaattcaaaaatcttgattatgcactttcacttttgaaactcttgtacagaagcacgtatatatacgagaaaaaagggggggtggtccattcaactgctttataatagacgggtagggtgtcacattgcaaaacccttctcacaaaaaaagcacgtccacacaaattacttccctaagatttatcacatccaaatctagtcttcatcttcaagttgctggagcgagggaatggaaggtgattgattgaactccacctttctaatggtgcctactgaaattggacccaccaagagacaacatt

SEQ ID NO: 225378 - DNA, 313 bp, Glycine max
  unsure (1)..(313): unsure at all n locations
tcacgtggtaagggtggtaaaaaaaagaagtcatgcagctgtgtgcaaacctaaaataaatctaattgattcacaagttgcagtgtcaagtatttcatattcccattcttttctgattctntttccaaaataaaatctccatttttaccctttgattgaaacaatcatgataagatacagagttngattttcatttttgtgtcttgataacagatttagacattangggaaattggttttgctatttgtaaagcggctgttaacattataactnttttaaaccttttaatttaattggttttgcacagttgat

SEQ ID NO: 225379 - DNA, 431 bp, Glycine max
ctgagcagcaactagcattggaatgcgaagccctctttattttaggatctgttcctgccatctcaaacaaacaaatcaaacgtaacaagacaattatagttgttgtttgaatacctcacccactcaagtgtatcacacaattatggcttttctctaatgaaacactcttgccttttaccactctaattccccttgagttcttacgcaattcaagagattatggccacaacaaagaacaattcaccaatatgtgtaaggtaaggctagaaagacaaggaaaaaggttaaccaagaaaaaggctaacaatgtttttacgcacaaatgaaggacataaaattcagaatttacgaattcaagtaacaatccttcatgcaaccaatatattaccttaaagagaattttttaaaaagttcttcaagcatgaaccatt

SEQ ID NO: 225380 - DNA, 411 bp, Glycine max
  unsure (1)..(411): unsure at all n locations
acctatgaaactaagctaccttttgcaacgcatcttattctttntgatacttgcgcccatgactcanggtcgtcaagcgcttaccttcaataaggttgagttgttcatagcgtgctcgagcccactccgattcttctaaacccgattctgctagtatcctctgggaagggatctctacttcaaatgggagtaccacttccattccataaaccaaggaatacggtgttgccccagtagaagttcgtactgaagttcggtatccatgcaaggcaaaaggcaacatctcatgccaatctttgtatgatactgtcatcttctgaataattctcttaatattcttgatggctgcttccacggctccgttcatctttggccggtatggcgtggagttgagatgctggattttgaaat

SEQ ID NO: 225381 - DNA, 425 bp, Glycine max
  unsure (1)..(425): unsure at all n locations
agcttnttatccaaggcgctctcatggtttctatatctcctccntccatggctcatcccctagcggacggcgccacctctcacctcttcttctttatcttccgctgcatcttcattgaggaaaataaccattgaaggacctcatccaacctcaaaaatcagcctccatataagcttcacaagcaatctttcatcaagtggtaatcaaagcacaagatctccattacgtgcctcttaaacctccattaactttttttctttaccttctcttccattgttgcttcttcatttctctccatgcatctccttacatgtctcttgctaaatggttttaacatgattctttatagctctcaccgatctaaacctgctatataagctagattatcttgtctatggtttacatttcttgtcttgttctataac

SEQ ID NO: 225382 - DNA, 395 bp, Glycine max
  unsure (1)..(395): unsure at all n locations
cctataaaactcagcttggtatctccttcttcactacatcaagaatcaccgttgttgtgtcttctctgtggctgtcttactggtttagctccttcctctaaatttattcgatgcatacatgtggatgggctaataccaggaatgtccgccagggtccagcctatagccttcttatgcttcttgaaaacagataacaacttctcctcttgctcatcagcaagggaggaagatataattattggaaaactttngctatcatccaagtaaaccgtatttaaatttgatggcagaggcttcaattctggtgtggccggctggatagtggtagaaggagatggtttctcagcctgtacctcataaagaaagtcagaggtatgtgtacttcctgacacatg

SEQ ID NO: 225383 - DNA, 437 bp, Glycine max
  unsure (1)..(437): unsure at all n locations
ctatccttatggcttgcctccggacttcaccacccgtgccatcctggaagatntaagccaagcccctactttcgaggggcaactcccaccttatgacgactatcccgagcaagacgatgaggaaggagatacccatcttggccccctgctccacctcatagatccgtccccacatgaactaccccaaccgaacatagtccgccatatcccagcctcacccacacccgtaaaagaatctgttcccttcgcggaagataagggaaagattaaggcacttgaagagaggttaaaagcagtcgagggccttggcaattacccattctcggatttggcggatttgtgtctcgtgcccaacatcgtcatccctcccaagttcaaagtaccagactttgataagtacaaagggacgacatgtccaanacgggcatctcggatgt

SEQ ID NO: 225384 - DNA, 274 bp, Glycine max
gtatacatgactctgctagagcttacctttactgaaccctaaaagataggctaacattttgctaaaacctaagcacttacacaatgaacgaaagctggagttgctgcacatgatgtccaaccgtatggcaaggaatcaaatcgggctgcacaatgcacaaggcgaaataaaatgttcaaagaagaactgaagctgcacgatccacgatgtcggatacaatgtgcaggaccttccgcccgaatatactggacacatacatctgttatatctttaa

SEQ ID NO: 225385 - DNA, 486 bp, Glycine max
tgcttctacaatctccctctttgtgatgatgacaacttctgtatattatgaaacacatacacacactttgtcctagtcgatcactcacttaattttccattatccctctttatttttgaatctatgcttcacttgaaattaagttaattacttatgtgagttcttgatttaattcctatttctctccccctttggcatcaacaaaaatccaaagtgcgtaacatgtataaaacattcatgtactattaatcattcacaagacattcattgaagaatataaaccaatcatgaagcaagaaacatgaatagatcaaatatatgtggtgtagcaatggcgtgtagcaagcaaatgctcacctctccctctaaaatttaattggattgcacttctcccaattcaattaaagttatctctcaacacacacatcaaatattcactgaatgcatgtgaaattacaaaattagccctaatacatgaactagtct

SEQ ID NO: 225386 - DNA, 434 bp, Glycine max
  unsure (1)..(434): unsure at all n locations
agctggancctcacagagatggctgctatctttatatcctagggaggggatccgagctaaatgctgatgggcagccgctgaagatactgaggaagaacatgaccacccactacaacaaaaatgacctatacctacggacaaaaactgtcactataaataaaaaatctgtacgtaaatgtatgattgactttgtcctacagacatttctacttcaactttgagatggcatataatgacggctaactcactataggttttacctactatgtatacgcgtgaggtaaaagtcattaacttctactcacatttattaactgcaggtaaaagactttaatatgtatctatcatcttcgactgtaagtaaacagtatcaacttctacttacatgttctaactgtaaggaaagtctttaatatgaacatcactcgagacca

SEQ ID NO: 225387 - DNA, 477 bp, Glycine max
  unsure (1)..(477): unsure at all n locations
tctaaggaggtgagcttagttattagaggagtgtgtgttttctagctctagcttctcaaggaagttntctcaaagaagcttatcaaggaagttctctcaagacagcttctcaaggaagctacctagtctataaatagaaacatgtgtaacacttgttgtaactctgatgaatgagagtcttgtgagacatacttcanagttccacttctcttcctcttttattccttcaatttcgtgctcccccctctctctttctctccctctttcttttcctccattgaagcatccttccaagcttcttatccaaggctcatcttggtggtgaagctccttcttccatggcttattccccagtggatggcgcctcttctcacttcttctcctttgtcttccgctgcatcttcgtggtgaaaaatcaccattaaaggacctcattgaagctcaaagaccagccttcatatnaagctcacaagcaag

SEQ ID NO: 225388 - DNA, 430 bp, Glycine max
  unsure (1)..(430): unsure at all n locations
agctggangatcgaagagagaaacatgtgttctttgtctatgatgcaagctcaaaaggctacaaattgtacaatccaaacaatggacagacaatcgtgagccgagatgtccagttctatgaagaaggcacatggaattgggaggagaaagaagacacttatgatcttctcccgtactttgaagaaatagatgaagaagccttgactccaaatgattcaactgcagcactttcaccaactccttcaaccaatgaagcctccatatcttccgaagggagttcaagtgataggccaacaacaatgacaaatactcaagaattatatgatgaaactgaagtataaatgatccgtctcggcttttgtgacacggaaccttaaccttgatgaacacgaaagaataatgggaacaaccactgaaaaaaaaaaaactt

SEQ ID NO: 225389 - DNA, 369 bp, Glycine max
  unsure (1)..(369): unsure at all n locations
tatatgaganatatgatggaagtctagtatataactggntgttgcaccaattgatatcaaccataatatccctaagataaatattaacatcatggtaggctatataagggacatcttggtgcataagacccatattagcttaatcatcgtaccaaatagataagttgtcatcccaagcctaaatttaaaaccacttagtagcttgccctttgccttgaggatgaaattttcattttgtgacgactaatagttgtcataattgttatcaaccactcaacaatcatcacaaaccctaatcccaaaactattcttgctccttctctctttctcataattgataattttccttaaatgccaaaactatctatc

SEQ ID NO: 225390 - DNA, 443 bp, Glycine max
  unsure (1)..(443): unsure at all n locations
agcttcgccgagtgtccncattgaagaacctttattcttatcttttaaagttagtgataaggctaaacgaaaaattacggaacttataaaaactaaatccttaattgaaggcgtaggtgacaatcatagcgaattactaaacaagattagtagtttgcttaaggtcattccagatactccccaagcttcggaaaatacttncaaaatggtaacaagaagtacctccaaattaattaatgttattaatgaagatagtgaccaaaacttacataacacaactgagataggatcagtgtcagaaaagaatataaatccattaaactccaaacactggaaaaccccctccaaattatattatcaacgtccaactgcccctgaccttctattagaagagagaggtgaaaacaattttaaaagttttagtgcaaataacatctatgaat

SEQ ID NO: 225391 - DNA, 469 bp, Glycine max
  unsure (1)..(469): unsure at all n locations
ctaagcttatcccttgaaatgaggggtggagattagccctggatttatcttatgtctactnccccnagcacacgnatgttcaatatgctggatttgccctggagatttgccctgaatcttctcctctgaaaactattatatttggaaatccttcccaagacaccattgaaccactgatggatgctttggaggaagactattaagaatggaaatagatatacgaatcaacgcagtttattgaacgagtattggatcttgaacagagaatcaatatactagattcattgacttagaatttagtatcaccaattttgtcattgtgaacaattatttgcttataaccaaatttgtacatttgctacttgtttgcgtattgtgatacagcatattaatgcttgatgctcaaaattaactcaaatgatctgagatagcatatgttgttggttgaaggatgatataactatcttcc

SEQ ID NO: 225392 - DNA, 428 bp, Glycine max
agcttttccttgtacagcttaagtccaagttgtctgtttcattcacaatcaaagatgtgaagccttatggagtagttgagtccatggactcctcttctactgactcgaagcacagctggatagtgaatgaccaaaggctgaaggtctacaatggtggcaatattgagagattggccaccatcatccacctccatgacccgcgagggtgttttatgatgttaaagaagtgcttactgaaaggcaacccaagatttctacccttctttctttatgttaattcatgttgacttgatgtatgcttgttaattcttgtgtttgtggatcttgattcattttagttgtgccttatctttcaataatggtgcgagcttgttgttgctatagtgcgatgctgctcaatataatgaatgctctgcatgattagaatt

SEQ ID NO: 225393 - DNA, 380 bp, Glycine max
  unsure (1)..(380): unsure at all n locations
ttatgtatatatgngtatagntctagagagctcttagaacatcttgttcaccttgagagaaaagactaagtgatgaaattgtatatctgtcagtaagatgcttgagagttagtcattgtgcaatcaaacaacaaatctacctggtttgtatagggccaataacggcttggtaggacaaagaatactgggttgtatcaagcttacggtagagcttgagttgtagagccgaagaggaaatgactaatatctataacttgttaaagttagtggaacttggtggtttgtcaagagctgaacatagtctcagtggtagagacaaaccaatataaatctttatgtcttacatgctcttcttttcttggttttctcctttaaactga

SEQ ID NO: 225394 - DNA, 449 bp, Glycine max
  unsure (1)..(449): unsure at all n locations
ctaagtcacctgaggcatgcaagcttntttgtcattcacgcacactgtagaatttttatttttattatcactatcccaaggtcttcattagtcatgtcattatggccagtattcctctgcacaaaattgcgtatcgtatttaatttcaagcgcatataaaacttacatattcatttattatttatatataatactacttataaagttctttcactgcttgaattatgtgacaaaggtttcaacactttgtctatgttaaattgttaataatacatgctaatagctcttctgggaagggtgaagacaaaaataatctaagattaattcaatgagaaaaagtaaaaaacaaatgtcacatgttcaaatttttcactaacattcttaataatattaacaaatatttaccgattacaaactaattagttgcttcacttaacatctcacattat

SEQ ID NO: 225395 - DNA, 435 bp, Glycine max
  unsure (1)..(435): unsure at all n locations
tctctggttcctattattnttaataacgttgctgcttagattatagttattgttgcctggcacgaagaagaatgttttcttctttcagcaatgctcatcaaagatgcaaaaatatatgtgtgcagcttctgcttgaatccttaggctgtttcttatagcctccatgtgactctggatgtggatggaaattgtgaaactatgtactttgttactcattaccattagttccattttttcctatcaacctttaacttagcttcactaaacttgtgttgtgctgatttacagttgtaatttgcaaaatattctcttcgcaggatgaggggaaaacaccatatatgtatgtggaagtggattttaaggaggtagaaactngaatacctttcanattnttaattgcaatgcaacctatatttcttggttgttatggcgtct

SEQ ID NO: 225396 - DNA, 428 bp, Glycine max
aagcataacaagactttctctgattaaattaaagatacaatctttgttgataaaaatgcttcagacacattatgaaagctaacttggcaaggatacaacataaataagtattccttttacacataagcacaagacgacaaaagttcaatgcaaaacagtggggtcaccctaagggctgaatctcaacacttcgcaagtgtgcatgatgacaatccctgtgtagcttccatcccttactttgggttcgttgatgaaattctggagcttaactatgtcaaatttactggatgtgttttcaaatgtaaatgggttgacagcaacaccggtgtacagactgatgatgtacgatttacgttggtagacctaaagaaactatcttaccacaatgaccctttcatcatggcaggacaagctaatacagtatttat

SEQ ID NO: 225397 - DNA, 428 bp, Glycine max
  unsure (1)..(428): unsure at all n locations
agctaaagttatggatcactgtatggctncctttattctcaatgtatacacaacataaaggataaatgtcaagaatgtcaataatacattgaaacatgggtcaaggaatcacaacgaaaagtgtacctaacaacttatctgaatcagtaagtccatttaatgttgaacaatgtttataaaatacattataattgcataactaatgttttttgtgttcagggcacataggcaacttattgttctatgtccacaggacaatattgcggtttggttatgttctctgcggaagaagcctgacgttaacatcaagggtgcagttaacaggttactttctaaatataaagccaaatagtgtataccaattgtagtggttaaacacaatgatttttatattatatacattattgatattttcaaactaatgcaat

SEQ ID NO: 225398 - DNA, 404 bp, Glycine max
  unsure (1)..(404): unsure at all n locations
ctaagctatattgtcatgctgcattgataaagaaaaccttatgtattagggtgtgtccgtgngcgttgagttggttaaggctggttcacgtgggatctcgggaagtggttggttcaactccttctaccatctgcgagggaattcgaattttacattgtaaaaaaattttacataaggtcgcctttccctgtgaaatatttttcgcaatagaaactaatcttctgctagattaggagtgaaaactaaccaattaaatatttataaaattaatacttaaagcatgtttcatagttaaataaatcatgatgatcaaatatatattcttttctaaaagagaatcaattcaacatacaaaatttcacaggaaaatataattatgagtaactattctatacaattaatca

SEQ ID NO: 225399 - DNA, 435 bp, Glycine max
agcttcactggctagaaagagttgaatgttgttctgtttcaccaattatatcatgcgataatttgaacggtcaaaagctaagacactgtgactttatctattttgagaagtttgtgaggaacataatgttgttggtgaacgacaaaagaagaccatcaagactttaatgttcattgagggttgtcctacacgttcgggttgcatggtatgccattaccagtaacttagaaactttgctttcttatttattctaattcttaatcttccaaactatttagacagattcttcatcttttgtgacactacaagtttgtatgtgtttattgacatatttatttgaaagcacatgttcttgtatagttgaacattctatctctctagcatgctatgattatgaagcatcaatgtagatgtggataacatactacacttaca

SEQ ID NO: 225400 - DNA, 495 bp, Glycine max
  unsure (1)..(495): unsure at all n locations
tcttatccatggcaattctgggtggagaaactccttcttccttggcttattccctagtggatggtgcctcccctctcctcttctcctttgccttccgctgcatctccatggtgaacaatcaccattgaaggacctcattgaagctcaaagatccagcctccatagaagctccacaagtaagcttccatcacttagcaacatggagcggagtatgattgatgctgccagtggtggagctcttggtgatatgacccttgcagaagctaggaaattgattgagaagatggcttccaactcccaacaattaagtgcaagaaataatgctattgttcttagaggagtccatgaggtggccatggattcatcttcatctattgaaaatcaaaagctcgaaggaaaacttgatgccttggtcaacctagtaacctagcttggccatgaatagaaatctacacctattgcangaagttgtgtctatgttcttctgagatcaca

SEQ ID NO: 225401 - DNA, 413 bp, Glycine max
  unsure (1)..(413): unsure at all n locations
cctatgaaactcaagccgcaagaatggcccactaagccntcatgagtttttttttncattaagcagggggcctggcccggagctcgaccctttttcgttagtgataatggaagctctacagcccagncaacctcagcatagaaagccagaagacaatcaatcatctgaagccactgttcctggagctattgatgttgcagaacgcagatcacaaatgacatttgaggaggctgcttatcctgaaccagtaccagtaccagctgatccaccatctctagtggtggatccatcttctcccgcgccagaagcaactctcccatctacacctattaatatatccgatgaccctacagtgcgaacacctgaatggattcctactcctccagccacacctgagctttatatctcatatg

SEQ ID NO: 225402 - DNA, 362 bp, Glycine max
  unsure (1)..(362): unsure at all n locations
cgcntattgacactatgaaagaacactcattttatttctcattgacactcctcaattctccttttaccacccagagaaagggacaggggatcgcacgttcatcctaaggaatggaaataccgattcggattaattgccaaccaccgactcctcatctaatcctaaaacaaagcagtctcaactctcaagttataagacaacccattcaatgaacctgtaatcttacctggaaataaaaaataaaataacaaagtgccgcaataattaaaaatgaccaaagccccatccaaagaaccgcgaangatatgttcataaacgaccaaaatacttcactgcacactcacataaaagagtggtaacac

SEQ ID NO: 225403 - DNA, 405 bp, Glycine max
  unsure (1)..(405): unsure at all n locations
tgttgaagganatggtagtgcgaacgatgccgatatttggtttatgaagagcacgcataggaagcgaagccgacaatggtggaaggaatgngtgcacgggtgcaagacatggaggcacagtcggcatgggaagcagagctggtgatggtacgagacttggttgcatgggtgtggagcatgggcacagtcgacatggatggcggaggtggcatggacgacagaagtggcatgggcgacagagtccgcatgggtgataggcgtgttgcatagtagcggagtagacatgagcggagtcgatatgatggcgactggtatcggtgcctgcgcacggatggaagatgaanaatgtggagtgagactgtgaaggctcagtcgctgataaacgtcatcaatggtggtggcaat

SEQ ID NO: 225404 - DNA, 393 bp, Glycine max
  unsure (1)..(393): unsure at all n locations
ntgagnntttgcacatgcaagagagacgatgaacttattattcttactaagcggncagacgcaacgcaagggcctccatgcactgggtaactgttactttccttggatctggccgcgctgtgcatctcttctcagacgtagttcaccccggatcttattcacacggtgtcataaaatatgctagagtaacgaactttcgacttctcgctctagacaatgaatttccaatgcttataatatgagattctccccttacttcactgctgtcatacgcatgcatgaatgggttatatgtagaatgttagctccatagaattcctttctataacattttggaacggggaaatgaatttgaaatcttagaacgaattgctaagccctacctgattgata

SEQ ID NO: 225405 - DNA, 450 bp, Glycine max
agcttcaagaaaaagatggtctcatcaaattctttatttctctaaaggaactctatcactagacctccaatctcttatggagagggttaccactactggaaaacccaaatgttaactcttattgaggcaatacatctaaatatctgggaagccatataaatagggtcttatatacccaccacagtaaaaagagttacaatagatggtagaccatcaagcgaaagcataactatataaaaacctatagacagatggtctgaagaggatagaaaactagtacaatacaacttagaagccaaaaacataataacatctgccctgggaacggatgaatatttcagggtctcaaatcgtaagagcgctaatgaaatgtgggacactcttctattaacacatgaaggaactacagatgttaaaagatctacgattaatgcacttactcatgagtat

SEQ ID NO: 225406 - DNA, 495 bp, Glycine max
  unsure (1)..(495): unsure at all n locations
ggtcagtgtacctgaagatgctattaagcttagtctgctgttattttctttatctngggaggccaagagatggttgtgttcattcaagggcaacaatntaaagacctgtgatgaggttgttgagaaggttctaaaagaatatttcctagaatctaaaactggagagggaaaagttgtaatttcttcattccatcaatttcccgatgaatctttgagtgaggcattagaaagattccgtagcttgctatggaaaactcccactcagggtttttaagagcctatacagttgaacatcttcattgatgggttatggccgcagtcaaagcagttactcgacgctnttgcgggaggaaaatataagttgaagacacctgaagaagccatggtgttgttggatcaagtggcctcagaataattaagaaggcgggggtgaattaattattaatgtgccttgactaactaaaaaattaaccttcttaatgttactaaattcta

SEQ ID NO: 225407 - DNA, 442 bp, Glycine max
agctcgcgtccggcattttggatgacaaaatatatattatagtcaaaagggagagtccacatcattgacaaacaaaacaatatgtcacatcgtttggttgaaaacaaatataaaacaaacgacgacagaaacgaatcgtaataagtaaaaaacaacacaagtacatcctatcatttgaaaattcatttctaccttattttttttgctaccacacacccaaatattatctgcaaactcctaatattatttctatttatctagccaaacacaaactcattatttttaccttgtttctcttcaatcaaaaaacttgaatctttcttttattttcaccatccttatttatcttccatggaccacacacaaccctctttattttatttctctcatcccaatcgacgagagcactaataactaacaaaccgactaacacatcaactaa

SEQ ID NO: 225408 - DNA, 461 bp, Glycine max
  unsure (1)..(461): unsure at all n locations
tctacaggagatttgtatggattttatttctgnggcagcagcttctactgagacttccaagatcaatgtaggatttaaatggcgggaaaaacaagaacatccattcactccactcaaagaaaaagtgatgcatgcaccaattcttgcattacctaattttggcaaatcctttgaaattaagtgtgatgcgtctgcgtcgggataaaaggctgttttaatgcaagagggacatcccattgcttactttagtgaaaaactaaatggcgttgtccttaattattccacatatgacaaggagttgtatgcattggtaagggcattgcaaacttggcagcattaccttctacccaaacaatttggggncnnngngatcatgaatccttgaagcatcttaagggacacagcanactgagcaagagacatgccatgtgggtggaagttcttgaacaacttcaatatat

SEQ ID NO: 225409 - DNA, 371 bp, Glycine max
  unsure (1)..(371): unsure at all n locations
agctctgactcgagtcaacaatagattatatatatgttattatggaangagctctcaatcatcattaatcatccaccatcaatcatccttgaatcatctatttctttaatccttacaacatcatctctcaacatctttcaatcaatctttcaatatctttctacagaactttctgagtcatttctcttcatctctttaaaagctcttgatcaacactttctcttacaagaaaagttcttcgctcaaaaaattgtgctattcatttctttcattctcttctcccttagccaaaagaacgagggactaaccacctggattcttttgtgtctctcttctcccttacagaagagtcaaaggactaaccgcctaag

SEQ ID NO: 225410 - DNA, 427 bp, Glycine max
  unsure (1)..(427): unsure at all n locations
tcatggtgaatcnaggtgattcnaggtgtttgatgatttcttgttgataaccaaatatgatgacaaaggtgatgacaaaaagctcatagatcaatctaagaacaactcatgtgaatcaagaacaattcaagaggtcaagattagaattcgagacgaattcatgactcaagaagaaagtttaaagtcaagaatcaagattcaaggttcaagatctcaagattaagatccagattcatgaatcaagagaaggctctattcaagatatgtatgacaacattttctcacaaattgagtagcacatgatttttctcaaaacatgtctaacaaagagtttttactctctagtaatcgattaccagaattgtgtaatcgattaccagtagcacaaatggttcgaacaacgtttcaaattgaatctacaactgtt

SEQ ID NO: 225411 - DNA, 426 bp, Glycine max
  unsure (1)..(426): unsure at all n locations
agcttctatatgaggtgcagccactccagatgttatttgctncgaactcactggcctatgaagccgaggcacggataaaggatccggtttatggctgtgttggggcaatctcagtgctccaaaggcaagtgattatgctccataaggaacttgatgccacaaatgctgatttgattcgttatacctgcaatgaaatgcctaccactcaagatggtagaataattattggtgaacggggtggtggtggtggttcctctcttggacaatctcctgggtactattacccttctccttggaacaatgatccgcttggggatggttatcacagaggtgacaatatataatatatgattctaatttcatccttggttcagtatgaaatgaaatttccactactttctaattaacgagttatatatatatata

SEQ ID NO: 225412 - DNA, 427 bp, Glycine max
accttgctaagggtttaggttatcatcatgggttaagacacatttgccccacatttgcgggattctgttggatggataaatttaacggtaagaaactacaacacacatagcatattaataaaatgttatgtgttaaaaaaataaaaattaaaaagaagaagaaaaagagaaatttaaatgagtgtgtgctgttaaaacaaagtcaagtgaaaggctagtgaatgggctaagtggaatgaaaagacaaactgtgttagtctacgatttgtgctctcttagaacttaagcttttgcatcctagaaaaaccaatatttttgtagcccagcctcattacaagcaaataaaagtccttcttattcaatttgtgtatttctgactttatggcatgagatgaagtacacagattggacctcttgttagttgtta

SEQ ID NO: 225413 - DNA, 355 bp, Glycine max
atcatcatgctgtgataaatgcataccaactgtcgcacatgatgagggtgagaatgagggagaaacctctgctgtgactgacatatctatatagccaagtcgcccaccaacccaacaatgtcattactcagccaatgacaaaccttctccttacccaccactccagttatgcacaaacgccatccctgaatcaaccacaaagcctatgtaccgcactttcaatgacgaacaccacctttagcacaaaccaaaccacctaccaagaaatgacatttgcagcagaaaagcctgtataaatcaccccaaatccggtgtcctatgctgacttgctccatatctatcgataattaatggt

SEQ ID NO: 225414 - DNA, 405 bp, Glycine max
  unsure (1)..(405): unsure at all n locations
atcaacggctcatcttatattctaaataccttataattcaaaacaaattgagatgacctttcgaaaacaaaaagtaattctttcatttaaattaagtttttaaattggcaaagcctcccaaatattttctttaagatggtgaatataatgaagctcgagattccgccaaacataataataactcctcaacaaaattagtagacttcgattctatttgcacttaaggatataatctcgcccaactctacattatgcaatttatattttctaacactaattatagattctttttattttattcaacataatatctttaatntaatacttttttaatataagaccacatgtatccttacttagatatcaaactgaacactactaactagttaaatctgacaagtcacc

SEQ ID NO: 225415 - DNA, 386 bp, Glycine max
  unsure (1)..(386): unsure at all n locations
ccttagaaactcagcttagctcntaaattaaataagtatgactaattttaatttttattaatcacacttaacatccctcactcctttttaattatacatgatgtgaaaactaaactcatgttctccgagaagcttagcatctgttgtaaagaaattgatctctcaacacaagattttctttgtatgcttggagttggaaccctgaccacatagactctcccatgtgctgtatatgattgattagaacttacaacaactaagcctactagtggctgtcatattcaccctatcttccaaagctaaacaggcatttaattaattatatatttaggaataaatatatgaagatgaagatgtctctggttccatatataaaacacgcggta

SEQ ID NO: 225416 - DNA, 430 bp, Glycine max
  unsure (1)..(430): unsure at all n locations
agctntaacctaggtgttagtctcgcatatcttttataataacaatcaaactttataggagagtacacaagtacagatcaagataaagagaacataatttatcacacatttcgtcaccaacgactataatcctttcaacataaactcaaaaaccaaataggtcctataacctaatcagttgtctaagtcggcggagtgagatgaagatttttagtatcagaaattgaattcaggcaaggtatttaaaaaaatagtgaaagaaaacaattactgaaagatgataggaattgaccttcttctcaattacagtagagtgaagtgatgaaggaatctgctgggattggagaccctcgcatctcttcttatgcaaactctcttctctatggttctttcgaatctncatcatggtatcccctccgcgccggtgacc

SEQ ID NO: 225417 - DNA, 390 bp, Glycine max
  unsure (1)..(390): unsure at all n locations
ctgtcgccatggagctntccgacgatgctcttgngtgttgttcaaactacaaaaggagagagcaagatataaagagccaatggtcgatacatgcgtagatatgaacaaggatcattgagggaagccggtactgtgcccggtctcagctacctcaaggggatgtcgacnatgcatgctccaaaaactaacccaaggcaacatgggggttgaggagtatttcaacgaaatgaatgtgctcatgattcaagcacagattgaagaagatgaggaggtaactatggctcgatttcttaatggtttgactaatgatatctgcgatattgctgagctgcaggagtttgttgaaatggatgatttgcttcacaaagaaatccaagttgagcatcaatt

SEQ ID NO: 225418 - DNA, 368 bp, Glycine max
  unsure (1)..(368): unsure at all n locations
cagcctgcccagagaacgagtgcacggaggatattctttccacctcacaagaccggaaagcggnttctaatgactcctctgcggcttccacataacgcatataggatgggcagctcaccaagatgtcttcctcgcctgatacgatgaccagatgcccttccactaccaatatcaacttttggcggagtgccgacggaacaactcctactgagtggatccacgggcgccccaacagacagatgtagggggggttaatatccattatttggaacgtaactcgacaggtgtgagggcctatctgtactgggagatcgatctctcccctaacctctcggcgggtgccgcctaaggcacgaactgctagacaa

SEQ ID NO: 225419 - DNA, 398 bp, Glycine max
  unsure (1)..(398): unsure at all n locations
ntnatgaggaagcgtggagggggagacttacttcttctattgttgaccacagagnggtacttggagatatgtcgtgagggtcacgagaccttgaggatgtcaagtggggtgctattgcccaaaaccaagcttgatcaatcccgatccaacccgggcatagtcagtcattgagaacctgtgatgtacctaagcaggcgagctcctggcagtcaacagataaaaggaacaaagaccacaaagcaaggaggcttgtgtggtggctggccagctgtgaaacttgattgatattatgggatgtggcctctggtaatagactaccaagggtgggttatcgattaccacgcttataagtgaagacaggaagctgagatggtctctggtaatcgattaccaatgga

SEQ ID NO: 225420 - DNA, 404 bp, Glycine max
  unsure (1)..(404): unsure at all n locations
agctntagacttcagatgtaaaaggtggcattattttatttataaactagcatttacatccaaaaaatgatactgaattataaaactaaaattaacaaaaaaaaaaaccctaaaactgacaaacactccgaagaggtctaaacaagaatgtgttacactgatattgacatatagtggatttcagttacacttgtattctacgattagcttcttctaaaacaagcaagctttatttgaacattaagccaacaagaatgtgtaatcctgacaaaacaagcccgcgatagaatgcaaccacacaataaaatgaaaaaggaataaaaactaatgatatatatatatatatatatagccagaaaaaaagtgtgtaaagtaggatgcatcaaattgtgactcctttttca

SEQ ID NO: 225421 - DNA, 451 bp, Glycine max
  unsure (1)..(451): unsure at all n locations
actcagcttgancatgtccatgtcatatgagggcttggatagcttattgtcactattgaagacctctcctttaacttatttactacagctctatgctctggcgctttgtatatcccattgctcatcacctgcataatggaaaaacaagtaacatgttttttgttttatttttttagtaaatagtctatgctctgatagacattgtcattcaataacaaaaggtcatatatatggtacgtctattgactcttataataattatcttacaagtcatacaaactataatttcttattggttgatacattttttctacattgacaatatatagaaattaaactcctaatttctttcttttgtgtaaatctcattttccaaaataaaaaaatgtgatggcaattcttgctcacatttaatgcaacactgctatctctatacccactanattgatct

SEQ ID NO: 225422 - DNA, 434 bp, Glycine max
agctcattattgaaagggaaataaaatctctttggtcgctcaatcacaagtcctctcgtaacaaactttcataactcaaaagaacctttgcactcttctggtctctaacacattaatgacactttttacgccttgtatacttatcagctaacaatatgcaaaaaaaaaaaaattagtcttcgcccaagcaaaattagtttctgcatggacaaaacgagtttttgcacgaataaaaaaactagtattattttccaactagtcgtccaaaataaggtggcgtgccacttgtactcaataattttcaagaccagagttttctagtttccatcaaacttggtccttcgtcacaccactgacttacatttatgacacactactcgaagattcggcgtgtcttgtgcaatatttgaaacattaactgagatgactcttgt

SEQ ID NO: 225423 - DNA, 441 bp, Glycine max
  unsure (1)..(441): unsure at all n locations
gagacattcttntatgagcattgaacagtatattatgtttacaagataatcnttaaagcgattcatctaataagagaagaatattcaatctaagctatgagaatgagacctttagccttttaatggcattacagaatcaaactttntctatatagtttcactcctaactaatgatatacacgatatcttgtaatactatgccaaatgagctagtatgttatatcacaacaaaatgacagcctaaagaatctaatctatctatacagcataggcctataactatggttctagcatgaaatctggtctcagtatagatgggttctggttggacagatccaattttcacagcattcatgtaaggccttatgaacaaaatggccataacaaatatagtaaaaattaaaagataactaccaactgaagataaataacatctgattc

SEQ ID NO: 225424 - DNA, 410 bp, Glycine max
  unsure (1)..(410): unsure at all n locations
agctcgaagaaatataaaaaagatagtctattttatgttaagnggggcaccaagcattatttcacgcggtaccaaatggtgttacaaagaaggtatccgcctttgtggaaaatatcttgctttttctcattctctgttttaaaagtcaagtcaagctcttataaagaaagatgcttacttttttttcattttaaaaactactttttataatcaaantattacaaataaacaataaaagtatttttaataattggtactgtatttcaaatgattaactggtggtactactaattctcccgccccaaaaagaattgttaattacagaatcacaatatatattaactaataagtaatctgataattccttatcacaagagcttcaaaacttgtcttttatatatataaatttc

SEQ ID NO: 225425 - DNA, 359 bp, Glycine max
  unsure (1)..(359): unsure at all n locations
ttggagatgggagctgacgagacacatatattgtctgtgaatatcttggatatgaacacagtacgtcntaaagacatagtgctactgggtgaggttgtcattaagcacttcaacacagaacaggaatccaaccaaaagcatcttcgggatcctgagagcaatgctgattttgatgttcacgaaaagttgtctctgttggagtggttcgcaaatgaatacaaacgggttggttgcactcttgacgttgttaccaataaatcacaagaaggttcacagtcttgcagaaggttcagtgggataggtgggatcttgcgttaccagcttgatatgcgatcatatgatgagttctctgatgatgg

SEQ ID NO: 225426 - DNA, 380 bp, Glycine max
  unsure (1)..(380): unsure at all n locations
gagctttagtatntcttcttagactggctatttttcttctggttgagcctcacttatgggtgtgctactggtgtgaagtcctcttcacggatgatgttgcgcatgcatatggatgggctatacctttgagataggagacttctatcctaaggcttgctcgtgcttctttggaagctccactagtctttgttttttccttttcgcgcaatgtgatactaatgatggctggttcctcatcctcgccctctaaagagacatatttaaggtgaggaggcaaagcgctttctttaatcaaggttcatggattttctattttagtgtccagcactatgactaaggaatctaggtgctcgatgcattcccccagctcttgattatgc

SEQ ID NO: 225427 - DNA, 471 bp, Glycine max
  unsure (1)..(471): unsure at all n locations
ggctatctcgtacatgagttactcgagatattgaatctaatatagttaatgctcctgaagaagtatagcacagaattgtataaggtaagtttaatgtatttgtttaaatatattgtaatagtcaatgtaacacgtactttttaaagtttntcatttaccattttcagcaaggaaaattttacaaacagttcaagaagaatggatgtgagcatgactatgagatcctcggtgaaatattcaattccagcacaatttataacaggaaagttaagtcaagcttctactcaagagccaccaacctctaatgatgagagagaaatggagggaaactttctttccaaaggtgtttatgttgatgccaatgatgatgttgatggagactacataagaactttgacaaaaaaagaaaaatactacatcttcaagtgagcatcaacgtaaagatacaagagaatctatgttgcataaata

SEQ ID NO: 225428 - DNA, 438 bp, Glycine max
  unsure (1)..(438): unsure at all n locations
agctaactttgagccaacatagcatcctgagttttgtctcaagaacgctcttctttgtaggtatgtagtctcgatcacggaggatggcgcgatcactatctttcatattctctattagcttcatgtcctcttctgggatttttagcttgatcttccaccggctgaggcatcaaggatctgcttggactgcggncncaagccattaatgaagatgtcgagctgaactggctcactaaacctatgtgtangaactctccggagtgatccatgaaagcggtcaagtgctttactcactaatttattatggtattggtggaaggatgacattctcaccttcacctctacggccttagatctccacaaagtatctattcatgaactncttcaccacctcgtcccatgtttgcaggctattctccttgaacgacggaagctatc

SEQ ID NO: 225429 - DNA, 458 bp, Glycine max
  unsure (1)..(458): unsure at all n locations
tatgattccatttcctggggattcttggattggatgcttaattccattggcttcccagcctagntctgtacttggatcatggaatgtgtttcttccacttcctttagtgtcaatggatccatttatgaccatttcaaagggcagcagggtcttagacaaggggatcctctctccccttatctgtttgtgctttgtttggagtactttctcagagatatgagcagcctcaaggatgatgccaattttaaatttcatcccaactgtgcaggtattcagctatctcatttggcttttgcagatgatattatgcttctatctagaggagatatcccttctgtgtcaactatgtttgccaagcttcagcacttctataggggttcagggttctccattagctccgataaatatgccatatactcaaccggtattaggcctcatatcagcagcttactggatta

SEQ ID NO: 225430 - DNA, 357 bp, Glycine max
agctcgaccaatcccgacccaacgcgggcatattctttcagtgagaacctgtgatgtacctaaacaggcgagctcctggcagtcaaccgataaaagaacaaagaccacatagcaaggagtcttgtgtggtggctggccatctatggatcttgagtgagatttgggatatggcctctggtaatccattaccaagggtgggtaatctattacaacgcttataagtgaagacaggaagcccacatggcctctggtaatcgattaccaagggagcgttatcgattaccacgcttaaaaacgaggtcaggaaattaagagggcttctggtaattaattaacaaaagggtgtgaacgattacc

SEQ ID NO: 225431 - DNA, 475 bp, Glycine max
  unsure (1)..(475): unsure at all n locations
tattgatntgtcattaactgaaccctgaactataaatgattatcttttaataccttggttagaatttaggagagcatatggttcaagacaaatttactctgaatttgggggagaaaagntgaacaagaatgataagatataggtttagcatcagcacacacaacaaataagttgtatgtaaaacaaaaagttgtgttgttacaataaggtcaaaagcaaattacgaaaaggctatagtgagaaggttatttctacaaaacaagaaaagatcattgggattagtctaggacttgtgctctcttagaatctaaacctttgaatcctagaaaaaccaatgaatctttgtgccaagcctcactacaagcctgagaaacgtcttctgattatgtgtatacatctctgacttgatagcatgagatgaaatgcaaagaatggaccactttgtggttgttatcaatgaataacttaaacactt

SEQ ID NO: 225432 - DNA, 442 bp, Glycine max
agcttgtgaatgtatatctatcattcccaacttgttttaaagtcttgaagctgctccgtgggaagtccttggtaagggatgtattcggtggctataagaccactgtctaatttttccttaataaaatgtcgattaatctctatgtgctttgttcgatcatgttgaactggattgtgtgcaatgctgatggcaaacttattatcacaaaccagtcccataggaacttcatattttattttgaggtcatcaagtatgatattcatccataacaactcacaaacaccttgagccatagctctgcttttgcacttgatcttgcaaccacattttgcttcttactcctccacgttactaaatttccacccaagaacatgcagtatcctgtggtagatctcccatcaacaattgatcctgcatagtcagcatcagtatatactttcat

SEQ ID NO: 225433 - DNA, 485 bp, Glycine max
  unsure (1)..(485): unsure at all n locations
aagcttgtcattgtcatacatccttctatgctgataagcatgtattttgttctctttattgaatgggataattattgcgatgtaaatttcaaaattaaaaatgaagtgaattactcatagaattagaattggtagaatcattaaaagacgatccttttatcaagagacctcaatttcaactcaattttatttattggctgatatcttataaactaataaagcaaatctatacacctataataaaaatggcagctccaatgataatagcttgagagactcggtcatatgcatttgcaatatacgcaacaagaaatgccaataatcctgccaacagtgtcccgaatcctctgttgagccctttgcataaagttacccctagaaccaanagaacattaaaaaatattaagatcatgcacaaataacatgcaacaganacacattatttaacataggaatatagaaatatcaggaggaagagtaattga

SEQ ID NO: 225434 - DNA, 483 bp, Glycine max
  unsure (1)..(483): unsure at all n locations
ctcagcttnagatatttctganataacacacagtagtcaatgtctcttcatctctattatacagnngtgaattctgtaagtcagtttacattattgtttattacctaacttattgttttaaattcatacataatttcctttattntaacaacaataggcatatgactgagacaagtatgtgagcggngaatgccaatgtgtatggattcctcgagccacagtccatacaaagatctggacaatcacaatttgaatcaaaaagttatattaagaaatggatgcagaaatcgaagagggatgtgtacctagcaggctacttgaatgggttagttaaattggacaaatgaatttaaataatggataatagtataataatctatattggtctccactacagtgcacattggcaaatggtcgtcatttttcctaagggaaatattgccatctggtttggttcgttgcatataggcanacaactactta

SEQ ID NO: 225435 - DNA, 446 bp, Glycine max
  unsure (1)..(446): unsure at all n locations
agcttaatgacgccacaatgaaagatcattttctctcntgtgttcatggaccatacgttggacaacgagttttcaacacccacattttacaaaacaaatttagtaaataacgttaaaataaacatcttcattctcaaagaagaaaccactttagaaaaacgccaagcaagttaaaacctatttacatgagggggcacaacaatgtggaagcaaagcttgatgatgaatcaacaatgattccaaggtgttttgatgataacaatgatgacaacaaaagatgatgacaaaggtgatgaacaaaaagctcaaaagatcaaagaacaactcaagtgaatcaaataacatctcaagtgaatcaagaacaagtccagaagtcaagaatcaagaagaattcaagacttaaaaagaaagcctacaatcaagaatcaagattcaagattcaagat

SEQ ID NO: 225436 - DNA, 489 bp, Glycine max
  unsure (1)..(489): unsure at all n locations
gttgnctatgggtcaacctacacactcttctattttgttagttgcaagttgtaccatctatggtgaagctcatgatacaggccaatgtactcccactgaagaaaacactcaagaaattcattatataggaaatcaacagcgacaacggtatactcaaggaggattttcaggcttctagtagggtccatataatcaacaagggcaatggaggacacaccctgtcaatcaggtcaacaaagaccagagtgggcctttaaataggccaattcaacaaggacctaacatattctagagaactactaagctggaggagaccttgactcagtttatgtaggtaacaatgtcaaatcataaaagcactgagtcagcactgaagaaccttgaagtccaggtgggacaattggccaagcagatagctgacaagtcatccaacagtnttgttgcanatacggaacagaaatccaaggaggaatgcacaactgtgatgac

SEQ ID NO: 225437 - DNA, 247 bp, Glycine max
  unsure (1)..(247): unsure at all n locations
aatcatcatcatgtntatgtctcctctcacatgcatacttttccatgttattattttctcaccaatttttttttgggccactactacaaaatgtatatttaacatcgccagcttaacattgaattttgacaaaactgacgtgaacataaatgcggcgacataattataaataatgtgtatttgctcacatatgttctctgaaaacctgatgttaatgaactgacgttaacatcggttcctaaaaaac

SEQ ID NO: 225438 - DNA, 417 bp, Glycine max
  unsure (1)..(417): unsure at all n locations
tctgcaacgaattatctactgccatttacctgtccttttatatttcttaaaacagctgcgtataccatcactctttccaactctttatttttagacaaaccagaaaaaatcctttaaatcgtgcccttattttagaggatctaaataccaacctaaaagtgggttatattcgcacagatattagctaatcatcttttcttagaagctgatagttagtagtgggttggctaatcaattagttacttccctataaatagaatatcattgtaacatattcatgatctttatcaattctaatcaatatgagtgtcttctatggaactnctctcctattctgagcggtatgatgtgtggccacatcaaatgggtgtacttgcatcacccattaagattctgactcattttctttttacctat

SEQ ID NO: 225439 - DNA, 326 bp, Glycine max
ggaaggatttgtggatgacgctactacttcccattcacaacaattagacgcttcagaaagagtcttcaatacagctgcagaagctgacatacctactgaggtgtgcatatggcttcttttttttaaatcctatcttcatcaaatcttttttagtggtgcccgggagattaccactctactaatcacacagattgggctgtcgagtatataggcgccagattatctgtgctcgacaatcacactcgacatttttcatgatcctgctatcactccaagtggacttacatatgagagagctgtgattcttgaacatcttcagaaagtaa

SEQ ID NO: 225440 - DNA, 413 bp, Glycine max
ctgcagcctaatacttcctcgaagtagctatggaactatctgttgttctctcgacctccctatatgaaacttcaacttgtccatctgatcgcagatgatagaccgatgctcatatgtgctgcacatcatattcgctggctgacgcttgaaagccgaccattacagaatgggggaccttcatcactactaatagtctaggcactccaaatctagaatagatgtctctcttaagaacttaatcacttgccttgcattcatagattggactagcaatcgctctccacccactttgacgacataaagcaccactaccaagatatattcattgccaacggaggatggtcaaggaccaacaaaatcattcccaacaaaaaagaatcttcctcctaatgtttcgaatggcataatggcgc

SEQ ID NO: 225441 - DNA, 421 bp, Glycine max
  unsure (1)..(421): unsure at all n locations
ggccacccagctcgcccaggcgagctcagctagcttatgcgagcnagggtgcttcctccagaagtaacagccttctggagggcccaagtgggcctggttgctatttgcacccccanttttactaagtacaccccattgccttttnttttgtgattctttcttcgtaaagttacggaaacttatgaatttcgtaacgatacttgttttctttccgtaatggtacggaaccttgcggatacataatcatcccctttttacttacggaatgttacggaacctcactaatcatccccttttttgatttccggtgtgtcacggaaccttacggattgtgcatcaatattttcttttgttttccagcatgtcccggaatttacaaattgcctaatgatgggtgccaagcacctcacaaggaccaaac

SEQ ID NO: 225442 - DNA, 125 bp, Glycine max
catctatgatgacaaaacgaagatactaaaacaacatgtcgggagagctcaaaagttgaacttttctaagtgccacgttatctgaaagaaaatccatttctgcttgcttgattacaaaaagaaca

SEQ ID NO: 225443 - DNA, 464 bp, Glycine max
  unsure (1)..(464): unsure at all n locations
tgttganatacacctcgcattattattctattaaattatatattataacttaaacacttaaaactaactgttaaactattttgattaaactcctatgtcttatctagntatgataaccatttatcacaatgaatgaatgaggcttaagtggaagagctaatgatgtctcctattgtggaaaattatataaataaaatgttgtaaaattattttaatcattgcaatataacgtgttcttaatttgaccttgcaaaattgcttatttgttttgagttctcgcaaattacgtaattttattattaatccttataacactctagataacacatttgatattcgaaaaatactatctaacacttctatagagacccaatagcaatatatacatattgtacaataattaaaaattaaaaaatactaataattctataagacaaacaattaactgtaccactaaagatatt

SEQ ID NO: 225444 - DNA, 435 bp, Glycine max
  unsure (1)..(435): unsure at all n locations
ttcatctcagcttttgagagcttctgaaagtagagctagctctttccccctcttattctaagctcacctgcctgagaagctctcttaagaagatccctatagaagctagaggttagctacatatacctctctaaactccgctccttgagatgagaagctagagcttgagctcacgccacctatgatagctacgctcacccgtctgaaaaactacatgaaaacacagaatatatctctactacatagactactcanaatgcctcgacaaacaaggctaagagcctatactactagaatggccacaatactatgcccatacgaaggatgaacgctttctaatatttacagagagaagcgggctgatacttagcccatgaggctcgaacctaccgctaggctcatgagaaccctacgggctgtccttggactatggcc

SEQ ID NO: 225445 - DNA, 240 bp, Glycine max
gaagcatgggagaaatagagagagaaatgaacctatgcacaaaagaacaaagtaacgaagaggcacgggagaaatgcacagctataatgtcacgagtccatcttaaaccatctaccaaattctaactctattatcggtacgggaacacatgtcaccacctgaagcatgcgtacaataaactcttcccagacatgctatttataagacttaggatagactatatacgttataccacacata

SEQ ID NO: 225446 - DNA, 393 bp, Glycine max
  unsure (1)..(393): unsure at all n locations
cagctcgccgtgccattaccattccggcctaaattaatctctcgctcatacacatccctcaacataactcgggccaccatcaacgaggcactatatagacgcggttgcaccggaggagcatccacataagcattgcccacaatttcaagctcttgaaaagatgcttccaatgactcttccacagcttccatataaggtgcagaggacggacaacncattaatatatcttctttccttgatactatatcttcaatttctggcgcaacattgaccggtgatcgacgccatacccgaatcaacaaaacattaaacatgccgtatttatgaagtgattctaagtcgtctcccaacgagcaatgggcaaccaacgttcataatacatagtcctaaaat

SEQ ID NO: 225447 - DNA, 375 bp, Glycine max
  unsure (1)..(375): unsure at all n locations
gtcacaaatttatcatatattactatacctaattagatcacaatataaaaagtctttcacacttagaagcctttgtttttaagagtgtaacaaactcatcccagtactaaaatatatgttgggtatgtgtttgataggagtttggttcatgcactgccacttggaagtacacacaacatgggggctaaagatggcctttttggtggacaatggcaaaggtccaaagcaatcagtgataccaccacctaaagatcttcccaaatgctaatgcgtccatcatcaattaattatgcaatacacacaagaaaggccttccaatgccgaaacaanagaagctttggagggatacagagaagccaggcaaaagatgagtga

SEQ ID NO: 225448 - DNA, 436 bp, Glycine max
gagtctgtaccccagtcatccacaaacctatttttatctattgacatcaatattgctaacctattatatcgtcaagaatattcattatgaggcaataaaaaaaatctagtaattcaatttacttacatcatccacaattgtagtatagatatgttcaaacacttgtcacctcatattatttcacttagatctgcatgtgccatgaaaaaggatgcttgtacattaggaatcctaaattttgtcccactcccaatggatcctctctagcaattgtattgcagctttcaacaggtccaactggtttcagcacattattgtgtgaatcttatatggttaatgaaaataacaattaccataatattatgaaacaactattaataatgtcaacttgaatgaaaacaagcacacggaaaatcaatttacttacattagatat

SEQ ID NO: 225449 - DNA, 493 bp, Glycine max
  unsure (1)..(493): unsure at all n locations
agataacgaaaactgctaaggattcgaaactcattcttataaaatatataagacactaagaaaaataaaaacaaaaaacacggaaatataaactcagcccactttctcactagaaggaacagattgtacgaaggctgaaggatgcaatcttactgctgacgctgatagaagttcagatatttcagtgcttgtaacctatgaagaaaaaacccacgagtaaagctctacattatgcanaagagtatgaacaagacttgtgaattgtacaacaaaatactgtcgtggcactaaattcatgtgtgaccttgctggcgtatgacttcacatctaccacatcagcaacagaagaacttccaaactttgttagcttcattggcttcctagaatgcaacagctgtaaatagaacaaggcgatattagctgtgcaatngaacaataattcttaaatgtgacttcatccacacgtgggagatatctccattataccatactt

SEQ ID NO: 225450 - DNA, 408 bp, Glycine max
agcttcaacattcaatgtcaagcgtctcttatattacgggactcaatcagacatccgagtaaaaagttattgtcgtttgaaatggctcatagcttcaacattcaatttcgagggtctcgatatattacgggactcaatccgacatccgagaaaaaaattattgtcccttgaattggctcacaggctcaacattcaattttgagcgtctcgatatgttacgggactcaatcagacatccgcagaaaaagctattgtcatttgaatctgctcacagattcaacattccatttcgagggtctcgatatattacgggactcaatcacacatccgagtaaatagctattgtcgttagaaatggctcagaagctcaacacttcatttcgagcgtcttgctatattacgggactc

SEQ ID NO: 225451 - DNA, 411 bp, Glycine max
  unsure (1)..(411): unsure at all n locations
ntgatacaattcaaacgacaataactatttgctcttatgtctaattgagtccaataatataacgagacactcgaaattgaatgttgaagctctgagttaattcaaacgacaataactttttactctgatgtctgattcagtcccgtcatatatcgagacgctcgaaattgaatgttgatgctctgagccaattcaaacgacaataaatctttactcggatgtctgtttgagtcccgtaacatatcgagacgctcgaaattgaatgttgaagctctgagacaattgaaacgacaacaactntntactcggatctctgattgagtcccgtaacatatcgagatgctcgaaattgaatgtggaatctctgagccacattcaacgacaataattgtttactcgatgtctgatgag

SEQ ID NO: 225452 - DNA, 456 bp, Glycine max
cggatctctaagtcactgcagcatgcaagcttgaaggaaactagagccttgttattttgttcacccaactgaccatgaatcaaaaatctgcacctgtcgccagactctgtgatttatgctcctctgtcgaccactacatagacctttgcccttctgtgcaacaactctgaacaattgaacagcctaaagcttatgctgtaaacatctacaacagaccttctcaacctcagcagcaaaatcacccacaacgaaacaagtatgacctctccagcaacaggtacaatctcgggtggaggaatcatcctaaccttagatggtcgaatgcttcacaacagtagcaacaacaacaacagccttattttcagaatgctgctggtccaagcaaaccatacgttcctccaccaatccaacagcaacaacagcaacagcctcagatacaacaaacagttgacgctc

SEQ ID NO: 225453 - DNA, 508 bp, Glycine max
  unsure (1)..(508): unsure at all n locations
actcagcttccctctttgacaaatacccctcagccaaatagaatccatcttgngcctctttcccacaactctcgtaaatggaagagaaatgttcatctaaagcatacaagtccctaatattatgaaatcctaaaatntgggctcctagggagcaaaacaatgtgtgtctcctagagagggcatcagctaccacatttgttgttccctttntgtatttgataacatatggaaattgctctaggtactctacccattttgcatgcctcttgtttaacttgttttgccctctaatgtacttaagtgattgatgatcactatgaatgacaaattccttggaaacaaggtaatgttcccaagtttggaaggctcttattaaggcatatagctctttatcataggtggngtagttgacggtaggcactatgaatttntcactaanataagcaataanggtgccaccttttaacaatacagctccaacttccacttcagaagcatcacattctac

SEQ ID NO: 225454 - DNA, 442 bp, Glycine max
  unsure (1)..(442): unsure at all n locations
nagcttacttctctctcagttgctctacaactaataaactcccataaaacctcaacaacccttcagaaatcgtgattttagcttaaataggcaattcagtcggtggacgcgcggttagcgcacgtaagtgacttctggcttagcgccagtcacacttgctcagcctgaaggtgaagacggtgcgcttagagttggccttcgctcagcgcctctatacaactcatccttcttctagaattgtccatgcgcttagccattagatggggcgcttaacagatgatgtgcttacccagaagataagtggcttagcgagttcatgaaatttgcacttcaccaatcttgcctatttacctgaaattgaagtagaatgatcattatatacatagcactgggatacaaaatatctgttacctaaattaacataaagtaattacattactac

SEQ ID NO: 225455 - DNA, 479 bp, Glycine max
  unsure (1)..(479): unsure at all n locations
tgagccaaaatcccaacttaccatataccttgaactcaggtgagaatatcaatccttgccctcggaagaaaacacanaaagataggaacttcccaatcaaaagagtggaagataacacaaagagaaaattcccaatcgaagagtgggagatagcaaaaaaaaggaaagaaaattcccaatcaaagatcggaggaaaacagaagaaatatacagataggtctttggaccagacaatatctgaacaatacagaattgtcaccaagaaaatatgataagaaaggaaaccacgacctaaagtggtcctctccctttgattaccaaccaaaatcctgtgcgtcggtgacttgtttgcctcgcgctaaacataaatagaaaatataaagggccaaaacactcaaagccaatttccaccaagaaaaccccattccaagataagtctactgatcatgatacgcatgtatctttgattgatggaatga

SEQ ID NO: 225456 - DNA, 405 bp, Glycine max
agctttagacttcagatataagatctgttattattaatttataaactagcatttacatccaaaaaatgatactgaattataaaactaaaattaacaaaaaaaaaaaccctaaaactgacaaacactccgaagaggtctaaacaagaatgtgttacactgatattgacatatagcggatttcagttacacttgtattctacgattagcttcttctaaaacaagcaagctttatttgaacattaagccaacaagaatgtgtaatcctgacaaaacaagcccgcgatagaatgcaaccagacaataaaatgaaaaaggaataaaaattaatgatatatatatatatatatatagccagaagaaaagtgtgtcaagtaggatgcataaaattgtgacttctttttcact

SEQ ID NO: 225457 - DNA, 483 bp, Glycine max
  unsure (1)..(483): unsure at all n locations
tgtcagcaggtccaatgtccatatgagggcttggatagctttatgtcactattganaacctctcctttaacttatntactacagctctatgctctggcgctttgtatatcccattgctcatcacctgcataatggaaaaacaagtaacatgttttttgttttatttttttagtaaatagtctatgctctgatagacattgtcattcaataacaaaaggtcatatatatggtacgtttattgacttttataataattatcttacaagtcatacaaactataatttcttattggttgataaattttttctacattgacaatatatagaaattaaactcctaatttctttcttttgtgtaaatctcattttccaaaatatacaaatgtgatggcaattcttgctcaaatttaatgcaacaatgctatttctatacccactaaattgatctgtagcacacttgcaatcatctatcatgggttgaatg

SEQ ID NO: 225458 - DNA, 427 bp, Glycine max
  unsure (1)..(427): unsure at all n locations
agcttgcaagattatggtgtagccatcttatgttgtactaggcggcggtcgggcgatggtgcacaacaattctccacatccacaaatcacgtataaacccaccatcccctgttgcccacctccaactaagctcacgtactcccacgnagcccttatcctcgttcctctcaacgccggcgccccatcaatcctcccaagcttccacaaaattcaagtaattccacatccaatcatcaagaactaacaaaaccaagcaaaataggcaaaggcagaaaactctgcccacaacacaaaccaatatcacagctgtttacatacaaatacaccagtaacattctcttcgttcaattcgttaaccgttggatcgactcgaaaattctactggaagtctctagcacataaatatacattatgaatgttgggatct

SEQ ID NO: 225459 - DNA, 485 bp, Glycine max
  unsure (1)..(485): unsure at all n locations
tcctgcatacggacctataaatctcagctagttaagctagctaacctaggaggttatcttaatattcctagtccaacaagagggatatgaggacgaagcttggattgattctgtctaactagggatcgaggttttgttatttaggctacaacataaaaatcaaagggatgattgattagagaaacatctttatatacatcagctagttagttagaaagacccaacaactttacctactactgccaatcttacttacttgcatttttactggttttagcctagacttagcttaattctgttataaatcatcaattattcaatgtttctttcaacaatgccttatttatgaatctaaccctgtctaatactagcttcctgaggtcgatactcggatctatccgctttaattttagatacttgacgacncagcgccactttcagccaaccggatttcccttgacatatttgtaatccacaaagcatta

SEQ ID NO: 225460 - DNA, 264 bp, Glycine max
  unsure (1)..(264): unsure at all n locations
gtatatccacacactagacattgaataccggagcttngcgtggattcacacgataattactttttactcacatgtctgattgagatccgtaatacattcagatgttcgacattgcataccgaacctttgacctaattcgttaagcaccaacttttgatacgacttgtcgatcgagatccgtatatattgagacgcatcacggtgtataccgaacgattgtgctaatccaaacgacaataacgttgtggctgagatggatgatcg

SEQ ID NO: 225461 - DNA, 324 bp, Glycine max
tgggggtggccacttagagcttgccacgtctctccacttttgggcatattctttgaaagacacatgccccttcttgcacatgttctgtagttgcaacctattcagacccatatcaaaattatactgactctgcccaacgaaggcaaccattaggtctttccaacaatggactcgagaaggttccaagctagtgtcccaggtaacagctacccaataagatcttcttggaagaaatgtatcaacagcttctaagtttttgtgtatgcccccatcttcgcacaataccattttatacggttcttggggcaagtatccccttgaact

SEQ ID NO: 225462 - DNA, 441 bp, Glycine max
gcttaaggtcactaggaacaccaaattttgacttgtgcaccatgggaccttgagaatgaacccaggcttggttccaaaaattgacagaattcccatcaccaatttgccactctaggtttgcagtaacatactaacattttcctatttgtgacaaattcccctcctagtatttgacccaggcataaggaaatcaacattaggcacaatagaatcaccatacctatattttttttcctaaggatatgcacccacaaagagcctctattaacacacaaaaacaaacctaatttcaccataaatgcaacattgaaattgatggaaccctaatttgcggaaccaaattttagcataaacaaactggggaagctatttgggactctctaaaattggtgaatataaaaaggaaaaagcggaattagaaaaggagatgaaatgaacaat

SEQ ID NO: 225463 - DNA, 359 bp, Glycine max
  unsure (1)..(359): unsure at all n locations
atgctctattcaatggagttgacaagaatatcttcagattgatttacactcgcacagnggccaaagatgcatgggagatcctgaaaatcactcatgaaggaacctccaaagtgaagatgtccagattgcaactgttggccacaaaattcgaaaatctgaagatgaaagaggaagaatgcattcatgacttccacatgaacattcttgaaattgccaatgcttgcactgccttgggagagaagatgacagatgannagctggtgagaaagatcctcagatccttgcctaagagatttgacatgatagtcactgcaatagaggaggcccaagacatttgcaacatgagagtagatgaactc

SEQ ID NO: 225464 - DNA, 444 bp, Glycine max
agcttgaacacggccttgaacatgagtctctttcttcctgacttcatctatctgctgcaacttcttcaacagttcccattttctaactagataactgcgatatgcagcttgtatgaaaacagcagcatctgcatctgacaaaactcttccttcttttcgacctgcatcagttcgtgtgcttgaatccttctcttcccttgattcagtagtttcctccatcatattttctgctcctttctctgcctctttatcttcagtcttatagtcatcatcatctggacatgtttcccttgcccctttcagacattcactgggtatgtttacttttatctggctctgacatccatccctacagtcaacacccttgttttcattagtcatgcattctgacaccagaatggtgttctcctttggtttaactttcgcactggtgtttggagcatt

SEQ ID NO: 225465 - DNA, 436 bp, Glycine max
  unsure (1)..(436): unsure at all n locations
gaatacataggttacctttataagaaatcgccaaaaaaaaaagaaaacctaacaaaatgctatggaaaaaattatagcctcttttcaattctgtaaggaatacctgggaaatgatcggattcaataaacatgttttctttagcatcaactattttaattccaagagagcattgtaggtagcatagtatataagagtttgtcgatgctttcctaatacataggcaaaaccaaagacatccataagaattacaagttaagtgagaactagcatgactatgagttgataaacaataaaaaatattagcatcctgctaactntaactttcttcttttcttaataatagactctttttcatcanaacaattcatgaatctagagttgtgcatacagttgtgagagccggcgttcataccctcacacaaattaagaaacatc

SEQ ID NO: 225466 - DNA, 432 bp, Glycine max
agcttacaaatctgttttaaatccaagtctcatttataaaataaaatctagataagataagataagataagatctagatgaaataatatctagatgagatcaaatctaaataatatctagataagataaaatttggtagaataaaatagtctgttctcttcaagtccaagcccaattctggatttaagcccaattgcttataattctcctgaaattaaattaaaaacacaaaattaatccactaggcccaaatgataaaactgcataattaatttgacaattaaggctaattagtaattaaaatggtgacaaaaagggttaagaaatatgagaaaatgatgacacatcaaatcccctcacacttagccttttgcactcttgggaaaataaaaaaaaacaaagcaggggacaaattcagagacattaaagaga

SEQ ID NO: 225467 - DNA, 358 bp, Glycine max
  unsure (1)..(358): unsure at all n locations
cttttatcagtttctgggccaccccctgatattggagggggaccaactgtgccagcacaaccagagagggaggctatcatgcaactactatgcatacccgggcaaagatttcacccgtgccactgcaaagagacgagtgtggatcatgcgcaccaacatgaccactcttacacagatataaatgacgttgttacttagcaacattctgcccagcgaccgtaatgccgatctccccctgcgaaagtatcagttggtctgtgccgtcccgacatangtaggtatgcattatttccaactaatttctaatgccatctactatttgcagggatcgcacccacaagacacccagtggaccccg

SEQ ID NO: 225468 - DNA, 406 bp, Glycine max
  unsure (1)..(406): unsure at all n locations
agctngaatctgaagctgaacacaggctgctgttcttcccaagaaaatatgaaaaggaagaagctgcaacaagatttttggtcagcagcccaagctcacgagtctttaatgaggcagaaggcgagatcgcgttggattaaggagggggtcagatatctcgatattttcacctggtgattaactcccatcgaagtttgtagctttttccaacagagatttcaagaaactatgagcagcataccagttttgaatggcacctcttttcaagaaactatgttctttggggaggctactatgaaaaatgtcaagacaatcaaatcgattttgagggcttttgaattgtcatcaggacttaaaataaattatgggaagagcagctatggggtgttgggccaatctaaataat

SEQ ID NO: 225469 - DNA, 355 bp, Glycine max
ttgctagcctccagagatctaggaaggataaagcggctgaatgacccagttttgctcccgaatatgacagccaccgttttaagagcgctgagcacatcaagggatggtcatttctctgggagcgacgcgtccagctcacggatgacgagtataccaacttccacgaggagatagttcgccggcgttgggcatcactggttacccccatggccaaagttgacccagacatagtcctcgaattttatgctaatgcttggcctacagaggaaggcgtgcgagatatgcgatcctgagtgaggggtcagtggatcccgtttgatgcggatgctcttatccagtttctgggatacccttt

SEQ ID NO: 225470 - DNA, 349 bp, Glycine max
  unsure (1)..(349): unsure at all n locations
atgattttatttgaactatgggttgataaaaaaagttatcaaaattggcgggtgagaaaanaagctggcgaatgaaaagtagaactatgttcctcatggaattcaacattttggggtctatatataatggataatcttattcacataattgactatataagttaatgaaacttttaaatttataaagttgatttcggattgtaaatataattaattatacttataataacataatcgattaggtatgacactgcattaaaatattttgatatcggaatgatcacataattaattataattaattagcataattccaaaatgagaataataggttccaattataacatat

SEQ ID NO: 225471 - DNA, 277 bp, Glycine max
tccatatactagacatacatgcgaaatccaatgaagctaatttaaattacatacaaacatctatatatcgcatcatatagtcatatatatcatcatcaacataatctttcacaatatcagtaccatattctagtactatgctgtgactttacttcaagattacatgacgataccaatactcctacatataccctgccatcaaaactaataactatgagaaatgttatcaatgagacggctggctattcatgactgatgactacatagatatacctta

SEQ ID NO: 225472 - DNA, 387 bp, Glycine max
  unsure (1)..(387): unsure at all n locations
acctgcggcatgcaagcntggattaaaaggagcatttcatattatatnacaacacaagggatggagtaactattttacaatcaacatgacatatatatatatatatacatcacccatccaactcaaaaatgatttatgatacgcacacatacctttttcaatcgactaaattagattttattagtatacgacaaatataattatccaatgctttattaatgtcattatttatatagtgaattgctgtttcaatattgatattaaaaatatatataatgcaacttaaattgaaacaaacttatttgactcataaaaaaaaaatattattctacctcttccttttaccttaacttcaaacaccaaagcgtaaaggattctattattgaa

SEQ ID NO: 225473 - DNA, 342 bp, Glycine max
  unsure (1)..(342): unsure at all n locations
aaccacctgcagcagcaagctttaccttatatgaagcttttttngtttccataccaccccattgctatcttgctttactcagtctagctctcgtttcaagaacttgaacactttatctattcttgccataaaaggatagaatccgacaaagaggtatgttttccttcccccctaatgggcatcctaagatctccctaaactcttctatggctggtgccaactgaaagtccccaaaagtaaagcatctgagtgattggccgtaatattgattgagggatgtgatggcttctgccaacactttaatcattgtcaaatcccagatctttccatatgccttgctga

SEQ ID NO: 225474 - DNA, 375 bp, Glycine max
gtttgtcactccacccatatctggcctgacattatcttactttcaccaccgacaacaacgtcaaggaattgttgcaccccggatacaaaggctcctttgagtcactctgtaatccttcatacacaggggcatttgcttgctggaaagactcttgtccaaggtcacgaatcatatcctccaagcgatctcccatttctacatcaaatagttcacattggtgcccactctgcatgtctgtcatttcaccatgccatatccacgtcgtataattcctcttaattccatcacacacaagatgctctcgtatgtcatccagtatttgtcgtcttccattcaacaattgatgcaaagacaggaatatttttcatcttcatt

SEQ ID NO: 225475 - DNA, 269 bp, Glycine max
tggattaaagccggcgatctggcaggaggtcctagttctgcaaccagtttcgctgagtcaagaagtaccatatgctatggttgcagaagaaaagccaaacgatgcacgaaagacaattcgaccttcctcagttgtaggagcttactcaagctctcgagcatcgctattaccctattcatacaccgaacccccactgtaaccaacaccggggcaaacagcttctttcaacattccatatcagagaccaactccctaagaattggccctat

SEQ ID NO: 225476 - DNA, 328 bp, Glycine max
aatgtcatcttcaggtcattgtctacatcgacatcatctcatctcaatgtcattctccacatcgacattatctcatcttaatgtcactccaacatcaacatcattctatctcaatgtcattctcaacatcaacatcatctcatctcaatgacattatcaacaacaacaacatcctctatatcaacataatcattaataacaacttgatctcgtatcactattatcataaacgcccacatcgtgtgtctcacttattattaatatcatcttccatatcaacatcattctctatcaacattatcataaacatcgacgtcacctcatatca

SEQ ID NO: 225477 - DNA, 456 bp, Glycine max
cctgccgctgcaactgacctcttgtgcgtagaaatgactgtctattccttctcaccaatcttgggattggctttagtagcccttgtcttgatacgtcttggtattacagaagggatgacaaattatcttggttcaggagctagttggactttctttactctttttggtgcagaagcaaccaaggctgcaacttttctgttctagagataaacttgtacaaatccttcatctttttcatcagtctcacttaggccctttaacctttgtgggattgaagttctagccgctggacacacaacagtggatgcaatagactactcatgtcttttcttccgcctgtgctcctttgagagtagctccttctcttattcttctttctaggactgcttccatattttctttttatattggtacttcaccattatcttttgtatttttttggagatcccaaaactg

SEQ ID NO: 225478 - DNA, 380 bp, Glycine max
  unsure (1)..(380): unsure at all n locations
agctntancangggagatccaatcgatgtttattcttctatttctctcgtggaggtattgccctgaagcttgaccacacttatccaacaagccaacaatgcaattaattatagagatagaggctttgcaaaacaacataatcattttcgtaaagggactgagttggaaaaacttgcttccttacaccacaaatgggggacaaagcaccaaaagaaacaagtcgatgaatgcctctactaataacttcatcatcaaggtaggaaaggattgaagacaacatatctccttgtcggaccccacacacaagagaagaagctaactggttttccatcgataagaaagaaaagcttatttgacttgaggaacactaaaatccagga

SEQ ID NO: 225479 - DNA, 241 bp, Glycine max
acttgacaataaatgaaatgaataaaaagagagaccattggctctcctaaaggatgggagaataataccagaaaaaaataagcaataagcagaaagtaagtaagtacaaaaaagacgactagccccaataacttaagggggaatttgcaagaaatataattatgagaaatcaatagactactgaataacaaccttcaaagagcgagtagtaaatgctatattacgaaggaggacataaaac

SEQ ID NO: 225480 - DNA, 306 bp, Glycine max
cttttttttagacgaaaccatcagagacacctatgtgatgttgcaaccgcagtttcactagtaatattgtcaacatatattgatgtaccaaatgttgatttctcgaattgattattcgaagagtgcgtcttgtaactgtcaagacttatggatcacaaatcattttggaaatttttatattcctgtttatcctcttcttcgtttgaaaacacaaaaaaatatttcatttacttatccctttacacctacctgcctaatactttactataattacaatagtttattagaacggctgccttatccaaa

SEQ ID NO: 225481 - DNA, 226 bp, Glycine max
tacacatttatcacgaccttttggtatggataaaccttgtaaccaccgtggcatgaaacccagcagacattattactttgctttaattcttttaacaatacggcctgtagagccaaatttaaagacaaccccggggtggccaaccaagttttaggtgtatttatgccccttggtgggcttctgtaccagaactgacaggaaaacctttgccaagaaaatggaggtt

SEQ ID NO: 225482 - DNA, 364 bp, Glycine max
gatgaaagactccggcatactttaagctgatgcacggaaaatgttattatgaaattgacatgcccgaacaaacaccatttcctagttaaccatgcattaggtaccatgttcaattatttagtttataactgaaacgcggctatgatcccaacatgagtggctcctaacacatgaaactcagaatgtagtgtgaagctccacgcttcccactcctttgtttttgtcttgtagaggaaaacccaaggatgagcaaacatgaagacacaaggtatgcgactttccacaccaaaaagttcgtagaacccatatgcatgatgatgccctgacttatgcaacatgagaggctggaatatgataaccgcac

SEQ ID NO: 225483 - DNA, 451 bp, Glycine max
  unsure (1)..(451): unsure at all n locations
aagcaccgcggctgcaagctgccaagatatatgatttgttattttgngcaattttttttttattttggaccaacgccgggcattaattgttttactacgatcaagcaaattttccttgttgatttcgctcaataataggtttaccatcgagcttgcctgtggtttttcgcgggaactcaaccgccgttgtgtttcggtcgacattggcctgcgctgataaaagaggcaaagaaaaatatagccgaccttggcagcaaaataaaatcctcgacaaacatgaataaaaaataatcttatccgacatccgccaagaaggattacctgtcgctgtatcccgaaaagaatcaccggatgaagcctatcgaacattttcttatcgttatcatctcgaaactattcagggattgaacagaaaagcattatcctcaaacagtcgtaaactacatccgac

SEQ ID NO: 225484 - DNA, 404 bp, Glycine max
  unsure (1)..(404): unsure at all n locations
aagacttttttgttttattcagaaaaanagagtttatctcttttatcttagtgagagcgattctcctaaattctggagtgattcaagaacaccctggctgtatcaaaggactttcacaacctttgtgtgttggcctcgctggaaagagagattctttccttcctttcatcttcacccttgttctttccaaccacaattccataaaatccacctctgcccagaattatctcgtggccataactcccgttttacgcactcaaattaagtgattcttgagcctaaattaagattccaaacgagaactttcaacctcgtgtggaatcacctcatttggagccctgtagcttcagctattgcccattctatatttctgtccagccaccacttaacctacattttaccat

SEQ ID NO: 225485 - DNA, 299 bp, Glycine max
  unsure (1)..(299): unsure at all n locations
cagcaagctntaatgaggagggagctttatttttggaggatactcatcaaggcgggattgttgaacccaagtgactacatagaccctttgggaatttgtgaacggctcacttatcgcactagcttgttagcgcaatttcatccagaggaaataatttgcttaacgacactagcttgttaagcgcaattccagctagaggagaaattgcgcttagtatgaaagtctcacctagaagcaaccttctgccagtttgagttgggccacccttgcccaagccagcaaaattttccccaggcgag

SEQ ID NO: 225486 - DNA, 316 bp, Glycine max
  unsure (1)..(316): unsure at all n locations
tagcctanatctacaattntcaaaatagaagagggtctgggcttatcgcatcatgctgggcttagctcagccttagcagaatgacccttaggcttagcgcacagggcacactattagtcgatgaacacaactaacttatgtgtataaaacctgtgtaaattgtatcaaacttccccaatttatggttattntgtagtgttataagtactttgtgttaagtaaagggaataaatacttagtacttccattttgtgtggttaataatcattttctctcaatttcaggttaattaggcaactctgaaacgtgttggttt

SEQ ID NO: 225487 - DNA, 423 bp, Glycine max
  unsure (1)..(423): unsure at all n locations
taaagctagntcctttattaagatatggatgttttattacttaatanaggaactaagactctnttcatctaatagattataactaagaaaacatttattgattgattttaacactgaaatacgtattgtgcattaaagcgagaagagagtagagtttgatgaagtctaaccccaactatacctttgttatcggntaaatattctattttcaactatgctttgattataaaaccacaaaagattatnttaaccttgtgttatgcaattgttttgttttaatctttacaaaattgactaaagtttgcggttttatgctttcttatatccgctagcttaagttgatatttacataacaattgctaatattgtataagtatttaaggaaacaatgcttgaagttttcatattagtgcttatattatt

SEQ ID NO: 225488 - DNA, 317 bp, Glycine max
  unsure (1)..(317): unsure at all n locations
agctngcttctacaatctccccctttgtgttgatgactactctgaaatcaagaaacacatacacacactttttcctagtcgaccactcacttaattttccattctcccccgttgtttttgagtttatgcttcacttgaaattaagtaaattactaatgtgagttcttgatttaatccctatttctctccccctttggcatcaacaaaaagccaaagggcgtaacaaggtttaaacatacatacactactaatcattcacaagacattcattgaaaaatattagcccatccttgagcccgaaacatgaattgatccaa

SEQ ID NO: 225489 - DNA, 358 bp, Glycine max
  unsure (1)..(358): unsure at all n locations
gaacactactcttaaaacaaaaatggcgtacaacctcctcccataaatacaaacatcaatgtaaatttagagcaagcttatgcacatatttccttacgaacgttcacttgcacaagacatcctatcaactaagaaaaatgcacccatatacaatcaaggtagcttcattacctagattatttacatgtacttccaaggtgtatttgttatttacatcacacacgcctccttggctgaatttacatacatgcatactcaaagcantttggggtaccaaaaactgcacatgcgctcatcttggtatttctaatacccatacatatacanacttcacgatgaatcttgactacctacacaa

SEQ ID NO: 225490 - DNA, 396 bp, Glycine max
  unsure (1)..(396): unsure at all n locations
agctaaataaagtccttagagagccatattgngtttgtgtgancgcattgaatgagaggataattgttatgtatacataaaccgcgtaattaaatcacacaccaattatctaatttccctctcttttattgcttctttttgtgttaaacattaggaattcaacatcttttgatttttttttacctagtaggtgctaaaaataataaattcatcgcattcttggtggtatactttttgtacagacacaacataaggcatggaaaagagttaaggaatcatagagccgcactcagcaagtgaaaagcactcaacacagtagccttgcttatcgccagatatcacataggaagccagtttgcacgtgcatgcgcgcttattgcatggtgcgcacataac

SEQ ID NO: 225491 - DNA, 362 bp, Glycine max
caaggctcagagagtgtacacctagaacactccttggaacactccctttttggcccaacctgtgctctgaacactttcattccacccccacgattctttcaccctaggccaaacccttagattcacccaacgtctctctagccactttaataatctctcgggacatcctgttcacaaatcatttgcactttcttgtggttggccacaccattccctcccatatttcttggtggaagattccttgtttctcacccttcaagtgccaccatttgatccatggtgctaccaaaagactacttctctttgccctattctaaatcttacatcataaccaaaccttatggtggtgagcaagctctctc

SEQ ID NO: 225492 - DNA, 361 bp, Glycine max
gatataaataccaaccggttttcaacactcaaccacctgagacaaactccttggtaactatagcaaccaaaccagagattctgaaaattccggctgataaaaccaagcaaccaaaccagagagcaataagaatgatacaagatcttaaacgcatcgcccgttcatgaggacggaatggccatgcattaattattgtcaattatttatttcacaatcatgagtactttccacaagtatcatgaaaaacagattcttaaaacaacaacaaaaaaaacagctttggctctttaccctgtaaatgtaactatgactgctatatttctataaagccatcactgcagacacttatgatattgcggat

SEQ ID NO: 225493 - DNA, 391 bp, Glycine max
ttcttctggcttcaattcattagagggctctccttctgtgtccagcatcttgggatgttcccagcctttgatgacagctttccaggttctgctatccagtgatttgaggaaggccaccatccttgctttccagtattcatagttggttccatccagaattggtggtctgttcactggtcctccttctttctccatgttcatcagaatttatctccctagatctcactcagtgatttcgagtgcctgctctgataccaattgaaattctgatactggggacagatgtcgtaccggatgtcacgacatcacgcttcagaacatgcagattatatgtgtccgtatgaacagattaaacaagtaaataacacatgagaatggttaacccagttcg

SEQ ID NO: 225494 - DNA, 413 bp, Glycine max
ttttgagaaaacttccttgagaagctagagcttatttacacacacccctctcataactaagctcacctccttgagaaacttccttaagaagattcctaaagaagctagagcttagctacatatacctctctaatagctaagctcacctccttgagatgagaagctagaacttagctacacaccccctataatagctaagctcacccccatgaaaaaaaaacatgaaaatacaaaaaaaagtccttactacaaagactactcaaaatgtcccgaaatacaaggctaaaaccctatactactagaatggccaaaatacaaggcccatatgaaggaaaaacctattctaatatttacaaagataagcgggctcatacttagcccatgggctcgaaatctaccctaaggctcatgag

SEQ ID NO: 225495 - DNA, 309 bp, Glycine max
  unsure (1)..(309): unsure at all n locations
accatatgatatggtactttcacaccttcgttcacaaccttttctggtttcttctctctaacatggtaacttctatttttctcttcattcctaatttttttcatctttttcaaattttcaaatttctttntctttttatccttctatttctttttcttggtcattaaattaattattcttgaccattatttgttgctctttttcatgaatgctttcacctatcacatcatcattcttttcatcagtacctttcttttcagcagctttcttcttgtacactacactgatctcatcttttgccttcataaa

SEQ ID NO: 225496 - DNA, 355 bp, Glycine max
tgggacaagatagtggtgttccctttcctcccttgctctgaccgtacttgtgctgcttgcgcttatttattttgtgctgctgtgtgcttgtatgttaatcttgatctgtgtcgtgggctcagaatttgacatccacctgcacttgcttttgttacctccagtttgagaatcacctgccaagagggagctgaactgtgtattattttgtgggctggaaccatggggtgtggggctttaacaggggtgaaatagaaaacccaactcatttaactagtttcctctccaatggggcacgtgccttttctcttccagctgagtctctacctcatgccctcctatactgaccatttccttt

SEQ ID NO: 225497 - DNA, 310 bp, Glycine max
cctcttctttgatctcactcaattatcaagtgacagtgtaccatttgagggttcacttgatgatgagttgaagtttgatttttctgtgtctgatgcctgccggatggtttgcaccaaccaagcggatatgactggaaggcttcttgctgattcattggcattcgaatgccgcatcatgcactacttgattgtgcatatcctactccctagatctttcaaccttgcacaggtttctgaggaagattagatatcatgtgggttttcttaactggtcgtcaaatcaactgggcccttcttgtgagatatcgca

SEQ ID NO: 225498 - DNA, 292 bp, Glycine max
  unsure (1)..(292): unsure at all n locations
agaacgangaagaacgaatgaggaacgtttattatcggntgaaccctttcccaattccttcacggataacgttacggaaacgttttggaagcgcctcggcttagattctctcacgaaaacgattttttcatgcaaattctaatgagagataactgccaatggggctgaacccttttcttcttcactccctccactatttataacaaaataggggaggtggttgccgcccagctcgcccagtcgagccaggtttgtttctccagaagcaacaactttctggaggaattctctg

SEQ ID NO: 225499 - DNA, 387 bp, Glycine max
  unsure (1)..(387): unsure at all n locations
ctgcttctacaatcntccnctttgtgatgatgacataccttgattctataaacacatacaaactccatcttctaatcgatcactcacttaattctccccctttggttttgagtttaagcttcacttgaagttaagttatttaataatatgagttcttgatttaatcccaactttctctccccctttgacatcaacaaaaagccaaagtgcgtatagagacatataatcatacattcactcataatcatccaagcattntaatccatacaacaagcaagcaggacaataattcatacataaactaagcaaggaagataataattcatccataaactataatgaaatgtcagataattaataagtcatccaagataacgaaattacaac

SEQ ID NO: 225500 - DNA, 399 bp, Glycine max
agagaggtgtgtgtacctaagctctatcttctttaggaatcttttcaaggaagcttctcaaggaggtgagcttatttattagaggggtgtgtgtagctaagctctaccttctcaaggaagttttctcaaagaagcttctcaaggaagttttctcaagaaagcttctcaaggaagctacctagtctataattagaaacatgtgtaacacttgttgtaactttgatgaatgagagtctcgtgagacatacttcaaagttccacttctcttcctcttttattccttcaatgtcctgctcccccctctctctttctctcccttctttctttcctccatggaagcatccttccaagcttcttatccaaggctcatcttggtggcgaagctccttcttccatggc

SEQ ID NO: 225501 - DNA, 322 bp, Glycine max
  unsure (1)..(322): unsure at all n locations
caagctggaatcatttatcctatctctgacagcctatgggtgagtccctccaggtagtcccgaagaagaccggcctcacagtgataaaaatgagaaggaggaactgattcctactcgggtgcagaacagttggagagtctgcattgactatatgaggctgaaccatgttaccaaaaaggccattttcccctgccattcattgatcagatgcttgaacgcctggcaggtaaatctcactactatntccttgatgggttttctggttatatgcaaattactattgctcctgaggatcaagaaaagaccacattcacctgcccct

SEQ ID NO: 225502 - DNA, 419 bp, Glycine max
  unsure (1)..(419): unsure at all n locations
ccgcttcaattgaatgagcgtactaagacataatgggtcacctttattttttcaatncacttccattataggatttcctgactttccttcacacgctgctgtttggtctttcttaatttgcctcttcttttctcttttcttgttggtatgctttgccgctgatatttttatgtataatcatcatcattattattatatgaatatgatgtgctcggatgacttttccctttgtcctattaactatttcctttgatggggttggtctgttagttttcaagaattttcttaactggtcttcctatggtatcatggtttgaatagcagcttgtgctgaaagtatgtgaattgtcaatgtgcaaatgaacaacactatactattgagacaagtttctctcattatcacgaaacttaatttttat

SEQ ID NO: 225503 - DNA, 446 bp, Glycine max
  unsure (1)..(446): unsure at all n locations
agctntaatcaaaatcactagctagttgttctgttagttggagctttatggctcaacctcctttccagaaaggctcagttaaaaaatgagtgattacccctatcaaagataaattaaagatggatatgatggctgatgaagtgagagagaggagagagtggaaaatctttgcttaagttttttttcttttccatcaccatatatataaaatgtgtaggtaaaaggtacatgtgtaatgtgttgcttcatataagcaataaaggtgtgcatgtgtcaggcagcaagttctcaccggaaatgctttggggatactcaagaggaatcattaaatttcatgttggaaaaggaaaatatgttttagaaacaaaattagttttctggaccagctgtagctgtctcttatgtatggcaaacgtggtttgtagataagtgtaacaattaaatat

SEQ ID NO: 225504 - DNA, 369 bp, Glycine max
attcatctcttgccccaatcaattgtcccagtacattcgctgcacttgggcttcccatctcgatatgtagagggtggtaaattatgtatgcatgcttgcttgtatttgctggttaacttatctcaaaagacagcattgtgatggtccatcaagctgtcttctcactaaaacctttgaatgtgtatatatatgtatgtttaaagaaataaagcctaagcttgtgagtaaacagtcactactcacttaaaatctagcttcaacttggcatcaaagcgggtttcatccgctgtcgccgtcgtcgcagacgctattctctctgcgagaccagtgtaggatcgcgtgaaagcgcgatcaccctgcagtcgtctg

SEQ ID NO: 225505 - DNA, 451 bp, Glycine max
agcttgaaatgaggaagtgtagaagggtttaacttcctgcttttattcgttgaccacagagtgatacctggagatatgtcgcgggggtcaggagaccttagggatgtcaggtggggtgctattgcccaaaaccaagcttgaccaatcccgacccaacccgggcatagtcagtcagtgagaacctgtgatgtacctaagcaggcgagctcctggcagtcaacagataaaaggaacaaagaccacaaagcaaggaggcttgtgtggtggctggccagctgtgaactttgattgatatatgggatatggcctctggtaatcgattaccaagggtgggtaatcgattacaaggcttaaaaatgaagacaggagactaagatggtctctggtaatcgattaccaagggagtgtaatcgattaccaggcttgaaaacgaggtcaggaagctaggagg

SEQ ID NO: 225506 - DNA, 418 bp, Glycine max
  unsure (1)..(418): unsure at all n locations
gaagtatatcactctctaatgagaaggttgtagctacaatgccaaatttctcacacaaaacttggctcaagtttctctcgctaggaaggcttcaactaatcttcatcatgctccttgataacctcataaagccccaaagaagatcgttaaagagggatccactcaactgacaagcttctggaggaagtagacaaaaatgacagttgtcatgaagtgacaactaacagggtcatcctaaagtggtcattctcaagaacctttctgatgagcattttgaggtaacattagaatggtaattctgatgttagctgagaaaggatccatacttgaagtatatcctttagatgaagtcaactgttatgtctttctgaagtangatagcttcatcaatcttaacacatcttcacaggtataagca

SEQ ID NO: 225507 - DNA, 443 bp, Glycine max
agcttgcccagagaaggaatccacggatgatattgcttaccacctcgaaaaactggaaagcggtttctaatgactcctctgcggcctccacataaggcatagaggatggccagctcaccaagatgtcttcctcgcctgatacgatgaccagatgcccttccactacgaatttcaacttttggtggagtgtagagggaacaactcccactgagtggatccacggacgccccaacagacagctgtagggggggttaatatccattatttggaaggtaacttggcatgtgtgagggcctatctgtactggaaggtcgatctctcccctaacctcccggcgagtgccgtcgaaggcacgaaccaccattgaactcggctttaggtgggaggcattgaatggtaatttctccaaagtgctcttaggcatcacgtttaaactggaacca

SEQ ID NO: 225508 - DNA, 420 bp, Glycine max
  unsure (1)..(420): unsure at all n locations
ctttgaaatttttttcacacacacactttttgctagtcgatcactcacataaattcttcccctttgtttttgaatttggtctgaaatcaagaaacacacacacaccttttcctagtcgatcactcacataaattctccccctttgtttttgaatttgtgcatatcttaaaatttaattgattgctcatgtggcttcttgaatttaatcccatttctctccccctttggcatcaacaaaaagccaaagtgcgtaacaaattggaaataatcaaacataactaaacatccatacaacattcattgagaaactaactaccaaaccatgaagcaagaatcatgaagcaacaatcataaatagattatctattaaacccatatagtcaaataacatacttaatatgtgtnatacataccatgcaa

SEQ ID NO: 225509 - DNA, 444 bp, Glycine max
  unsure (1)..(444): unsure at all n locations
agctngcatatccataagcaatgaanaatgtttctgtagcagtcaaattcaagagtgactacatatacaaaacaattgatactttgaaacaactgacctttcaactttcttgtgagaaactggatccagctcatatgtcgataaactagtctgaccccttttgtagaattcaaaaccaagttctcttgctgcaatcacaaatgctgcttcatctggggattcagcctcatatgagacatttcctgtgccttcatccacttcgggtatggctgtatgacagactgccaataggcgaaaaaacttctggataacatctgcatgaggctcattaacccaatttccatttgttattctttcgtcagcaaagttaaaacctttaatgagtacccttttatcgagcaaacccctaatgttatctgcttctgattcaatatcatgctcata

SEQ ID NO: 225510 - DNA, 414 bp, Glycine max
  unsure (1)..(414): unsure at all n locations
gcttctagagagttcacattactctagagttctgcggaacgttctataaaantctacacttttctaaaaagctctagaattttctaaaacctctccaattaaggagggatcccaacaaatcctcccctcccgacttaattggggtgtagtaacaaaccggcaccttgacagcaatcttcaaacttcattgtcgctagtactttggtcatcatgtctgaccagttctcgtctgtgtgaacctttgtaagatgtactttcttttccttgaggacatctctgatccaatgataccttatgtcaatgtgctttgcgcgggaatgatatgatgagttctttgccaagtaaattacatttgattatcgcacttaacacatacctatcttgatctgtcccagttctgaacaagtttttatc

SEQ ID NO: 225511 - DNA, 406 bp, Glycine max
  unsure (1)..(406): unsure at all n locations
agctataggctgctcaattgctccaggtttctgtttttatgggcaaaggnctgtatggtggtcagcagaggagcacaaaccacaaacccttgcgacaggtacatatttctgattcaaggccagctgggttaccaagttgaccaacgcatccagtttgccttcaagcttcttagtttcagatgatgcatatgggtttgtagctacctcatgcactcctctaatgactatggcatcatttctggcgctaaactgctgggagttggaggccatcttctcaattaaatttctggcttcagtaagagtcatgtctcccagggcttcaccactggcagcatttatcatacttctctccatattactgagtccttcataaaaatattggagaagaagttgtttgaaatctgat

SEQ ID NO: 225512 - DNA, 356 bp, Glycine max
  unsure (1)..(356): unsure at all n locations
actagacaaggtatatgaatatgatgatagttgatttcaattgtttaatagaccagtagaccttgatatgaacaactgaacaaggaaatcacatatttatgtcccttcatgtgttatgcccaacatcctttattgaccatttctccaccacagaaggtctccaacttttatcaagtccaaaaaatgtaatcacatgagaatataattaacaaatatgcaaaaaatggtattctgggggaagacagaaatatanttgataagcaactgccaaatctacagataagtgactcagaagagaaaacacaaattaacttttattactgcgaaatataattgaatttttgagaactatgtga

SEQ ID NO: 225513 - DNA, 409 bp, Glycine max
ccagcgagcttggtatattgaaccaatccacaaaacacatgcattgttccacctattaccaaagtaatatggaattaataaattgaaataagccaggaacaaaagcaaatgtctaactgtggtggtatgattccaattccattaaatatttcagaagataaagtataaagctatattattgattaaaaaaataagtaaattttaacaatttcttaatttcttatacatgtacatgtatttcatcataaattcatttttcaatcaataggtgtaatttacactaataagttctaactcagctggttgagcaatgtgcgagttattgaacactccttgatacttgagcttgaatcctatggatcaactaagggtataattacaatcttttcactaaagtgcaactcttaaa

SEQ ID NO: 225514 - DNA, 388 bp, Glycine max
ttttttttttcaagaatagacatgggacttgaaatttttatatgtcatggagtccttgactacactaagacaactcattaaattatcataagagggagggagagaggctaacaaaattatcaccaaatcttcatcttccatcttgacaccactatcgcgtatctccatcagaacaaagtttagctcatcaagatgttgctttagtggcacacatctcccttatttggaggccaaacaaacattattccataagcaacttgttggagattgatttactcgcgaagaattccttccatggttattaaactctcgagttaactcgttaactctcgcagagttacgagttcactcacgctctgcgagtagactcgggtgaaactctattatt

SEQ ID NO: 225515 - DNA, 444 bp, Glycine max
  unsure (1)..(444): unsure at all n locations
ctatntgaaagatgaggcgcacgaagctgtgctcttttcggagattgcacgggagatgaagggtccaacgagttagagttgtatattaaaaccaatgatgaccactccgattaaaccaattgaagaaacatgtacctttcatcttggcattgaagaggaacaagttactcaagttatcaacccactttcaatggaagataataacaacttacaacaagctatccgagagcatgctaacctatttgcatggcccgcgaccgacatgccaatcatagatccaaccttccattgttgtagattatccatatgcagagacaccaaacccatagatcataacatagaaagatggggaagataggtgtttgtagtgcagaagatgtcccaaacaatggcacccatgtatagactgttactacacccatggtatgaaatatcatgtaaaaa

SEQ ID NO: 225516 - DNA, 325 bp, Glycine max
caattccacgccgcaccccaaaagaatgaatgaattgtatttacccattggcgcggcggcaagtctactgatcgcgagccggcttcatgaaatttgcaatccaaactaattaattaattaattattctcatcacaattaagcggtaaccgacctagaatctgcaattcataatattataataataataatatttacattgcatttacctggcataatagtttggttagtcgactcatcattaacttgttcctcagcattctcactctgatcagtgtggttagttgacttctggatcatgccaacctccctaatcaaatcaaggag

SEQ ID NO: 225517 - DNA, 396 bp, Glycine max
  unsure (1)..(396): unsure at all n locations
gcatgcaactgttattgaacacactttttttttactaatctgaaatctgtggaaacaatttctcactttcattaaaacttacttcaatttacctattaaagctgtgcaacctgactgggggggagtataggccatttactaaatatcttgcagaacttggtgtgcaacataggttgatatgtccacatacccatcatcaagatggggtggtggaaaggaaacactggcacatantaaaaactgccctaattgtgatgtctcaggcttccatgtcttttgagttttgggaccatgctgttatctctgctgtttatctcatcaatcgccttcccttatcctctatccatcaagaggtaccttatcagaggttgtttaaaaggcttccggattacaagt

SEQ ID NO: 225518 - DNA, 311 bp, Glycine max
  unsure (1)..(311): unsure at all n locations
taccaccataagaggccaaggataagagcgggagaggtatatatganatgaacgcaaggagagcaagagaatagctcttatatatgcgcacacacctgagctcgatttatagcctatgtgccactccctactggatggagatgtgaattctcactcgaatctgtgactgaaatcgtgaagccaaactttggaaccaacatttgactaattatgagtaacgaattctacttatagatccctgccactaatgcactatcatttcccagagtctccactaaatgtgcctaagcgtcatgacgcatgtaaagcat

SEQ ID NO: 225519 - DNA, 339 bp, Glycine max
  unsure (1)..(339): unsure at all n locations
cctgccgcatgcaagctttncgattcatactatggactcgttttgttccacatngcgtttcgcgcatttttattctcgttttgtttactttttataccccctgttgacgtgcttaagccattttacttaagtcatttctcgcttaacttaaaaataaaataaatttccaccgaacgtttgaattgtattatccattaacttcagttaaaataaattccgaccgttcggtcgtgccgtaaccacgttggaaatcaaaaagagggtaaaaataatattataatcaaaaagacatcttttagtaaaaaaaagcggaaaatcaatcgtacgttttctctttgg

SEQ ID NO: 225520 - DNA, 448 bp, Glycine max
  unsure (1)..(448): unsure at all n locations
tctatgtttgaatcttattgtgtagtcaacattcaaaatatttttaaaagataaacaaatgtatgatttgatacattataataataataataataaaatgattataatttatacttagttaaataggttggcctgctagatctaaaaagactttttgaatggcctaaaacttgatcttttttaatcaaagacttttataaaagtctaagtctcacctatttttgaaaaagtttgtgcctaatgtaggttaggccacatgtccctgtngaaggcctaagcctattcttacccctaatcacaacacatacatgcaatccataatcaatctaaaatgagataaattnttctttctttcacattctcttctcnaaattgagaccaccattgacaagcaagggagaaattattganacttatgcatatagcacatgaatatgcttattcaact

SEQ ID NO: 225521 - DNA, 285 bp, Glycine max
tataaagaaaaaaatagactgcacaacatattttcgtcacggttgtactttccaaattacataacataaattctctttgcatcaaaaatgctattccaaccaacgtgtcatgtttgttcgtagctaaaaaaaaggtgaacaatgtgggcgctaatttctttatcggattacacctgaattggttaatacaaagatgcctatattcgcaaccagaagaggcacatccccaatccacaaagtcataagaaccaagggtttcaccagttgcaatttcatttgatccat

SEQ ID NO: 225522 - DNA, 395 bp, Glycine max
  unsure (1)..(395): unsure at all n locations
cccgtcacatgtggtactatgtggcgatcgggcgatggtgcanatcaactctccacatccacaaatcacacatgaacccaccatccccagttgcccaccttcaactgaactcacgtactcccacgtagcccttatcctcgttcctattagcaccggggccccatcaatcccttcaagcttncacaacatccaagcaattcaatatccaaacatcatgaactatccaaaaccaagaaaataaggcaaaggcagaaaactctgcccaaaacacattgcagtaccacagctttccttactcaaataccccagaacattctctttgtccgattcgtcaccgatggacgactaaaactttactgaggccctacacataagcacatttgaccgtggactat

SEQ ID NO: 225523 - DNA, 297 bp, Glycine max
tttttttttttgagccaaagccccgggagggagtcagattgcgtatgactctcacaatcagcttcagaactcaatccatgatcgagattcaagagaagaaaccacgatccaacctgtctagacttcatataggataagcatcaaaagaattgtccaaaaccgaatgctcaggtctggtttacaaaataaatttcttaaattttcaaggtacccgagtgattcttttctggaatcgacacccattattagtatctattaccagtgccacgctggtgttcaaatgctttaaatgattat

SEQ ID NO: 225524 - DNA, 386 bp, Glycine max
cccatcacatgtggtactatgtggcggtcgggcgatggtgcacaacaagtttttcacatccacaaagcgcgcataaacccaccattctctgttggccacctccatctgagctcacgtactcccacgtagcccatatcctcgtttctctaacaccgggtccccatcaatcctcccaaagcttcacaacatccaagcaaaacaacattcagacagcacagctatcacagccaagcaaaacaaagcaaaggcagaaaactctggcaaacaccaaccaaaatcacagcttttctcatttaaaggtcccagaaacaatttctttcatccaattccgtaacccgtggatcgactccaaattttactggaagtctatagtacataaacctaca

SEQ ID NO: 225525 - DNA, 448 bp, Glycine max
  unsure (1)..(448): unsure at all n locations
agcttcagatgcaagctcaaaggagaatttattatcgtttagaaacaacaaacacttgaaaatgaaaacctataaatactagatgctntgaagaaatgagtaacgaacctacacgctatcattcaaattctttatgtagaaaactctttgtatattcttataaagtttgaaaagctctcaaaacatcttgaatactctaagacaaaaaactaaatgcttagatttcacatttgtttgtaagatgattaagatttaatcagttagcaaatcaaacaacatatcttcttatttgtatagaaccaacagtggcttggtaggacaaagaatattcggttgttaaagcttggcgataaactttgttgtgagagctaaaagtaacagtgacaaatacttgtaacttttgtgaaattagtgaaacttgattgtaaccaaaacttgacttagtctg

SEQ ID NO: 225526 - DNA, 394 bp, Glycine max
  unsure (1)..(394): unsure at all n locations
atttttntntcacaaatgttcttcaaatttatttaaaattaatgacccaagcaagaatcaaaccttcgagttttgtgttattagcacaacactctaaccaactaaactaataaatcaattatattataaaataattaatgtcactatatgtaacactaaaattcttaatatttaatgcgcatgaaaatttagataataaattttgtaacaattaattttgatctaacaattaatttgtttacacatgttcgtagaaaaacaaccactagaccacatgtcattcacttattgaataatncaacactgcagaagttgagtggtgactatcaacatagtaacaatgacgtgaaacaagagcctanaagaaatagagaactaacacaacaacagtggc

SEQ ID NO: 225527 - DNA, 450 bp, Glycine max
  unsure (1)..(450): unsure at all n locations
acctgcccgcatgcaagctttgnggcctagtgaccttgaggagttcatttgctaaggnnnnaggnggctggttactgttcacgcgcatggtattgttaacatagcaactccaatttcgttctctgcttcaaattcaagtttcattttctgcttttaattctagttccgttttcatttctgtcttctaatttcagttcgttttctgcctttgatttccttttcgtttctgctgttaatggaaggctgaatctctagtgttgttttctcttgaggtttaagcgtagctctctttgaggttttgttattaatattaaattctgataagttcttccccttcccaaatattttgtatttgctgctgatattaatccacgcatgcttaatgcttgattaattggctatgtgcttaaataacattctgctaatggcatgtggagggattaatggtgt

SEQ ID NO: 225528 - DNA, 467 bp, Glycine max
  unsure (1)..(467): unsure at all n locations
tccttgagaagctagaccttagctacaaacacccctcttgttctaagctcacctccttgagaagcttccttgagaagctttcttgagaatattcctggagaagctagagcttagctacacacacccttctaatagctaagctcacctccttgagatgagaaactagaaatcaactacacacacccctataatagctaagctcacccttatgccaaaaatacatgacaatacaaaaaagtccctactacaaagactactcanaatgccctgaaatacaaggctaaacccctatacaacaagaatggccaaaatacaaggcccaatagaaggaaaaacctattctaatatttactaaagaagagtggacccaaccttggcccatgggcttagaaatctaccttgagggtcatgagaacccctagggtcttcttagcagctctagcctaatcttcttggagtcttctgtc

SEQ ID NO: 225529 - DNA, 392 bp, Glycine max
  unsure (1)..(392): unsure at all n locations
taccggaggaatagaatgagagaaggggggagcatgaaattgaaggaataaaagagggagagaagtcgaactttgagttatgtctcacaagactctcattcatcaaagttacaactagtgttacacatgttcctatttatagactacgtagctcccttgagaagctttctagagaaaacttccttgagaagcttcttcgagaagaattccttgagaggctagagcttacctacacacacccctctaataactaagctcacctgcttgagaagcttccttgaaaagattcctanagaagctagagcttatctacacacacctctctaatagcctaactcacctcctttgagacgagaagctagaaccttgcgactcatcccctatatagctaa

SEQ ID NO: 225530 - DNA, 346 bp, Glycine max
  unsure (1)..(346): unsure at all n locations
gatgcgggtacagcttttgtagggagattaacatgagaacccagacggnttaaatttttgttactggcataaaaacaccttaatggtgaagatgacaagttctaatgtctataatttggtaatgtgagggcttccaaatgataattatgaatgacttagttgagagaacagctttaggaaaaagcacgagattgcaataatgttgtattcgtcttgtactacttcaatttccaattattttaattctcgtaaaggtcatctcaaagcttcataaagatgatattctcgttcgaaaatcagttgaatgttcacgctgagttgggctatcatatcaatacatgtcttt

SEQ ID NO: 225531 - DNA, 306 bp, Glycine max
  unsure (1)..(306): unsure at all n locations
agctngtaagggataaatgaatagcaggttattattctaaatntagggcaacagcagagagcaattctttggaacaatagatataaacatctgcagtgagctcgcgttaataagtcaggctgagtcattcttcaaattgtcatttatgtaccaatttccggatccacaaactgctggcggttnttctctggtggcatattatagcactagttaatactactgtttgatcaataaagaaaatttatatgaacgcagaacctttnntttttaaaaaaaaagtacagataatttgaaaaaataatttta

SEQ ID NO: 225532 - DNA, 377 bp, Glycine max
aggaaaataccttacctggttctcaaacctacttgcatactccgccaccgtcacgctcccctgttttagctcgaggaacttcatcttcttcctattcttcacgtcttctacaaaatacttctccataaaagtctgtttgaaagtcttccatgggacaacaacacctgctccctacagacttgggtgagcgctcttccaccagtactatgcctcatctgccagcatgggagtagcaaacaacacctcttgttggtcctgacactttctcactcaaaagatcttcttaatctccctcatccaagccttagcgtcttcaagatcataaccacccattgaaggtaggtgggttattcttctataagcgactctaaccatgg

SEQ ID NO: 225533 - DNA, 163 bp, Glycine max
ggggattctatttcttaaaacaacactgacaactcaaccctcctgtcataaataccaacatcaatgaatatttagagcaagcttatgcgcatatttccctacgaatgcgtacttgcacaagagcatctattaactagaaaaaaggcacccttattcaatcaac

SEQ ID NO: 225534 - DNA, 362 bp, Glycine max
tcgagcttaatgctaatgggcagcctttgaagaatctaaggaagaacatgaccatgcttgctcagacttggagcattctttacttttctaacctcatccccacttcccacacttctgatgtcaccctatacagagccaaactcatttatggcatcgtcatgaagatggatatgaatgtagggtacctcatctcccaccagatctcccttatagcatagcctgacacatcaagactagttcgaagtccctgaagagcttgagtcctgccattaatttggcttatattaagaaaaactgttggaatcttgatgatccaacagtaactttcacaggagccaggaacgccatgggtaagagatctg

SEQ ID NO: 225535 - DNA, 258 bp, Glycine max
tttttttcagcccaccttttgcagtgtattctggcacaattttttacaatcttctatatatcttctgggattgatgtccactaacgcatgggatatgatctgtggaccattccatgctgttaatacctattcacccttgattgcttggatgtgttagtatagcttatgtacaacaacataggttttcatcaatagtattcttgtcaccatggatgaccaaaatgacttcttactgcactttgcaatcatctgcaaact

SEQ ID NO: 225536 - DNA, 446 bp, Glycine max
  unsure (1)..(446): unsure at all n locations
agcttcaagaaaaagatggcctcagcaatttctttatttccagaagggaattctatcaatagacctccaatctttaatggagagggttaccactactggaaaacccaaatgtaaatttttattgaggcaatagatctaaatatctgggaagccatagaaatagggccttatatacccaccacagtaaaaagagttacaatagatggtagatcatcaagtgaaagcataactatagaaaaacctagagacagatggtctgaagaggatagaaaacgagtacaatacaacttaaaagccaaaaacataataacatctgccctgngaatggatgaatatttcagggtttcaaattgtaagagtgctaaggaaatgtgggacactcttcgattaacacatgaaggaactacagatgttaaaagatctaggataaatgcactaactcatga

SEQ ID NO: 225537 - DNA, 458 bp, Glycine max
  unsure (1)..(458): unsure at all n locations
cctgccgcatgcaagcttgngtttggtattgtggatgaaatattatttatgaaagnaaaaagggagagtagaaatatatgagaaataaaataatatgtaaaattgtttggttgaaaagaaatagaaaagaaatgaggagagaaatgaatgtaaataagtaaaaaataatacaagtagatcctatcatttgaaaatttatttttagcttattttttttgttaccaaatacccaaatattattttcaaacttctaatattatttctatttatctagccaaacacaaactcattatttttaccttgtttctcttcaatcaaaaaacttgaatctttcttttatttttatcatctttatttatcttttatgtaccaaacacaactttttttattttatttctctcatctcaattgaagagagcattaataattaataaactgatcaaaatattaattaatta

SEQ ID NO: 225538 - DNA, 357 bp, Glycine max
gcagaagttcttactgagatttccaagaaaaatgtacgatataaatggggggaaaaactagaacatccattcacttcactcaaagaaagagtgatgcatgcaccaattcttgcattacctaattgtggcaaatcctttgaaattaagtgagatgcgtctgggttgggataaaaggctgtcttaatgcaagagggacatcccattgctttactttagcgaacaactaaatggtgttgcccttaattattccacatatgacaaggagttgtatgcattggtagggcattgcacacttggcagcattaccttctacccagacaatttgtcatacatagtgatcatgaatccttgagcttc

SEQ ID NO: 225539 - DNA, 404 bp, Glycine max
agacaggaaaaattatgctgacattcattgagctccttattggggttgtggttattgtgggtgtagctcgctacatcattaaagggtattccgccactggtgtgttatttgtcggtggcctgttattgctgattatcagtgccattatggggcacaaagtgttaccgtccagccaggcttcaacaggctacagcgccacggatatcgttgaatacgttaaaatattactaatgagccgcggcggcgacctcggcatgatgattatgatgctgtgtggatctgccgcttacatgacccatatcggcgcgaatgatatggtggtcaagctggcgtcaaaaccattgcagtatattaactccccttacctgctgatgatttgcctgctatttgtcgcctgtctgatg

SEQ ID NO: 225540 - DNA, 270 bp, Glycine max
  unsure (1)..(270): unsure at all n locations
cgtttaccatcaccggaaataaggttccatcatcaaaacacccaaacccgttgccgaagagacggcccgagacatcatacaggcgacaaaattagcggcaatcatcagcccggaaggggagttaatatacctgcaatggttttgacccagcttgaccaccatatcattcgcgccgatatgggtcatgtaagcggcaaattcacacaacatcataatcatcatgccgaggtccgccgcgcggctcattagtaatattntaacgtattcaac

SEQ ID NO: 225541 - DNA, 347 bp, Glycine max
cctgcgcgcatgaagcttgccgcaatataatactaagagtgtttgtaagctcaatatctcagtttttcttaccaagtaaatggatcatttttaaggtccaaacgccttaaaatgatcaccttccaagtaaaaagaatcgcttgatccacccttaaaaaagaactacgtaggtctgatttcctcttcaatggagggtacgtaggagcaagagccccgcttttgtcgaccttaaaaataaaaaaagaaataaagttagggtaacacaatttcacacaattctaaaaataaggctgttgtcctttgagccaacgtgagaagtgctaataccttcctcaaacgtaaataca

SEQ ID NO: 225542 - DNA, 331 bp, Glycine max
  unsure (1)..(331): unsure at all n locations
ggagtaganacatgggaccaacattgtatttcataatttaagtcgtatccagtcaaggtctgagagaccatacaagtttcctaacgatttctaattatgtgggccattaagtctatcatatgctgacaatagccgagaagcccatgaatctcttcgggggcggagtaagtgtctgccatcgccttggccttggctaacaaacggggaagttcttgactcccgttcaaggtaagaagcaaccgatccatccacatggttgcctcttggtgtaaagagtcgatcaccctttctctaccctctttttcgcaacacttgacatactcatcccgat

SEQ ID NO: 225543 - DNA, 423 bp, Glycine max
  unsure (1)..(423): unsure at all n locations
gcagctgcaatactgtgtggacatttctatttctaccnngncactcattaggctgggtaattgatcctcaacctcatgccttaactntgaaaaaacctccatttccgattcaatagcagctcgctccttattcaatgcaaggttatcttcttctctctcagctcttaacctttccaactcaagtgttgcctcctcagccattctttcaacagcactgatcttttccctctctatgaaaagctcctgctcaaaacttgcattgatatccttctctactcgagctactaaagcactatgcgcagcaacagcattttcagcaatagattctgcttcaatgcgtgcaagctcttcactaactatttccgaagcatcttcagtagcaagagccatagctgctggggctcttgtactggttatctggct

SEQ ID NO: 225544 - DNA, 335 bp, Glycine max
aaactccccgagaatcagcaaggagaagagtttttttggggccacacggattcctaagtttcaacttacccatatggaagtgacatcatggcagctaggtcccagctttccattgtggattcagtcaacaaaccaacttgaatatgttggactatctaacaccgggactttctattctattcccacacaaatgtgggaagcactttctcaaggttggtaataaaacctctctcgtaatcatatccatggtgagattgtgactacatttatagaatccatttctatcccaactattgatctaagctcaaaccacttgtgtggaagataccctatct

SEQ ID NO: 225545 - DNA, 407 bp, Glycine max
gctgatattaagaaggtggcgaagtgtttcttttgcaagaagaacggacacatgaaaaagaattgccccgggttccagaaatggcttgagaagaaaggtaaatcaatctcattagtatgttatgaatctaatatggttagtgttaatattaacacctggtggattgattctggatctactattcatattgcaaattctttacagggtatgcaaaacctaaggaaaccagtgggaagtgagctaagcattttatcaggcaataagctaggctcacatgtggaggccattggaacttgcattttgactttaagtagtggctttattttaaaattagaaaggactttttatgtaccaagttcttcccgaaacttgatctctatttcaagggcttgcaccgttcggatatt

SEQ ID NO: 225546 - DNA, 405 bp, Glycine max
  unsure (1)..(405): unsure at all n locations
ctttctaaatcaagaaacacacacacacttgtttctagtcgatcactctcataagttctccccctttgtatttgaatttatgcttatcttaaaattaaattgattactcatgtgagttcttgatttaatcccatttgtctccccctttggcatcaacaaaaagccacagtgcgtatcagacttaaatatgctaatataactaaacattnatacaacattcatgaaaaaccatcaatcaaatcatgaagtaaaaaccatgaagcaacaatcataaatagattaactatgaattcacttagtcaattacatacttggtcactctaccatgcaaataatgaaatagttaatcgtttaacaccatattatatacagattattttgataatcctgactttattatcctat

SEQ ID NO: 225547 - DNA, 239 bp, Glycine max
ctcaatatcgcatactgaagctctgataaatacaaacgacaataacttcttactcggatgtccgattgagccccgaaatatgtctagacgctcgatattgaagaccgaagctctgagaaaattcaaactacactaacattttactcggatgtctgactgactccccgaatatatctagacgctcctactctgatatcgaagctctgagcaatacaaacgacaacaactttctacttgga

SEQ ID NO: 225548 - DNA, 380 bp, Glycine max
cggcgaaggcgcacaacaggtttttcatattcacaatgcgcgcataaacccaccatcccctgtaacctaccttcaactgagctcacgtacttccacctagtccataatctgcgtatctcttaacaccgggttcctatcaatccttccaagcttccccaacatgcaaataatgcaacatttaaacagttcaaactatctcagccaagataacatagcagtggcagaaaccttggcaaacaccacccaaatacaatttttccacttaaagaccccagaacaatttcttctttcaatttcgtaaccgtggaatcactccaatatgtactgaaggtctaaaacataagcctacattttgacggtggaactactacaaaaaatca

SEQ ID NO: 225549 - DNA, 431 bp, Glycine max
  unsure (1)..(431): unsure at all n locations
agctnccttaagaagagtccgaaatatgtatattcttagctacgcacacctctctaatagctaagttcacctccttgagatgagaagctagagcttagctatacaccccctataatagctaagctcacccatatcccaaaaaacatgaaaatacaaaaaattccctactacaaagactactcaaaatgccccgaaatacaaggctaaaaccctatactactagaatggccaaaatacaaggcccaaacgaaggaaaaacctattctaatattcacaaagataagcgggctcatacttagctcatgggctcgaaatctaccctaaggctcatgagaaccctagggccttcccttggatctctagcccaatctacttggagtcttctatccaatgtccttgcggngtaggcgtgcataagcggaggtctccac

SEQ ID NO: 225550 - DNA, 250 bp, Glycine max
acatatccacggccaacccaacttttactttccctggcagtgtggatagaagatacacatacaccacactctgtctgttctcccaactaacctacctgatgtaaataatacgtcttatgctaaaataaaaataactttgataaaaaaatgtaactgctctacttaccactaatatgtgaacacgatatagaaagacaaacataggcagatgcaatagaatcaaaatatctcgatcgatgtcactttcctt

SEQ ID NO: 225551 - DNA, 421 bp, Glycine max
  unsure (1)..(421): unsure at all n locations
agctngngaatgaataatggaaatattgtatttatcaggctagngcacagggaaataggatttaatatccatttggggggtgcaaacagtaatcccaataataaaataggatttgaacccaggtgtactgagtgctaatgagtttttgtaacattggactttattgtgggaacaagttgtttttataggcctgtgtagatttgtatcttgaattctggttatgcttctagagcgatggtgaaaacggtgaaacaacacataaaaattaacatgtaattttataataataataataataatattaataataaaataatattatatattataagcttaaatatatttaagacccccgataaatgaatcaaatttgttataggctcctaataaatttcttttgtattttgagtctctgatatat

SEQ ID NO: 225552 - DNA, 417 bp, Glycine max
  unsure (1)..(417): unsure at all n locations
acttcaatattttccaaatcatcaagaatcttgtttttatcagccaanngttcagaggttgttcttgactctgtcatcttgaaggtgtacagctgttgcttcaagcatagtcgattttcaagggactttgtcatatacaatgactccaatttcaacctcattgaggctactgtcttttctcttgcaacttctcttaaagttttatctccaacgcatagaatgattgcacttctggctttagcaatcatctctgatttcttctttgagcttagagattcagacatcctttcttctcctttaagagcttctgcacaaccatgttgaaataagattgcttccatctngattctccattacccgaaagcagtttctccctgaaaactctctatatcggactttgtgggtccatccttcttg

SEQ ID NO: 225553 - DNA, 396 bp, Glycine max
gaacatgctcggaaagatggagtggcaattatataaccctcttttgcacgccaccttgagatatataggatactgattctaagccatatgcacgtctactgcaactgaagatatgtcttccttatgattttagatgtggcattgactcgtagaagtttctatgtcacttaacccagtaccgctggagtttctattatattacccgagtgatgaagagcttttcagagaatatttttagagaatagaagtctctttcacagaactaactacactatcttgagattgaagagatcttatcatttatcagatcatgcttatcaatcatggatctatctatcttacttatacactatacgtctaattctctattgacatatgcatattggttgtgctcct

SEQ ID NO: 225554 - DNA, 446 bp, Glycine max
  unsure (1)..(446): unsure at all n locations
taaccaccgcggctgcagctaggttaagtgcattagtttgtttttcaaggaaaaatacttataacttttgtgaaagttagtggaacttggtggattaccaagaactggatatagtctcagtggtaaaggcgaactagtataaaattctctgcattttatatatttattattttctattttaactgataagggttcgaatttgattttgatatttgaaaagagtttgttacaatatctactattatcgcctaatcttatctatttgtgaaaacttctttttttgtttgataaaacattaacatacaataggctttaaaaatgcttacaaaatntttaaaatcacaatccaacctcccttcttgtgatatttgcctttatagcttggcattagagttcaatctctaagggttgagcatttaatagtgtctacaggataagatcttgat

SEQ ID NO: 225555 - DNA, 200 bp, Glycine max
accgcaaaaaaggcacccagagacaaacaaggcacgcccgtcacccagattatttacacgtacccccaaggtgtatttgttacttacatcacacacctccctggctaaattcacatacatgcatactcaaagcattttgggggaccaaaaaatgcacaagtgcacatcttgggagttctaacacccatacatacacaaac

SEQ ID NO: 225556 - DNA, 442 bp, Glycine max
  unsure (1)..(442): unsure at all n locations
agcttgagatgaggaagtgtagaagggtgtgacttcttgcttttattcgntgaccacagagtggtacctggagatatgtcgcaggggtcaggagaccttggggacgtcaggtggggtgccattgcccaaaaccaagcttgaccaatcccgacccaacccgggcatagtcagtcagtgagaacctgtgatgtacctaaacaggcgagctcctggcagtcaacagataaaaggaacaaaaccacaaagcaaggaggcttgtgtggtggctgaccagctgtgaatcttgtgtgatatatgagttatggtctctggtaatcgattaccaagggtgggtaatcgattacaaggcttaaaaatgaagacaggaggctaagatagtctctggtaatcgattaccaaggggtgtaatcggttaccaggcttgaaaacgaggtcaggaagc

SEQ ID NO: 225557 - DNA, 301 bp, Glycine max
  unsure (1)..(301): unsure at all n locations
cttcncgagcgcccaatgttgtgctagccatgcattacaatatgtgatggtgcatccaaactcttgtctaatggatgcgatgaatgtaggaacaattagttgctcgttttcttcaaccattgcaaggatattttttcctatgagtgtggaatctatcttattatgaacttgtgaaatggtaggcctgacgcatgtgccaagactgtcaatcattctaatttcccatactttaaaacctttcgttcaaacggtctaagttttcattggcacccctcaactcggcaacataagaccaatgtat

SEQ ID NO: 225558 - DNA, 321 bp, Glycine max
  unsure (1)..(321): unsure at all n locations
acagaaaacngggccacgaacngaccggngggancnnnngaaagacgccgggagggcgcgcgacgcnncggggnccgagagcannagncacnggggcgnnnngagccnnngagnccaannagcnnnggaaaaacgccannncnnncccnncnnncnnccaaaacaannnccaagggcccaagcactttcnacancacccananccancagnagccacaacaaaccaccanggggcnccgnngaaaccccacaccgagaggaaccctncaaccgaagcggaancnnccaacnggccncgcggnnnnnggagagaacgaagcc

SEQ ID NO: 225559 - DNA, 429 bp, Glycine max
acgtgaagagatggcgcttagcgcaaggtttgcttttattatataagcaatctgaaaatctttctaagtcattttctgattatctcttcacacataatttgaaaaacctttgtgttcattactaaacaggctgaaataaatcacaatcacaagcaagatgtcctaactacatgcaagaaataaaatgaagatagagaagggaaagataagctggattgcgtcccagtaagtgcttctttaatgtcactcgcttgacgccacatcctgttatccatgatccaataaagttcccacttcaaggaccttcttttcaggtctccgttcctccatcacatgaactttaaacagacattccggtcaagttgctctttatcttcatgaaatagaacaaagcttgatttctgatcttctatttccatgtgcaacatc

SEQ ID NO: 225560 - DNA, 460 bp, Glycine max
  unsure (1)..(460): unsure at all n locations
ttacctgcccgcatgcaagctttanacgacagacacagaggagagttttctaattctctccctctctctcttccttcaggaattggaaaatgccaatgttaagttgcgaggatatagcgaggaaaagaaagagatgacccaactaaccagaatttcaggaccaaagggagggaaggagggaatcgtcccctctaaaagtcacctaataatataatttaagcttgtttattaattccaataatataataattaattagattaaacttatgttttaaagaaatttatgttatttgaatttatgctttagagttatgcaatggacatgtttgaaagagtttaattttcattgaattgttgggcattttatatttttctttcttttactaaaaacaaaaatatgtatttttagttctttaatatccatggatatctatgagtaatggagaggttcgcaaaaaca

SEQ ID NO: 225561 - DNA, 446 bp, Glycine max
gcaagctatatgaattctatcattgtatagtttattatttacgagaaaatgatcacaaacacataatttcctataatcagagtgatcaattccaatatagaagtgaaaataatagaaaaatacaatcaattattaaccttaaagaactttattaaaaagagaaattagagtgcatgggtatagcgacatcacaatatgagtctaagggatttagccaaccatgtccataaaatagctaaacaacatacaatattgcattaataaaagagattaaaaatccttacagattcagacctcaattgttctcggtgcagttctcctcccaaaagctcttgttgtttataaataaaataaagcataacctaaaagaccttttacacttctatttataatgtttaaaataagttgtagtataaaggccaacatgagttgcgctgggtcagcac

SEQ ID NO: 225562 - DNA, 134 bp, Glycine max
aaaaaaaaaaaaaagccaaccggcatgacacaaacactgaaggcagaggaaggaagcacaaaaacaaccaaaaccaaaacccaccgaaacaaaaaaacaaacctcacagacaaacgaacaaaaggacacgccaa

SEQ ID NO: 225563 - DNA, 410 bp, Glycine max
  unsure (1)..(410): unsure at all n locations
ttagtcacctgcctgcatgcaagcttgcaaactagacactagtgtgggttttttttgagacanagangtatttgcatgtatgtattcattgagtgaactagtccattctgggatggactgcaggtttgcataaattatgagatatcattctatatatatatatatatcggcttgatgtgttctggacataggcctctatttctagcttctctaaactgtttcttcaggattgtattgcaatgttgaacagaaatcaaaaagtctgaataagatgtattatactgaggattcttctatcacatacggattgtacaggcgtggcaaaggagctggatctgtcacctgtatgtatataataataaatgtaattatgtaggtttcaacccccccaaatgtaatgtattatacta

SEQ ID NO: 225564 - DNA, 363 bp, Glycine max
  unsure (1)..(363): unsure at all n locations
agacaccaaggatcatggccataacatttcttgaccggaatactgattttgataaaattgtagtctgagtatttccttgatttgagggaatatcatttattgactcaatgaacttaggtttcaaacagtatatatagactatttgtagtctcttcatggctaacaactaactaactacttacaactgtctacttctactagaagtactaactagcttcactagaagctgaagaagactgcagttgntaactgcgctccttaaaaactctaatactttggaggctggacagaacaaaatggaagacatggtactggtgcgaagagcttggattggaagctaagaaagtccggcggtggagcaat

SEQ ID NO: 225565 - DNA, 349 bp, Glycine max
acaaaaagcccgagagaatgatttcaagattgagtcaagaacaattcaagaatcaagagaagtttgatttccagaatcaagaaaagatgaagtccagtttcaagagaagaaatcatgaagacttcacaagggaagtattggaaagacctttcaaaaaacaaacatagcacatttttctttcaagaggttttcttaaaattctctaagttaccagagattttactctctggttatcgattaccagcttccagtaatcgattaccagttgcaaaattttgctgttaaagctttcaactgaatttacaaccgttcaattaatttcaaaatggtgtaatcattaccatatatt

SEQ ID NO: 225566 - DNA, 376 bp, Glycine max
  unsure (1)..(376): unsure at all n locations
gcatactggcttcgagatcacgaagtgtgccactttcagatatgttcagcagggcttgggttacaccaggaagcaatggagatccccttggaaatacctgcaaagacattagttgaagggctagaaattaatagtaattcttacatgatacattgcctttagctacaaccaattaaaaacttaagcaacatgaaaataatagacaacatagatgcaaattcataagtgattttagtgttctccaatcagaactggagtttcaccttctaacctatgctgatctttagtgtaagcctctatcatgcatattacccggatgaaactccaatttttattggagaanaacacanaaaacacctaagaagttgcatgtaag

SEQ ID NO: 225567 - DNA, 427 bp, Glycine max
agcttgcaccaacatgtattagtttcttttttactcaacaaatagtcatcatccatccacaattccaatcattcatgctcaatatgatgcatgcacctgacctcaactctaatatgcaatgtggtaccatccctaaggaaatagccttagcatgtccacacgacactttcacttaggaaaactaggcagtaagtttcgaggtcaccttgtcgtgcacaggcaactgccccccccccccccccacagtgatcagctcgagtcttaagggagttccaaaccgagtgacatgccccatagtacaagtattcctcctcacgagaaactacaagtacttactgacaaagtttatactatttccatgtcatatgaagtatgaaacatgggcaccatccaatgcactgaccatgaataattaaagattctaagc

SEQ ID NO: 225568 - DNA, 356 bp, Glycine max
gaacgcatatgttctagatgtgtggagagtcaacttggttttggatggctcgctacttgtggtctcactactatggattggacgaagaagatggtgagttttgacgatgaggtcagaagattatcttgcagggctacttcataagagacaagcatcattctccagctgtggaaggcattatccatggagcttccatggaaccaacaatgtgatttgactcgaatcctcacctcacccctgttcccgcgaatcctaatttgccggcggtactagaccaacatgtttctctttttcaatctagaaaggggttactactgaacccgaatcatgaccatgtcatcaccttgcttcccaag

SEQ ID NO: 225569 - DNA, 314 bp, Glycine max
ccttaattttaagctatatcttcggaaacatcatagctgacgcctgatttttgtagaacccgtcgtctgaactatgtaaaaatgccgcccctgtcgcgagtttggccaaattccatatcaacacgtatctattgaaaaccgaaagccgagaaaagaaacaatggatgatttgtggactataacgctgaattcttggcacccctaatgggatcagatgtcgacggaaaagagcgacatgagtttattttggtggacggatcctaatgaaacattggggagtcctgagtgtttgctatgcaaacatctaattatgt

SEQ ID NO: 225570 - DNA, 367 bp, Glycine max
  unsure (1)..(367): unsure at all n locations
ctctcccggataacatgcatcacctcacgcacttgttaagnngagaatcttcgggtggtctgaactatgtagaaaatgccagccccatgtcggtgaagtttggtccaaaatatcacatattaaacacgtcatcatcattgaagaaccagaaaagccggaagaagaagaagacgaattggaatgatttgttgagacatataagcgctgaatctcctttggcaacccctatatggtgatcaggaatcgtcagacgtgaaaaaagaggcgaccatgatgttntatctattgtgttggacgtgattcacttaatgaaaaatcaatatgggtgaagtaccctggagctggtttgcctcatgcgagaataatt

SEQ ID NO: 225571 - DNA, 232 bp, Glycine max
aaaaaagcggaattgcaagaaaaaggggcccaacaacacaccacaaaaaataaaataaaaatttggttgcagacccacgtagacgtggaattagggggtcccccttccacaagcaccaccatggactctcttcttccagttaaggtcgaccacgcaatgtgctgaaaacctctaaattctccttcaatctctcaacactcccactctttggaataaccagaccaaccttggg

SEQ ID NO: 225572 - DNA, 207 bp, Glycine max
gagcccctcataggataacctggaaagacttcccaccaagaccttgataaactggagagcttcatggagaaaaaaaagaaaaaaaaaggggagccaattgagataaaaggaaaatgaattgaaatgtacaacttttctaaagacacaggtcacatgcttatatgacagactcttaaactttggaaatcctaaactttgaaaactctt

SEQ ID NO: 225573 - DNA, 313 bp, Glycine max
aacacgccgtagatgaggaactcgtgttatcatgtcatcaatgtcattgtgtttgacaaacctttcctttgtcattgatgtatggccatcacacaactatcaccttcgttctccctctcatgcgtgttattagagtcgctagagatcacatcgagcgttgtctaaaacttatgatgccttccatatagctttgttgcaacactagcataaatctactgtattggtccctctaacaacacagatctcgaactcaaattaaacatgtgtttatgctcttagagaccaaaccctcatgatataggcgggaggtgcg

SEQ ID NO: 225574 - DNA, 346 bp, Glycine max
  unsure (1)..(346): unsure at all n locations
tgcagatgtaagaagccagttatggtattcaaggtggatttctaaaaggcttacgattcagtctcatggtcctttcttgactatatgctgcaaagaatgggattttgtccaaagtggagacaatggatttcagcatgtctcacaacaacaaccatatcagttntagttaatggcagtccctcaaaggagtttgtcccttctaggggcttgaggcaaagggaccctttagccccattgttattgggataatgttgtggttttgaaagctttgctgagaggtttcgaaatggtatcacgcttgaggattaattatgccaagaaccagtttggagttatagggggagat

SEQ ID NO: 225575 - DNA, 173 bp, Glycine max
accacacgccgacagccggccatctgcatgactcaaacgacactcacacaaatcttggggacgcggaagaggacgcaaatctccaacgcgcagctggctcagtcgccaccattgacgaacggcgcataagacgatgatcttttatacacgctaacaggctattttctgacaga

SEQ ID NO: 225576 - DNA, 364 bp, Glycine max
  unsure (1)..(364): unsure at all n locations
agctngggtgctacatatggagtgagacgttcttttatctcccgggctactgccaaggagggcgtgctcacattaagtagggggatacgaatgagtttgtgacacattgtgcgattcgctagtgtaataaaaatgcccctaccatgtgttatgaagtgcatttggagaagcataaggcctgcatatggaaatagaagctgcgtatgtctaatatgggacaagaagaacggagtctttgaaatgatgatgcgctgaccatcgtcgataaagaataaaatactgtcactattctcattaactgtgttgagcattaccactgtgtcgaccgcctctcacaactgaccacttaacttgaactctgaga

SEQ ID NO: 225577 - DNA, 148 bp, Glycine max
  unsure (1)..(148): unsure at all n locations
atccacataagcattgtcacaatttcaagctcttganaagatgtttccaatgactcttccacagcttccatantagggtgtagaggatggacaactcattaatatatcttctttccttgatactatatcttcaatttctggtgcaaca

SEQ ID NO: 225578 - DNA, 365 bp, Glycine max
  unsure (1)..(365): unsure at all n locations
tttatgtttaaaggtcacaaatttatcatatattactattccttattagaacacaatataaaaaagctttcacacttaaaagccttttgtttttaaagagtgtaacaaactcatcccagtactaaaatatatgttgggtatgtgtttgataggagtttggttcatgcactgccactttgaggtacacacaacatgggggctaaaaatggcctttttggtggacaatggcaaaggtccaaagcaatcagtgataccaccacctaaagatcttccaaatgctaatgcgtcaatcatcaattaattatgcaatacacanaagaaaggccttccantgccgaaacaaaagaagctttggagggatacag

SEQ ID NO: 225579 - DNA, 474 bp, Glycine max
  unsure (1)..(474): unsure at all n locations
tcttcttagtcacctgccgcatgcaagctggggttntttagaagaagagagaatggatattccttgagctcaacaacacccctcaccaaaaaccatgaaagcatagcccaaaaccaacacaaatgagagtttgcacaaatacccattatggatcaactcaaagaaaaggaagaaagagagaaagagagctcgtcgttccaacaatgggatcacaaactaaagaaaaggtaggagaacctcttgtcttggagagaagaaatcaattcccatccttaagagaattccttgtgggtggaggagaaataagagtttgtgaaaggaaaagagaacacctgggaaaaagagagaaatgggagtgtctctggatatagggtttctcataaagaatagaagaaaataggagaatgaactctcncccgcaaagccaatgggccaaaccaaagctccaacacaattcaacacatcatctaagcg

SEQ ID NO: 225580 - DNA, 417 bp, Glycine max
  unsure (1)..(417): unsure at all n locations
aaacaantattgcctgaaccactggacaaaaataatgcacaagtacaaagtttaccttgtggattttcaaaaatatttcttcaacaaatacttaaaatgatatgccgtagtatcaattgtttgactttatccttgacaatggattgtgtgttatggtgtcttggttcatgccaggtatgtcctttgtttaatgtgattattgaggtatatgatatgatattatttacttaaatttttgaatctatcatctatgtgtttatttcctttggttctattatcatttagaatctggtattagacacttggttttaanagctgagatgtgatgttttttatctaaagaaaattttagtttaattgaaataatcttaatattcatcaatcaaggtgtaagatctgtcagaagacaattgtcaa

SEQ ID NO: 225581 - DNA, 418 bp, Glycine max
  unsure (1)..(418): unsure at all n locations
agcttatacagatgctgttttatatattcttgaancacaacctggcaatgtggaagttttaattcagtggcaaaatctccctcccagtgaaaatagttgggaatctgtggctaaattacaagaggtttttccgacttatcaccttgagggcaaggtgagtcttttaggcgggaatattgataagcataagcataagccacacatcacccgcaaacagcgagcatgagaagcaataaccatggaccaccagcagcagggtgcacaacacccaaggggtgcaaaccacccaacagttatgacccacccaaggggtgcaaaccacctaatagttatgacccacccaaagggtgtaaaccacccaatagttaggattcacccaaagggtgcacggtcagaagatgtgaatcaaagggacatg

SEQ ID NO: 225582 - DNA, 287 bp, Glycine max
ttagctatataaaccctccttcattgttttacaagaagctgaagcaacaaattgcatgcattaaattattgcattttcccaaagttccaattaatggtagattggtttgtgtggcaagtgtgcagtctcaattgctatttctgaagaatcaaagttgcaggggcgttataattattcgcaaggtacacggttgtgcaagcagcttgaaggttattcatgcatagtaaataattatatcataaacgctctgaatgctacacaacaacatgatcaaacaatgcagactg

SEQ ID NO: 225583 - DNA, 439 bp, Glycine max
  unsure (1)..(439): unsure at all n locations
agcttgtcattggactcataattactttttatgacacgatccttaactgccattgtctgttttgtcatttttgtgtgtggcggtggttggtgagggttgggggagggtacacgagggttagcgattggggcttaaggaaaggggtagtatgaaccttcatcctcatcaaggatcaggcatgtgggtgccatcatgacaaattcccaatggcatgtggaagccattttctgacactaaaactttttagaacatgttatccagtgcagtgtggaagccaatgatattaaatttaagagcggtaatgctctttctagtaatataattagtgtacatttacaccattcctttgagttcccattatctaattttaccattttgtaacgaacgtggngaggattagtaacatgtgagatagaaacaatacgttttatcaatgttt

SEQ ID NO: 225584 - DNA, 414 bp, Glycine max
  unsure (1)..(414): unsure at all n locations
aggtactactagccatctaaatatgtattagttatactatgcatcatacttatgggtttaattttgatcctctaatagtatagaaatattntcactatcaacaaaccatttattgccatgaatttaaaacattgtttattgattgtgtactgagttaggatcaaattattagactctgataagataatgctctgtttactgggtatcttanattttgattgtaggggtccaatgcaagaacattttggatttacataaatctgaatcctgtttggttattttgtttgcattgacagtttcttttaatagacctgcgatgtcatggcgattcagcatcaatcaagaagagagatccccatactgttgcatctgctgctatggatgttttgaaactggtgtgctttctttacatgt

SEQ ID NO: 225585 - DNA, 435 bp, Glycine max
  unsure (1)..(435): unsure at all n locations
agcttcactaactggcttgtgttgttgattactatgttncctaagaatagcatgctacccaagagtcactacgaggcaaagaaaatatcatgtcccatgggtattgaataccagaaaattcatgcatgccctaatgactgcattttgtaaataaatgagtttgcagaaatgcacaattgcccaacatgaggagtatcacgatacaaactgaacaatgaccaatgcaatggtgatggaagcacaaaaaaaatcatccagcaaaggtttgttggtgtcttccaataataccaaggtttaagagattgtttgctaatgcggaggatgcaaaataccttcgatggcatgcggatggtagaataattgatggtttcctccgacatccagttgattctccacaatgggagaaaattgatcggttgtatccagaatttggac

SEQ ID NO: 225586 - DNA, 308 bp, Glycine max
tacagcagattctagtaatgacccactaacctagaatttaaataacttaatgccattaacctagggaattaaaaaaaaacttaatggctgagtgtaactgaaaatgttgcaaccaaaagtcacccccaacagccaacaagtcagccaccatttggtctcccaaaaggctgatgcctatgttgccaattgggcccttattacaacttgaacttaacctaactaaagcccttttagttgattaacccaaaacatatttttggtcagccaactttacaaggattgggccattatttagacaaactaaacac

SEQ ID NO: 225587 - DNA, 207 bp, Glycine max
acagagtggttcctgtagatatcccgcgggcgtcatgagaccttggggacgccatgtggggtgctattgcccaaaaccaagcttgaccaatcccgacccaacctgtgcatatgtcggtgagtgagaacctgtgatggacctaaacaggcgagctccctgcactcaacagataaaatgaacaaacaccaccaagcaaggatgcttgtg

SEQ ID NO: 225588 - DNA, 422 bp, Glycine max
  unsure (1)..(422): unsure at all n locations
agctncatgacccctaggctatgcttnttgtctattnngggtgaaaaaatgtgttttcgtgacgaaaatccaagccgaggtgcttctgtaacgcttccaaagtggggtgattctgtggaaattcttcatcgatcttcaccgttcttcgttcattcttcatcgttcttcagtcttcaacccggaagttcccgaaatcgaatatttcaattcattctatgcacccttagtggcccctacttgttttgtggactttcactttaatttcgcttactttcaattttcttttcttccgctataacgagcttttaaccgtttatttaaganggtttctcacctaataaatgatcaaacgaatttcaatcgatcatttgtgttgtaatctcatttaatcactggtaaaacaaaatataaccgatcgatca

SEQ ID NO: 225589 - DNA, 261 bp, Glycine max
ccaccaaaggagatgttttaatgagtccctattcaagttgggaatgtgtgatatctatgcaccaacttgagtgggggtgctaagataatattagacgataaaatattatgctaactgtaacttaaactgtattacaattgtgacataattagtggaattattattcccttaataaatgaagaattataagacgcctactcatttatatatatatatatatatatatagtggctaatctctatagatctatatatttataat

SEQ ID NO: 225590 - DNA, 312 bp, Glycine max
  unsure (1)..(312): unsure at all n locations
ccgctngtgcattcaanatcctgatgagggtgatccatatgttctcaagactggactaatccatttgctacccaagtttcatggttctgcacgtgaagatcctcataatcatcttaaggagttccatattgtttggtccaccatatagccccctgatgtccaagaagatcatatctttttaaaaggtctttcctcattctctanagggagtggcaaaagattggtgtactaccttgctctcacgctcattattaactgggatgaccttaagagggtggtcttggagaaattcttncctgcttctaggatcac

SEQ ID NO: 225591 - DNA, 432 bp, Glycine max
  unsure (1)..(432): unsure at all n locations
agctatgcatggaaaatgtaatttgatattgagatgcccgaagaaacaccatttcctagttaaccatgcattaggtaccatgttcaattattttgtttttaagtgaaacgggtttatgatcccaacatggttggctcgtggtgcctaacacatgaaactaagaatgtagtgtgaagtttcatgcttccccctttttgtttttgttttgtagaggaaaacacaaggatgagcaaacatgaaaacaaatggtatgcaattntgcagatcaaaaagtttgttgaacgcatatgcatgatgatgccatgactcatgcaaaatgtgaggccggaatatgataacggacaaatgcaggatatgtccattatgatgttatgaagaggtgcttatgcgatgcatgatatgaatgcattttacggacacgagagcccggaa

SEQ ID NO: 225592 - DNA, 352 bp, Glycine max
catcagaccacttcagagtgtggtacttcttttatggacttgatggggcccatgcaagttgaaagccttggagggaaagatgtatgcctatgttgttgtggatgaattctccagatttacctgtgtcaactttatcagagagaaatcagacacctttgaagtattcaaagagttgagtctaacacttctaagagaaaaagactgtgtcatcaagagaattacgagtgaccatggcagagagtttgaaacagtcagtttactaaattctgcacatctgaatgcatcactcatgagttctctgcagccattacaccacaacagaatggataatttgaacgaaaacacgactttg

SEQ ID NO: 225593 - DNA, 216 bp, Glycine max
agctatagactggagagaggttacttcttttcagcgccaggccaacaggggaatggcgctctgaactatgtgcgactacggagaattatcttctagttaaatactgaaacaatcagtatactgatctacacactctcaaatggacgaccatactgcatccctgcataatatcattaatgaggcttgctagcgcgataagaatggtagattgacttg

SEQ ID NO: 225594 - DNA, 203 bp, Glycine max
gcatgccccactctcacatagttgcacgatggccgatgacaaatcaaccgttcggggagagtacctatggaacgcccgttcgtaaggaaaccaacatgagatactgagaacagatgcaaccacgatataagaactgaatgatatttctatatcaagaatataccaacacgccgctatatgaacgatattctacccagcactct

SEQ ID NO: 225595 - DNA, 394 bp, Glycine max
  unsure (1)..(394): unsure at all n locations
caaggataaaagggatgccccacattatttccatgacacaaatgcaaagatgatgatttggaaattttatgcaaaactggtcatgcatgcacctatgtggacgctcaagtgtcatatatttatggtcatgtgatgctagggctcaggattcatttcctatattataaatcaacccaatgtttccaaaatatgctcttttatcaatttatgcatttatcctaggtcatttcgggcgtccggggaaattttaacagattcacccttcaggtgtagacacgttttttcttcacaaatcgggtatgatctatgaatctttattttcaaagagaagatggaaatcatctcttnttaaaagcatgttgggtttagctagacaactatttttatttttctc

SEQ ID NO: 225596 - DNA, 434 bp, Glycine max
ctcaagcttgaggtgatctaaggatggcctttgaggatgactattttatggttaatgagacaggctgacttaggctatgtaatgacattgctgggctgatgggaaatttgaccgtgtacgaatggcagtcatactccctcattctcatcctctttgtttgccccaatgttcgcatttatctaaaggtggatgatcagatttacctttttccagacccactttgatcttttcaccggcgacaatcattatccgaaagctttgatgtgtgtaacccaccatttttccattaattgttgtggctgggggcaaatgatgcccctcagaatatttgcagggtttttaccaactgcttgtcctcagtggctatccgatgcaagctcaaattggttattgggtgggaatcaatgggaaaccccggttagaaataccatgac

SEQ ID NO: 225597 - DNA, 444 bp, Glycine max
  unsure (1)..(444): unsure at all n locations
agctttcctctggatgatctactagggtttccaagcgttatagagaatgagaagggattggaacctcaatttcactttctctatgtgagagccatatctcactctacagacattatgtcataaatcccaacggtggaaatgtgcgaaaatgagttgcaaaggtagtgtctagatttaggaagataaatggtcaatgagttcgggatcgtagttttatggggattgatttangtgtatgtgggaaaaatgtcaatcccttgatctctcaccccccccccccccttccttctcaatttttacttcaccactagatcaatcttataactgtaagtgcataagctgtatgaagattttgatgatgccaaaagatgaaagctattcaacggtgattcaagtcaagatcaagaactcaagagatacgatttaccaataatcctttatatg

SEQ ID NO: 225598 - DNA, 272 bp, Glycine max
  unsure (1)..(272): unsure at all n locations
ctcaagcttgaggatagagacttcccaagctatgtatcttctctcttattgagtctctcttactttctagnattctcactctaagaagtggattcactcttgtcttggatccgttaggaatgaaggctcctacccttatttatactactccacctccataatgaatggaggagattacttgtatcctacggtggggattaattctctagaatgctacacacattctatgaggctctgcacttctttactcactttcatatccttccatactc

SEQ ID NO: 225599 - DNA, 416 bp, Glycine max
  unsure (1)..(416): unsure at all n locations
agcttgtnacctcacaagtatatttggatgtttgtcactcttgaatggctttcaccttctattgatcaacttacacttcttgtgaaataacaactaatttgagaaaaactacatggtccatataaaacacacatttttccaaggtagcatacaatttctcttgcttaagagctattaaaacacaccttaattgcacaagatgatcataatgggatatgctataaatcagaatatcatcaaaagaaactacaacaaactttcctagaaattcccttaacatatgggtcatcaatcccatgaaagtggtagatacattattttacctacagtgcataacccttcactcatacaaccgatatttagtcttaaaaggtgtttctccattcatcaactcttttaattctaatttggtgata

SEQ ID NO: 225600 - DNA, 331 bp, Glycine max
cggactctcagccacttatgattgccgccgaagatcccattactgcttctcctaagctctctggcctttcttcacgccgcatcccttgccttgcgaactccttggagtacccccacgttggggccactgaaaccccatgcgatgaaaggcgtgatgctttcgtctgatggcacttctctcatggggtagccaagctgtcttatggcgaggaccggattataatcaatacaaccccttgttccatcaagagaacatttggacatccttcgcatgaagatagaatcctgattcttccctccttctagcgagggaaccaattaacagacgcccc

SEQ ID NO: 225601 - DNA, 448 bp, Glycine max
  unsure (1)..(448): unsure at all n locations
acctgaggcatgcaagctngcacttgntcacccaacctgactttggtttgtcttattatggagnatatcttacatgatgtcgaagagttttgtgtagctcatgttatgcataatgccagtcgtaaagctgttttagttaaccacaattagttatataaggttctaacttctaaggttctggaatntgttgtaacagacttcagacacttacaaatctgacaaatgtctctgtagctatatgtggaacttatgtagtcagataccttatgaatcagttcagaaatacaaaatctcaaattaagtaactttccaaattctctccaaaaaatttctgtatttctaccacccctttccttttatctttctaatttctaatcagcaaggacccagctggaatccataatcaagacaattaacacatcaagtttaaacacacgtagaaaataaa

SEQ ID NO: 225602 - DNA, 456 bp, Glycine max
  unsure (1)..(456): unsure at all n locations
actcaagctntaagaaagcaaattgaataaaccctaaacactcacagttttgaattctcttacttacttgngaacacacaacaacactgaaacatttttcgcgtatataaaggtcctaaatcgccatctggaatgactattccttctgccctaactcgccagtgggagttgcaacttgcccttaactcgccaatggcagttgcaactgccctttctctgaaaaagctaccctacttgagaaagcacatgacaaaagcctgtacgcgcctgagaaaagcctgcttttcagcaacttggaaatcaccagtttgactggcggttcccatggataccgatatcccccatagtgttggcagatccttctaaaacaccgaacttcgccaatccactggcgggttgcgtgtcacctgctgcactttatgtagaaacaaccgcctgccggaattagttcataac

SEQ ID NO: 225603 - DNA, 418 bp, Glycine max
agcagcagcttgctatgcagccaagtttattgtaaaaataaaacacgtgtgtcatcaagtgccaatctaaactgcatgacgtgttccaagttctcatcaaccaattaccactaggcctacaccaacaattacaagaaatcgttaacggaggaatagtcggtatcaaactagctatatgagcgaaaaataaaaataatatagtaacctcccatgaaaatgatctacatcagatacatgctcttcaaagagggctagagcaatggctgcgcctgagggataattaactaactaactaaatattagataattaaaactataacttcatttaaataactaacctcattaagaagtaactaactaatcgactataacttaattcaaatacatactaattagacttgatttaaataaataatac

SEQ ID NO: 225604 - DNA, 307 bp, Glycine max
tactaagcttctaaggaagtgagcttagatatgagacgttgtttttgtatctaagctctagcttcttaaggaagtgttttcacaaaagcttctcaatgaagttttctcaataaagcttcttaaggaagctacctattctataaataagaacatgtgtaacgcttgttgtaacattgatgaatgacagtcttgcgatacaatacttaaagttccacttctctccctcttttattccttcaattttgggcatcccacatctctctttctttccttctttcttttcctacatagaagcataccttcaagc

SEQ ID NO: 225605 - DNA, 303 bp, Glycine max
tgactggtgtaaacactaatatctgctcccatatcacatacatgctctcatacattctatattgtacacaaaagcaatatgtgttattcaacaatatgctcaacagcctggctactttggagataatcttttataaaacccctgtcaaccctggccgtactaagaaaccctcttattccttgacactcagggaggatgtaattctcaatatacttggccacctctttcctcatactgaaattatgacccacactatccttttcaaccatgaacgaccctcttcccattggaactcatccatcc

SEQ ID NO: 225606 - DNA, 438 bp, Glycine max
agctctttagagtatatacatgggaccatctcattctatttcacaaagtcgtatctagtcaaggtctgagagaccatacatgttttctagcgatttctaattatgtgggccattaagtctattatatgctgacaatagccgagaagcccatgaatttcttctggggcggagcaggtgtccgccatagccttggccttggctaacaatcggggaagttcttgactcccgttcaaagtaagagcaaaccgatccatccacatggttgcctcttggtgtaaagagtctatcacccttcctctagccttcttttccgcgtatacttgggcatactcgttcgcgaccctatgctctggggtcgcggctagacctaactctttctggtacttggcgatgatagctagcattgtgggtcctcgtctcgcataaacgttgagacaa

SEQ ID NO: 225607 - DNA, 351 bp, Glycine max
agcctcagactacatgagagaaatgttgttcctctatctctaacaagggaggagatggctttaagctagctcacaaaagcctacaattattccagggggccaaaatgatccctatgtccataaactattatcttttgtgatcaacatctggatgaagtaaaagacaattagggggattcggaaaggttaagtgggaaaaactatactcacgtcgatttccattatctgcaagcatggcaagagatgtgcttgtatacaagtctctattgtggccttagagtctacctttatagcgaagcaagagttatggatctatagcaatgctctctcactcccccaatggcggaacca

SEQ ID NO: 225608 - DNA, 414 bp, Glycine max
agcttattgggcatgaaaaattctgaacttctacgcaaatgcagctggtgaacataagaagctctaactccatgaattggaggaactaagggttcaagcttatgagaattccaagctttataagcaaaaagtaaaaaaattatcatgacaaaaagctttcaaaaaggaattttcagtctgatcaataggtattgctatttaattctcgattaagattgtttccaggtaagctgaaatccaagtggtctggaccattcatcatcaaaaaagttatgtcacatggagcaatgacattggaggacccaaccaccaaaaggacatggaccgtgaatggcagcaaaatcaaacactaccttggtggagatatcgaaaggctaatcactattgtccaactgaaagaggcttgaaccacac

SEQ ID NO: 225609 - DNA, 438 bp, Glycine max
  unsure (1)..(438): unsure at all n locations
acacttgatactaagctttgactactgtactcaagatatgggatttaccattctatatattgataacaaagtctcggctgttataatccttacaacaacagataacaaagaataaataatatgcccacgtttacacaacctanaaatgtggtatcatggctgggaaataatccaatgtgaaactacttaatcccaaataattggaataaacataaaaaaattttctaaacaacccaacaaattcctcccctaaacgaattgcactactgatgcattcaatttacctctggtacagagcatacacctattaacttacgcatactttaaaatacatccaacttaagtggctttgtcataatatctgcaatttgtcctgtgtgctcaatacttaattcattttccatcttagttaatacataagaatggaacttcatcaat

SEQ ID NO: 225610 - DNA, 421 bp, Glycine max
  unsure (1)..(421): unsure at all n locations
agcttccttaccgaaaaataatttatttgncagngantttaaaaagaattgcgcaatgtcggcagaaaaatatcagtcgtggctatataacgaccgatgtcaggtatttttgtttcaattcaatccctgaataatttttggatattgtccaataggaaatgttcgatcggcgtcatcaggtgatgcttgctttttattttagacctgctggatcggtcatctttcctggccgacatcgactatcattctttttatcagtgtcggagaataatgttatttggccgaggtgggctgatgtttttctagccgagtaaatgagaacacgccagtgtcggccgaaacacagcttcggttgagctcgcaccaaacaacatagccgatctacattgtaagtattgtaggcgacaccgaacaacaaacc

SEQ ID NO: 225611 - DNA, 325 bp, Glycine max
cgtatgagtactacgaaagagtcaagtatttgtgtgcatttctgcctcaccaccagatatctgagcaactccttcttcaatatttctatgagggacttagcaacatggagaggagtatgattgatgctgacagtggtggagctcttggtgatatgacccctgctgaggctaggaatatgattgagaagatggctctcaactccctacaattcagtgcatgaaatgatgttattgtccttataggagtctatgaggtggccacaaattcatcttcatctacagaaaataaaaagcttgaaggagaacttgatgccttggtcaacct

SEQ ID NO: 225612 - DNA, 407 bp, Glycine max
  unsure (1)..(407): unsure at all n locations
catgnagggaagaattcttgtttttgctgttgaagatggaaaactacaactaattgccgagaaagagacaaaaggagctgtttattgcttgatggcatttaatggtaaattgcttgctgctattaatcaaaaaattcatctgtataaatgggtgctatgggatgatggtactcatgaattgcagtctgaatgtggacatcatggacacatcctatcactttatgtgcaaactagaggagattttattgtagttggtgatcggatgaagtcaatttccttgttaatctacaaggtaaattttaaactggtgtgacactagtctctgntctggtttgttaaattcaactgttcttctgcttagtgttttggatgaataactganttttgtatatataatgagtacattc

SEQ ID NO: 225613 - DNA, 403 bp, Glycine max
  unsure (1)..(403): unsure at all n locations
gacactatnngaaactcaacgctttggatagctgacaacattagaggttcctgtgagtnttanttatnttccttcagagcncagagccttgaattgatttcatccactacttctttcttgcagtcaaaattcaagttctgcttaacaagcatgagggaagcttcatagtcaagtttgtgatttagcaaagaagcagcagtccaacactgaaaagagaaagcttgtcaagtacatgtactaaaggcaaccaagtgaacaacacaaatctacaagagtttggaaacctaaatctaacaacattaaacagggttgtaaaagctttagaagatagaaccataacttcttaataacaaaagttacatccaccaagcattgttctatgtagatccctacaatgaaatat

SEQ ID NO: 225614 - DNA, 450 bp, Glycine max
  unsure (1)..(450): unsure at all n locations
agctttngaagaatgatccgaagaacaaatttgtcaaaccaaaatgaaactccgagttgacttatccctttcaaaagttgatggtcttatgacaatagtagaattcatatcattattaaaacatattccatccattctgcattctgatatatggnttttgatagatctcaatggcaccaattgatccatgcatctgatcccctatagtggaataaggcatagttgttgttgtattcaatccaattatcatcaaagagttcaatcacaagaccagcatatacttagcagtaaagaagcctctataatttgataccctagagtaatgatcaaaagctgggttaaaacttaaaactganagcattgaagttgattttctctattccttagacttgttttttgtagtagtgactgaacctgtgtggtacaaatattaatttnttatactttaat

SEQ ID NO: 225615 - DNA, 450 bp, Glycine max
  unsure (1)..(450): unsure at all n locations
tcagcttctgtgtcctatgaccataaggctatcatcattaatggacagagaaggatacttctttctggctccattcactaccccagaagcacccctgaggtattacactcaaatgtatttcaggtttctttccattttggcctttttttttttttatcaaatgggcaccttaaagtatcttccttttttcagatgtggccagatcttattcagaaggcaaaggaaggaggtttggatgtcattcaaacttatgttttctggaatggacatgaaccttcacctggcaaagtaatgaataatgtttgcttgcagtgtttgaaaaaacatgcattttttgttgctattatcttttttaacacagttagctgttttttgttgctatcggtattatcttttctaacaagtntagctgtttcgttttggtgaaaatatgagttatctggtgaaatg

SEQ ID NO: 225616 - DNA, 424 bp, Glycine max
  unsure (1)..(424): unsure at all n locations
tgcagcatgcagcttngactcgaggcatcagattgttcttatagttnggaaagaatactatgcccagggctctcccttttacttttttgccctcaacatactgttggggcaagcatagactcaaatagaatatcttagccacgcattgcatagactcagatagattatctctagatatattgagatcttactcttgctccccaaacgtatctttttctctcttgtttacatggctagacatgatttggtctttaaccgagccaaatggtgcggggggattcatgtagctgtccttacataagggataaagattttattgttgttgttgtttacatagctagatatgctaatatgcgttggcagtgaaagcaattatagactgcatgaagggtctcacttagaaagctgtagataaaaaagaaaa

SEQ ID NO: 225617 - DNA, 458 bp, Glycine max
  unsure (1)..(458): unsure at all n locations
acattgcagctgcaatcactgttgcagaccaatnttatatacctttcattcggctattggcgttctagatagtgagttgtattggaaatgagctgaaaaattagagaaatgacaggaggaatgttttcaaatttatgtctcaaggcaaatagatatccttgtaatgatttaatccaagaggcttttaatttggatgtggataaatgaattacagagccgtgagccagtgaattatctacttgacaattgcattataaaaatcctattgcttgtcttctattgaattctgtgttaagattcaatcattctgtcagatttacagggttactaggttttaaattgtgatctgcaatcaccattgtggctgccatgttcaaagttttctgcattcatattgcaactgcaattgctgtagcatatttgctgtcaatattaaaggtttcgacgtctcataacca

SEQ ID NO: 225618 - DNA, 447 bp, Glycine max
  unsure (1)..(447): unsure at all n locations
agctngatcaaaacaaacatctaatcattttcttgcactcaattcttacaattnctcattcaaatcaatcacaaacacctcattcataagaaatcacaccacgaaatatcataatcaattagttcactgttcaaacatgcttttgtacaaacaactaaaacaactgaaatttaaaagactaaaatttaaataactaaaacataaagcataaactaaataaactgatcaaaataaattgttcaaaatgcaagacaagaagataaagatcctgtcaatcctcctgcgagtagtcctctgcatgctcattaagatccaacatcagaacagctggtacatcctgaagaatgggctgctctggctccatggctggtgctgatagcatggtgtcctcagatataggtgcaaggaatggctctgccatgggaattggagaagtctcctcttcct

SEQ ID NO: 225619 - DNA, 336 bp, Glycine max
ctaccaactactccctaaccgtaggtgactctttaatgagggtcttctaacatggctaatactttattttcatcgggcatacgatgcaaaaactaggttaagtgataaaaatatcgttaaaggcattctaaaaactatcttttgtatggatccaaacatactttattatgagacaaaatttagcagaggcgaacactgcccatgctttcataaaacaatacgaaattttttttcaaaagctaaatgttttcttctataataaaaaaagttaaaatcggtcctgaaagttctaatagttctcgcctcacaaatcaaacggcccattttgctacgacg

SEQ ID NO: 225620 - DNA, 153 bp, Glycine max
aaagaaaagaatggccaccaaaaccccacacgaagaacagattcgcactccacacaaaatgccccaccacacccaacagcctcaaatcaagtgaacctgccgaccggtgcacaagatccttaacacaacaaacaaagacaggccctccatccc

SEQ ID NO: 225621 - DNA, 417 bp, Glycine max
  unsure (1)..(417): unsure at all n locations
agcnnactagcttagctgctaatatttatcttataccacaaacggggaaccttaccccaaataacaaactaatataagcctttaatataaagcatataccaccaaattgtgaaccttataccccaaataacaaactaagtaaagaatttgtaaccaaagattactgaaacattaattaatctccagttgttaacaaaaagaagtgagaaaatggacctgcaaaaatggaaacatatccccaaactggattatagacattacctctacccttgcaatcacagcaccgagcagaactctctgtttaaagcaaaagatctacattgcttagaaaataagtttgtgatctgcacaacaactatatgcggaaaacaactttgaatagtntgaatatggtcagggctccagattgatgaccat

SEQ ID NO: 225622 - DNA, 444 bp, Glycine max
  unsure (1)..(444): unsure at all n locations
agctnngaatctccatacatgggttgcacttgttttgtaacnaggccagaggctcaagcggcgagtatatacacattaaaatgctttctttgtttcccactttattgaaattatcatatttttggattttggaacaaatgtaacattttttcattaaattttaaaaagtactttctatcttttttgacttctagaatacaaaattaaaattgtatactggaaatgtattttctaaaaccaataattatgtgttccatgaagtgtatttctgaaggacatttagatttgtgtttcaaaaaatactttctgaaatacaaaattttaaacattaattttggaatgcacttttctggaatgatgatataaggatattatgggtatagcgaatatttataactggaaggggagtgtaattagaaaaacatgatgagtggatttaaaaat

SEQ ID NO: 225623 - DNA, 358 bp, Glycine max
tgctgcatcatcctcctctacctcatcgccgacaaagaagaaaaagcccgcacttgcaagttcaaacctaagcctaaagcctagcccgctgcgaaagccaggatactaatgcaactaaattcgaagcaccagctaagcccaagccagctgctaaacctaaagccaaagcttcagccaaggccaaacccgctgctaaaccaaaggcttctgctgctgccaagcccaaacctgctgacgccaagcccaaagccgctaaaccagctgccaagtccaagcctgctgctaaaacaaaggctggtcctgccaagcccgcggcatagcccaaagccaaaccccgtcaaggcttcaatgacgtcca

SEQ ID NO: 225624 - DNA, 314 bp, Glycine max
  unsure (1)..(314): unsure at all n locations
agctngaggaataataaggaactattatggacaccnctatcactgacaaaccacacatgtgagcacccttagaggtaagggacgagttaattgcaattggggttatagcgagcatgtgtaaggatccttagaagatcaaattggagctaattttggggcgattaagcttaataaatttgcttcgataatgataactatgaagtgcccacggtcgacgggtcaattgatgccctgatgcgaatcggatgatttaattgaatgtctcgctttgaatgttagaaacctaaaaatttgcgaattctcgattctcgcat

SEQ ID NO: 225625 - DNA, 395 bp, Glycine max
  unsure (1)..(395): unsure at all n locations
cgaaaggaggaagcactgaaatcttaaacatggcctgcgggaagcatcaaatattacaccttagagtctaaatagttatgatcacaacgaagataaatttcagactcaataaaacacatggcgcaatatggaaaaataagatgaaaacctgaaatctgcatagaatgaaatatttcccacatccctctccattcttaatcacattggacacttcaaacacctgtaatattatgccattataggaaggagggaataggatccatgttatacctgcacaggcacaccaatcattatatgccctgccaattataaaagtcaatttggagaatgtgagctatntttggccagtcctttgctatatccttctcacatcgcttctctatctcagggcaacc

SEQ ID NO: 225626 - DNA, 373 bp, Glycine max
  unsure (1)..(373): unsure at all n locations
ttttgttgatacaactctgaaatcaagaaacacatacacacactttttcctaatcgaccactcacttaattntccattctcccccggtgtttttgagtttatgcttcacttgaaattaagtaaattactaatgtgagttcttgatttaatccctatttctctccccctttggcatcaacaaaaaaccaaagtgcgtaacaagtataaaacatacatacactactaatcattcacaagacattcattgaagaatataagccaatcatgaagcaagaaacatgaatagatcaaatatatatatataaaaaaccacatactcatatagcataattcataattgttcagtcatatcatgcaaataaaagaaatacta

SEQ ID NO: 225627 - DNA, 412 bp, Glycine max
  unsure (1)..(412): unsure at all n locations
tgctcggggccatttcctgcgaaggcgaaaatatggattagttattttaccannggaacactactcttaatacaaaaatggcgtacaacctcctcccataaatacaaacatcaatgtaaatttacagcaagcttatgcacatatttccttacgaacgttcacttgcacaagacatcctatcaactaagaaaaatgcacccatatacaatcaaggtagcctcattacctagattatctacatgtacttccaaggtgtatttgttatttacatcacacacaccttcttggctgaatttacatacatgcctactcaaagcattttgtggtatcaaaaactgcacatgcgcctcatttggtatatctaatacccatacatatacaaacttcacgatgaatcttgactacctacaca

SEQ ID NO: 225628 - DNA, 377 bp, Glycine max
  unsure (1)..(377): unsure at all n locations
agcttagaaaacggctgagcgagacatattgtttgtgtgngatngcattgaaggaaatgagtattgttttgtatacataaatcgtgggattgaaccacgcaacagtcatctaagttccctgggttttatcgcttctttttgtgtaaacatgaggaatttaacttcttctgattttttttaccagaaacgtgctaaaaatatctatttattgcttattgcggtatacttctgcaagactcaacataggatggacagagttaagattaatagtccactaaaagtgaaagcgctaaccaatatccttgctatccctaagcacaagaagcattgtcttcatgcccttaggcagggcgcttacggtggcctatcatggattt

SEQ ID NO: 225629 - DNA, 422 bp, Glycine max
  unsure (1)..(422): unsure at all n locations
tgcgctcttggctcactcaccgccgttggggtaattttcttatatcttagacttatnccaaggtacatatattttacacctagaccactccttgagacactccttttttgctctaactttgctctgaacactctcattccaccaccacgattctttacccctgggtccaaaacctctagattcacccaacgtctctttagcccctttaataatcgctggagacatcttgttccacatatcatttgcacttccttgtggttggccacaccatccctcccatatctatcgtcggaagattccttgcatttcacccttcaagtgccaccatttgatccatggtgcgtccataggacttgttctctatgcgctagctctaattcttacatccataaccaaaactctatgttggtatgcaagctctc

SEQ ID NO: 225630 - DNA, 442 bp, Glycine max
agcttaccaccataggaagccatagatatttatcttaaggtaggagaatatgagtggagggagagggagagaaggggcatgaaattttgtgcctcaaatgaggtctgaactttgaagtgtaattctcaaatgatcaaagttgaaaaaaatgcacacacatgacctttatttatagcctaagtgtcacacataattggagggaaatgtgaatttctattcaaatttcattagaatttgaaattgaatttgtggagccaaattttagagccaaaatttcactaattatgattagtgaattttagctatggtttagcccactaatcaaagatcaagtccaagattcttcactaagaatgcttaggtgtcatgaggcatgtaaagcatgaaggacatgcacaaaatgtgactatatgatgttgcatagaggtgtatcaagcaaatg

SEQ ID NO: 225631 - DNA, 395 bp, Glycine max
  unsure (1)..(395): unsure at all n locations
acactatanacacactaagctggctctanacccacattgatgtttgtatttatgagaggtttttacttgccattttcgctctaagaatagagtcccactggtaaaattaactttccaaatgtttgccttcgcaggaatggccccgaggaagcttgcctcatagaggtccaggaaggacaaggcggccgaagaactagttccgctccggagtacgacagtcaccgctttatgagcgctgtacaccatcagcgcttctaagtcatcaagggatggtcgtttctccgagagcgacgcgtccagctcagggacgacgagtatactgattctcaggaggaaatagggcgccggcggtgggcaccactggttactcctatggccaagcttgaaccacaaat

SEQ ID NO: 225632 - DNA, 438 bp, Glycine max
agcttgctagtcaactatctcgttaagcttctcattttctgtaaacatcatataaccccacaaaaatgtacattaagataatcacgagctgctattttcagactattatattcagaagaaataagcaagatcttaccattctctcctggtttgagacgaccacctgggagtttgcagaatgtgtttccaatttgcagaagaagtatatgaggatgattgtgctcttgtacctgcaaatttaaaatcataaagatgagataggaaaatgagcagaatcttgaagggaattagatagtctttctctatgaaagtagtgccatagatgagaattaacacgaacacagtgagaaaccaatataggtataagtaattgaaaaagtaaaaatgtaagtgacctaaatgagtttagagcataattgatcagatgtatgtagaggg

SEQ ID NO: 225633 - DNA, 415 bp, Glycine max
ggtccttatagtgcacgaatctagttgttaaaaaatgatttcttttttagatctcttgccgtgttagcagtacttagtatgacatgacaagtgatggccaatgaaactcgcatgattttgcactgagtggactagtgatgatatggcaagttttgattggtagttggtttcaatatattgggggtgcgagcactggattgtggccgttacgccgtatttctgtttcgtggaagaagatgaacccaacaacttacctagaaggttcggttttgtgcttgtgctttctggagaaaccaagttgacaagtgttgtgtgtaacgctcctaagctatgtattaagataagttcaaagaatatacaagactatcttttcattatttggtatagaaaaaaattaccaagatgatttgctttt

SEQ ID NO: 225634 - DNA, 321 bp, Glycine max
tgcagcatgcaagcctcctcgagaagaggcggagagaagctagagcttatttacacacacccctctaatagcgaagctcacctgcgtgagatgagaagctagaacttagccacacacccccgtaaagatccaagctcacccccacgacagagtacatgaaaacacataaaaagtccctactacaaagactactccaaaggcgccgagatacaaggcgaaaaccctatactactagaatggccaaaagacaaggcctaaacgaaggagaaaaacgcatcctaagatttacaaagataaccgggctcatacttaacccatggg

SEQ ID NO: 225635 - DNA, 386 bp, Glycine max
taattcgatgacccagagtggaccttgagaatatgtctcgggggtcaagagaacttggggaccccaagtggggtgctattgcctaaaaccaagcttgaccaatcccgacccatcctgggcattagtaatcagtgagaacctgtgatgtacctaaacaggcgagctcctggaagtcaacagataagaggaacaaagaccactaatcacggaggcttgtgtggtggttggccaccttggaactttgattgatatatgggatatgggctcttgttatcgattaccaagggtgggttatctgataaaaggctttaaaatgaagacaggaggctaagatagtctctggtaatcgattaccaaggtgtgtatcctaatccatgcttgataac

SEQ ID NO: 225636 - DNA, 307 bp, Glycine max
  unsure (1)..(307): unsure at all n locations
agcttgagatcaggaagtgtagattggtgttnacttctgcttctatttggtgaccacagagttggacctggagatatgctgcggaggtcaggacaccttggggacgtcaggtggggtgctattgcccaaaaccatgcttgaccaatcccgacccaacccgggcatagtctgtctgtgagaacctgtgatgcacctatacaggcgatctcctgtcgtctcagataaatgactaagaccacatgcaggagctgggggctgccaacgtaatttttgtatatatgggttgtggcctcttgcaaatcattac

SEQ ID NO: 225637 - DNA, 430 bp, Glycine max
  unsure (1)..(430): unsure at all n locations
agcttgacaccatatggagcctacttcctatatanctaattaaagcctcgctttccaacttgacaataaactaaaactttgataggcatttattgcgcacaagttttagcttctacgcgcataaaaatattttccggattgaatattcaaatttcttatcattataattgctaattaaaaacacgacaagtttatgcgcgtccattctgtctcccagcacaagatgatgaaattgacaactttctcttcctaaatttcaaaacaatatgactgtctcaaccacgcaaccttccttcaccagctactatactaacttatcatcctttgaactaactattttgttattctttcggacaaacttaatcgtcattgctttaagtgcgtgtgatattattttccagttaaaataattatcacaaagtgtatcacg

SEQ ID NO: 225638 - DNA, 400 bp, Glycine max
  unsure (1)..(400): unsure at all n locations
agcttgccacgcagctcgcccaggctagcatggttgcttcctccagaagcaacaaccttctggaggaatctcctggagggcccacgtgggcctggttgctatttgcacccccatttttactaagtacaccccctgccttttttggtgattcttttttagtaaagttacggaaacttacgaatttcgtaacgatacttgttttctttccgtaatgttacggaaccttgtggattacataatcatccccttttttgacttacggaatgttacagaacctcactaattgtgcaacgatgcttccatttgatttccggtgtgacacggaaccttacggattgtgcatcaatattttcttttgttntccggcatgtccccggaattcacaaattgcctaatgatg

SEQ ID NO: 225639 - DNA, 440 bp, Glycine max
  unsure (1)..(440): unsure at all n locations
tatgctgcanacatctacaacagacctcttttctctttcttcaaaatcagccacaacagaacaactattacctctccagcaacaggtacaatcccagatggaggaatcatcccaaccttaaatggtcgaagccttatattaaaattgttgctggcccaagcagaccatacgttcctccaccaatctagcaacaacaacagcaacagccctagatacaagcaataattgaggcccctccgcaaccttcccttgaagaacttgtgaggcaaatgactatgcaaaacatgcagtttcaacaagagaccaaagcctctattcagagcttaactaatcagatgggacagttggctacacagttaaatcaacaacagttccagaattctgatagattaccttctcaatctgtccagaaatccaataatgtgagtgccattacattg

SEQ ID NO: 225640 - DNA, 374 bp, Glycine max
tatgcactccttaaggactattgctcattcctggcgctaaactgccgccagctagaattcatcttctcaattaatttcctggcttccacgcgagtatgtctccaagggcttccccactggcagcatccatcaatacctattctccatattacagattccttcataaaatatttgagaagatgctgctccgatataatatggtgagggcaacctggccataatctgttaaatggttccttactcatcagcgattctcactagattgcaactcctgataatcctcctgaggtactgccctgaacacggaaatttttcataatctcttctaaggcatccactaggatgaccctgggcaaggattcgccagtcttcgc

SEQ ID NO: 225641 - DNA, 339 bp, Glycine max
aatcacatccaggaatgacctctgagtttaatgctccagtaaataagttgtttgggtctgtctgaatatttctattgatctttataatatgcgtttggttgcctgtgaagagtactatttaatcttgtcccttttggagtgaagatgttatgtgaaatggtctacaccttcaaatggtatgtattgaatggttcatcagccatacaattggcttccccataaatgtgctggatgtggacttgccaaccatgttgttataaggatgtttaggctcacagttagttgtaaacttgcttgggacacatttcataacatgcacggtaaggcagatcatgattg

SEQ ID NO: 225642 - DNA, 131 bp, Glycine max
gcaacccaaagcacgggaagccttgaaacccacgaaccacaaaagagggcgcaaccccgcaaagaaacgcaaccacaaaccagactaaaaccaagaaagaccacgtcccctctgacgcacatgggaaaaca

SEQ ID NO: 225643 - DNA, 417 bp, Glycine max
cacaagtgacaaaatcattaaggacagtcctgatgatttaaaaaactacctcttggatttctttgaaggatctcaaaagatgttgcaaaatcctcataggaggtgatagcaaataggcaagaataatcctgttctcttaacacaggtttctatgggttcataaacaggttatggctcatgtcaaaaccttattgtcccacttagtatgtattatatttaatgattctaagagtttcagagttatgctgcccttttgcaatgtattggttcgatttacttaaatttgaatccaaaataggagtaatacaatattctggtttctttctctttaaagattatgtgctcatcacatgcaatacatctcaaaagatggagaatattactgaccttaaccacaaacatggttctattatattc

SEQ ID NO: 225644 - DNA, 135 bp, Glycine max
gaccttgaaactaagctcacatgcagttgatcaatctgctattttcttcataaatattaggaacaaacttaaacaatgccaaaattccatacggccccccttttagttcaaaagaggggggttaatataaccaaa

SEQ ID NO: 225645 - DNA, 347 bp, Glycine max
aaataaggctttgttgatgttggatacaaaataacaaatttatttagaaacacgttccttatttctttttgcagatgttgtgggatctcgcaattgggttgcaggatttgcgacacttttcaattcttgggcttctacatttgccattggaagggaacgtctcttcagccctgtttgggatcaattggttatgttcaatcttgctgatagggtaggcttaacaggctggagctagttttgttgtgtggaccctttgatacaaaatatattgatcctttattaccagactacccttcgtcctgctctgctctgggaatatctctgcttactaatataccttgacttat

SEQ ID NO: 225646 - DNA, 488 bp, Glycine max
  unsure (1)..(488): unsure at all n locations
ggacctataaaactaagctatntatgaacttatacctaacacgtattttagatgattcattataaatccaaacacgtaataaaattacatccaaattcaagcctcgtttgtttctatgttacaacgacacatatttgaaagcaagcaattaattttcaattcaggtaaaacggaaacaaaacgtgtttcttttctttctgagaagagcattagagattacgtgtgagaagaattntaaattagtttgtaattttttgttagttgaaggaattgtttgatgatattgatagtatttactgtttagtaaataaatttaatttagcaattagtttgaagagttttgtgagaagctattctaagtagctttaaaatatattaaaatgaaatttttaattttatattatactcttttacctttaaaatatttaatctttttacataaggtaagggtttagtggtcctttttattcctctactttcggtacacc

SEQ ID NO: 225647 - DNA, 415 bp, Glycine max
  unsure (1)..(415): unsure at all n locations
agcctanagnnataggagggagaataaatctaatctaaatcaatggcacctttcaagtaacgaagaattctttgtgcggcttttagatgagagaagaagagcctccataagcgaccacaactccacccatataaatatcggccttgtttggtagatacctaaactcccacaagactcttgaagatcgtggagtctaccttctctccttcatcaaactttgataacttcaagccaccttccatatgtgtgttcacgggattgcaatcaaacatattaaatttcttcaacacttcttttgtgtacctttcttgtgagacaaagataccattctccgtttgcttcacttccattcccaagtaatatgacatgagtcccatatctgtcatatcaaaatcacgagacatgtactccttga

SEQ ID NO: 225648 - DNA, 374 bp, Glycine max
  unsure (1)..(374): unsure at all n locations
gaccttaaaactaagctgataacttcagctcaactccattattcttttacgcgaaaggtttaaaaataacccacaaacaagtgaggattgtgataaaaatgataataaagaaacgaatgggggagaaaaaaaaacaaggaaaaattcgaaagagaaaaggtgtccattgtataagggttaaaaaaatatggtttttgagtgtagcaacaaatagtggaatattgtttttcgaattgtttaatccgaaattatcaaaaagtaagtctggatttgtatttccagaaagctctactaaacgttatgtgctttggattcattgttacggaanatatcacatatattccattcctattacgagacaagttaattgttag

SEQ ID NO: 225649 - DNA, 445 bp, Glycine max
  unsure (1)..(445): unsure at all n locations
agctntgatagaggtaaaacttcaaaactcttatcatttttcttgcatcttcttattcctttaacatattttattgaatcttctttttaccttctcngttccatgcatatattctttcttcatggtgaaagccaactagcgcttctcctccttttccatgaaggaatattaaagatttaatgtgaagaagacttttaaaagactatcaggtcagactaaactcttatagaggccagactgagccaatataaaagtctttgataggctataagtcaggcctcaaaaattcatcgtaggctatgcctcgacctcttaaagcccgatctaacctattcccacccgtaatgacaagtgtcaagtatagtttaacaaaaaatgttgttaggggattatgctcatatattcaaagatggttttgggcttgagctctcactacctgatcgta

SEQ ID NO: 225650 - DNA, 402 bp, Glycine max
  unsure (1)..(402): unsure at all n locations
actatgaatactcagcttcctcggtgccttttcanaagtcacgcgctaatgccatttatgcatttcaccgaacacttggtgggcacgcgtttatgcgtcaatagcaagagaacggggacaatgtggcatgtcccattgttccaaaatgcattataggcctagggccattccatacacacccctaattcaacctaatcaagcaagatnacaaaccaaaattgccctatatatgtgagcacactctcacaatttatagcaccaaaaggagatcaaaatacaccaatgaaaagctagaaagcttatggatggaacacttacttgttggtgatgaacataagcgcataacggaatcaaanaatgcacaaaaggatgaccctagggctgctaactcgtcaatcccgt

SEQ ID NO: 225651 - DNA, 391 bp, Glycine max
  unsure (1)..(391): unsure at all n locations
tgtgtgaagtattggcgatcaaaattgccattccttggattataggggtgaaccaagctcatgctnttacaaaaagggtcatcaagtcaagttgaaatatggaagtaatcgtcttgcaaaattggggcaaaagatgaatcgagtcacatcactgcttcatctactgccaaacatatttaggagtattgatgtccttgttacttccagtttcaccttgacaaagatgtcatggaccatgttgaaaatctaaattgattcaaccccatatcttgcgtaaaaattcgcaatacttcaattgtacatcattcgcatgcattcatgctttccattggttgcattgctcgttgcattctttccttgaaaaaaaaataaaacgaacttaatcattgta

SEQ ID NO: 225652 - DNA, 455 bp, Glycine max
  unsure (1)..(455): unsure at all n locations
tgcttgnggagtttctatggacgctggatctttattctttatgaggcccttcaatggtgattttacaccatggagatgcagcggacggcaaaggagaagaggagaggggagacaccttccactatggaataagtcaaggaacaaggagcttcaccatcaagaattgccttggattaaaagcttgaagaggatgcattaatggaggaaaagaaagagagaggggggagcacgaaattgaaggaagaataagggagagaagttgaaatttgagttgtgtctcacaagactttcattcatcaaagttacaacaagtgttacacatgtctctatttatagactaggtagcttccttgagaactttctctgaaaaacattcttgagaagcttctctgagaaaacttccttgaaaagctaaagcttatctacacccacccctctcataacttaactcacct

SEQ ID NO: 225653 - DNA, 416 bp, Glycine max
  unsure (1)..(416): unsure at all n locations
agctttcagtgtagaagaacgccaactgcatcccacaatattccaccaaattaaattataagtatccacttattgtgcagcgcttatttatcttggagntgaatatcatatcatttgcaaaaatttaacaattttgtcttcaaattttacaatttcaatgaaataatgcatttacaatagcaaactattaagaaaaataaaaaccaaagataaccaagctaaatgaaacctgaagtatgctatagacaggaactccggtttcttgcaagacagatgggtttagcatagtaacaagctgaaaaagcagatcaggttgtgcatcaaaaagatcatgaagactgcttttcatcacctacaaggaggtagatcattttattgttgtcacaaatgtttgccactcacatattaagaacttt

SEQ ID NO: 225654 - DNA, 399 bp, Glycine max
  unsure (1)..(399): unsure at all n locations
tgcttggccaactcctgtgatctgacaatttgtttccttatctttaggnccatacacagtcacacacaacacatattaaatatgtatgaaactgtactttcacacacacacatacatttatatcctgaattacctgtgtctacgtacatgcatccatatatgtagactaaaactataagattaatgcaaggaagttatatcgtagttaaggtttgaggcgaggttaagagtgtcctctaataaggcatagactgttatatacattcgttatacactttatgcaaccttgttcatacagacagcatcaatatttgatttcataaagactggaaaccctattgagggaggacgcgcgacgactctaagtaatataagggttggtttcaaaaatatacatat

SEQ ID NO: 225655 - DNA, 447 bp, Glycine max
  unsure (1)..(447): unsure at all n locations
agcttccacaacatacaagtaatttcacatccaatcatcatggactaacaaaaccaagcaaaatagggcaaaggcagaaaactcttcccaaaacacaactcaaaatcatagcttttcacatacaaataccccagtaacatttccttcattccaattcgttaaccggtggatcgactcgaaaaatttactggaagtctttagtacataagtctacattttgaccgttgtgatctgttagaaaatgtccagaaccccatatgtactacccttttcacaaccagccatacacaagcatttttttctgcacttatacaaaattatgctgcacatttcaacagcaaaattctgcataaagtgcagattttgaaaaccactctttccctcatccaattntgcccaaattgaatcctacaagtcccaaatcatgtaccaatcatgtctaaacca

SEQ ID NO: 225656 - DNA, 380 bp, Glycine max
  unsure (1)..(380): unsure at all n locations
tcccagatccgatcatggaaggacttggcaatttccttcattangcagcaccagtacaatacggacatggctcccgatcggaaccagcttctaggtatgactaaacgagagcatgaatccattaaggaatatgcccaaagatggagggatctcgcagcccaagtcgtaccgcccatgacggaaagggagatgatcacaattatggtagatacgttacccacgttctactatgaaaagctgataggctacatgccagctaactttgcggatctcgtcttcgccggagaaaggattgaatctggactacggaaaggcaagttcgaatatgcttccaatgtggcccccaacaatagaagagccccagtagtgggcgcgaggaa

SEQ ID NO: 225657 - DNA, 304 bp, Glycine max
cgcagcagcaactgccacacatggaagttgtttaattttttatcgggactggatcggtcacaaaggttggagaatgaacgcgacgcgccgtccacgagccaaattgagctcatcgacccacaaaaagaagggcatgtatacttagaaaatgtggatccagagggggggccctaataaagagaacgggccagtgattgaagcgcatgcaacgcctataaattgcagcgcagaaaatgtggctgacgctggcgctgaagagtggactcaaaacgggattgaagatatggatgtcgatggcgccaaa

SEQ ID NO: 225658 - DNA, 360 bp, Glycine max
ctaccacaaacccaccacccaaaacagggtaagactgcacataccgatgagacatggattaaacttctcccatcaggtacatcaaaggaggtagagcactttcggtgcatattggaaaggcgtgacggaagctgtagatgacacaccatatcaattaatcaccaatccatatctaaaccaagaaaagagacaaagttagtaactatgaagcatagacacttctctgtgaagtgtcaccgtgttggacacgttgcaacactgcacacttaacacttgtcgacactctatatgagatgattcaaaatacttttgcgactgacactaaatcgcccctacacaataacactgaaaattaaacga

SEQ ID NO: 225659 - DNA, 248 bp, Glycine max
ggaccataagcacgcagcacagcccacagaagagaattattctccagcaagacaccaaccgccatatatccccaaacccaaccccacgtacagagagacgcccccaaccggttggaagccccaccagcccgcactaacgacacaaatgcctctttgcgacggggcaaatgaccccacgggggacttgttgggtccacggaaacgagagaggaaaacacggagaagaggggactccgaatcctgccggc

SEQ ID NO: 225660 - DNA, 139 bp, Glycine max
gaggagagagcgctaaatacaacacagactagacaaggaccacacaccgacccacaacccaccccacagcaccctgaggaaccggacacagccctgacactgtgaagaacaacaacaccgacccgaggacctgcgccac

SEQ ID NO: 225661 - DNA, 417 bp, Glycine max
  unsure (1)..(417): unsure at all n locations
agcttcttatccaaggctcatcttggtggtgaagctccttcttccatggcttattccctaanggatgacgcctcctctcacctcttctcctttggcttccgctgcatctccatggtggaaaaccaacattaaaggacctcattgaagctcaaagattcaacctccatagaagcttcacaagcaagcttccatcactttacatgtctcatgacacctaagtatacttatggagaatcttggatttgatcttggattagtgggctgaaccatagcagaaattcactaatcataattagtcaaattttggctccaaatttggctccacaaattcaaattcaaaatccagtgaaatttgaatagaaattcaaacttccctccatatttatgtgacacttaggctataaaaagaggccttgt

SEQ ID NO: 225662 - DNA, 441 bp, Glycine max
  unsure (1)..(441): unsure at all n locations
tcacacggatgtgttatggtacactatgtttataaagagtatattancaagctatactctgagtatgtagtctttaagataatcgtaattataactttctaacttattaaaaaatgagtatactttaataaatctctgattaaaatttataataagcaaatattttttaatatacatatatatatatatatatatatttatgaataattttaattatgatataagattctctaactattgataatttggtttaaaaaatattaaaatttaatctacatataaagataaatatagaatgtcgaaagaggtaaactattaagtatattaaatatattaataaagatacaaagagaatagcttgatatagttgatataaaaaatagtttactagctctagaaatagtctgtgaaatgtatgtgtgatatgcatatcataagatg

SEQ ID NO: 225663 - DNA, 433 bp, Glycine max
  unsure (1)..(433): unsure at all n locations
agcttatcagaaggggaatggtaaaatttctctaagctgatattaagaaggtggcaaagtgtttcttttgcaagaagaagggacacatgaaaaagaattgccccgagttccaaaaatggcttgagaagaaaggtaaatcaatctcattagtatgttatgaatctaatatggttagtgttaatattaacacctggtggattgattctggatctactattcatattgcaaattctttacagggtatgcaaaacctaaggaaaccagtgggaagtgagcaaagcattttatcaggcaataagctaggctcacatgtggaggccattggaactttgcatttgactntaagtagtggctttattttaaaaatagaaaggactttntatgtaccaagtttttcccgaacttgattttatttcaaggcttgatcgttgga

SEQ ID NO: 225664 - DNA, 460 bp, Glycine max
tcatgtaaccaccctcaccccaacttttgccccatgaatttcttatgagccagtattttccctcagcctcctcaccatacccaacaatggtaactgcatggttaagttcagttccacactcgccactgaaaactcctcctgagtaaaactgaaacccttgtcccttggcttcaaagagcaccgagacaggttgagaggccactgcagttagaagttgctcctcgttctggggagttacactttggtaacctctgatctgaattgcagggttggaattgccactacaagttccaactgtttccacgtaagggtattcttcttcatttgcaagaccatagtcacgaatatagtcgaaggctttttccacgtattgtccatggcacccgtcattgcttggacaattcaccatattttgctcagacaatgaaaccaactggccagtttttattcggttgattcc

SEQ ID NO: 225665 - DNA, 448 bp, Glycine max
  unsure (1)..(448): unsure at all n locations
tcaagcttacagcngattttagtaatgacctttttttcctaaaatgaaaataacttaatgccattaacctagggaattaaaaaaaataaaatatacttaatggctgagtgtaactgaaattgtggcaaccataagtcaccctcaacagccaacaagtcagccaccatttggtctcccaaaaggctgatgcctaggttgccaattgggcccttattacaacttgaactaaacctaactaaagcacttttagttgattcacccaaaacatatttttggtcagccaactttacaaggattgggccattattttgacaaactaaacactctaaaattgagacaaagtggggtcattagtcctcctccattggggccatgatacaactcacaaacctggacttntctccttgaaacttggcttgtattcatatgtatggcaacacttgttgaa

SEQ ID NO: 225666 - DNA, 467 bp, Glycine max
  unsure (1)..(467): unsure at all n locations
taaaactangcttgccattatgcacccgaatggcagccagactggtttgactatgcacaggacgagtatgccataccatttttgatgggactcaatgaatcctatagttcaattcggggtcagatcctctctatggatcttttcccttccatcaatcaaattatctctctagtggttcaagaagaaaaacaaagagagattggtacttctatttctgctctccactccacaaatgatgcttcacaatctcatgcttttgttggtaaagattccagatatcagtctgatcacaagggtagagctacttccagaaatcgaccttcttgtgcacattgcggccgacttgaccctactcaaaaaagtgtttcaagatacatgcgtttcctccccaatacaagaaagagtaaacctgcttcttttaataccgagagcaaacagtgaatcaagcccaacatccactcttgtac

SEQ ID NO: 225667 - DNA, 307 bp, Glycine max
  unsure (1)..(307): unsure at all n locations
tgcagcatgcaagctggggnactacaacaaggagaaagagtgactagtcttgtgaaacanaanncaacaataagtaaccagatatgtgaaaaagtcactcacaaacacttgagtggtagctggagttggagctaaagcactttcaccattaaaagtgggaggactctcaaaattagtaggagatggctcaacttgtggagcagatggagagcagttaatttcatcttacaaatgcgtgacatctaacataaataanttgtangcaacaataaaaataatcaatcaaattgtaaaaaaaatgtcactg

SEQ ID NO: 225668 - DNA, 462 bp, Glycine max
  unsure (1)..(462): unsure at all n locations
ttaatcaaatgntcctagttccatcatataagaagatcttataccctcttctaaacaagagattcaacagaatcatagagaactagcatttttaacttcaggagcactctagaagtaagtgaaattttctagttctcttggcattgctttattttatcttatagcagctaaaacgagggtaatataacaccatggctaaatgagtaaatgatatttaaatgcatgtttggtaggttctgagaaccaatggaccactagctggtgggagcaattcatggttcttcttaagaggggtttaacggaaaggaggcatgaatcttatctgggcttaaggagtttccaaagtctgtctgtttaattctctaggacttctatggtggcattctgatccctccatatacacgatcaggtatcatgagtctatagtttcgtttggtttttagcgactttttgtgagaattc

SEQ ID NO: 225669 - DNA, 256 bp, Glycine max
  unsure (1)..(256): unsure at all n locations
agctggaaattgaataccgaagcgctgattantttcaaacgacaataactcatggctcagcaatccgagtgagacctgtaaaacatcggaacgcgccgaattgaatggtgaagctctgagcaaactcaaacgacaataaccctcttactcgggagaccgatgggaacctcgaaaatatcgagaagcccgaaactgaacaccgaagctctgagcaagtacaacaacaataactgtgtacccaaatgcgtgaacgagt

SEQ ID NO: 225670 - DNA, 426 bp, Glycine max
  unsure (1)..(426): unsure at all n locations
gacctataaaactaagcttaacattcaatatcgagcgtatcgatatatgacgggatctgtattttacatccnagcaaatacgtactgtagtttgaagttgctaatatcttcaacattcaatatcgagcgtttcgatatattacgggactgaatcatacatccgattataaagttattgtcgtttgaattatatcagaactttcgtattccagtttgagcgtctagatatattacgggactcaatcatacatccgagtaataaggtatttgttgttgaatttgctcatagcttcaacattcaataccgagcgtttcgatatactacgggactcaatcagacatcccggttaaaagttattgtgggttgaaagcgctcaaatgcttctcatttcaatatcgagccgttccatttattaatggactgaa

SEQ ID NO: 225671 - DNA, 357 bp, Glycine max
  unsure (1)..(357): unsure at all n locations
gaaactcaagctatgagtctctaaaaccaatagtcacagacaaacacaagattattatttatcagangagcacacggacatatacttgtccatggattctggatgacgtgagaaccactttatacactcggaacgcaactataaagcacagcattgtctgatgattgagaaagacccaatgcatatggaatggcttaccaccaccgcatgaagatggctataacaaaaacaggccactttccaccacctgatgacaaaacaacaaaactttcaattatcgcaaattctccaaagctatcatcacccttcccaacagacaaatatataactcctggacagaacaaaagcaaagggacc

SEQ ID NO: 225672 - DNA, 260 bp, Glycine max
acaaaatgacgcagctgcaactcaacaaacaagacataattgctatatcccgggtgaaagtcaaccgtcaccatctttgtcaaacacaacacaaaaagtcaatcgggtcgccacaacagacatatcatatcaactgccaaaccaggaaacggaagaaaatcaaataagtgctcaacctgattaacaggagcaaaatttcattcaacccctcattaccaaactaaagcagggtctctggataagaaaaacatgcaccctca

SEQ ID NO: 225673 - DNA, 432 bp, Glycine max
cggcggcactacaacggcacgaaagggaggttgtggtattcaaatgcagatgcaacgcagcagaagggggtaaagacaatatattactactattatatgaaagtgggaagacaatactaagaatccaacatcattagcatgaccgataattacattaccgccgggtcaaataacataacaatcgtcttatatacacggaaaaaagtactccaacgccatcaatagcccgttagactattgctgtctttaaaaaaatgtgcccatatctttctaatagtggtgatgacgccgatgtcaacagtgtgtcattagcaaaccactgcatgatttcaaatgtaagaactactgcaaatataaatacagtccaattgcactgagctatgcaacatggaccaacactcttaagcctggcatgatgtcacaccaatgcat

SEQ ID NO: 225674 - DNA, 435 bp, Glycine max
  unsure (1)..(435): unsure at all n locations
agcttcccgccaatggtatttgatgtttattgataccatngnntcctttagattctaggaaaatactattgatctatgtatgtatatgaaggtcagtgggagtaaggttatttttctaattcggtatgttgatgatatcttgcttgcaactaatgatcttggtcttcttcatgagactaagaattttctctctagtaactttgaaatgaaagatatgggtgagacaagctatgtgataaggatagaaatattccaaaatagatcacaaggattgttaggctcatctcagaaagcatatattaataaagtactagagaaattcaagatgaaaatgtgcttggcatcacccattccaattcccaaaggagacaatttaatctcacacaatgttcttaaaatgatctggaatgaaacaaatggagcaattttgatgca

SEQ ID NO: 225675 - DNA, 441 bp, Glycine max
  unsure (1)..(441): unsure at all n locations
tgaagaggaagctncatggaggaaaagaatgtgagaatgggggagcacgaaattgaaggaataaaagagggaaagaagtggaactttgaaatgtatctcataagactttcattcatcaaagtcagaaaaagtgttacacatgcttctatctatagaccaggtagcttccttgagaagctatcttgagaaaacttccttgagaagcttctttgagaaagcttccttcagaagctagagcttatctacacacaacccctttataactaagctcacctccttgagaagcttccttaaaaagaatcctaaagaagctagagcttagctacacatacctctctaatagctaaactcaccttcttgagatgagaagctagagcttagctacacacccgctatataacttagctcacccccatgacaaataacatgaaatacacaaaa

SEQ ID NO: 225676 - DNA, 430 bp, Glycine max
agcttgctagtggggcttctatggaggttggattttgagctccaatgaggtcctttaatggtgattttccaccatggagatgcagcggaagacaaatgagaagaggtgagaggaggcgccatccactatggaataagccatggaagaaggagcttcaccaccaagatgagccttggataagaagcttggagaggatgcttcaatggaggaaaagaaagagggagagaaagagagaggggggagcacgaaattgaaggaagaaaaagggagagaagttgaactttgaggtgtgtctcacaagactctcattcatcaaagttacaacaagtgttacacatgcttctattataaactaggtagcttccttgagaagcattcttgagaaaaattccttgagacgcttctttgagaaaacttccttgagaagcta

SEQ ID NO: 225677 - DNA, 408 bp, Glycine max
  unsure (1)..(408): unsure at all n locations
tcanaacacagcaacacagaatctacgtgtcttatacctctttatttaagggagtctctagggttgagaagtgaaattgagaatgaggtaaatttgaagcagactctcaccttacacatgttcataacatcaatttaaacttgtgcccactggatttacacctaaaatttcaccgaatcaanatttgactccttaacacccaaatttaccctagaaatggctctttgttcactttgtgcatttggttttctctctatgacagcccanactttctcataagtcttaaatgacattttgagctatgattaactcactctaacctccatttactacagaattcagatttaaccctccaactctcaaagcctcactctcttttcactcatggcaccacattctcactttcta

SEQ ID NO: 225678 - DNA, 420 bp, Glycine max
agctatagcgattttggactatctaacttaccgattgagtccaccacatctgatgaagagcccctccaaagccctgcggtcctagaacctatgaattccactatcaaattttagtttcttgaaacctaacacaagaaaaactttgatatttaggttcaagtacaacatcagttctcataaaactgatgttaacgcacgacactcaacattgattctacataagaccgatgttgagtacaatactttacatcagttcttttaaaattgattttaacaacttccagttattttaaaaaataccactgtgtatttgttaacatcaattttcatataaaccgatgttaactgagcgatataatatacatatcttttagtagtgcacaaacactctaaaaacatattaaagcaaaaaaagtagtt

SEQ ID NO: 225679 - DNA, 423 bp, Glycine max
tgtgccaatcccacatgggtgaagaattctcacaaaatatcatgaccctggtttcccaatgattgtttctagtgagagtgacctgacttattattgtgtgatttgtcttgtcatgtactcctaggctccaatgaggttttttactgacatggtaccacattgcatataggattgagtcttactgtatctgttacataactcctgtgtaatgatcattgtgacttgttacatgatggtgggtaatgaattgtgtgaatgtgagatgttgtgttatacttgagatgtgttgctatgaacatgtgattaatgtgaaggtgtggaatgtgattctgtgattaaatcctcgagacaagtgatgttacacaatgagtggtaaaatgacatgaatcgtgctaagatgagttcttatacctatattatata

SEQ ID NO: 225680 - DNA, 428 bp, Glycine max
  unsure (1)..(428): unsure at all n locations
agcttaaagtatgcccgagtcattcatttctatgaaangtngttgaaatattggcgatcagaatcgccattcctttgattatagggttgaaccaagctcatgctnttacganaaggttcatcaagtcaagttgaaatatggaagtaaccatcttgataaaattggtgcaaaagatggatcgagttacatcactgctttgtctactgccaaacacatttaggattgttgatgtccttgttacttccagtttcaccttgacaaagatgtcatggaccatgttgaaaatctaaattgattcaaccccaggtcctacataaaagatcgcaatattgtgcatcattcgcatacatccgtgcttttcattggttgcattgctcgttgcattctttcctggaaaaacaaaaacttaatcattgttatcaaaaaca

SEQ ID NO: 225681 - DNA, 423 bp, Glycine max
  unsure (1)..(423): unsure at all n locations
tcaagatgaatcaagattgattcagatagttttgatgttttcaaagatgatgacaaanagctcaaaagtcaagaacacttcatgtttacacagatgatgacttctagaatcaaagaatgagttcaagattgaatcaagaacacttcaaggttcataaggaaatttgatttcaagaatcaagaatcaagtttcaagattcaagttccaagaatcaagatcaagattcaagactcaagattcaagaatcaagagaagactcattcaagataagtattaaatagtttttttaaaaactgagtagcacataaatttctctcaaaaaccttttaccaaagagtttttactctctggtaatcgattaccagattattgtgatcgattaccagtagcaatatgggttgtaaataaaacctttaactgaat

SEQ ID NO: 225682 - DNA, 425 bp, Glycine max
  unsure (1)..(425): unsure at all n locations
tgcggcatgcaagctttcaaatagataatcatttacaaattcttctaanatcaaacttggttttaccaaagtcttttcaaataaataactctattttaaaccaaatctcagaactgtacaagaactttttttccccaaaactgtgtttgtatttttattttgaattacttgcattttcaatttgagctcaaaatagttcttcattttgatctggttctttcaaaacttacataataaacctctttgttttaaaagaaaaattaaaagtttataaaaccccaattcaaccccctttcttatggtatttttgtcacttcatattctacttgtttttagggtttgggtgtngctgcttggtgtgtgtttgtcgtaggatggaggaaagcccttatcttggatccaaagtcttctccttttcactctcg

SEQ ID NO: 225683 - DNA, 455 bp, Glycine max
  unsure (1)..(455): unsure at all n locations
tcatgggttntcttgaagcttagtctctgacagagactctgtattcattatcaattcttggagagaattatttcggattaacgacacctcattgaggatgagtaccgcttaccagccccaattcgactgccagacaaaggtcatgaaccgcatcctcgaatagtacctatgatcgttcgtccatgcccgttcttctgattggtacaaattcctagcattggcggaatggtcgtacaataccttcatccattcaccgaacgtggctgtagattcccttttggtcaccaggcaggccatctccgaggctctccaacggcgacttgcgaaagctcaagtcactatgaaaaattgtgcatgaggatttccaggagggacagtgggtttatgtcaagctccaccccttttcaaacgacgatctcgggaacagcccaccataaactcaccaagcgctattt

SEQ ID NO: 225684 - DNA, 399 bp, Glycine max
  unsure (1)..(399): unsure at all n locations
gcagcgatattggcttgaagggaatgatattggactgttggttatcattctaatgaacaaatttcctattctgagtattctctatgccaaaacaccagctggattttgtcttttcatctaacatgtagcaattccccaccctcttttcttcttccacgaaaaaaatgatcaactttttgtactaagaaaaatgtgcaaatcattaatgagtttcatgttgctaggtctcttttgtgattatttataggaggatttggctccttaaaagtgcagagtgtaattgaagatgcttttcaaattgtgataaaacacatgcacatgtataataaattataaaattattaataatttaactctcgatattcaaatcattgattactattntacacaatcttttaa

SEQ ID NO: 225685 - DNA, 420 bp, Glycine max
ggaccttcctctcaggttcaagcttgttttcaacctcatatttcttctctcaagccttcacttgttccacacttagtcgacgcttcttctcagattgatgccccggttcttcaacacacccttcctcgtcgagtccgtccaacatcgatcggaactccctgccatacatgtggtggctgtccctcggactatgttcctctaaaccaatgcaaattaaatcagacatcatcattattagtataaccaacataaaacatggatcttggatctgtgtctgaattttaaaaaacaaaaaccaatatttaaaaagtgtgaatgaattaattaagcacctgttgatgatgatggaaaaattgtcatgagggcagtggaagaatctgagctgttaagtctcttcatgagtgggaaagatgggatctt

SEQ ID NO: 225686 - DNA, 249 bp, Glycine max
tgacacccctaaatctataccatcctggaaacatgtatgagaccgacccttttcatatagcatacagcagccatacagcactgcatcgcacagactaaatatccattttccaacctggcgcaatgtagcctaatgccggcgagcaaaagcgatgctcacgggtgcgctctacaaaggatgaaagaagcgcggagtccccccaacggtcatttatggaaaacgtcaaataaaccgaacgaacccgatcga

SEQ ID NO: 225687 - DNA, 419 bp, Glycine max
  unsure (1)..(419): unsure at all n locations
catgcaagcttgaacgacgatatggccatgacgatttttttaaanaaactaggatctacaaatttgaaacacgcgaacattaaaatcttcgtacactacgaaattgaaaaggggggaggtgcacagctttacaaaaacaaaagcaaattcacaaacctaacataaaaggaatcatgattgaaacgagggtccgggttctcacaacgaaagaaaaggctatgcctctgcctcgggagagaatcaaatgaaacaaatgaagttgatactatggtttgatttatgatggcaaatagtgaaggaaaaagggacggaaaatgacagtcagtcagggacaacgaacaatcatgctgggatttcaattaaacacaccacacaaaacaagactttttgtataaaaccgaattgttgtgtcccctaga

SEQ ID NO: 225688 - DNA, 467 bp, Glycine max
  unsure (1)..(467): unsure at all n locations
actaagctntcacatcgatatcttctagatgtgatgagcttctcctattaatgtccttgctagaaacttctcagacgcctcagggaccctcgcaagcgttcacggcgactccagctactaacaggagttcggtgcatcgtttaaagctagaggttccacgctttgacgggatggatccagcggggtggatattcaaaaattggcaattctttgaataccacgcgacaccggagcatgaaagtctcacgattgcttcgttctacatggaagggaatgcgttagcaacgtttcaatggatgtaccggaatggacagctggcatcatggccagcgttcctccacgtcttacacatgcgattcttcttttacacgtacgaagaccacactggcatgttgtgcaagctaacgctacagtcatcggtagcggagtacctcgttgagtttgaatccttggtcaaccgtgtcatc

SEQ ID NO: 225689 - DNA, 411 bp, Glycine max
  unsure (1)..(411): unsure at all n locations
tgctncaagaaaaagatggactcagcatactccttatttccagaagggaattctatcaatagaccttctatctttaatggagagggttaccactactggaaaacccgaatgcaaatttttatcgaggcaatagatctaaatatctgggaagccatataaatatggccttatatacccaccacagttaaaagagtttcaatagatggtagctcatcaagtgaaagcataaccatagaaaaacctagagatagatggtctgaagaggatagaaaacgagtacaatacaacctaaaagccacatacataataacatctgccctaagaatggatgaatatctcacagtttcaaattgcaagagtgctaaggaaatgtgggacactcttctattaacacatgaaggactactgatg

SEQ ID NO: 225690 - DNA, 424 bp, Glycine max
aatatatgatatgtttttcttgtaccaaatcatacacacaaaacataaataatataggcttgccccatggtttttgcatgctaaaccaatgaccaatttaacttataccaaataaataataaagggttgctccatgttaaccctcacaagtagtcatagtcctgatgatgtaactctataaaaaacaccttacccaagcatgtatttctcattaagtttatgactttctcatgggataactcgaatattagaaatgttatgcacaattttcagtttaaaccccttatctggcatgggcacaacctcaaatgttaaatgtttggtattttgtctttcttttgaatagaaaatgcaggagatgacaagaatgaaaagaacaccattgtcttcaagctacatgttcattgtcaagtgggtcaacctc

SEQ ID NO: 225691 - DNA, 370 bp, Glycine max
cacaaatataagctctacctccacgaagaagaacatttttttttttaagaccacacgtacacccaacaaccttttcattacatgaattggtacatgatccacatgtcctcggttggtaaagaccaagcttagatctttatttaccatgtgacccttggaaaactactcaatgaatctctctcctcctttctagactatagactaaattactctttactgtgcctctgaggtcttttgaaatgtcacctacttgacgataccttcactatcacactaggcccacaaaataatatcttcaatctcttaactacaaaccaaatgctgttatctgcctaagcgacacgaaaactatagaactttgtggatctaa

SEQ ID NO: 225692 - DNA, 415 bp, Glycine max
agcttcttatccaaagcaattattggtggtggtgaaactccttcttccatggcttattccttaatggatggtgcctcccctatcctcttctcctttgccttccgctgcatctccatggtgaaaaatcaccattgaaggacctcattgaagctcaaagatccagcctccataaaagctccacaagcaagcttccatcatgtggtaatcagagcacaagagcttcaagtaggtgttccttaaacctccattaagtttttttctttaccttctcttccattgttgtttcttcattcttctccatgtatctcctcacatgtcttgttctaaatgttcgtaacatgattctttagagtttccaccgattaaacttgctatagaagctagatttgatttctatggttcaaatttcttggtc

SEQ ID NO: 225693 - DNA, 304 bp, Glycine max
tgtagacatgggtggagaaggccaaagatgaactatccatggggaagttgaaaggaacacctcttaatttgatatcacccaactctgatctcattcagtttaggttctcaatgcattgccataatttggaatatgctttatgatcatatgaaaaggggtatattacctcactactaagtataaatattggcgtttgacctatatgctctgagagaatggactgaaattacactacaaacattctcttgaaaatagccactcgttaaacgccatatacacgctgagcgcatcttctccatgcgct

SEQ ID NO: 225694 - DNA, 369 bp, Glycine max
agcttctatataagctgaaccattctatcaataaacacaagttgagttttattcagaaaattagagtttatctcttttatcttagggagagtgattctcctaaattcttgagtgattcaagaacaccctggttgtataaaagaactttcacaacctttgtgtgttgccctcgctggaaagagagattatttccttcctttcatctttaaccttgttctttcaaaccacaatttcagaaaatccacttctgcctaaaattatctcgtggccataactcccattttatgcactcaaattaagtgattcctgagcctaaattgaatttcaaaacgagaccttttacctcgttttggatcacctcatttggat

SEQ ID NO: 225695 - DNA, 469 bp, Glycine max
  unsure (1)..(469): unsure at all n locations
tgtgataagctacaaagaatagatatcatatttgttacacacactantcccgncnacancactgtaattgcagaatgttcatctgagctatatcaaatatcatattacaaagattgttagctctaatcgaaggatagtgtacatggttttcattaaattttctcttcttttgatatgatataaccaggcacaaagccccatttcttcatctatgattctattgaccactagccaatataacttgtaaaacaagtccccttcagactgggtaataaagttcatcttgatgatacatcacggaagtgagattccaccttgtcatgtggaggaaagacataaagcaactttgtctgtgaagaggatgtcggcatgtgaatagctgatctactttatccaagatcatattcaatcatttcagcctctactcaagattaatgtcttaaatcacttagacacaacntatgataat

SEQ ID NO: 225696 - DNA, 348 bp, Glycine max
  unsure (1)..(348): unsure at all n locations
cccaaccncagcagcaagatcagccaaagcaaacaattatgacccctccagccacagatacaatcccggaaagaggaatcaccccaatcatagatgggcgagccctcaacaacgacaacaacaacaaccagcaccgtccttacaagaggctgctagaccaagtagaccatacgttcctcctccgaggcagcaacaacaacaacagcaacaacaacatcaatagagacaacaagccactactgaggcccttccttaacctgcatcggaagaaataacgacgcgatgccaaggacaatataaaacaagcaggtacaccacgagactagagcctcaagtcccagttaacaa

SEQ ID NO: 225697 - DNA, 451 bp, Glycine max
cttctcataaggcctaaagacatattttgctttattatctcactttaacctccatttaccacagaattcagattttaccttccaactctcaaagcctcactctttctccactcataacaccacattctccctttgttaccctaggttaattccacccttcatctctaacagtcttccataagcaatttcagcacataaacatcacaagcatcatcataaaaaccctaaaactgaatgggtaagcttaactcatccaaacatggcaagttcaacatgttttcaacaagttccttcacaaataatcatcatgaagcagaaaactagcaagactacccatcatatcttccaaaaccccatacccacgaaaatctagagagaaagaagtctcacccaacctgaaatttcgaagtaccactcgtagacacgcacttcacgacttcgaaaatgccct

SEQ ID NO: 225698 - DNA, 432 bp, Glycine max
  unsure (1)..(432): unsure at all n locations
agctttggccagtcttcgcctcctgggttatgtcttcgctgcttgaggatggggcagtgtanaattttaagatatgaaatggatttgggaagaccctcctctggtagctgttggaggttggggcagtattgaagaatcaattccttgagagaggagagctgacagagccccttgtagtccagttnttttagattnggaaaagcactgatgcatagactaataagagagagtggcagcaaaccttcatcaggaaaagattccgcatccagctttcctatcttcaaggtttccagagagggattgtctcccaaagaccctttcagtgaggccatgagtcccgacgagcagttatagagttccatctctnttaaatgtgatggcaaacctccttcagggaacgactcaactcttggacaatcttgtatttgtagt

SEQ ID NO: 225699 - DNA, 468 bp, Glycine max
  unsure (1)..(468): unsure at all n locations
tcccaaccaccccacanaanatatattggttaacagtatgtttaatttactcctaacgagataattanttttcttatatcatanaagtttactatagttaaaagtgatgttatctcttaagttttacttgtgtaatatggaatttattttttacaacatgaaattctatactcaaaaaatattgtttttcaccaatgatgcaatttagcttaatattgaaatcaaaaaagcatttatacatgtgtttagttgtaaatagtttcaatctttattagttttgaaatattcaccaatgagccatctaaaatattggctcaataaaataagtatatttaaatatacttatcttataattactattaaaactactacttgttgaattaanaatattacttcttaggcttgtgaatttgaactaataacatctttaagaatacttttttcatccatggatataatggagtattg

SEQ ID NO: 225700 - DNA, 444 bp, Glycine max
  unsure (1)..(444): unsure at all n locations
agcttggaagatttgcaagatcatcttccttgtttactccttgaanaatatggccatcaatataaagatatgacaatttagagagtgatccaagactttcaaatggatttccactgaatttattaaaagagagagagagagattttaaatctatctcccttaagttgcggagattacccaaaaaagtcggaattgttccttcaagttgattacgtgataaatcaagttcaacaagagaagtcaaatttcccgaagaaagtggaatggttccttcaagttgattatatgacaaatcaagttcaacaagagaagtcaaattttccggggcatcaaaaatagtcccatgcaagttgctggaacttaggtccaaagacttgagacgatgaagaccgcataagcaatcaggtatagaagatgagaatgaattccagaaagtcaagattt

SEQ ID NO: 225701 - DNA, 347 bp, Glycine max
ccgctccggagattgacagtcaccgtttcaggagcgctgcacaccagcagcgcttcgaggccatcaagggatggtcgtttctccaggagcgacgcattcagctcagggacgacgagtatactgatttccaagaggaaatagggcgccggcggtgggcgttactggttactcccatggccaagtttgatccataaatagtccttgagatgtatgccaatgcttgaccaacatatgatggcgtgcgtgacatgatatcctgggtatcgcgtcagtggatcccgttggatgccgacgctatcggccaacctcaaggatatccggttgtgttggaagaggccagtaatgtg

SEQ ID NO: 225702 - DNA, 387 bp, Glycine max
atcttgtaagaagtatagtaatatacgagtaatgttttgcgtgattgataacgacttagattttaatcatgggttaaggagttgtacaactgatggagatatattacacttatttagggatgctcttgaacatgagaatgagataaatgtttattttcatcatgaagtatgatccgattctagaaagaagtcccacaaatgttgtacttggaatgtgatccaattcgataagctgttgagaatgaggacgatttatatgatgtacctgttgctggccatgaggaaggttagttttaattcatctgatcttggtccgacatgggtaccatatttaactaatatgattaatttttactttatgaccattgatgcagatgttggtgctgg

SEQ ID NO: 225703 - DNA, 464 bp, Glycine max
  unsure (1)..(464): unsure at all n locations
tgcagaattggncttcgccagagaaaggatcaatgtggtancctattagaggcaaanntgatcatcctactacgacgactgaganaactggggcaaataaagagggtgaggatgagggacaaacccatgctgtgactgccattcctatacggccaagattgccaccaacccaacaatgtcattactcaatgaataacacacctcctccttacccaccacccagttatccacaaaggccatccctaaatcaaccaccaagcctgtctaccgcacttccaatgacaaaacaccacctttatcacaaaccaaaaacaccaaccaataagtgaattttgcagcgagaaagcctgtagaattcaccccaattccagagtgctatgctgatttgctcccatatctacttgataattcaatggtagccataaccctagccaaggtcatcaacctccacttttctgatgata

SEQ ID NO: 225704 - DNA, 291 bp, Glycine max
gcaaacgggcgagggtgcaaggccgacactccacaaccacaaatcacacataaatccaccatccccaggtgcccaccctcaaatgagcccacgaactcccacggagcccctaacctcgatcctcacaacaccggggcccgatcaacgcctccaaactgccacaacatccaagaaaatcaacatccaaacaccatgaactatccaaaaccaagaaaacagggcagaggcaaaaaactccgcccataacaaaaaccaataccaccgctttccatacgcaaagaccccaggaac

SEQ ID NO: 225705 - DNA, 288 bp, Glycine max
  unsure (1)..(288): unsure at all n locations
agcttataataagaaagtgaagnccttattttttagagngggagaattagtcggcaaggttattctgcccatggactaaatggatcgagcctctggcaaatggtcctcaaattgggaaggaccgtctaagataatccagaactattcaaagggcgcttatgaattagaggaattaacccctcataaactaactttgagcataaatggtacgtatttgaaaaaatataaaccaacactgctcgaagttaaataagcattgatacgaagaaataatggaaacataaaaat

SEQ ID NO: 225706 - DNA, 452 bp, Glycine max
  unsure (1)..(452): unsure at all n locations
ttataagngcgggtctgggagacgaaagcatttgttttctatatgtgaagatgatgttccaagtacttctgatttggtccgaccatgccctcctgattttcagctgggaaattggcgagtggaggaacgccccggcatttacgcaacaagcataatgtaaccttacggtttaaaagctctatagtgggcctagctttgagttcttgtttgtaaggctttgtgtcttttgtttctgaatttataatacaaggatctttcttcatctggtcctggtctctacccattctcattcatttgcatgtttacttctttttctgatacggcagattccacgacgagtcccccgaaggtactaatacctgngacccgtctatcaacttcgagcaagatatgaaccatacggatgatgaacgagatgatgatgtgcgacttccttcggaactagaaagaat

SEQ ID NO: 225707 - DNA, 382 bp, Glycine max
atcttccaccatggagatgcagcggaagataaaggagaagaagtgagaggaggcgtcatccactagggaataagtcatggaagaaggaacttcgccaccaagaatgtgctttggataagaagcttaaaaaggatgcttcactggaggaaaaaaaagagagagaaagagaaaggggggagcataaaattaaaggaggaaaagggggagagaagatgaactttgagttgtgtctcacaagactctcattcatcaaagatacaacaagtggcacatatacttctatgtataacctatggagcttccttgaaaaacttccctgagaagactctttgagaagcttccttgaaaagaaaaagttagctacacacactcttctaataac

SEQ ID NO: 225708 - DNA, 428 bp, Glycine max
tccatcaagtggtcatcagagcacagagagctttatagttttgctccttaaaccgccattaaatttgtgctttaccttctcttccattgatggttcttcattttatctccaagtatcttctcacatgtcttgtgcctaaacgtttttaacatgattctttacagtatccaccgattaaacttgctattgaagctacatatgattttctatggtccaaaattcttgttcttgttcttgaaccatgaattatgtagagcatacgctcctttgagtatagccttcgtatttgtctgtggctgagacctcaaccataaaattcttaccaaaatattaaagtagacgaaaacctctcaaatctataatgcttgttcacctattgagctttgcataaaagtatgttagccatgaacttgcacatataattctat

SEQ ID NO: 225709 - DNA, 405 bp, Glycine max
agctctataagtgcgggtctgtgagacgattgtcaagggctcgcgatatgtgaagatggtgttccaagtacttcggatttggtccgaccatgccctcctgatttccagctgggaaattggcgagtggaggaacgccctggcatttacgcaacaagcataatgtaaacctttacggttttaaaagctctatagttgggcctaggctttagagttctcattttgttaaggccttgtgtcttttgtttttgaatctataatacaaagatctttcttcatctgtgcctggtctctacccattctcattcattcgcatggttacttctttttctgaaacggcagattcgatgacgagtcccccgaaggactaatacctgggacccgtctatcaacttcgagcaagaaatg

SEQ ID NO: 225710 - DNA, 386 bp, Glycine max
  unsure (1)..(386): unsure at all n locations
tgttgaaatcgccatgtgtggatgagtatatcataccttttctgcntnagggntcttatgacgatgcttgtgatgttcatgtactgaaattgcttatggaaaactgttagagatgaatggtagaattaacctacggttagaaagtgaaaatgtggtgttatgagtggaaaaagagtgaatctcttgatggctggaaggccaaatctggaattggtagtatttataggttagagtgagttaatcttagcttgaaatgccatttatgacttatgagaaatgttacgctgtgctagagagaataatacaaatgaccaaagtgaaccaagagccatttctatggcatactttgagtgctgaggagtcaaactttgattcagtggaatttt

SEQ ID NO: 225711 - DNA, 428 bp, Glycine max
ggaccctaagcgacgcagcagcaagctaaaggagcatcaaaccgttgacccccaaggcctacactccgaagagcccgacaggacctctacttcacagattcaggcccaacccccaaaataagtctctgcatgcaaacaccgctcatgaattaaaaaaaacccaagacctcacactcgtgtttcaaacacggctaacacaattgcctacaagtaacactgggtcctaaataggaaacctacacttctctaaacactgcacatcaacactgctctcaagataacactgggcgggttattgcacacatcacaacctacaacacaagagatgcacatccagagtaaccatacctaggtacaccccactcatcacaagtcaaaatcaaacgtccaaccaccacaccaggtacatggtctcacaataaccacgg

SEQ ID NO: 225712 - DNA, 409 bp, Glycine max
gttctccatgtcgagctgaggagagagacttatagtagctacattctcggcacccaaagattaaacatcgccttcaataagtataccatgcagagaaaatccaaaatgtgttaacacaagagtcaataacattccataaggaacattacaagtggatttgacgggctcggatgccttgatcaaatgattaaagatcatgtgacgtaggctgatgggaaaccttcttccataaatagtcaatgactaagaggtcataggcatttacttcttgaaaggtttatgctctgggcagcatagagcgcatgcatatccaatggacaatccttcccaaggatttcagagacctcggtttgaaaatatctctgttgttctcccaaacttcctctagaccttgttattctatgtcctg

SEQ ID NO: 225713 - DNA, 421 bp, Glycine max
  unsure (1)..(421): unsure at all n locations
aagcacctgcggcatgcagctttagtctaatttagcgcgggaatattattcaagcaagcggacatccgagaaaaagttattgtcgtttgaatttcctaccagcgtttgtttncaattgggagcgtctcgatatatgaaaggactcatccggacatgcgtggataaacgttttggcaattcaattttcttagagcttcggatcaaaaatttgagcgcctttatattttacgggactcaatcagacatccgagttaaaagttattggtcgttcaatttgatacgagcttctcatttcaatatggagcatctctcgataaactacgacaatctgtcgggcatcgaaaaaaatgtattgcgtttgaattttctaagagttccgtttccatttgggcgctcaatatatcacggactctaccggctt

SEQ ID NO: 225714 - DNA, 439 bp, Glycine max
  unsure (1)..(439): unsure at all n locations
ctaagctggaggcaaactggatgcgntggtccacttggtgacctatctggcctcgttatacaaatctgcacctggcgcaagggtttgtggtttgtgctcctctgccgaccaccatacagacctttgcccttccatgcagcaacctacagcaattgagcagcctgaagcttatgcagcagatatatacaatagaccttctcaacctcagcagcgaaatcaaccacagcagagcaattatgacctttccagcaacagatacaaccctggatggaggaattaccctaacctcagatggtccagccctcagcaacaacaacaacagcctgctccttccttccaaaatgcttctggcccaagcagaccatacattcctccaccaatccaacaacagcaacaaccccagaaacagcaacagttgagcccctcccaaccttcctcg

SEQ ID NO: 225715 - DNA, 434 bp, Glycine max
  unsure (1)..(434): unsure at all n locations
agctntgcttcaccagggactagaagtattaattcttttataaagacttcaaatgagaaggcactatataaatgttattattcccatttttttattaaacaagatgtattatggatattttatttggccttgatattgttcttctttatttaaaagaataaatgaaatgaattttacaaaaatgatattgtaatcctttctacaactcacttggcgagataaacttaaatcattggggatttttcttactacttgaaatttttttctcaccccaggacattttttctaggtttttccttgatgaggaataactgtttttaagagttttggaaaaaataggtggggtttatacaggctaattgagggtgattttaaataattaacttcacttcaattaagttccttgaacacctctaaatgtcttgtacacatat

SEQ ID NO: 225716 - DNA, 477 bp, Glycine max
  unsure (1)..(477): unsure at all n locations
actcagcttatctncagacatgaatgatagccttcggctctatcattattttaatnncncctttgagcttagagattcagacatcctttcttctcctttaagatcttttgcacagacatgttgaatcaagattgcttccatcttgatcctccataacccaaagtcatttttccctgagaacttctcaatattgtactttgttgttcccatctttcttgatcttgtccccacagacgacgccacttgttggttcttgtagtctgttagacctgctctagaacaaaataagaataaaacaagaacaagcacaacaaaaacatacaaggatctacaccagattgtacgtggttcaacagtgtgcctacatccatatgaaatggtagctcatcatcatcacattgataatgaaattcaagttcaatacaagcaacagatagttctgatctctctaggtttctttctaataaaacctctctc

SEQ ID NO: 225717 - DNA, 437 bp, Glycine max
  unsure (1)..(437): unsure at all n locations
agctttaccggaaagctaggcacaatatttttttgntttgccgacattgagcaattnttttcttatttttcaccaacgccaggcaataattgttttaatacgatcaagctaattttccttgttgatttcgctcaatgataggtttaccatcgaggtcgcctttggtatttcgggggaactcaaccgccgttgtgtctcggtcgacattggcctgcgctggtagaagaggcaaagaaaaatatagcagaccttggcagcaaaaaaaaaatacctcgacaaacttggataaaaaacaattctagccgacatcggccaaaatagattaccggtcgctgtatcccaaaaagaatcaccggatgaagccaatcgaacatttccttatcgacatcatccgaaaattattcatggatagaacagaaaaacaatagcccaaaacg

SEQ ID NO: 225718 - DNA, 382 bp, Glycine max
actaagctgcagactccggttctctgagtggcgcgacgattgtcgttttctcaatcaatgccaagaattttataccatgccctcgtgctcagatcgcatcagtgactgggccctaacctttatgacctcattgcggctgctgacaagcttttaggaacagtcctattgctggacttcaccacaacacgttggggtggaatgtcccctagaaacataagacgtgaagcaaggctgaatatggaattggagcagttggaacctctaagaggtgagacattgagagactaacaactgagagatcacctaacactactatcagacagctgaactgacactgagaacttgggccctgcctctcatatactttggcaaagcttagcag

SEQ ID NO: 225719 - DNA, 424 bp, Glycine max
agcttgcagtgctactagtactagctgccatttttgactaagcaaaacaaagcaggaacgcgtattgaattgaacgtgtcaagtacacgctgtatcaactaccaaagaattaatatgtttgtatatagtgcgtacttttacatgtttcttgttgagtttataaaaaatatattaaacacaagcgacatctctaacccaaaagtgagtgtgtttgcgtgtgttttaacacaccaaatattatattttcggaagtaaaacagtaatggaaagtattcaaatactttgggggaacataagatctcttataaataacgtatatgtatagtaatttgcattagtcactgtgttatcatagataagcttccgggaaagggtgataaagttgagtctatatttctgaaaaaaaaaaaaaaattgttagctg

SEQ ID NO: 225720 - DNA, 465 bp, Glycine max
  unsure (1)..(465): unsure at all n locations
tcatacctcaaggacatcaaagaactctctaaggacacattttgtgtttatgtaataccagtttggatttaaatggttaaagaataacactttctaataatgtggacaacattttcatgcacatgataaatataacaaatttgcaaggtaaacttcaacttttatttattattttcaatcttttaagggaatattttttctttatttactattttttgtaatttaatgtaatgcatgagaaacaacacaacaacatattttagaagattgtgttgtgttgattaatctagcaagtttgtataattgtctactattaaaaagatgaaaaacattccaaatttgacatgtgttgtttaatgaatatgccattgaagatgttgttcataagctaagaaaaacacttctaagtttttgcatggatgaatgcacataanatttatttggaagctagaatattttatatgc

SEQ ID NO: 225721 - DNA, 406 bp, Glycine max
  unsure (1)..(406): unsure at all n locations
gcacttgaacaatagnatgatattggccgacaagttctcgactcacttccatgttgcctacctctagtaccttgacaacttaggtgcttgccacaagtatgcatggggagtagctgcactgacatacctctacgaccatctctcatatgcgagtaagtataacagcaagtcatggggaggttatgtgacattactcatggtaagtaaacatttttagtcttggaattattttttattactataattaatatttgtattggtattttttatagccttgggtgctggcgcatctgccaatgtttgctacttatagtgagaggattatgtttgtgaggacctanaagccaccagatataacccattgagaggtaccgagcgtgccttccccagtaggaagagactggat

SEQ ID NO: 225722 - DNA, 454 bp, Glycine max
  unsure (1)..(454): unsure at all n locations
ntctttagttggtaaaatacacatttacttattgaatgttatttagnttatagataaccattattaaactttnttctttctctcttaccatcaagttgatgggtgagattgtagtaggtgatcgctccattactcacgcatacgttccattattcaggttagttgtaattnttttttattctagttacttaaaattntgtattgcaaatgtgttaagtatatatttggttgtggttgtgttatttatattccatggtttgttcatttagaaactcaaacattatatatatgtgattnttttcacctaaaacatgactagaattcttgctactaataatagagatcacgttaagattatatatgtgaatcatgaatgttcgtatttttttaaatatatagaacatgaaatatattctttcgaatcgtcattggatgtataatagaatgttatagt

SEQ ID NO: 225723 - DNA, 244 bp, Glycine max
cgtggaggaggacttcccgaacccggtcctgcacacgctggcccttctcggcctcctccgaaaccatcgattcttcctcatccacctcctcggaccctccgacttcttcgaaaccgagggcgcctggccggacccccgcccctcagacacggcggaggcacggcccccctgcgtggcggcgctcctgagccaggacctcctgcccgtcgccaagttcggagactccgacattgccgaccgacaa

SEQ ID NO: 225724 - DNA, 403 bp, Glycine max
  unsure (1)..(403): unsure at all n locations
agcttggccacgcctacaaaatcttagctaatgttaaagccagcctaagcttgaaccctcgttgtagagcaaacaaaccgaaacacattcaccacgatggcgaccaaagcgatggaggtggtgaagggtctggacgtgaaacggtacatgggtcggtggtacgagattgcgtgtttcccgtcgaggtttcagcccagtgacggcgtcaacaccagagccacctacgctctcagagatgacggcaccgtcaacgttctcaatgagacttggagtggcggcaaaagaagcttcattgagggcactgcttataaggccgatcccaacagtgacgangccaagttgaaggtcaggttctgggtgcctccgtcttaccctttttccgttactgggatactggggtttg

SEQ ID NO: 225725 - DNA, 366 bp, Glycine max
  unsure (1)..(366): unsure at all n locations
tcagtggatggaagggagcaattgtntgatggtggctattatgtttcctaggaaggacaactgttacattagtcttttggatttcagggacaaaaagatggtgtggtgttggtctgatgtgggggctccttttgccgtcgatgagaaacgggtcagggatgctattgccatggaagataataactccatttgtgtggtaaatgagtttgaggatttggggttcatggatttgagaagttctgctgccaatagcattaggtggagctccacgagtaggttgatgaatgggaagatgcctgatgaaccatgttatcctaaactggcattgcatgggggacagctctttttcgccatgaatgattgcat

SEQ ID NO: 225726 - DNA, 377 bp, Glycine max
  unsure (1)..(377): unsure at all n locations
agcttgtgcatccaataccctgatgaggttgnctcatatgtncttaagactggactgattcatttgcttccaaagtttcatggccttgcaggtgaagacctgcacaaacatttgaaagaatttcacattgtctgctccaccatgaaacccccagatgtccaagaggatcacatatttctgaaggcttttcctcattcattaaagggagtggcaaaggactggctgtattaccttgctccaaggtccatcacgagctgggatgaccttaagagagtattcttagaaaattntttccctgcttccaggaccacagccatcaggaaggatatctcaggtattagacaactcagtggagagagcctgtatgagtactggga

SEQ ID NO: 225727 - DNA, 395 bp, Glycine max
gaatcagaaaccacacctgtgcaagagttgtgaattgtgttcttctgcagatcaccatacagatctctatccttctttacaacaatctgaagtcaatgagcaacctagaacttatgctacaaacatttataatagacctcctcagcagcaaaaccaacaacaacagaataattatgacctttcaagcaatagatacaatccaggttggaggaatcatccaaatctgagatggacaagtcctccacaacaacaatagtaagtgcctcctttctaaaatggtgctggtccaagcaagcccatatgttcctcttcaatacagcaacaacagcagtcacaacaaagacaacaagcaactgaggcgtctcctcaacctttcttataagagttagtgagac

SEQ ID NO: 225728 - DNA, 429 bp, Glycine max
agcttctattagatgctaaatcctccactctattgagcttcttctttatattggggatccccttatcatttatgaacccatagtctttactccactgcctgatggcctctttcaagaacttgagcttatttttgagcacaaccccccccccccccccatcccccctgctgagcattgttccaagcctcccacactaatctttggtaaccctttggatgtatccaccagtcagccaccctaaaaggtttagggccccagaccagcatcttagtttgtaatatggttggacaatgatcataaaagtccctgggtaagatatgttgacaactatcaggccatattgacatccattgggctaaaaccaagaatctatcaagcctactcttaacactccattaggctaatccagggaagctgtgccttaaatta

SEQ ID NO: 225729 - DNA, 465 bp, Glycine max
  unsure (1)..(465): unsure at all n locations
ntgatggtgttgagaagaaatcacatgtttgtcatcatcttaaagggggagaatgtgaatgtattttgatgatgtcaaaagaagaatcaaacaaggctcattttgcttcaagattaatacaaagattgtttcaacaaacaaagccttgattcaagatttcttcaagatcaagtcatgcctcacaatgaaaggtttcaagtcattcaaggcacatgtaatcgattaccaatggtttgaaagtgtgtaatcgattacacatcatatgtaattgattaccagagactctgaatgttgggaattcaaattttaaatgaagggtcacaactgttcaagataaacaactatgtaatcgattacactaattctgtaatcgatttccagagaggaatttcaaggaatatcgccaacagtcacatcttatcatttggattttgaatggaatcaaagcctattatatgtggactt

SEQ ID NO: 225730 - DNA, 412 bp, Glycine max
agcttatatggctgaaagggatgctaagtttatcggagagctccaaccacctttgaatattcatataactcggtcctctgtccaagtactaatcaggtaagaatatgaaagcaacaaactcattcatatttgaatatgttcttttaagaaagcaacatatcctgaggttgcataagtataacaaacagatgggttatttaaaaacttacaaaacaaaaggattaagtaaaaataaataaaataatttcatttaaagataaacctagagataaagagcgaactagaacagacaaatgcccatcttttaagcatgtagaaaaaataacaaatatagttcagaatatgaaacaacctaatcctggtcagagacaacatttggcagatggacacaccacaacatacgcattatttt

SEQ ID NO: 225731 - DNA, 450 bp, Glycine max
cttgaacgaaaccatatgccactaagtatcatactttagttcttcagcataaatagttcaggaaccgcaacaggaaatatcagtatagatctacaacaggaggcaagtggaggttatactcagacccaccaagttgctaaattgtggaaaatgatccagcaattgggggtgaccattggagacaatcaagaggtccaacacaaggaaattttgcagaaattaagtagtatggaaaccagagacagattggaagctgagaggatgggagcacatgtcatggacccatgaatatagcctcttatgatgttagaggtcctgtgaagggagtgaaatgggctgccataacgagattaataaataaagaaaatattaaatgatctgtctgcatgagactaagaaagacagatttgatatacattatgtcagctatatggcgaatgatgaaatatg

SEQ ID NO: 225732 - DNA, 426 bp, Glycine max
agcttgtgcattcaatgtctttttttttgtctgcttcaaatcctggcactctaagtacatcaagttagtccaagacacaatcaatgctagtgagaacattaagttggcagcataccaagatattttacagcctgacagagttcggaaaccaacaggttatctgcaacttcatcaattcaatgcattgttaaataataaatcacatgacaaatattctgattcatagacataatagagaagcaatagctcatttatgtttaatattcaaatctgttactgaccttggaaaagtgattgttaatgttttttatattgaccagtattaagagttcgtgaatagttgtgttgagttatcattctaatgatgtatcgttaatgtgtgaaagattcatgaagtctaaagcttatagtgaatgtaaaagctca

SEQ ID NO: 225733 - DNA, 418 bp, Glycine max
gtatgagatagcagttgggatagccagatgcatttcattctttcacgaagatagcaaacacagaatgatccattatgacatcagaccacgaaatattctattggaccgcaatttcaatcctaaagatgctgattttggattagccaagctttgcaacagagacaatactcatattactatgacaggaggtaggggcactcctcggtatgctgcacctgagctttggatgccatctcctgagactcacaagtgtgatggtacagctacagaatgctggtatttgaaatcgtaagtaagagaagaaacgtcgacactaacctttcagaaagccaagagcggtttccagtatgggtttggaatagattgatgctggagaattggcaaagtaacaatggcttgtgaatatacgaagacatct

SEQ ID NO: 225734 - DNA, 486 bp, Glycine max
acctcagagtcacctgcggcatgcaagcttcatgatgatgaatcaagttgattcttttatttttgatgatgaacaagatgatgacaaaaagcccaaagaatgatttcaagattaagacaacacgttcaagatcgagataaatttcaagtttcatgagaagaaatcaagaagattcaagaatcaagagaagtttgatttcaagattcaagagaagatgaattcacgattcaagagaagaaatcaagaagacttcacaagggaagtattgaaaagatttttcaaaaaacaaacatagcacgtttttgtttttcaaaagagttttctcaaaattctctaagttactagagttcttattctctggtaattgattaccacgttcctgtaatcgattaccagtggcgaagtttgatttcaaaagcttttaactgaatttgcaacattccaattgtttttaaatggtgaatcgatacaatatattgggatcga

SEQ ID NO: 225735 - DNA, 415 bp, Glycine max
  unsure (1)..(415): unsure at all n locations
atgaccaagaataaggtgttgtttgagcataacaagactctcctaatntggtttacagatgagaatctttggagattaatctgcatagttattcaaagctgtatacataatttttgtaaagattaataattcaaattaaaaaaaatgtataaagatttgacagtgaattgaaagattaataatcgattatattatatttattaaatatattatataataaatgattaattatttatggtggttccacccacctttaaactaactaactacaacagtagttaagctaaaaaaataaaagatcaatacattctaattaaacactttttctttaaacataatcatacgagtactatatttatcaaaaaatgtgtaaatataagttctaatgttttatatcaaatactgggcttccctc

SEQ ID NO: 225736 - DNA, 269 bp, Glycine max
taatctatcctgcaagagcaacaatcacacatcgaacccctaagggactatgtatcatttcaacaacatgtgtagtgcaaacaaaaagaacttgcaacgcataaccgctcaagtaaatatggtaaaaacaagcctactttgcccacagggaaatgaatgaaagccatacaatcaagaactatgtgaccatcctaagaactacctatcagcaacaaacacaatcaataaaccatgtacaaatgctaactatatcacaatctcactacaaa

SEQ ID NO: 225737 - DNA, 326 bp, Glycine max
tgagctgcagctgctgcaaaccatcatctctcataatatctttgggggaccgctacgcacattgaatacacacaacgataatataatctatcactccatccaaatacttgcttatattgaatactcaatcgaatacaaggagctataactgccctctctacaaattaccaccctcgggttctactcttattgaagaatacatcgacacgaccacgcgtgccaccacaactgcagactataatcttctgaagctctcatgtcaaaagcgagttgtgaatttcacccgactgtaacacggcactattaccctcacacaaaggctcttg

SEQ ID NO: 225738 - DNA, 412 bp, Glycine max
  unsure (1)..(412): unsure at all n locations
acttcttgaaaatgaatggcagtggaatgaacaaggaagaaagatgattggagacgccacttcaaggagaagatgagtcaagaagaagctcaccaccataagaagccatggataagagcttgaaggagaagaagatgaggggagggtgaaggagagaacgagcacgaaatttagtgcctctaaagaagtctaaactttgaagtttaattctcaaatgatcaaagttaaaaaaatgcacacacatgacgtctatttataacctaagtgtcacacaaaattaaagggaaatgtgaatttatattcaaatttcacttgaatttgtggagccaaaatttcactaattatgattcgcgaattntagctatgggttagtatactaatccaagatcaagtcaaagattctccactaagt

SEQ ID NO: 225739 - DNA, 412 bp, Glycine max
  unsure (1)..(412): unsure at all n locations
tgtgcnctatcaccacatggatacatccacgactaggtatttatataacaatctatcttaatagtacttatttaacacatgaaattctttaaaatctaatttcaatagttattcaaagttgtatacataatttttgtaaagattaataattcaaattaaaaaaaatgtataaagatttgacagtgaattgaaagattaataatcgattatattatatctattaaatatattatataataaatgaataattatttatggtggttccacccacctttaaactaactaactacaacagtagttaagctaaaaaaataaaagatcaatacattctaattaaacacttcttttttaaaacataatcatatgagtactatatttatcaaaaaatgggtaaatataagttctaatgttt

SEQ ID NO: 225740 - DNA, 353 bp, Glycine max
gaccttagatactctagctggatttcttgtcctgatcaagtcgaatctcttggtttaccctttgttccatacataaaacagggaaacacgcatttaatttaaagactctcacctacaatgcctttttttttttaaaaaaaaaaacaaaatttatctgaaggaactgaaacaagtactttattaaatcatgccgtactaaccgagctaaacacccttattttcaagagcttatttcccaaactctttatttctttcttgtatttttttaagctatatacaccatgggctatatctaatgaacatatgcttcttcctctcaatatataaaaccataacgtttcaaactggtcaat

SEQ ID NO: 225741 - DNA, 447 bp, Glycine max
  unsure (1)..(447): unsure at all n locations
agctcgaccacatccttatctttaaaagtatacatatttatgatgnatgttaaaaacatatatacataaggggggccactgaacctcacatacaatatagtacgcncatttttggctcacatagtttaggtagtttatggtcaaaatacgactcagacccattctcgccccacataggctatgtcacttatctcaatggcctttaattacaactcaccatatctcttgttcatcacatgcacgacataaatagatatgtgttccttccaaataatggtcagacattataacctttatgatgcaatcttattctccaagggcattggatagaagactctaataatattggggcagaaatgcaagagaaaagcctaaggttttcatgagccttatggtcgatcctgggcccctgggcctagcacgagcccacttattcttttacatatt

SEQ ID NO: 225742 - DNA, 350 bp, Glycine max
tattgtcttatatggtgggatgcccacactaaagcacaacacattctttcaagcagggagtaattcatttcacaggccgtgaacttcttactcaagtagtagacagcgcgctctctcttcccggactcatcatgttggcccagcatacattccatcgactcgttcaaaattgtcatatacaagatgagaggcctttcgggtaccggcggcataagcacaggagggttcatgagacactgtttgatccttccaaacgcctcttgacaatcctcgtttcaccggacagtttggtttttgtgtaagagtttgaacaacggctcacaaatatcagtgagctgtgatatgaatct

SEQ ID NO: 225743 - DNA, 426 bp, Glycine max
  unsure (1)..(426): unsure at all n locations
cctgaggcatgcaagctngattgacgtgggatggtcgacgttcctagatgattttccgaatgtaaggactaatccactctccagtcatggaggctcgacggttaatgcagtggaagagtgggagcctcacgggctaaagcagatgggagacgtgataacctatagaaggttcattttggaagcacaatgtgaatttggtatgatttgccttgatggggaccagggagatttttgtttaatgcattcgggggcatcacatgatgtggagacgtgcccaatggcagaagagttgttataggggatgatggataaaggccatattgaattctacagcacaagaaatagggaaggggatgcgtgcatgcagtcagatgataaaattccgagcaaacccaagccattggtgatccactctactaaggatgt

SEQ ID NO: 225744 - DNA, 443 bp, Glycine max
ttgcttctacacattaaggagatctactagagtaagaaaatttactagtcttagtgattatattggatatttgcaagaaaatgactataatattggagttgaaaatactctcgaaacttttgatcaagccatgagttgtaaagagtcaaatttatggtatgatgccatgaaggatgagatgaattccatgcagagtaatggattttggaaccttgtagagtttcctaatagggcaaagaccattggttgtaattggatctttaagacctgaaaggattcattatgcaaaattgagagatacaaggcaagactcgttgctaagggatttactaaaaaaaaggaatcgattacacaaacaatctttctcttgtatctaagaaagattctttttgtattatcttcgcattagttgctcatagtaaccttgagttgtacaaatcgat

SEQ ID NO: 225745 - DNA, 445 bp, Glycine max
  unsure (1)..(445): unsure at all n locations
agcttgtcacagttctgccatcactggtggttacttgttaagagagggatcggccattgaggtatgagttgctctgccagttttgcccccagtttcttgacatgggctgccacccagttttggaccctttaatggacactgaattcacatcaccagctccagccacattggtgatcaaaactaggttgaagtaagagtggccattgattgtgaaccttattcctccctntttcacacaaggaaccttgccatcatcaccaaaagtttagtttagtactagttaaacatatgagcaattgaaaattaaatatccgagataaattaagctatctcagtcgttaatgagaaaattaatagttattattatgtgcacgtgcataacaattcatgatgtggtaaaaagttctccacaatgattaagattacttattctattcttattctc

SEQ ID NO: 225746 - DNA, 415 bp, Glycine max
tctctcaattaaattcctcactagctaatgaaatcgggaagttgtttcccaaaaaaatccctataaattagtttcacgagaaatgagtttatttgcataagtattgcctttactatatatgtaacctacaaaaaggttatgtgtctagttctatgtaatttttcacctatttagagatctccaaggaaccaaatcgatcaattttcattttggaatgcagaaacctaaaccctaaaatttatatacattctcagcaaaagaaattaaataaatataaatagtcacttctaaattaattcaatattggacaagcacataaaattaaaatttggattaatctgttttggtgaattataatccactaattctttttgcagctcttaataatctttgtcaaataaattaataattcaaa

SEQ ID NO: 225747 - DNA, 451 bp, Glycine max
  unsure (1)..(451): unsure at all n locations
agcttcttgatatgaacanacattatactcttatactgaaataaactntacaanagcatgtggctctcttaagtcctaatatcaataccaatccatcatttttgctaataagagtcattatacaatagagaagaggggagatgaaataaacaataaaataagagaaatcataacccaggtgttatcctaaccactaaacataccttcatcttctaggtcttcacagccaggagcaacttcaaccatatttgatggattagtgcaactattcaagttgccatgggcactctcttgacaattcttcgcctgtgatccttttggttgcccctgtccctttttcttacgcataatggtacctgagtcacaaagttgatatatgacaacaacagttagcattntcctgcacaatacaaatataaaggataatcagataaagtccatccatgtgtac

SEQ ID NO: 225748 - DNA, 438 bp, Glycine max
gtgacactatacaaactccaagctcactgtgctgtgtaagctatatgagaattgtgctctcatatatatattattgatcaatactaaatgatgccttagatgacaccttgttgattacatttatgaatcaatgatcaagccaaagattgatagagatagaggtaacatactctaagcggcccttcttcaatcttggtggggaataccacatctctttcaacattattgggaaatattttatcctttcttcacatgcttacataactactagtgagcgggtaaaagcatcacaaacaaatcataaacagtttatagtgctccagcccaacttgtctactctcacagatgagaataatcaacatgagacaggttcatatctggtgtgtgcattatagcattgagaggactggggaggacacacctctcgagtgctactta

SEQ ID NO: 225749 - DNA, 404 bp, Glycine max
agcttctcatgaccattacatgcaagaaaatttgtattttaaggctttccatctctggtaatcgattacacagccttggtaatcgattaccagaggctaaacttgaattacacagcctcaagacatgaaatatgcaaaaatgcactgtgtaatcgattacacatacctggtaatcgattaccagtgacccattcctctgtgtaatcgattacacaggctggtaatcgattaccagaggctcccttagtttcctgacttcgttttcaagcctggtaatcgattacaccccgtggtaatcgattaccagagaccatcttagcctcctgtcttcatttttaagccttggaatcgattacccacccttgtgaatcgattaccagaggccacaattcacatatcacaca

SEQ ID NO: 225750 - DNA, 421 bp, Glycine max
cgagatgaagaattgttgaagggtgaaacttcttgcttttattgtttaccacacagtggtacctggagatatgtcgcggaggtcacgagaccttggggacgtcacgtggggtgctattgtccaaaaccaagctcgaccaatcccgacccaccccgggcatagtctgtcagtgagaacctgtgatgtacccaaacaggcgagctcctggcagtcaacagataataggaacaaagaccacaaagcaaggaggcttgtggtggctggccagctgtgaatcttgtgtgatatatgggttatggcctctggtaatcgattaccaagggtgggtaatccgatacaaggcttaaaaatgaagacaggaggctaagatggtctctggtaatcgattactacggggtgttatcgattaccacgcttgaaa

SEQ ID NO: 225751 - DNA, 483 bp, Glycine max
tctaagacacctgcggcatgcagcttgaactaacacgtgtataaaagtctattcatatgatataaagtcaggcagaaagttaaccctagttcttaaggaggaagccttgccctcgaaattaaggcccatactctcttttctctctccctccctcactcgtcttcttctctctctccttccccaccatcagcgtctgtctctaacatccaatgtaaattgctagctaattgctcttgcataataaatacatataatcaatccaagggttcattcattttaaaattgagtaaaattaatttaattaatcattaaatgtagtgtgaaaccaataaatgcatatattcttaggagaattataaaacttcttacagcagattttataatattttcttgttgcagtacattattcatgttattttaaaattaacaaaccaacattatcgttaaaaaaaaaactccagagtgatctcatcttctcataat

SEQ ID NO: 225752 - DNA, 420 bp, Glycine max
gacacttataaactctagcttctagccaacaggacataccttgaattaattccttagatagtcctttttagccttcgttacctttccttgttgtgaagctcactacaagccttaactgaaaaaccatgatattaccatattcttaaggaattttggagcttttgaattgttttgggaataaaagtgggggggttttgtttcattggacaacttgttttgttggctatgcttcatgaagtattttgggccatacttgatgtacattgtgtattggttaaatgttggacatgctgaatgaaatgctcgttctcaaacgtctaaaaaacaaaatttgataaaaaaaagataaaagctattaagttgagcgaataagatcttaaaaggcacaagaatgatgaaactctttgctctactcttcat

SEQ ID NO: 225753 - DNA, 375 bp, Glycine max
  unsure (1)..(375): unsure at all n locations
acccacaacaaccaaataattatgacctgttcaagccaaatatacaatccaggntggaggaatcatccaaatctgagatggacaagatctccacaacaacatccttgccctccttctcagaatgctgctgggccaaacaagccatatgttcctcttccaatgcaacaacagccgcgacaacaacaaagacaacaagctactgaggcccctnctcaacccttcttggaagagttagcgacgccaatgaccatccagaatatgcaatttcagcaagagacaccagcctcaattcagagttcgacacatcacatgggacagatgggtactcagttgaaccaagctcagatccataattctgaccaattgccctcacaa

SEQ ID NO: 225754 - DNA, 358 bp, Glycine max
tacgtgcgctacaaggaaaatacagtgaatgaagctcaaccgaatagtcaagcgcaaaaacttccatatctggcggcactagttgaaaagtaaccttattaagggaaaatgtgcatatgctactctccgtgcaataaaacccaattagcttttagtatcctttctgcttctgttcgagagtctatatcgatgtcatgttacatccaattttaaaacgcatttcatactcctcaccttaaaaaacaaggggcggacttgtgaaaacaaaatgatgtatttagagccattggttgacaataagctctagaaagctgagtctacctagaagaaaaaattaaaccgaaactcgagaaaatcc

SEQ ID NO: 225755 - DNA, 443 bp, Glycine max
  unsure (1)..(443): unsure at all n locations
gtcgggagtaataaacccacacatttcagaggcagtgtacatttcttaagcttcttccaaaaccttcaacttctcgtgttccccagctgcctccataagattcacaaaatcttccaaactcaaaaacccatcaccattagaatccaactcctcaatcaacttttcagcatctttggccaacaacttaccaccaatcatgcctagccggttcctaagctcacatggagaaatcttaccatccccatcctcatcaaaatacttaagaacacgctcaaactctgtgttcatcctcataactttagaaaatacacgccaaaatattgatgaaaaaaattacacttgtgaaattgttaggcacaagactatntagttatgtaggtgcttggctgtgacctacatgtgatttgtgttaacatcttatggcggttgacgaatttatatat

SEQ ID NO: 225756 - DNA, 205 bp, Glycine max
ccccccccccactcccccccccgccccccccccccccccccatgtgctctcaccggccaacacgagagcacgcgaaacaagttttgagggagaacagggaaaagactaagaaccccacactggaaaaaccacggacgccgacaccgcagcgccccccacgcacaaagcacgaagaaaagcacaggggaaggccccccaaatcaag

SEQ ID NO: 225757 - DNA, 386 bp, Glycine max
  unsure (1)..(386): unsure at all n locations
tataaaactcagctcggtatgactagccgcacccatacataaaanagtgtttattattttacggcaatcatgcgtgaaattaagaactgtatctacatgcatggatagtatacagtcgtgttctttctacactaggtcgctatgtgatcctcactgaggcctggggatcgtaagaataacatttttttaataactatcgcggactcatatctgtataatgacatttaactaggtaagggcacaaaaacatctcagattgaagattcttatgaaaagtaaaattgtgaaatcaatataaaatatactaatatgtgccaaggctgtgcattgcattcttacacaaagactcactctatcatatctaaaaatcatatattaaacaaaaa

SEQ ID NO: 225758 - DNA, 408 bp, Glycine max
  unsure (1)..(408): unsure at all n locations
agcttgaccaatcccgacccaacccttgctttgtctgtcagngagaacctgtgatgtacctaaacaggcgagctcctggccttccacatataaaaggaacacacaccacctagcatggaggcttgtggtggctggccagctgtgaattttgcgtgatatgtggattatggcctctggtaatcgattaccaacggtgggtaatcgattacaaggcttaaaaatgaagacaggaggctcagatggtctctggtaatcgattaccactgggtgtaatcaattaccaggctcgaaaaacgagtcacgaaactaagggagcctctagtaatcgattaccagcctgtgtaatcgattacacagaggaatgggtcattggtaatcgactaccacgtatgtgtcatcgaatacaca

SEQ ID NO: 225759 - DNA, 425 bp, Glycine max
tgccacaacatcttgaatcaatgtacgaaagcgtcctttctttcttatctggaacatggacgctcaggtggcaagggcgtcggccatctgattttcctctctaagaatgtgatgaaaaaatatgtcatccaacaattctatcaactttttgatgtaagcctggtaaggcaccaacctatgggctctggtctcccattcaccctctaactggtgaattaccaaagccgagtccccgtataccttgagccacttgaccctgaagtccattgctgcttggatcccaaaggcacatgccttatactcagctatgtggttatgcagtgaacccacctacccggaaggcattattgtcgtctgggaaaccaaactgcccaacttctggcctatgattaacggccgccaacaactatcattgtcctgcttac

SEQ ID NO: 225760 - DNA, 413 bp, Glycine max
  unsure (1)..(413): unsure at all n locations
agcctttagaatatgngnctctctatttcctctttaatctctctatttccccttgattcctactctttagttntcattttaacacctcaattgactatttattctatgttctaaacttccatatttccattctctcatggttagttgaggttaagggaaggagaagccaaaaggaggtcatttccaccatttgcttgttgctagtttgagttggctaaggagaaacccgtaaggaaagttactttgtgtgtgttatgcatgctttgtggtgtttttttatgcatatggtgtttatttcgtgagataaggtttgattgaagatgaagcatgtgaaatagcatgatgtgcttgaagatagcatgaacctgttggtgtttntgtctatacatcgcaactcttttttatatattgag

SEQ ID NO: 225761 - DNA, 313 bp, Glycine max
  unsure (1)..(313): unsure at all n locations
tcatgaatgaaaagaaagagggtgtatattggagagggggcnctccgcctctgtacgaatttcacagcgcggagaatgtatctttggagtgagtctcacaagagggtcgagttatcacagttacaacaggtgggacgcatatattgtattatagacaaagtagcgtccttgagaagccttctggcgaagacgttcttaaaaagcctccttgagaaaacttcctctgagaagatcgacttaattccacgaatcctttgacacgcggctcacctcctgagaagtttctggaaacatcctaacagcgagagcttac

SEQ ID NO: 225762 - DNA, 355 bp, Glycine max
  unsure (1)..(355): unsure at all n locations
cagctncngccattatgaaatgctctatttttatctctaaaacgcacacacttntcttaccataccaaagatatacatggaaatgctgaacttgctgtcaaaaagactagtgttagcaatgcagggccataaaattttttaccattgccttaagtgcaaactttgaactatcgtatccattcgttctttctctattctattctcagnagttttaactatatagtgccatgcaggtcacaattgtggttgtcgcagtccttgaaggcctacctttggttgttaccttaatgcaagaacatgtggctaggttatttcattatgcaacatagatatgactaacactacgccactaata

SEQ ID NO: 225763 - DNA, 378 bp, Glycine max
tcaagctgttcaatcgctttagatagctgcacaaaagggcttttgtctgtatggtggtccgcatatgagcataaaccacagagtcttgcgacaggtacacattcttgattcatggccagttgggttaccacgttaaccaaagcgtctagtttaccttccagcttcttaatttcagacgatgcagaagaatttgtggctacctcatgcacttctctaaagactatagcatcatttctggcgctaaactattgggagttggaagccatcttctcaattaaattcctggctttagcaagggtcatgtcttcaaaggctctaccactggtagcatctatcatacttctcctcatgttactgagaccttcataaaaatattgg

SEQ ID NO: 225764 - DNA, 462 bp, Glycine max
ctcgtactatatgaaaagataagatgattctttggccattttatttctccctgaaaatgaagaagatgtcgcccttgcgcaattttctaaagctcgccccaggcatctgtttaaacatgagcttgaagtgctcaaacacaagtttgggcgcacgactctcgatggccatgccatacaaacattctatagattgcagtagtattgctttggcttggaacctaaaaagaagccacctactgggtcttaccatcattaaattgagtgttggtatcagactttgaaccacttcacttctgcttcactcaaaacactcgcttccatgatctattcatggcaatgggatatctatgctacgtctaatcacaccttctcttctatgacgacatttacattctctcgcttcttcttcacccatcatggagaccccatcattgaagagggttgactacacactgatgctat

SEQ ID NO: 225765 - DNA, 454 bp, Glycine max
tgccgtaataacctgagattgagagaaaatgattattaaacacatattttgttaatactaagtatttattacctacacttaacagaaaatacttataacattacaaaataaccataaattgggagagtttgatacaatttatacaagttttatacacaaaagttagtcgttttcactgactaacacatacatgttcatagtccacacatatcttttcatacaagacacctattcactaaatatagctttaccatgtaacacaagttccctgagagttcaatactcggttcttaccgttttatactacttgcacgatctggtggacttgccgggttcgaccaagtttttggcgccgttgccagggaacttctttctatttggaaagtgtgttcaatcctacggggctattcttattctttggtaactgtgaatatttgctctcgctcatattagt

SEQ ID NO: 225766 - DNA, 431 bp, Glycine max
agtaggccttggatcttcttcatcaatggagtcctttacttcttgaagttcaatggcagtggaatggagtaggaagaaagatgattggagatgctacttcaaggagaagatgagtcaagcacaagctcaccaccatatgaagccatggataagagcttgaaggatgaaaagatgagtgaagggagagaaggagcaaaacattttgtgcctcaaaagaggtatgaactttgaagtgtaatactcaaatgatcaaagttcaaaaaaagcacacacatgacctctatttatagcctaagaatcacacaaaattggaccattaaacgatcttttgatttttctgaaaggagagaaatattaaggcattggaccattaatgatctcttggtttttgaaaggagagaaacgttaaggcattggaccattaacgatct

SEQ ID NO: 225767 - DNA, 315 bp, Glycine max
  unsure (1)..(315): unsure at all n locations
agcttgacatgaggaactgtagaagggtgatactttctcgcttcattccncgaccacagagcggtacctggagatatgtcaccgcggctaggacaccttgcggacgccacgtggggtgctattgcccaaaaccaagcttgaccaatcccgacccaacccgggcatagtcagatagcgagaacctgtgatgtcctcaaacatgcgagctcctagcagtcaacagataagaggaaccaacaccacaaagccaggaggctcgcgcggtggctggccagctgtgaatctagtgtgacatatgggctgcggcctctggca

SEQ ID NO: 225768 - DNA, 352 bp, Glycine max
tgtgcgcctacgatcttctttatcaatggataccattgcttcttggaagatgaacggcagcggcaaggagaaaagaatatagagaggagacgcctcttctatgacaagatgagtctataagaagcttaccaccatatgaggccatggataatagcttggaggaagaaagagatgaatgaagggagaggaagagaagagctcgaaatattgtgctctaaatgagccttgaaatctgaaggttaatattctaatgatcaaagttgaaacaaatgcacacacatgacctctatttatagcctaagtgtcacaccaaaatggatggaaatttgaatttctcattctaattgccctt

SEQ ID NO: 225769 - DNA, 114 bp, Glycine max
  unsure (1)..(114): unsure at all n locations
ccccccccccaacccccccttgtgggcnccccccaagaggccatatgtgctgcaaccggaaaaaactacgggcagagcgcacaaaaagacttttttaggcgaccgcaaaacaag

SEQ ID NO: 225770 - DNA, 332 bp, Glycine max
aaagtaccgaaatccatgaaaagagccgacctcctccacaagaaggcttccaaaacacacgggcgaaggaatgaaacctcgaccacatacttaagaaacaacgggatctaccaaacacggggcccaacccactataactcacacccaccatgggaccggagcagacaacactgtccccagacaaacatttacaaagggcacgatcgcaaaacacaaacgaaacactccaagcccccaacactgccgcgaaagaaagcacggcgcactcaacgagaggccaggacgcgaagctggtgcgacacgaacacaaatccattgaactaaaaacactc

SEQ ID NO: 225771 - DNA, 437 bp, Glycine max
  unsure (1)..(437): unsure at all n locations
agctttgaccatntgaatagctcaagagctttctattgttcaatttcgaacgtctcgatatattatgcgcctgaatcggacctccgagtgaaaagttatgaccatttgaattgctcaagagcttccattgttcaatttcgaacgtctcgatatattatgcgcctgaatcggacatccgagtgaaaagctatgaccatttgaattgctcaagagcttccattgttcaatttcgaacgtcttgatatattatgcgcctgaatcggacattcgagtgaaaaattatgaccattagaatctctcgagagcttccgttgttaatttcgagcgtgtcgatatattatgcgcctgaatcagactttcgagtgaaaattatgaccatttgaattgctcgagagcttccattgttcaatttcgagcgtctcatatattatgcgcct

SEQ ID NO: 225772 - DNA, 431 bp, Glycine max
  unsure (1)..(431): unsure at all n locations
tttgagcaattcaaatggtcataacttttcactcggaggtcttatttatgcgcataatatatcgagacgctcgaaattgaacaatggaagctctcgagaaattcaaatggtcataacttttaactcggaggtccgattcatgcacataatatatcgagacgcttgaaattgaacaatggaagctctttagcaattcaaatggtcataacttttcactcggaggtccgattcaggcgcataatatatcgagacgcacgaaattgaacaacggaagctctcgagaaattcaaatgatcataacttttctcacggaggtcagatttaggcgcataatatatcgagacgctcaaaatataacaacggaagctctcgaaaaattcacatggtcataacttttcacacggaagtccgattcangcgcttaatatatc

SEQ ID NO: 225773 - DNA, 319 bp, Glycine max
caactacataaacaaggatcgatcgataatgggaactatcaaaagctaacttctggaacattgcgatatggaaaccaaaagagagctagtttccataatgcaactcacacaactcagggtatcctagattatgtacactctgatgttctggggccagccaacgtactttcattaggaggagcaaaatatttcataactttcattgatgagtggtctaggaaaggctggacttatctgttgaaacataaaaatcacgcgcttaagtgttcacacaaaggaaactgttctgtgagaatcaaactggctggcatgtgaaact

SEQ ID NO: 225774 - DNA, 411 bp, Glycine max
gtgaattacccacatgtatgtctctgtatcaagcttcatgttatctcgtttgtaacaaattaaagataatttaccttgcctagaattaataatgaagaaagagaatttatccatttacaaaagagcattccaccttctcaacacacagaaaccaaaaagaagacagataccatttgaattgtaacataattgtgaaccctcttagagtattagaaaaagaaacgagatttccttaaaatggtcaatgaaatctttattagtgaacacatataagcatctgaaaaagaagaaagaggaagagaaagcctatgtggagggccaaccttctccatattccatgttctcaaatgttgcaaaagctatttcaagtattccgcacgtagcctaatgaaattgttagaaataatattt

SEQ ID NO: 225775 - DNA, 216 bp, Glycine max
  unsure (1)..(216): unsure at all n locations
tctttgcttgacgttgccctgccactcgcaactcgataaaatctcatgcagttccttctcacttttgggaagtaaacttgaacgctgcaaagtataaatcatttgcctcgtctttatttttgcgcaattgcgaaacaacaaaggagcattattcgtctcatatcctactttttgcttaatgatatttatatccttgngtcgctgtcctacaaaaaa

SEQ ID NO: 225776 - DNA, 440 bp, Glycine max
tgtaacctattatgactttgtcgaagagcaacgcgtattctatgtgtcttgaatttttttccttatctttcaaagctgcccttaccgacgttagcccttggccaaaagaaattgagtattatatttatatgtttgataattattattattgcgattatattttctcttgatgcacgtaaaagagaataacctaaacttttatatatgcgccttcaaattaaaactaacatacataaatggtctattaatggatcttacataatgactcgttgtcctttgcttctttcaagagagaacatcatcaattgatatggaaacatgtgtgccttctggatttagattacatcccacacaacaagagcttgtggggtattacctcaagaagaagatagactccgtaaaaattatctacatgttattgttgacattgatctctacaa

SEQ ID NO: 225777 - DNA, 361 bp, Glycine max
  unsure (1)..(361): unsure at all n locations
ctctgagtcgactgcagcatgcaagcttgtcaagccccctaacctgtgcatgtgttgtccgggatgcattagctaagtagtccaacgtggatgcacattntgttctgtacgcaaagtcagacgtgttaggtgaggggagtctctgtatttgacaattctacctttttctgactattggagaatgcattgaacataggcgtctcattttgtcttttgttgtgggcaagtgcagcgcacacgcgctactcttgcatacctgtcactcatggagtacgtatgtataggagacgcgatatgtgaatgagtggggctgcattatggtgcgaaagtctagggcgccatttaagctcccgccacctat

SEQ ID NO: 225778 - DNA, 440 bp, Glycine max
ctgacctcatcgtctctcacagactttagaattgggagctctttcaatccttgtgttcggactctcagccacttatgatatccggcgatgatcccattactgcttccgctaagctctctgttctttctttacgccgcatcccatgccttgcgaactccttggagtaccctcgcgttgtggtcaccgaaaccccgtgcgatgaaaggcgtgatgctttcgtctgatggcactcctctcatggggtagccaagttgtcttatggcgaggacgggattattattaatacaacctcttgttccatcaagggaacaattggacatccttcgcatgaagatagaatcctgattctctcttccttctatcgagggaacaaattaacagacgcccctccatgctattcaagaggttggtcccaattcgcctttcctttttctacgcac

SEQ ID NO: 225779 - DNA, 419 bp, Glycine max
agcttggagaggagggtaagcgaggatatctttattgcccacgctgtggtcaatggattccctgatgaaaccgtcgatttccggacgaagatccattgctgacgctccacgaaagtcaaaggaacgggttcggaatcggcggtggctgcgataaagggagaatgcgacggcggtataaaccctaatcggcgggaacggtggaatgtgaaaacgaacgggatcttgggatcggagaaaaagggcttaattgaaatatattgatagccgtcgggagattcacataggaagttcgatagccgcggggactggggagttaataccagacgttaacgtttccttctgcttgctccaccactataacaattacgtgatggaattatatatcgtattacgagcgcgatctagtcctatccactact

SEQ ID NO: 225780 - DNA, 457 bp, Glycine max
  unsure (1)..(457): unsure at all n locations
agcttcctaatgggcctagatggccccatgtctaaagaacacccnctaaattgatcttttcaccccccattttgagttttttgcttatttccttttgaaacgtcacgaaatcttacggatcgcgtgacaattggctttaagcagttcaatgtgaccagcaagaattcgcatgtcaacaaacaaatgtcctcgggcgaaattagggtatgagaatttcccctctttacttatcttttattggaaataaaagggaagtaaagataagacactaatttcgttcgagccgaatttcctcccgaccgatcattagctcaatcagcgaaacctttcaaaagacagagcataaaagacattaggcgcatcagcaaaagtcttggtgccttgaaattgataaacatggataactgtgatggtctctgcatgctatcaaactcgctagtctcgggatagcagggga

SEQ ID NO: 225781 - DNA, 439 bp, Glycine max
tatgttgcaaacatttataatagacctccttagcagcaaatataacaacagcagaataattatgacctttcaagcaatagatacaatccaggttggaggaatcatccaaatctgagatggataagttctccataacaacaacagcttgtccctcctttccagaatgatgttggtccaagcaagccatatatttctcctccaatgcagcaacagcagcagcaacaacagtcacaacaaagacaaccagcaactgaggcttcttctcaaccttccttagaagagttagtgagacaaatgaccattcacaatatggaattcagcaagagacaagagccttcattcagagtctgacaaatcagatggggcagatggctactcagatgaaccaaactcaatcctagacaaatttgcttcacagactgtacaaaatctgaaaaat

SEQ ID NO: 225782 - DNA, 388 bp, Glycine max
acccatctagctgctgtgagtccactgaaagatcattggtgggcgactcaatccatatgcatgaagtgtctggaggtattacccaatcatctcatgatatgccatcttccaactgcaatatgttcctttcaaaaacttcttctaaggaagatgataagaaatgtcccatggaatattttcaatacagactacatgagagaagggaaactatgttgaacaatgatcttatttcacaatctttcggtacttctgagtctctacagcaagatggaaataaccacctcagagctgcacattgtctggttatcaaggagctaaccctgagccaccttatataaaacatgatactaataatataataacactaataatcatgatgacatgatac

SEQ ID NO: 225783 - DNA, 448 bp, Glycine max
  unsure (1)..(448): unsure at all n locations
tactcaagcttcttagaggtagatttaccgatcttctatataaaggtggataacttgttttattgacaaanatttcgaccaaaaagaggaaaaatgtaattatttcccccaacaaagactataaaaataaatttgtctaataagaaaaagaaatgtcattattctaaaaaaaaatgtaattgttgatttttgataataattaccttaaaaatcatgttaaacatcattcttatttgatagataatgtaaaattataaactaacaatgcatgttccttaaacttatataaaaaagaggaaaataattttatacaaaatgaacaattaaaataaaatacgaagttaccgccaacgccctctaaatgtacaagtgcattcatcctaacaatatttattccaagtagaagcattcaccctatatatctgtaagtctctctaaatgtaagtta

SEQ ID NO: 225784 - DNA, 458 bp, Glycine max
agcttgccactgcagcagttaagtgaacaatttgattgtccacagtcattggatggttgcttggtagaggtacatgctcataactaataagatttcctgtgcagggtatcattgtttttgcatgactgatggctaccttggggctggagattatggctgaatctgcctcaagtgttattttgaaggtaattgagataatcttttgctggtgcttgcttattatatacctaaatttgggttcaagactagttattcaacatgtggattatctaccataagattgttctaataagtgattttatcatttgagcagatgatattatcatttgaccttgcttttgctttgattccgctcctaaagttcagtagcaccaaagtgactagcagcacaagcattgaagaggcgcgtttcctccttgcttgtggattcatgaactatcaagttatacatgaaactg

SEQ ID NO: 225785 - DNA, 429 bp, Glycine max
tcacgaatggtcttctccagataatctctagcaatgtgcattttctcatcagtaatatacccagcaatagcaacaacctccattctatccaataggggattatgtatcatttcaacaacatttgtagtgcaaacaaaaagaacttgcaacgcataactgcttaagtaattatggtaaaaacaagcctactttgcctacagggaattgaatgaaagcaatacattcaagaactatttgaccattctaagaactacctatcagcaataaacacaattaataaaccatgtacaaatgctaactatatcacaatctcactacaaaggctctagattataaattaatacctttgatagatcaatggtgacatcaagatagtggtcaagaaaattagcattctgctctggatccagaaactctaacaaagcactc

SEQ ID NO: 225786 - DNA, 482 bp, Glycine max
cctgaggcatgaagcttcccaacatccaagcaaaacaacatttttactcataagctatcacagccaagcaaaacagggcaaaggcagtgaactctgctcaacacaccaaccaaaatcatagcttttctcacttaaagaccccagtaacaattccttcgatccaattcgttaaccgctggatcgactccaaaattttactggaagtctatagtacataagcctacattttgacggttgggatctactagcaaacatacagaactcattctacattactctttccacaaccagcaaatacatagcatttttctgcacttgtgcaaaatcctgctgcataatttcacagcaaaaatctgcacaaagtgcagatttcgaaaatcacacttcctctcatccaatcttgcccaaatcaattcctacaagtcccaaatcatgtatcaatcatgtctaaaccacagtcaagcttcacaacacagcaacac

SEQ ID NO: 225787 - DNA, 455 bp, Glycine max
agccacccagctcacccaggcgagcaagggtgcttcctccataagcaacagccttctggaggaatcttctggagggcccaagtgggcctgattgttatttgcacccccatttttactaaatacaccccctcctttttttggtgattcttttttcgtaaagttacggaaacttacgaatttggtaacgatacttgttttcttttcgtaatgttacagaaccttgcggattacataatcatccccttttttgacttacggaatgttacggaacctcactatttgtgcaacgatgcttccttttgatttccggtgtgtcacggaaccttacagattgtgcatcaatattttcttttgagttccggcacgtcccggaattcacaaattgcctaatgatgggtgccaagcacctcacaatgaccaaacacaagtggcatgccaccaagcaaaggtgcccg

SEQ ID NO: 225788 - DNA, 401 bp, Glycine max
agcttgaaacgctacaaaaatcggttaagtgctcttttatctctgcaacatgaaaacttttatttaaatgataaccgatacgcttgtagataggggcaaattattcctggataattacatttctattggcttctacatataatgcaactcatggctctggagcactggtatgaacttatgatataccatatcacgcactaaatctgactctgctctctcaattctgtgttcgtatgcgcaaatatacgttaactcatttattgtctattctgctatttatcacctttttcttgcatttgacctgactgttcttgactcgagtagatagcactctgattagagctaataaccttgagtataactcagcatgttcgcaatgtatcattaaactaagctctaaa

SEQ ID NO: 225789 - DNA, 440 bp, Glycine max
  unsure (1)..(440): unsure at all n locations
cttacacgccttactgtcctttcagtgccataaatatatctattactcctatcttcaaaatatgttaaaaggattgaggagcaaaaaaaatgtctattaacatccatctatgcaggaaatatccaaaaccagagggaaaanaaagaattggtggaatggagctataagcaaatgatctaatagagcaattggttgcttgatttactttactttgacccacaanatactcttgttcactctaaaagttcaaataatatttgttaaatatatcaagcaatattttttacaatgaaaaaatcattttcaatgcaaaaagtatgactttaagcggcaaaaaggcataccactcttattgtcaccaccactaacaatgaaccagnntttccctactgtcacaccagcatgtccaacacgtggtgatgggattctcctactgcgtt

SEQ ID NO: 225790 - DNA, 451 bp, Glycine max
  unsure (1)..(451): unsure at all n locations
ctcatctttattntcgatttcttttcttccgtctttaacgctcttttaccgtttatttaagccgttttctcatctaaataatgataaaatgaatttcaaccgatcatttgtgttgtaatctcatttaatcacttttaaaatgaaatctaaccgatcgttcacgctataacctcggttaaaccaaaaaaagtaaaataataataaaataatcaaaatatcttgaaaaataataataaaataatcaaaatatctttgaataaaataaattaaaaaaatcaatcggacgtctttctttggaagtttccttgaatgaattgattaataaccaaagtgaaactaagactaaaatagactcacaaatcaagttgtgtccgagaatcactataaaccgttttaaggtccaacgccttaaacggtccctctttgctttatcggctaacatggaccgttc

SEQ ID NO: 225791 - DNA, 460 bp, Glycine max
agctcttgtgaccttacgttttgatcttatgttacagatctcactgcagacaagtgctttaaatatctccattcttagaacatgttgggattatttatgtaaaactaccttggagtatgccatgaatttataattcaatagatattctgcacgttacttatcatattttggtggttaactaaaattaactagtacactcttgatttgtgtgttggtgcttagctatgatgtgactgattgggttagtgaaaattgattgggcagggtctgagtagaaagttggttcatatattgtctgccttgctttttctggtttcttggccatttctcaggtatcctattttttcattttttgaatctttcatactagtttacgtatgtgaattgcaatgcattgattgctggtactgatgcattgtctgaatggtttgatgtaattgctatgatagcaacttcccta

SEQ ID NO: 225792 - DNA, 432 bp, Glycine max
  unsure (1)..(432): unsure at all n locations
ctttggagtagaaacatgggaccaactcattttatttctttattaaagtcgtatctagncaaggtctgagagaccatacaagtttcctagcgatttctaattatgtgggccattaagtctatcatatgctgacaatagccgagaagcccatgaatctctttgggggcggagtaagtgtccgccatcgccttggccttggctaacaagcggggaagttcttgacttcccgttaaggtaaaagcaaaccgatccatccacatgggtgtctcttggtgtaaagagtctatcacccttcctctagcctctntttccgcgtatacttgagcatactcgtccgcgatcctatgctcgtgggccgtggctatacctaactcttcttggtacttggcgatgatagctagcatgttggtcttcgtctcgcataaacgctga

SEQ ID NO: 225793 - DNA, 456 bp, Glycine max
agcttcaggctgctcaattgctccatgttgttttacggaagggcaaaggtctgtgtggtggtcggcagaggagcataaaccatagactcttgcgacaggtacaaatttttgattcaaggctagctgggttaccaggttaactaaggcatctagtttactttcaagcttcttggtttcagctactgaagatgaatttgtggctacttcatgcactcctctaatgactatagcatcatttctggcactaaactatagggagttggaagccatcttctcaattaaatttctggcttcagcaagggtcatgtctccaagggctccaccactggcagcatctatcatacttctgtccatgttattgagtccttcataaaaatattggagaagaagctactctcaaatctgatggtgagggcaactggcacatagtttttaaatctctcccagtattcatac

SEQ ID NO: 225794 - DNA, 441 bp, Glycine max
  unsure (1)..(441): unsure at all n locations
tgtagccaaaggttactcataaccagatggtatcgattatactaaaatttttggtcctattggtcgtacagaggaaatacgcattttattgtcctttgttgcccatcacggtatgatgttgcattaaatggacgtaaaaagtgtgttcctaaatagactaatcaaggaagaggtatatgtggaacaacccctaagtttgagagttctatctacgcttatcatgttttcaaaaataacaaaggcttctatggtttaaaacaagctcctcgagcttggtatgaaaagttaagttcatttttaactagaaatggctttataagaagaaatgcagatactcttttgtttcacaaagattatggtagtcaatttctaattttccaaatatatatggacaatatcattntgagtctggagaaaaagaatatangctgcttggttact

SEQ ID NO: 225795 - DNA, 289 bp, Glycine max
ggtggtccgcagacgagcacaaaccacccagtctggcgacaggtgcagatcttttattcatggccagttgggttaccaggttaaccaaagcatctagtttaccttcaagcttcttagtctcacctgaagaaatcgcgactacttcatgccctcttctaatgacaatatcatcacttctggaactaaattgccgggagtttgaaaccatcttctcaaataaatatctggctccaggacggggcatgtctccaacggctccaccaccggcagcatccatcatacctctctc

SEQ ID NO: 225796 - DNA, 349 bp, Glycine max
tgggatatcctctgtgctttacccgagcacaataccattacttatgagaaaagcgctaataaggtgcttcagaaatatttctttatagttaagattgattaagtacagagagatattgagaattttgtgtcgaaggagcaagagagtttggcttaagcatctgagaggtttcgggagttgctccggagttgcccacatcatggtttcaacccacaaaaaattgtacatattttctatggaggagtgccatctcataatatgacaagcgtcgatgcggcttatggaggaaatctcatgttgaagcttccaagatcattgaagatatgccctctaatccctacaaaaatta

SEQ ID NO: 225797 - DNA, 447 bp, Glycine max
  unsure (1)..(447): unsure at all n locations
agcnttagtccacactctctacaacgggttcttctgatctctgcatggcgtaggccaatcctcgaaccagactcaacattttcaacaccctcaggttcttattaaagaatcaagttattttaaaattaactttaaaaaaagttatttttcatagttacttaatttaggtttggtatgaattattgacggttattaattttttacttggttggcaaggaagttcgaatccgatgcaagggcaaaattttggggcggtgccagctggtggtggtagcgcgacgaatcangctccagcgagtggcgctgccgcgggtggcgcgccggctcagccgacgcatagggttcgagcgaggagaggttaagccacggacccacacagcattgctgagagggtacttattacagttcttgtctctgactttaattcttggctgtcattaatagcat

SEQ ID NO: 225798 - DNA, 418 bp, Glycine max
  unsure (1)..(418): unsure at all n locations
cggactgtgctagagagnaaaataaatgacctcagtgttcttatagccatttctagggcaaatttgggtgttgaagagtcaaattctgattcagtggaatttttggtgtaaattcagtttgagcaagtttagattgatgttatagacttgtgtgaggtgagagtttgctccaaatttacctcattctcaatttcacttttcaaaccttgaaaatccattaatatgaggggttttggacacctaaatcttgtgttgctgtggtttgaagcttgactttggtttagacatgattggtacatgatttgggacttgtaggatttgatttgggcatgattggatgacgggaagtgtggtttttcaaatatgctctttgtgcagatattgctgttaaattgtgcagcagaattttgcacaagtg

SEQ ID NO: 225799 - DNA, 409 bp, Glycine max
tgctggcgattttgtccgagctatcatgagtaaagatcgttcacccactcattaatacaactagcttattgctagcaaaatcgagtcatattcatagctctgatgctttcaatgttaatttccttattatggtaatgcttcttctgatgatgagacggcttttgatctgaggatgaatcttctccaccccaaaaaggatcttgcagtgcaagattgagcaaagctgaccaaaaaaagtcatccgtgtccattcttctaacaaaggagtacactttttccaatggaaatgaccttctaaggagactgcattccgtactaacaatgtgttgattcgatattttagcccaattatattgcgaaaggggacaattcgcattgtatctttattggttttatgcaaaatctatcg

SEQ ID NO: 225800 - DNA, 432 bp, Glycine max
cggaacatatagtctgaattgaggagtctcttatttacttactcaaaatatccgctggctgatcattataaccaatgaagtcagtgacaatctccttggacagaaactgttctcgaatgaaatgacaatcaatctctatgagcttagtcctttcatgaaagactgggtttgacgcaatatgaatagtatcctgattatcacaatacaacttcatttgcaactcttcacaaaacctcaattcttgcagaaattggttaatccacatgagttcacaagtaactgtagccatagatcaatattcagcttctacaccgagcgacaacagtattgttcttgctgttccaagagataagaattcttctaatgaagacaccataacctgatgtagaccttctatccacgggacaaccagacgcaatcacatcacaatat

SEQ ID NO: 225801 - DNA, 462 bp, Glycine max
  unsure (1)..(462): unsure at all n locations
cagctttgaaaagaatatatattctaatttcaattctttgaaaaacaattacacccaacataatatgttctttcttctgatgaagaatcaagacatccattttcatttcttccataacactttttttggaaataacctgatatccgttgaaaaaaactagtctttaaaatcaacaacaaaaatattgactactgtgctcttatatttagcatatcaatagttcaattntcaagcactggtaattaagcattacgtagagtttgaaaagggacactttatcattaaaaagcctaaaattaactttcgcacgaaagtttacaataaggcttttatttatgtttgcttctcatgcgcatcttatactaataaatattagtttctagaaattaaaaggaattcacatgtttaataacccctaattctcttaatatatcctgtaacacgtgtcgcaagtgtggaatc

SEQ ID NO: 225802 - DNA, 398 bp, Glycine max
tggctagcccaaaatctgatatcttgcggcatatcttcttattcaaaagaatgttatgtggttttatgtcaaaatgcaaaattcgagtgttgcatcctatatgcaagtattccaagcctttatctataccaattgcaatttcatatataatgtcccaactcaagggtgcaatggtttcaggtccttttttataaatgaacctgtcaagggacccattgggcataaattcataaatgagaactctcttgcggccttccaaactgaacccaagaagagtgaccacattaatatgagaagttctactaatgctagcaacctcgttcataaattcttcaccatcttttgttgatgcattcaatattcttacaggcacaggagcgccattgggtagctttcct

SEQ ID NO: 225803 - DNA, 444 bp, Glycine max
tcactcctacattttatctctagtatgcattttctctctttaaccactcctcacgtttggatgtttagggaaaaacaccataactaaacgcgctccaagggatccctatcgcaccagatccaaatctataacgatgggtgatcaacaggagactcacgaacagatgaaagccgacatgtcggctctgaaagaacaaatggcctccatgatggaggccatgttaagtatgaagcagctcatagagaagaacgcggccaccgcctgcgctgtcagttctgctgccgaagcagacccgactctcttggcaactacgcaccatcctccctcaaacatagtatgacggggaacggacacacttgcgcacgattgccagcctcacctgtgatacaaccgacggcttactcttatggattgtccgccaactattcaccacccgtcttgcaa

SEQ ID NO: 225804 - DNA, 359 bp, Glycine max
  unsure (1)..(359): unsure at all n locations
tgagatgaggaagtgtannaaggtgaaacttcctgctcttatatattgaccacagagcggtacctggagatatgtcgcgggggttaggagaccttggggacgtcaagtggggtgctattgcccaaaaccaagcttgaccaatcccgacccaacccgggcataatcggtcagtgagaacctgtgatgtacctaaacaggcgagctcctggcagtccacagataaaaggaacaaagaccacaaagcaaggaggcttgtggtggctggccacctgtgaaacttgattgatatgtgagatatggtctctggtaatcgattaccaagggtgggtaatcgattacaaggcgttaaaatgaagaca

SEQ ID NO: 225805 - DNA, 331 bp, Glycine max
agcctccatctacactgacagacaaagagattattgttttgctcactaaagctcacagcacaatcattctttctcttggtgatgaggttcttcgagaggtagctgaggagaaatctgccacacggattcggctgacacttgagagcctatatatgaccaactccttaactaacaagctgtagctgaagaaaagactacatcagctgaagatggaagaacgttcttctatccaagaacatgtccctttgttcacacaggccgctcttgatttgaaaagtgtacatgcgacgatagatgaggaagatcaagcactaaggctatttacgtctct

SEQ ID NO: 225806 - DNA, 448 bp, Glycine max
tgaataacccaattgtatgtctctgtatcaagcttcatgttatctgttatgtaacaaattaaagataatttaccttgcatagaattaataatgaagaaagaaaatttaacaatttagaaaagagcatcccacctccacaacacacagaaacaaaaaagaagaaagataccataagaattgaaacataattgtgaacccagtaagagtataagaaaaagaaacgagattcccttaaaatggtaaatgaaatctttataagtaaacaaatataagcatcagaaaaagaacaaagaggaagagaaagcagatgtggagggcaaaccttctccatattccatgttctcaaattgtgcataagctatttcaagtattccgcacgtagcctaatgaatttgtaaaaataatattagaaaacatatgccacagaagaaatcacacaagctcataa

SEQ ID NO: 225807 - DNA, 453 bp, Glycine max
  unsure (1)..(453): unsure at all n locations
ntaacctcatcgtctctcacagtctttagatgtgggagcttatcttatccttgtgtccgggctctcagccacttatgacagccgccgatgatcccattactgcttcccctaagctctctgtcctttcttcacgccgcatcccatgccttgcgaactccttggagtaccctcgcgttggggttaccgaaaccccgtgcgatgaaaggcgtgaagctctcgcttgatggcactcctctcatgggggtagccaagctgtcctatggggaggaccggattataattaatacaaccccttgttcccatcaagggaacacttggacatccttcgcatgaagatagaatcttgattcttccgtccttctagcgagggaaccaattaacagacgcccccccatgctagccaagagttggtcccaattctccttctctttttcgacgcacgagcggtaacct

SEQ ID NO: 225808 - DNA, 436 bp, Glycine max
  unsure (1)..(436): unsure at all n locations
agcctccttgaganacttccttgagaagattcttatataagctagaccttaactacacaaacccctctaatagttaagttcacctccttgagatgaaaagcttgagccttagctacacacaccccttataatagctaaactcaccccatgccaaaatacatgaaaatacaaaaaagtctctactacaaagactagtcgaaatgccctgaaatacaaggctaaaaccctatactactagaattgccaaaatacaaggcccaaaagaaggaaaaacctattctaatatttagaaataagagtggacccagccttggcccatggattcaaaaaactacactgaggttcatgagaaccctagggccttctttagcaactctagcccaatcctcttgaagtcttctatccaatacccttgggggggaggattgcattatat

SEQ ID NO: 225809 - DNA, 475 bp, Glycine max
  unsure (1)..(475): unsure at all n locations
ctcctttgttgtngtgtgtggtttatctgnctcgcttgcccctcccccagcggcccgcttgtgcatctttacggccttaaaactcaacttaacctatcgcttcacagtcttagattgggaccttctttcttgtgctcggactctcagccacatacgatagccggcgatgatcccattactgcttcccctaagctctctgtcctttcttcacgccgcatcccatgccttgcaaactccttggagtaccctcgcgttggggtcactgaaaccccgtgcgatgaaaggcatgatgctttcgtctgatggcactcctctcatggggtagccaagctgtcttatggcgaggccgggattataattaatacaaccccttgtttcatcaagggaacatttggacatccttcgcatgaagatagaattctgattcttcctttcttctagcgagggaacaaattaacagacgcccctccatgct

SEQ ID NO: 225810 - DNA, 368 bp, Glycine max
  unsure (1)..(368): unsure at all n locations
agctccaattgctcacttcacagtatcagcttctttatattaaaaactcacataaaacgcatacagactaattttctagacgtgactatcaaaaaataaataaactgccaactgcttgtaactctgacatgttttctgaatcgaatattaaaccctattcctatatatcaaatcttatcctctttaataaacttacctttgttcttaataaaccacgcctgttttttagggagtgcactcagcgcattcttcatcacctttaataatttagtcttcttcttcataaancaattgattcctgcaattatatctctatataccccaggagtggaatgtctgattggtttcctgacttcatgcatatccac

SEQ ID NO: 225811 - DNA, 446 bp, Glycine max
  unsure (1)..(446): unsure at all n locations
agcttctaacaaacaatgctcaaactttaatatggaacacaaatacttaatttgaggcactaaattattctaattatttaatatgtaaagcaaaatgttaactagcaattaaatatgattatgaaaaatacaactcaaactagacacacatttaaatttcctaggtcatgtcctgngtatccaaagaatacaccacactttgtgattaaaaaaaccagaatgcgcattatgatcaaaatagttaatcagtggtaaaagagaataattataataataataataatcataataataacaataatatgtaattatcaatttgatgcttaatcttatctatgtacaatgctcaataagttattttatttcacaaatttcaataagggctagcattttataaaatatctgaatgtaatgctttatatttttagacatcctcaacgggcatg

SEQ ID NO: 225812 - DNA, 442 bp, Glycine max
  unsure (1)..(442): unsure at all n locations
tcggtggcaactcgaggtgctcttagactcatttactatgtctttagtcacctatgccacccgaataaacgaaatgtggctcttttgcatcggcaagcacttgggtcttatttgggtcatgaagattttagaacaaagaagagatcctgtggaatcaaagttaccaaaagggcatgtcctccgtgtagaaagcggtgcaagtatgaagttcctaaggtttcaagtggacacaaacatgaagaaaaccctaaagcaaaaacagttttgctaatcaagtgctccaagtgcaggtgcaagtctgatccaatatccggcaagactccaaantcaaggttttcccgcggcaaataataagagagagagaattctaattctaccgggttgcattcgcagacaatcttgatgactttatatttgtacactggattacctgattatttac

SEQ ID NO: 225813 - DNA, 441 bp, Glycine max
  unsure (1)..(441): unsure at all n locations
ttaagagaacgcagccgcagccatgaacctctaggacattatattgtcttttcacctaacactctatgtatcatcaaaccaaccacaaacacactaagctatagagaataatactcatcaagaaaacacactcccatcgtggcccaattctaaatagaactgggcgacaacatacgagaacatgtgaaggccatgctaattacagaatggggaaaccaatacaatttatagtaaccattttcactatccttaccacactaagtagtgaaaagactactatgttccatagctgacttttcatcctcgctcanaaagttcgcaaagtcgaggataatttaaccccttaacaacgtgcatctcgtctatcattgggaaacgcccctaccacaattggtattggcatcaaaagaccctacaagctcttgatagcctggtatccac

SEQ ID NO: 225814 - DNA, 404 bp, Glycine max
gatacatattcagcctctagaaagagaaccccaatattatttgttgattcaatgccaagaaacttcaagcatttagaaaacatctcaaattgaataataaacacaaaaaacataatcaaacccacttaccccaagcaatatcatcgacacaagatcctgtttggatgtgagaaaattaaaatctgaacatcacgaggtctaatcctccatatctttggtattcccacccaccttcgtcttcaaattcacgagaacctaagttgttgcagcttcaaactaaaacaacaaaaacaaaaaagaagtttaaatagaaaacatgtgcaattgagtatagagagagaaagagatagtaccaagggcaagacatctgtggggctagagtggagttatcaagaaagcgaaat

SEQ ID NO: 225815 - DNA, 317 bp, Glycine max
tctggagggcccaagtgtgcctggcttctatttacacccccttgttactaactggcaccgcacttttctatgatcgttcggaatgcctttttccggaacataaccaagctctaagaatttcgtgacgatacttattgttctttccgcaatggtacgaagccttacggattatgtactctctctttcttggcttccaaagaagttacggaaactcacggattgcgcaaaaacacctcttttcgacttccgccacattacggaattccacggattaagccagcctgcttccttttcgactgttgggacggctcgggact

SEQ ID NO: 225816 - DNA, 434 bp, Glycine max
ctcacaatatccaagcaattcaattctgaatatcatgatattatcctaaaccaagaaaacagggtagaggcagaaaactctgtccaaaacacattcaaataccacaactttccctactcaaataccccagtaacattctcttcgttctgattcgttaaccgttagatcgccttgaaaattttactggaggttactagtacataaatatacattttgaccgttgggatctactagaaaattcctggaacccgatatgtactactcttcccatgactagcaatgcacaaacatttttctgcacatgttaagaaaaatctgctgcacaattcaacaacatttttctgcataataaggcagatttcgaaatccatcttgcccacattcaatttttctcacattggatcctacgagtcctaaatcatgtataaatcata

SEQ ID NO: 225817 - DNA, 391 bp, Glycine max
taacttgaacgcttactggatgcattggtttattctgttactctactggccttgaataaaaaatctgtacctatcgcaagggtttgtggtagcgctcctctgctgaccaccatacagacctttgccttccatgcagaaccgggagcaattgagcagcctgaagcttatgctgaaacattacaatagacctgctcaacctcatcagcaaagataaccacagcagagcaattatgacctctctagcaacagatacaaccctggatggaggaatcaccctaacctcatatggttcagccctcagctacaacaacagcagactgctctcttcttctaagatgttgttggtccaagcagaccatacatttcttcacctaatcaacaacagtaacaa

SEQ ID NO: 225818 - DNA, 417 bp, Glycine max
  unsure (1)..(417): unsure at all n locations
cgagatgaggaagtgttgaaaggtgaaacttcctgcttttattgttgaccacagagtggtacctggagatatgtcgcgggggtcaagagaccttggggacgtcaagtggggtgctattgcccaaaaccaagcttgaccaatcccgacccaacccgggcatagtcggtcagtgagaacctgtgatgtacctaaacaggcgagctcctggcagtcaacagataaaaggaaaacaagaccacaaagcaaggaggcttgtggtggctggccacctgtgaattttgtgtaatatgtggattgtggcctctggtaatcgattaccaagggggggtaatcgattacaaggcttaaaattgacgacaggaagctaagatggtctctggtnatcgattaccacagggtgtaatcgattaccacgct

SEQ ID NO: 225819 - DNA, 324 bp, Glycine max
  unsure (1)..(324): unsure at all n locations
aaaaactgttcaaatcatgtctcaataaaatcaattgatcgatctaatacttataaaaaacactcaataccaaaagatccttcatgtctgtaatatcanagattgattaattccatagaattaactgagtgatcttttgtaataatcaatcttctgacttaattctccaaaatactctccattgctatactcacttaactgattaattccatgcagactgattaattcaatagaattaattaattgatctaatatgtataacacatactccataccacaagatgcttccatataattaatctcatgtttgtgtcaagttaaagt

SEQ ID NO: 225820 - DNA, 410 bp, Glycine max
gtgacttgagtcatcaaaagattataaatatgtgaccatgtgttgattatcaatcatccatcatctttgaatcatctatctttctatcttttttcaacatcatctctcaaacatctttcaatcaatctctcaatatctttctacagaaatctctgattcatttctctttatctttctaaaagattttgatcaacactttctcttccaagataagatctttgttcaaaaacctgtggtattcatctttttcattctcttctccctttgccaaaagaacgaaggactaaccgcctgaattcttttgtgtctctcttctcccttacaaaagattcaaaggactaaccgcctaagaattcttctgattcttgccttccccttaagcaacaaatttcaaaggactaaccgcctga

SEQ ID NO: 225821 - DNA, 450 bp, Glycine max
  unsure (1)..(450): unsure at all n locations
agcttgtagaatggctagacatgatacatgttatggtttgatttggttcaaggataaaagggatgccccacattatttncatgacacaaatgcaaaaatgatgatttggaaacttcatgcaaaactggtcatgcatgcacctatgtggacactcaagtgtcaaatttttatggtcatgtgatgctaaggctcaggattcatttcctctattttaaatcaacccaatgtttccaaaatatgttcttttatccatttgtgcattcatccaagtccatttcgggcgtgcggggaaatttcacagcattcacccttcaggtgtagacacatttttcagaaattggttatgatcaatgaatttttctcaaagaaaagttggaaatcatctcttttcaacagcatgtcggttctttaactacacaacttatttttctctttcaccttctttcctac

SEQ ID NO: 225822 - DNA, 350 bp, Glycine max
  unsure (1)..(350): unsure at all n locations
tatagaanatcatgcaaagctttcattaatgaaacctgcatatggggttgtacgtgaaggactccattctcaaaaggaggatgctacacttctcgaggaaagaagtatggatgtgcatgataaggaggcggcagatattgacatatataaaagagatctggaggagtcttcaaatgaattgatgcctgtgaaggaggagagaaatagatctttggaaaagcaaatatctttatcacgtgaagttgaagctctgacaaaaagaattgaggaattgcaagggcttcttaatcaagaggagcagaaatcagcttcttttagagaggagttagcaagtgaagttgaaactctga

SEQ ID NO: 225823 - DNA, 362 bp, Glycine max
catgcaagcttgtgaagagctgactctcatcctctctctaaaccaatcttctggcataccaagcaagccgtctagcgcaacactccacgactgagcgtgaggaacaatctggaagaaggatgaattgtgcatgttcaccgagtgaagggtcattccgctaagcacaccgcttcagcccatctgctgagtgaaaaaaccgcatgctaagccaaaatttactaatgcgcgctaagcggttcagagttgtattaagcgcgcaagcacaaacaaagccacctatttaagcctgaaatcatattttagaggggggtctggccctttcttgaagctcttgcacgcctagatacttctagagagagaaa

SEQ ID NO: 225824 - DNA, 411 bp, Glycine max
tatgctgcaaacatctacaatagacctcctcaacctcagcagctttatcagtcacaactgaacaattatgacctctccagcaacaggtacaatcctgggtggaggaatcatgccaaccttagatggttgaatccttcacaacaacagcaacaagaacaacaaccttattttcagaatgttgctggcccaagcagaccatacgttcctccactaatctagtaacaacaacaacaacaaccccaaaaacagcaaacagttgaggctcctccgcaaccttcccttgaagaacttgtgaggtaaatgactatgcaaaatatgcagtttcaacaagagaccaaagcctccattcagagcttaactaatcatatgggacaattggctacacagttaaatcaacaacagttccaaaat

SEQ ID NO: 225825 - DNA, 438 bp, Glycine max
  unsure (1)..(438): unsure at all n locations
gcagcacgctcacatacccggcaanatagcatattttgggacacgccctgcacacatgacaaaacaatcaaacgtcaaattcccaaaagcaaaacgggcaccaataaccaactatattcacaggaacgctgtcatgagaatcttattcagacataatcattccactgacacgtacatcactagagcacgaacccattaacaggagaggaaaccggaactctacaaggcccttaaactaaaacaactcaagcaacaaaacaagtatgaagaaaagcatcacaaaacctaccttgcacagaanctcatgtcataactacttcaacaggaatgaagcatcaacacatataaatgctattcgccgaaataacaaaagcgacaaataccagtatcatgtgagctcatcattcatcacgcagccaccctcaacaacttttagct

SEQ ID NO: 225826 - DNA, 364 bp, Glycine max
gagctagagacggccacgaataaccacgttctgtctttgagtggacacaaatcacagagtgaaaagccagctgtaactctcaagagagtgccaaacctgacatttcaatatccaggcctcataaagaactcacatgcgtaacaagctgtgacgcggcaaacaaaccactgactatgaacgctttagataagaaaggttgtaatgcaaaacaacaaaccgagcaattgcgcatctctaatttggaggatacctgaggtcaagaccctgactatgctccaacatcacgaaaagcaaggaacctgaacctatccgacagggattactcacagaatccatgccctcgaaggaaatcggcggacgaaag

SEQ ID NO: 225827 - DNA, 397 bp, Glycine max
agcttggtctgtctcgccaacactatgggctattctcacgtggccctatctcgccatcactgtgggcgagtcccacgtagcttgtgtgtcgccatttgcattggcgacactcttctctctccctcctacgcggcttatatcgccactggtattggcggcactctcctctctccacctttgtcgccaaagggtatggcgggtttcaaccttgccgccaatggtaatggaggctttcacccactaacagaccccctccggcattcttttaacacacgccccactccgtatatagcttttagataatagcacccttacgtcaatctgcctcatatagtgtgtaatggaattggtggaaggtatcttagttggacaacgcatggcgagacaagacatcgac

SEQ ID NO: 225828 - DNA, 455 bp, Glycine max
  unsure (1)..(455): unsure at all n locations
tgccggtggagctgacccatcaactgccctaactcttttatactgttgatccctaagctcttgaccttgacttgatagaacctctctttaagcgaaggcatttgacttgatcccatgttttactaaagtgaaaaaaatcggtgcgaatcaaaattctgacatctatcatgggtggaatggatgaatgcatgaagaactgtacatgatacagatgcaatntatgaatacgggagcccgggaaattgtctctttcatagatacaacgtcttggggtagcacagtgcccgacgcatgtatttaagaaagtgacacggaccctctgttggtttgccaaagagaggggatcaagacaaaacccgtgcatgatgcatatgcgaaaggcacaacacggcaatatttacaaccaaatataatcaaaggggtacatgttactttgactatatgcatggcagtgt

SEQ ID NO: 225829 - DNA, 412 bp, Glycine max
tcaattattataattataaactaacgaacaaaatggactctctatttatgagacaatcatgtaatggctcaaagcccaaaacccattattataatcctttgaacaaaagttatgaaacagaaaactcctttccaaagtgcataaacttttggagtcacacaatcactcatttatcaaactttctggattcaaccgaatatacaaaccaaaccacaagacttaataacaacccatatattttaagcctcggaataaaaggaaaaaaagtggacacgtgtctatatattattatcaccaaatatatgggggggtgttctaaaaaaacagaagtaccgttctcaattctgaacctttgctcattgcttaaagaatatttaaaagtcaaaaagcaaaaacctatacatgcactcat

SEQ ID NO: 225830 - DNA, 328 bp, Glycine max
agcttctccaacttatccttgtgaacaacattattcttttcttcttgaccgagagcactcgacgaatacggatggatggacagacacctcacccaacttgtgatcaaagatcactgcaatctgacaacattcaatgctctctagagtgtctcgctgcaaacacgctggctttaaaaccagcacacacatccccaacccaggaaggtgctttgaagaatgcacctccgcgaacacgaacaaagggattcatcagcactttagccggctattctccatcagctgccccccagacgaaccacgccccactcccagccacatgttcctttcc

SEQ ID NO: 225831 - DNA, 389 bp, Glycine max
taaaactcaacttgctcagaatagctgatatttccatcgaagaagaatcttttattgcaacttatactactcacgatagcgctttaccccatcagaaagaggctactgttggctctttggctttcactgtaactagcacagcttctagtcggcccaccgaatcaaccacaaaattagtaccagctcatgctaacaactcgtctctaaagtcaccggcacacaagaattccgttaagaagccaactgttcgggctaaagattcttttgagaaaggctatagtcaaatggactggctcaagctcacccaaacacattctgaccctgcaagttctcatactcagttcttttactatgcaactgcaaccactatctttgttggctccgctttc

SEQ ID NO: 225832 - DNA, 428 bp, Glycine max
ttgagccacaatcctaactcatcatataccttgacccattgttataatgtcaattcttaccctcggaagcagaaaagaagagaatgaaaattttcaatcaaagaaaaaaaaaagagaaggaaaatttccaatctaagagaaagcacaacaaaaaaagagagaaggaaaatttccaatctaaggaaaaaagagaggaaaggaaattcccaattaaagagtgggagaaagcgaaaagaaaagaaagaaaactcccaaccaaagagtgggagaaagtaaaaggaaggaaagaaagctcctgatcaaagatcgaaagatatcagaatatatgtgcataaaggtctctggaccggacaatatctgtacaatacaaaattgtcacccaatgaacaaaacaaaagggaaaggaaaccacgacctaaaagtggtct

SEQ ID NO: 225833 - DNA, 392 bp, Glycine max
  unsure (1)..(392): unsure at all n locations
cgcacacgtatctttttgtcccacttcagcggaatcgataaactaggaggcaactctaattgattagtcttacatttgcacggggaacggaaaagntatattatcgctacccaaaaatatgctacgagaacagggttctatatccttatcaaatcaacactcgatcaaagttatagtctttatgcactacaatcatatccatgtcccagcccagttcttttttaaaaaacaaaatagtccatgaggcaacgattataaacgcgttcactaatcacaattagccgagtccttcataaatgatataacatgatatgctcatccgatgtatataacagacaatgacctgacactgacctaaatgaccaaactacacatctggctctataaacact

SEQ ID NO: 225834 - DNA, 400 bp, Glycine max
  unsure (1)..(400): unsure at all n locations
tcatgattaagtttatgatataagctcggatgtcatgagcttatttattaaaggctttagctgtttacccaaacatgaccttaatgtcgcccatgaagagagaaataaatacaattttttcacatgacaaaaacttgtgaaatttttacaagagaatccattcctctgtgcgtgtgcgtgtgcgtgtgcgtgtgcgtgtgtgtgtaaatcacatgaaaagctatggatctacattcaactttaaagaatacatataagtatattacttacttcaaagaattgatctctaagatcagatggctttcttgtatgtnttcatgcacagccctgagaaagggtgcttcaacctgcaaatgatggagtatttaaaaatctgatatccatgcaatgcatctgacat

SEQ ID NO: 225835 - DNA, 440 bp, Glycine max
tcacgtatttataggccttcttcaacatatgtttgttgtctcttaatgaatagatttcttcagcttagctagtgtatgaagatgtggctattgtagcattaaatgcttgcgttaaatgcacgtatttttcatgttggaaaatcattctctttagttcccttgaagaatactccagtacgaaaccacctgtttttttgtcaaaacaagtctgtcaaagtacggtgcatcttttgatattgtttggacttcaaaatgttgaacgtccctttctacaaaccattcataaaaaaaaacctctctttctgcaatacctttctctagattaagggaatacaattaaacacttaaactaaaagattaaggggatacaattatgattgttagacactgaacgaccgaaacatctcttaaagttgtgatgaaaacaaagatatatactt

SEQ ID NO: 225836 - DNA, 433 bp, Glycine max
cgcttcacctcttggtcctcctcatatttgttgcatgagaaaacatgctctattttcatctcccactcctagtaggcctccggatcattctttcctttaaatggaggaacgctgagttcaataccatcaaattggttttgactatgaacaccatcattccctcttctcctcctttgttcttcattatgatctctattctccattcgatcccacctctcatggagcgcatcatctcgttggttcattaacctctccaaatgtttcatcacagcctgcatttggattgctaaagccccactttatcattaggattacgacttgacatcttaaacaaacaaacggtacccgtaccaaaccattatacgtgctcgttgaacacctccccactcaagtgtatcacccaattatgtgttctctctaatgagacactctt

SEQ ID NO: 225837 - DNA, 449 bp, Glycine max
  unsure (1)..(449): unsure at all n locations
tctagccaaatggacttacctcgaattaattcctttgatatcccttttgagccttgnttctctttccttggtttgaagctcactacaagccttaagtgaaaaaccatgatatcaccatatccttaaagaattttggagctttggaattgttttgggaataagtgtgggggggtttttgtttcattggataacttgttttgttggctatacttcatgatgtattttgggtcatacttgatgtacattgtatattggttaaatgttggacatgctgaatgaaatgttgtttctcaaaggatatagagtaaaaaaaaaatcgaaaaaaaaagcaataaagttgagtgaataagatcttaaatggcaaaagaatgatgagacttttggttctactctttatgtttaacatttatctttacttctttttattgtcataattttcttttcttatt

SEQ ID NO: 225838 - DNA, 268 bp, Glycine max
cactctttacaagcaaattggtgggagtctgatgtatctaacagccactacacctgacataactcatacttgaagtcttactaacagggacatggaatgtccaagagaaatgcatcttctatcagcaaaaagaatttttccatacttgcaacggactgttggttttggattgctttacaacacaggagaaaagacacatctagctgcttccactgatagtgattatgctggagatcaagatgatataaagcgcacttcacgctatgtc

SEQ ID NO: 225839 - DNA, 445 bp, Glycine max
taataaagcttgtgaagcttgtgccgaaacccctaccatgtttcttattgctttaagccaaaggagtcgttatttgattttgttatatatacccccacaagctttaaaagaattattatttgaaaaatatcctcttcacatagacataattattctgttgataaaatatgcaacaaaatcatgtttttatttttcagagaagaatacccaaaaaaaaaaaaaatacacggcgaaaatgtaattttattatgtattttttgttgggaaattttttacacccctcttatacaacaaaaatatatcttcatcgcgtatttttttataattttttaattaattagcgatataatttatttttttaaagtaatcaaactgattgtaatatatatactcttcttaaattaaaactaaattaattaagataaaatctattggttttaacaat

SEQ ID NO: 225840 - DNA, 414 bp, Glycine max
tgatttgagagagctcaaaatatatgttatataaaatattcaataatggtgagaacacgtgtcccaaaaataaactaggacactgaaatatttttattgaataactaatcacagaagatattaattgaatttattataaaacttaaaacagacacgtggtatggaataaaaaaaaatatatggtgacaacacaaacaacgccaaagttttatcttcctcgggcaaacaaactacgtgaatccgccataccattcaacactgttaaaaattaaaagttctaagaatattatttacatgagatctttccttgagcctccaacaatatcccttttggtccttcttccctcctctttaattagcaacatactcgttaagcaaccctccttcaatcttttgccaaacctttaaatccgc

SEQ ID NO: 225841 - DNA, 450 bp, Glycine max
agcttccatcatttgacattacttttacctattattgtaatgttattatccttaactatatggagtataatttgcagaaaatgtcgagtatgcaatgaaatagtcaagcaagtgcaagatgtcacattattgatcttgtttacctaatgtgtatttttatgtacagtgtatttggggtggcggtaaggtacatcataatgggggtcaaaatcatgacgagaaagcaacatttaactgttttaattatttttttatgttctcaccacgatttttggttgttcacggtcaaatcaaacaccctcttatattatggataacatgacatcttcatttggaggaattacgatagggataagagagatggaaaaaagagtacaaggtacataaagatagtgataatgtaataactaagcaatgtattgattatgaagtgaaaataacatataaatg

SEQ ID NO: 225842 - DNA, 384 bp, Glycine max
  unsure (1)..(384): unsure at all n locations
caagtggtatcagagcacaagagcttcaagcaggtgttctcttacacctctattaatttttggatttaccttctcttccattggtgtttcttcatttctttctccatgtatctcctcacatgtcttgtgctaaatggtgttaacatgattctttacagatttcactgattaaacttgctatataagctagaattgattttctatggttcaaatttcttgttcttgttcttgaaccatgaattgtgtttcggttccttttattaagcccaaggcaatcaatataccatgctttaaaaaaaatcgttggtggtggcagcttggacatacaaacttgtaaaaattactgagaattggtactctcaattntgagctgaaatttttact

SEQ ID NO: 225843 - DNA, 450 bp, Glycine max
ttgaaaagtgtcgtttttcaccttctcgctaagccaatctgctggcttatctagcgtccgctaagcgcaacactcatgggctaagcgcgaggaagactctggaagaagatgagttgtacaggttccctaagcgcaccgcttcatctcactaagcacaccgcttcagttcatctgctaaacgagaaaggcacgcgctaagccagaattcactaatgtgcgctaagcggtccataagtgcgctaagcacacgagcacgaactatgctacctatttaagcctgaaatcagattttagaaagagagtttggatttggattcagagctttgcatgtctagggtttctagagagagaaaggccaagtttcaaagagttttgagagattttgtttgtgaagatctacgagaccatagcttgagcaagagccggttgaaagctgagatgagttatgac

SEQ ID NO: 225844 - DNA, 445 bp, Glycine max
tccatccagaagatagagactaccaacacatacctcctcttatagtttaatctcacctctcctgcagacgagacagcgcagaatcttagctcacacactcccctataataagctcagcgtcaccctctatgactaaaacgaacatgagatatacacaaaaactgaggctgttactactaaagactactcccaaattgcccctgagatacaatggctaaaacccgtatactactagaatgggcaaaatacatggcccacacgaaggataaacctattctaatatataccaaggttagcgggctcatacttagcccatgggctcaaaatataccctaaggctcatgacaaccctaaggccttccgttggatccttaccccaatctacttggagtcttctgcccaaagcccttgcgggatatgagtacatcatacttgcgccaagaac

SEQ ID NO: 225845 - DNA, 397 bp, Glycine max
agcttgatatccatggagccctggtgctaccacttcttactcatctagaagttagggcttacgcggatcaatggggattattagctcttgttgttgcacggtatcctactacaaacacaggcttagagaatgcttttttgagaggtggcactaagagacattttccttccatttgcctgtcaaagagatgaccctcactctagatgatgtgtcttgtttgctacactttcctgagacaagcagacccatagatcatatcccctcactctttgacagagaagtaatgaacatcctgcggatgacttatctgaccattccaatagagacaaatgcttcaccggaggcaaatacatgtgttatggtgaggttgacgcgaggggaagacctctatcaccac

SEQ ID NO: 225846 - DNA, 444 bp, Glycine max
ctgaatgaactcttacaactcaaactttagttttcgtttcttggttatttctaaagcaaaatttctctaaaggttatgtgattagtgagttgtaaacacatttgagatcaaaagaggtccattcaatcatgtcttttgttcttgtatttgaaagtaaaggttgtatctctccttaactctatttcacacttttttacacattgctactgcatgtgcatgagttttactacatgctagaatatatgtggctagtttgaagctaaaaccaggtttctcttaagcttagattcactaaagacggaccctatggttgggtgcctaagtctcattttctaagtagaatttgaaattgattgtgattgattgtaaaactcacattgcctaataaaaatctcattcacgttgaattagataaatggattatgaaatctagaaatagatagt

SEQ ID NO: 225847 - DNA, 379 bp, Glycine max
  unsure (1)..(379): unsure at all n locations
atcttcccttggccaaaaagtgtggagccacttctatctaatggtacagaacaacaattctatgaaaatacaaaatgtgaaagaagagaacaaaaggaggtgtgggggacaataaagatgtgctaatgtggacacacgtgtggtgaacttcataagccttttttttgtccccttgcattactctttccacataaagacaatggaaagttcaatcttgagggacccttanattacgtagtatttacttttcacctattcttcttctccattttacctagtgtggtaggaaaataaaggctgctgattgtaagggatagcacttttatcttgtttcttaaacacagtgcctttcggtgatttntttttttctcttccctac

SEQ ID NO: 225848 - DNA, 427 bp, Glycine max
  unsure (1)..(427): unsure at all n locations
ttctggcagactctgagagacatagtaacatagatnttggaatgttcataacagaagaaggaagtgtgtaagccattgtactatatcaaaaatttctattgcatgctttctcaacagaatctctatgatgagagatgaaaccagtacacaggaacatgtccaccatgcacagttcagaattctgatccatttttctctctgaacaagcagagaaactgccaaagaagtccaaacaaatcctctgacaacgcaagctacccagctcagttgcttggtgttatcagccttgactatgagaatccacaagccaatactgtgaaaagcaatgctaataatagcgcagcagatagaggccacaacgaaagttcattttgtcccgaaactacaacttatagaacatcttctggatatactgataatcatagac

SEQ ID NO: 225849 - DNA, 102 bp, Glycine max
ggaccttaagaatctgtggatgagctctaccaaggactcctttctatctttgaccgcctttgagcactgttctctttacttggtatgaagctcactaccagg

SEQ ID NO: 225850 - DNA, 419 bp, Glycine max
  unsure (1)..(419): unsure at all n locations
ctagaatgtgaattaaaacgttcaataaactgctggttatctattaccatccatgtgtaatcaattacacattataaatcttgaattcaaatttatagtgaccgtgataaacattttcagttgctggtaatcgattactagagagaaaatctcaatttgaaatgatggaattctttggtcaaaccttttgttttttcaatttagaaacttcttcctaaagattctagagatcaacttgatcatatatcttgattntcttggattcttgtcgtgaataaaacttagaagcacttgatcctttagcatcatcaagacatcaaaacatcttgcttctacataggagtcatttgacttaatccatcaactgagaaatccttcaactatttctcgctcttggaaaattctctttgcaagaatca

SEQ ID NO: 225851 - DNA, 335 bp, Glycine max
  unsure (1)..(335): unsure at all n locations
tcttagtttcagatgatgcagatgggtntgtagctaccttatgcactcctctaatgactatggcatcatttctggcactaaactgctgggagtnggaggccatcttctcaattaaatttctggcttcagcaggagtcatgtctccaaaggctccaccactggcagcatctatcatacttctcttcatattactgagtccttcataaaaatattggagaagaagttgttctgaaatctgatggtgagggcaactggcacatattttcttaaatctctcccagtactcatacaggctctctccactgagttgtctaatacctgagatatccttcctg

SEQ ID NO: 225852 - DNA, 407 bp, Glycine max
  unsure (1)..(407): unsure at all n locations
agcttacattgatcaatgacgatcatgactatatgtaccacaagctcgatagctcttatgcgttctatcctcatgctctccactaggactatgaatctatctgaatcaaactctattaagcacgccacaatgtgttccttctacaataccttggtgnggggaacgaggacaattacgatgatgaatcataccatttgatgaaagaagtggacgggatataacaatactattttgcattggcactgcacaaaatacaaatgtaccaaaaaagtctcgcacatttgataacttattatgtgccttaagcatgctaaccagttcaagtcctatccatgtatggaataagcaggcgcagcccacttcaactatctttataccttacatagaatctgtcaccaatgaccaca

SEQ ID NO: 225853 - DNA, 435 bp, Glycine max
  unsure (1)..(435): unsure at all n locations
ctgggactgaggacctatataacagcaccaaggtttttagtttatggagttttttttcggagaggagaataattctaggatcttagaattccagtttttattactgttcatgcacactgttcacgtagaataaaattcattttctgcaaatcatctctaatccatacatttattaatattatgctctttttattttcttttgatatancttgtgctttaacgatttgaattcaatatgattttgtttatcaattatttttggatttgtacattacttataagaaattttataagtttctttttttagttagtatttcactacgttttaaaataattaattaatcaaagacgtttttaagcagacttttaaataggttcgtgggtcaagtcacgcctttatattagccgagcccagccttaaaaaaaagcctatga

SEQ ID NO: 225854 - DNA, 346 bp, Glycine max
  unsure (1)..(346): unsure at all n locations
tctggagcctaaagaaaagttngaacgagctttacaagatgttttagtttttacattcccaacacctttgagtggcatttgcattggctgctaacttcatcgttgcatcagtacatttgatatttgttctggattgtgcatcatcatagtgtgtgtgaaggaaattctttaaattacaaaaaattacttcagagtcacaaatccctattttaatcaatcacaaagttgttgtaatcgactacaccgagtcgcctaaagcttaaagagataagtctccgatcagtctaatcaattatggcagtactttaattgataacactggtgtttgagaaatgaccgagttttc

SEQ ID NO: 225855 - DNA, 424 bp, Glycine max
  unsure (1)..(424): unsure at all n locations
cctatataagctgaaccattgtgatcagagacacatgttgtgttttattcagcccattacagtttatcgcttttatcttaatgagagcgattctcctagatacttgagtgattcaagaacaccttggctgtctcataggactctcacaacacttgagagatgccctcgctggaaagggtgactcattacttcctttgatgaccacccttgtacttccaaaccacaatttcacaagatccacctctgcccagaattatgtcgagggcacaactcccattatacgcacttaaattaagggattcttgagtctagattgaatttcaaaaacagacctttcacctcgtttnggaatcacctcatttagaaccctcgcccttcgaataacgccgttgctatatttctagacagccaccacgtaaactac

SEQ ID NO: 225856 - DNA, 368 bp, Glycine max
tcggaagaaagtgatgaggtacaagccctaaaggcatagcttgaaagagcctacgtagtcgaagagaagttcaagtccataaccatcaaagtctgaaaagagtatgatgaactaagggatgtccatatggccaccgatgaagccttggaatgagaaaccaagaaggcccgaaaggaagaacacgaccaaagcaaagttttgaggggctttatagggcagcaatagtgagctcaagctctgaagaggtgaaaggaatcatcacgggtcaaaggcatgatcttgaaagacgagctaaaggtttgtcttatgtcgaaaagaaatttgtcccaacacgtaagcgagactgaaagaaatatgtgggccatcat

SEQ ID NO: 225857 - DNA, 284 bp, Glycine max
  unsure (1)..(284): unsure at all n locations
tatctataatagctacactttcttggctgcacggcataaacattcctcaattcttaaaacaaactaataggcactaaatgtaaaaagattactattattattaaacaataatgacaatactcacatgatgatcacaatggatttgatctttgaatggaaaaacatgtgctgagaacaacaataaacagatataaagagtttgctcaattaactaaactaaacntataagtatcatctttacttacttgacatggagtgtgaatattcacacataaaaacataaa

SEQ ID NO: 225858 - DNA, 440 bp, Glycine max
tcaaattagaactcggacatcgcgtattcattttatacttattaaaccctctcggccgaaacaaatgaaatgctaataacacccgtcttaaaaataaatgttttttcttttgtataagcttcaaattaaaatttggatattgcttacccgttggttaagaaattaaaagaaaaaagtattattatgtaaattataaaaaaataaaaatattataaatattataatctttcgtcttaaacattaactaatttgtcttagaaaattatctacaatattttcatcattatactaataaacaaaatttatgcatgactagtataagaattcaactgcatagaaattattgcagttatttattataaaagttaataaatttattatatctaaatatttatattacatgatattataattcgtttacctttacactattactaaat

SEQ ID NO: 225859 - DNA, 413 bp, Glycine max
taaccattattgtaataacaaccaaagtgtggaacaaatcattatctattaagaggaaaaaaaacaatagatgcaagaatggaaatattaaatgaaaaaaaataagaaaaaaaaacaaaaaaaaatcctatcgagacaattattcttttttttttttttttttgctcagcatcgagacaattattctatgagacacttacggagaaaacgttccatcaaccaacttaaaatgtccaatttcatatgtccgaataggtatgccctcccatatctgcaaaaagaatataccacaaaggcataaattaatctgttttgcgaagaacatgtaacattaagaattaaggacccaaaagaaaagaagcttacatcccacacaatggttcgttcatcatacgcagcactcatagctattc

SEQ ID NO: 225860 - DNA, 416 bp, Glycine max
ctgcagcttatttcaaataatgcacaaatttttatatctcaattcaactctattattgtgctctcctgtgcttcacaggaggtactatatgggatgttccatttaatgggaaaatacttatacattgcacagactactaattagtttaaacaaaagttccatataactttttttttttctttttacaaataatcgaacgatatatagggaaagaaagctacatttacaacaatgttctcaatcattctgattctgatggatgaagtgtatcttattccttaccacacattacaagatggcattatcattactttttgcacggcgaactgatgatgggtattgcataatgaacataacctttttactttctttctggcgtccagaaatgggaacaaacaaccaaactatgagcacat

SEQ ID NO: 225861 - DNA, 401 bp, Glycine max
  unsure (1)..(401): unsure at all n locations
ntatgagtctgtagcgatatctggatacttcatgctgactttttttcatatgccacatattaatctggtgtctttggtcatgtgactatcctacagtgcctgtgctactgcagcnttcatatatattggtattttctttcccctcattaataatccaattaactaattagcacctatgcttgcaattgagtgcattttttttttctgaatattctcaaaatgtctactgaatcacgaaaatcatcaaatgggccacaaaagtattactctttaataagtgacacaacaaatcgcttatttggaatctttaatgtcattcccatcgttgccaacacttatggttgtggaatatctccagaaattcacgttagaaacaatcaaatgtgttcactctaacatat

SEQ ID NO: 225862 - DNA, 340 bp, Glycine max
  unsure (1)..(340): unsure at all n locations
tatatgagtgtctgacttcaaaaacccagagagagatattctaagagaacttaattgtccaatgctctctccacaactcttggagaaacacttgcaaatctattgagaattcatccaggaacttcaaattggattatcatccttaacagagagaaattcctctaggaccctcactgtgtatcatccaacctaaaggagagaaatctttctgttcatcttagaaagcgcattgtcatcaagagatgagttgtccttcggggaatctttgaacacaacggtgagggatctcaaggtgcgttcaagtctgnaacgattacagagatagtgaaaactcactggg

SEQ ID NO: 225863 - DNA, 438 bp, Glycine max
  unsure (1)..(438): unsure at all n locations
ntaccatcacattcacatatgcttcattaaacgcgattacttattttntttaatttagcaatgatccactaacctaaggaattaaaagaacttaatggctgagtgtaactgaaattgtggcaaccaaaagtcaccccaaggctgatgcctaagctgccaattgggcccttattacaacttgaactaaaccaaactaaagcccctttagtttattaacccaaaacataattttggtcagccaactttacatggattgagccattatttagacaaactaaacactctaaaattgagatgaagtggcgccatttactcctcctccatttgggccatgatacaactcacaaccttggacttttctccttgaaacttgggcttgattcaaatagtatggacaacacttgttgaagccttcctttgctttcttgctctaccctt

SEQ ID NO: 225864 - DNA, 396 bp, Glycine max
tgcaccaacattcattagtccaatacacactcaacatatagtcatcatccatccacaattccaatcattcatgctcaatatgatgcatgcacctgacctcaactctaatatgcaatgtggtaccatccctaaggaaatagccttagcatgtccacacgacactttcacttatgaaaactatgcagtaagtttcgaggtcaccttgtcgtgcacaggcaactgccccccccccccccccacagtgatcagctcgagtcttaaaggagttccaaaccgagtgacatgccccatagtacaagtattcctcctcacgagaaactacaagtacttactgacaaagtttatactatttccatgtcatatgaagtatgaaacatgggcaccatcaaatgcact

SEQ ID NO: 225865 - DNA, 332 bp, Glycine max
  unsure (1)..(332): unsure at all n locations
aatgaacgctgagcaccgtttttaccgacgcagcttcatgtaactttctctatacacttcaataacaggcttcctctagaagcttcctcgtggcttccttgacaacctctctcaagacgcttctttcagaagctacatccttatatattcacccctctattaactcaattaacttccttaaaaataattacggatgaaaatagcgcaacaatcatcaaacatcaaacataattacgaataatatatagatatatatatcanggtgttacattgcgggctttggtgaattggctaggagctcggcttgttncatatactttcaactctcaaat

SEQ ID NO: 225866 - DNA, 440 bp, Glycine max
cttgactcacctttggctgaattaccgactttctccgtcgactatagcgtcacaggattctttcaccccgtatacaaagacttctttgaatcactttgcaatccttcatacataggggcatttgcttgctgaaaagacttttgaccaagggcacgaatcatatcctccaagcgatctcccatttctacatcaaacggttcagattggaatccactctacctgtctgtcaggtcaccatgccatatacacgccgtgtaatacttcttaatcccatcacacaatagatgctcccatatgtcatgcagtattagtcatcgttcattccaaaaaatgatgcacggacaataatatcttccgtcctcatccgggcaacttctttcggaggcgaattgaagaactcttctatgcctctctcatatgcagggctcatgcgactttcc

SEQ ID NO: 225867 - DNA, 319 bp, Glycine max
cctaaaaccagctcacggaaaacagacgggctccacgcagatttttttgtctactccaactccctcgtaatatattgtaagccgccgagatcattggcccattccaatctggcactgacatggggaccgcgaactgatcacgctcgaacatacggacattggaaactggaaagcgtataagctgctcacactcaaccaagtcctctagggttttgtcattgccctcaatggcacacatcgaacatcagtgcaaacacaaagggtgattacacctgaaccaaccagctttatggacgccaataaacataataaaaagagt

SEQ ID NO: 225868 - DNA, 356 bp, Glycine max
tgcacgcttctttaatattgtcttgaaaatacatatttattaactttcatttctgcatggcataacttttatttcatattaaaaataagtggatttattaacaatatccacatccaaagaacatgctatggtatattatatcgtcattataataatataataaagctgtctacggattgattcatttaaagggtatattcttacaaaccaacaccaacgctattattctttttgctcatttaaataattcatttgtcactttcttgaactctcaagaattgaacgctgctcagatgaatcagacatgtaatccaatcacactaagtaaacgttgtagaaaataaagacaacaacta

SEQ ID NO: 225869 - DNA, 402 bp, Glycine max
ctctaatccaatctatacgatttgaagcagtcttatctctatcttgtttaagagttaagcactacatcttgtagagtgttcctttcctgtgagggaagggaatgtcacattctgaaaattttctcatcattccaccatatggggtccaaatcatcaagggactatcttcttcgagcaatgtttgccacaaccccttaagactagtttatggcattgcatctttcacaaaaactgacttggctttgaattagttcttgaaagttgattttccttgaagcaaaacttcatggggggtgtcatttggatagctagcgatatagagcacagatttgatcctatacaagcttgaagacaattctttttaaccaaacccaattcaagaaagctctctttcatcacttg

SEQ ID NO: 225870 - DNA, 440 bp, Glycine max
tctccgcttatttgctataaataggggaagaagtgaataatataagggttcaaccccttaggcacttctctctctttcgaatttgcttacgaaaattgtttacgtgaagaaaatccaagccgaggtgctttcgtaacgctttcgagaggtttccgtaagcaaatccgtgaaggttttccaccgttattcaccattcttcatccgttcttcgttcttcaacgagtaagtttccaaatcgagcttttcaattcattctatgtatctgtggcggtccccatttgctttgtgtatttttattctcgtttcatttactttccgtacccccttttgacgtgcttaagccatttctcgcttaatctaaaaataaaataaatttccaccgatcgtttgtattgtatcatcccgtgaatttgggtaaatgaattccgaccgttcggccg

SEQ ID NO: 225871 - DNA, 303 bp, Glycine max
tcagaattcaatttcgagcgtctcgatgtattactgtactctatctcacatccgagtaaaaagttattgtcgtttgaatttggttagagcttcaacattgaattctcagcatcctgatatattacggaactcaatcagacattcaagtaaaaaggtattgtcgcttgaattaagtctcaacgtcataattcaatttccagcgtctcaatagattacgggactgaatcacacatccgagcaaaacattattggcgtttgaattagctcagaccttcccaatttaatttccgaccgcctcgatat

SEQ ID NO: 225872 - DNA, 453 bp, Glycine max
  unsure (1)..(453): unsure at all n locations
tctaagcgcctgcggcatgcaagcttgtagaaatataacaaacttatgtgtcttggttaatacaaaggaggctgctattgtaaattngtgaggttctaacttctaatataataacttcatcttttattttctcatatctttcacttgcaataacccccatattctttccccgaagctccctttaaaccttccttgaaacgctgattatgcttccttttctcaacttgacaattttatctatcttccagctgcaagaaacgtcctgagggcagcttatgagacccaaaaagggccattcagccgcctggactaaagaccagcctcgagcgcttacacgcgccaccattcgcattacgcctcgggtcccctaacctttcatcatctactcgcggcgtgttccacatatcaccgttacatgatagcgccttctgttcaatcctgtcactcgaagcc

SEQ ID NO: 225873 - DNA, 454 bp, Glycine max
  unsure (1)..(454): unsure at all n locations
gacctataaaactcagcttntgacatagaatttgcagcaagccactaagtctggcattatggctgtggaaaccaaaaggccaaatgaggcctttgtcttangccctcaagagtttcattttttttttacatttttaatatttttttgtcaatttaaattattaagcggtaaattttgttaagatatgatttattgtttgtaatcaatttaaattattaagccgtaaattttgttaagatatgatttattgtttgtaatctctctcttcctaaagattagtcaattaatatcatctttttaaaaattaaccaatatcacaattaatgtcatttaaaatattttatctatcccaaaaaagtaaatccctattaactttcctttaacccatcttaatttcctaactaacgtatctcactctctggactgcattcttcaccgtgtttcatctcctcat

SEQ ID NO: 225874 - DNA, 358 bp, Glycine max
acacaagaaactcaactacacatatgggcaggcgggctccttcacaacttgtattaactcgagctatgaccactgaactggcataccgcgatgctacaattcatgtacgcctgagtgggcttatagcctagaccatactgtccacgattgccttgggtttgtatcacgctagaaaagccgacattgtctttgcctaaacccataccgggagcataaccgacgccccaacataacataggccatcataaccgacgcatccgacagacaaggatgcccatagagggagtccactgaggaaatgctgaccacctaacaagactggaaagtggttcaaacgacactatcgcggatccacata

SEQ ID NO: 225875 - DNA, 331 bp, Glycine max
  unsure (1)..(331): unsure at all n locations
agcttgagcnacggaatnttaacacaaacaactttctatatcaccccctagtacctccactatgcccgaacaccatggaatatacctctatatatcaagacgaacatgacatcatatcccaataaaacagagctgcctgaacactagacgatcccgaagagagagacagaagcacgaacactacgagaaccgagagaaaaagtatggcgccaacgattctagatccaccagaaagagaatataagacttctggacacacaactatattagacgaccgtacaaaacattgagacaagaaaataacgcaatgaagaaccctaaaccaaaaatg

SEQ ID NO: 225876 - DNA, 428 bp, Glycine max
ttgtgtaagcgattacacatttggtcattgacacgcgcgtttgtttatttaaatatacacatgtaactcttcaaacaggattctactctttcagaggggttgtatgattttatcaacagttatatctcttacgaatggacctcttgatccaacacgactagtctataaaagcgaggctctgtcttgcattttcgaccaggcattgttccaaactttctaacaaactaatacaatgattttacaagccatgaatcttttgaaatatatacgaactacttattcttcttctgaccaaacgctatctgaagttctctggatatgcacaccatgagaacttgtgctcttcgtcctatttattgtctcctcacattgccgaaaaaataagacaaggactgatctggatgcattaattctgagtcactcttctc

SEQ ID NO: 225877 - DNA, 363 bp, Glycine max
  unsure (1)..(363): unsure at all n locations
agcttcttaggcgtangaagcaattatggagattcttgatgcaattgtctctaaataagggtgaaatccaaatacaccttcaaaattcaaggtggattgacatccctcttttttgccccagctgcacgtcaaaaacaaaaggcaagttcaatgagggtgttactaggtgcacccaacaccattgcttgtacatccaacaattcaagtgaagtggcaaaaatatccttcacttaaattntaaaacccctccctcctaccttgcatttgtatgccgcaccagctccgntcttgcccttctctcttcgttttgcgtgttgagccatgctgccacagttaaggccagctccaccactgttatgtcat

SEQ ID NO: 225878 - DNA, 485 bp, Glycine max
  unsure (1)..(485): unsure at all n locations
cgtattgagaaggactactaattntcatgtntactctnttgttccagactacattggttctaagctaactgctgatatggctcagatttgttttcctaaaggcttttagccttcgttaatatattatgcgtttacaaaaacagtcaaaccaatttttttgtcgagaccaaacaactctagaataccaaaacaaaaaacactaattntcttttattaatattatgttggtccaattgaaactaagtattggagtataaatgtgtgatgaaggcccacattgagtagaaatgaaaaggttgaacattatataaatgaggaaaatatcataaacttatgtaaggtttttttgagttaaagtgtggtatcaaattatcttgtgtgattgtttatgacttattgatataaattaagtaaggttttcgatctaattcttataaatganacaaaaatatgagtgaaagaaagtctttataaatatgtaataa

SEQ ID NO: 225879 - DNA, 431 bp, Glycine max
agacttgatgtggatggataggtctcactttttctttgaatggaagtcaagagcttccaagactgttagccaaagcaaaggcaatggcggacgtgtactcaactcccgaggaagttcatgggcttctcgattattgtcagcatatgatcgagttgatgtcccatataattaggaactgctgatgcatttgtatttaggctctgactctgacaagataaacaatattggctcttaaggaaaatgagatctgattcaaacctatgtctttgctaaaacttttgtgggggcccaatactctgacaacttgtcattgtcatgcattcaatgttatttcattgaccactactcattgcattctggtcttttagccgaatagtcgagtaacaccataaccaaaaagacagacacctgtacgacaccctatcaacccg

SEQ ID NO: 225880 - DNA, 482 bp, Glycine max
  unsure (1)..(482): unsure at all n locations
tttctatagttggtttattttttatttccccttttacaatgtgtttctagcttctcatgtggactcctgtttttctatgcagtggttatatgcctcctgaatatgctgtccatggatctttttcagtcaaatctgatgtctttagctttggtgtgattgtgttggagataatcagtggaaggaagaacaggggattttgtgacccacacaatcatctaaatcttcttggacatgtaagtctaaagattgaaatctgtatgtgaataaatattaacactttgatcttgaaaaagttaacattatttaactagtactctcgattatatggaatatgaaataaataaggtactgatggttttcatgtaaattttacgcatggagactatggattgagaaaagaccatcggaacttatggatgactcagcggacaatctagtcgctccatctganatattaagatatattcatattggtgtgtatg

SEQ ID NO: 225881 - DNA, 459 bp, Glycine max
  unsure (1)..(459): unsure at all n locations
cacttgnatactcaagctcgacataccggcttgtttaagtcatactattaacttttatttctattacctataccatctttatgacattatgaatgactatcatgaattgacataatgcgcttaacaaattcacttgcatgtgaaaaatttccaaaaacaaaaagactcaagttacaacgataatgcaaccacattaatacttccaaataacaaaatgttctgtaagacatttcataccacttaaatatttctattcgactatattagtataaatcatctctaatccatgtattgtataatattacactctctctctcattctctttcgatatactctgtgcttaaataactcgaattcaatatgactttgcttatcaattatttctgaatccgtatattacttaaacgaacatttaaaggttctttttttagttagcatttactangctcataaaaata

SEQ ID NO: 225882 - DNA, 410 bp, Glycine max
  unsure (1)..(410): unsure at all n locations
agcttgttgcagattntgtcagatctactctgttttgtctgtttggagtacctacagcaatcgctagtgatcaacgaacccattnttgcaagaaatcaatgcatgccttgcttaaaaagtacggggttgtatacagggtatccacaccataccacccccaaaccaatggacaggcaaaaatttctaacagggagatcaagagaattttagagaatattgtgcagccaagctggaaagattgaagtaccaagcttgatgatgctctatgggcacatcggactgcctacaaagcacccataggaatgtttccttatcgggctgtcctcggaaaggcatgtcatctttcagtgaagaatcagcacaaaggatactgggcagtgaagacctgccacttctctatgcatcaagct

SEQ ID NO: 225883 - DNA, 479 bp, Glycine max
  unsure (1)..(479): unsure at all n locations
natgcgcatatntncttacgaacgtacgcttgcacaagatattctttttctaataataatgcacccatatacaatcaaggcagatccgttacctagattatttacatgtacttccaacgtgtatntattacttacatcacacacatctccttggctaaatttacatacatgcatactcaaagcatattggggtaccaaaaattgcacatgtgcacatcttggtatttctaatacctatacatacacaaacttcatgatgaatatcgactatctacacaatacagngctacatttcatgctcttttcaagtttttgctacctaaagccgcatgcaaattcaagtatatcttcctttgctgactaanattgcagtacaagggatatattctttctgtaatgatgttctttacataacatgcaacatatttatatataatttttcgtgagatattctgactaccaanaagtatatgtacata

SEQ ID NO: 225884 - DNA, 370 bp, Glycine max
  unsure (1)..(370): unsure at all n locations
agctttctttagccttaataaaggctgtggtttttatttatttctctgaaacttaagtttggtaaactaatagagatagttgaattggtttgtgtttcaagtttgccatgctctttacttctaacatctgctcatgttgttactgatatactgtcaaaggttggtcttcacatttgggtttgtcctttggttactgatgtatatgtaatgccctgtactatttattcgtcaatatctttgatactttgacaggcattgcaaaaagaacatctttcttcagctctcatcaacaatggtcactgccctacacttangtactttagcaattcgtagaagctgattcctcgagtgtatgttgatttgctatcat

SEQ ID NO: 225885 - DNA, 488 bp, Glycine max
  unsure (1)..(488): unsure at all n locations
tcatgatgatgaatcaagttgattcacatagcttcgataatgacaattatgatgacaaaaatcccaacgaatgatttcaagattgagtcaacaagttcaagatcaagtttaatttcaagtttcatgagaagaaatcaagaagattcaagaatcaagagaagtttgatttcaagattcaagagaagatgaattcaagtttcaagagaagaaatcaagaagacttcacacgggaagtattgaaaagatttttcaaaaaacatagcacaattttgtttttcaaaagagtttttctcaaaattttctaagttaccagagtttgtactctctggtaatcgattaccaacttcctgtaatcgattaccagtggcaaagtttgatttcaaaagctttcaactgaattaccaacattccaattggattcanaatggtgtaatcgattactagtgtatctgaacgttgaaattcataatctattgtgaagagtcata

SEQ ID NO: 225886 - DNA, 356 bp, Glycine max
  unsure (1)..(356): unsure at all n locations
ttgtcgtgaacataatacgcaagagctatgattttacaatgttctatttgaatanacgccactacattaccctattactatacataagtaatagcctataaaaatgtgtgaagaagaaaaataatcgaacgcgataacatacagggaggcactaagcaaagtaaaatacaatgaagcatgtaataactacaagtactcacttgcaagaggcaatacgcaacatcaaattcaaatgcaccatgagcacttgcagccacaacatgagttagcaccataatgaccattatagtcgcttaacatctattcaatggcctatatgacttcagtagccacgactaaatgtgcctaccatcact

SEQ ID NO: 225887 - DNA, 444 bp, Glycine max
  unsure (1)..(444): unsure at all n locations
cttcccaaacgatattttctattattatttatatcctacataaacccatgactctctgtgccattatgaaatgcaccgtacgtatcattgttcttgctcttctttacactgcagttataggatacatcatctgaccaatcaaggccaccccatatagtatccccaccttcgggtatcattgacatggttgaatcctacgttcgggtcatccgcattagatgctgtaaatgtttaagaccaaaaacatccttatcccataaacctggtgcgaaagtactgtatgagggttagagattcattatattatatatgtattcgcagctaacatgatgcattntataaccatatcatcaatggaaattacagataaattcaccctaacacaacttgagacaattcttatatattgcaaggacacacacttttgaagatcttatatacaga

SEQ ID NO: 225888 - DNA, 437 bp, Glycine max
ctagtgatattttgtgaagatgtaccggctctccttttgaatgcacgaccttatctcttttctctactagttcgtcaattttcttcgattctttgatgccctgtctatagtaagaggtctataaatatggagagaatctttagtattgaaaatataaccattgttgatcttgattctttcttccctctattgacagttgctgcgtatttttgattgatactacataaatacattctaaaatagtccttcataactcaacatagccgttagacatatataacgaattctaaaatagacttgtagatacattccatctaatggtatcatctaatattgcataaactgacttatcctagaaagtgcatatttaaatatgcatttggatggatttggcaagtacttctcctcaatcatgcttcacacatattttatctaac

SEQ ID NO: 225889 - DNA, 309 bp, Glycine max
gatactacgaatgatacaataagacaatctcataaaaaaaaagcccatcgaggcaaacgcgaattaactataccctacaataacattaaaatgtaagaactgtagaccaaaactaaatgaaagccatcctagaaccaaaatatggagagcccaataagaaaataacatgtggatgcaagaaatgagaatacgcctaactaataccaacgattaaataaattgcactttaaaaacttagcagaaaaaaaaacactatttacctaaataaaaaaattggacgggaccggggcacgatcccccttaggacaa

SEQ ID NO: 225890 - DNA, 397 bp, Glycine max
tgttggtttcgtatgaagtaaacgacgaagctgttaacgtgttatctgtacaaggtccctctcgcgatctccttttagttcgatgagcttgcctcccgcgatgaacttcatgtttaatgaagtgtagtcagtgagtactgggcctaatgtcttcaaccattgtactcccaataccacatcagcaccacacaacgacattaccacagcgtaaatgagtgtcactggatctgcaccgtgacattaccacagcgttgttggcatctaatttcgtcaccgttacccaccgtgactcgtactgggactatgtcttgcgtggggagctttaaagctgtgaccacactatgatggaggaaattgtgtgtacttcctccagtcaataagatgcttacatggagat

SEQ ID NO: 225891 - DNA, 466 bp, Glycine max
  unsure (1)..(466): unsure at all n locations
tggggttgcatctaagcacctatattgactttcttatgctgtctctacatacataaaacagccccaccatccncaatttgcaaaatcatattcatatatcattgtggcatttcaccgagcacttggtgggcgcacgtttagacatgaattgcttgagaatgggagcaatgtggcatgccccattgcttcataatacaacctatgcctaaggccttttcattcaaattctcaattcaagaaacaagcaccaaagcaaaccaaaactgcctcacaaatataagcatgttctcacaatttaaggcaccaaaagatgaagaaagcacatcaatgggaagcaaaaacatcaatgacggaatacttacttgttggagtgaattgaaacaccaantacganagcgaaatacgatcaaaagtggcttangggagcatgaaaccacaagctttcgtgttctttatcttttgaatg

SEQ ID NO: 225892 - DNA, 345 bp, Glycine max
  unsure (1)..(345): unsure at all n locations
gaaancaaattcattctcacttcccagcatgatctgcatatgcaaatctgacaacaatcatccgctcttttgcaatttgaatgacaccccgaaaaccactgtctttctaaaaggctgaccgatatctaatacgattgcgcataataacaacaaagaattccagcacatctaatatactgaagcttacaatggatttacaagagggacctcgactacgtttgaccgcatacaaacggacacccaacacacttttccctttattatatgaattaacaaccacgactacactaaagatgcgaaaactgcaagctctccatacatgaattcatgcccactatacatcat

SEQ ID NO: 225893 - DNA, 460 bp, Glycine max
tctaccaatacccattcctacaacttaagaggaataggaatgtggtatcgaagacacagagatggacatagaaatagagatgacatcacaaattttataggcaataatgaccaattccaaggtaaaggcagaggaagggattatgaaaagtctagggtggagtgctatagatgtcattgtagaagcaaagcttcatggtgaatcaaaggtgattcaaaggtgttttgatgataacaatgatgataacaaaagatgatgacaaaggtgatgacaaaaagctcatagatcaatcaaagaacaactcacgtgaatcaaagatcaatcaaagaacaactcaagtgaatcaagaacaattctagagtaagagtcaagaatcaagattcatggttcaagatctcaataatcaagatctagattcatgactcactattcaagaatcatgacaaggcttaatcaagat

SEQ ID NO: 225894 - DNA, 208 bp, Glycine max
gagaaaaatacccgacacacacacacacaccgacacacacacagaaatggcggcgcaacgaggaacacacacacacacacgcgcactgaaaaacacgaaaatcgtcggcggcgacgcacacacgcacaacggaagaaccgaagcctcccaagagacagagagccaccaacgaccacaaggcgggcggtcacacccaacagcaaagggg

SEQ ID NO: 225895 - DNA, 397 bp, Glycine max
  unsure (1)..(397): unsure at all n locations
tgtaccagaatanaatgatggctggcggataagttatgnttaacatgacgtcctgaaggtgagggccaaaattgagatcacccattgaggcatatgcatcaccgctaatgacgttaaaagagtgcttcctgtgaggcaacccaatgctgatttctttcattctatttttcatgcattgcataattagcaatttgctcgataatcattgaaaaaaaggacatcagcttataaccagtcatagatattggtggctattttaaatgctttgaggaagtggactgaacatcacttaaaaaacattttcatgaaaatagtccacttgctaagcgcataccacctcgctgtgcgcatctatttcatgcgctaagcgctcaaacccctgcatctcacgctgata

SEQ ID NO: 225896 - DNA, 441 bp, Glycine max
  unsure (1)..(441): unsure at all n locations
agcttgctctaaatttacatagacgcgcgtatttatgttatgaggccgcacgccatctttcgcctaagaatagcatcccactggcaaaactaactttccaaatgttggccttcgcaggaaatggccccgaggaagctcgcctcaaagaggtccaggaaggacaaggcaccacaaggaactagttccgctccggagtatgatagtccccgctttaggagcgcggtacaccagcagcgcttcgaagccatcaaggggtggtcgtttctccgggagcgatgcgtccagctcacggaccacgagtatactgatttccaggaggaaatagggcgccggcggcgggcaccactggttactcccatggccaagtttgatccagaaatacgccttgagtnttatgccaatgcttggccaacagatgagggcgtgcgtgacatgagatcc

SEQ ID NO: 225897 - DNA, 432 bp, Glycine max
  unsure (1)..(432): unsure at all n locations
catgaattacattctctccctttctangcaaactcttaattcttcttgatatcgtcaaaatcttcatgatttacacaacattcaaaattacaaaacggccctcaatattggtggttgatctctctttggtgattcactacaattggagtacttcttactccaatagctcttaaggtggttggccccttgcttctggactcatattctataagggatggcaccaatcttccttccaattccctatatggcaacccacaaacaaggaaacaaagagacaagcaataaccacaaacaaaaaacaaatgatatgaaagctaaaccaatggagttttaacaagacaatctttcaaggattattcaacaattaaagcaatgaataggacatataagcaagctatgactcatagagaaacttataatggctctatagta

SEQ ID NO: 225898 - DNA, 440 bp, Glycine max
agcttcaagaaaaagatggcctcagcaaatttcttatttccagataggaattctatcaatagacctccaatctttaatggagagggttaccactactggaaaacccgaatgcaaatttttatcgaggcaatagatctaaatatctgggaagccattgaaatagggccttatatacccaccacagtagaaagagtttcaatagatggtagttcatcaagtgaaagcataaccatagaaaaacctacagatagatggtctgaagaggatagaatacgagtacaatacaacctaaaagccaaaaacataataacatctgccctatgaatggatgaatatttcagagtttcaaattgcaagagtgctaaggaaatgtgggacactcttcgattaacacatgaaggaactacagatgttaaaagatctaggataaatgcactaac

SEQ ID NO: 225899 - DNA, 452 bp, Glycine max
tctcaaggaagctacctagtctatatatagaagcatgtgtatcacttgttgtaactatgatgaatgggagtcttgtgagacacaactcaaagttcaacttctctcccccttttcctccttcaattttgtgctcccaactctctctttccctctctctttcttttcctgcattgaagcatcctctccaagcttcttatccaaggcacattcttggtggcgaagctccttcttccatggcttattccttagtggatggtgcctcccctctcctcttctcctttgccttccgctgcatctccatggtggaaaatctccattgaaggacctcattgaagctcaaagatccagcccccatagaagttccacaagcaagctttcatcatctagtgtcaagggaaatcgtcttgtgcaagggagattgctcggtgtcgagggtggtaacctcggctaat

SEQ ID NO: 225900 - DNA, 431 bp, Glycine max
  unsure (1)..(431): unsure at all n locations
agcttcagtgcaagaaaacatactcatgactattttcttttaatntggctntagaattagaaaagcatgaaaatagggacttgtttgtaagaatttgggctgcccaatgattggtactttgcacctaagtaacatgggaaatgcttttcaatggtgtgtagatatgtgtgtaaatataaggggcataaaattcctcaccaagtatgaacaagttgttttcctaaatgaatgtatgatagcatggaatgccctttttaatgcaaatgattgcaggatgtaattagctttccgatatgcatataaataaatatgagagaaacaataaaaatttgcatggtgtacttcacatgtatataggtagttcgtgatagcaaaatgtttaggatataaattatgtgtaaagtctgacgcaacactttgagcatgaaagt

SEQ ID NO: 225901 - DNA, 467 bp, Glycine max
  unsure (1)..(467): unsure at all n locations
tagcgagttcatcaganacgcagtaaaattatgaagaatatctatgtactctctaagcacataggtcaggcttagcgaattcatgaccaaacccagaaaagatctcaaaatgtacaaacttgttaagccataaggataggcttagcggttcaaacacatgctagagaggtagaagaactacacaacgtgacatgacaaaaagactcagcagtaacaaatatgaaaccaaacaacaaaaattgggttaaccctacaacaccaaaataaccaactaatgattaaagagagagatgaaacaacaaataaggaaatgaagaagctaaagaagaacaaggatgcttacaatcctcagaaggtaagaaaataagagtaatgtttgagaggaaggaagaaaaagatgaaacatataacgtataggagagggttcagagaagagagatatgaacgaaaagacagaaatgagagtg

SEQ ID NO: 225902 - DNA, 355 bp, Glycine max
  unsure (1)..(355): unsure at all n locations
actcaagctntagacaccatattagaacactaatggatcatacnacaatctctattatatcataacaaacgacaacagacagaagacaaaattcaaacaacgactgagagaaacactactcgcggagattcaaccctgagttacaacactctattcacaaacgcccgacgaccgccgcactataattacgcacctacgaagcacctatttacctatcgacaaccatcaacaaacgtcaatacccaactctacaaactgacacaatgcgctaactactaacctgagatagcgcacacgaatactgcgcttctcacaccatactccaacaaacgtaactcatgctcagctcattcat

SEQ ID NO: 225903 - DNA, 478 bp, Glycine max
  unsure (1)..(478): unsure at all n locations
tgagatcagatttgtgagaggagtttaggctgttagctgtttgctctgcatgtctagtgattctagagagagaaagatccaagtttcagagagttntgagagattttgttgtgtgaagatctgcagagaccatagcttgaagaggaagttgttttgagagcttgatatgagtctgtgagtggttgtgagatcctataggtgaaggagacatcctcaccacttgtatttgtgcagactttcatcttgttcttctccttgttgtaaaggaggcttcctggttatggaaagctaaaatcctctattggatcttccttgtaggtacctgatgtaaatatcttattatctatttaatgagtggttgtgtgctctctgcgctagcaggttttcattctagtatgcctttaccttgatcacatagatgcatgccttagtagggtcattcaacagtggagactgatctgaatctgatgaccttgtc

SEQ ID NO: 225904 - DNA, 311 bp, Glycine max
atgtagaacggctagacatgagacatgtcagggtttcgtgttgtttcaacgataacaagggatgccccacattatttccatgacacagaatgcatacaaacgatgatctgggaactttatgcaaaactggacatgcatgcacctatgcggacactcaagtgtcaaatttatatggacatgtgatgctagggctcaagaatcattccccctattttaatcgacccaatgcttccataatatgtgctgttatcaatctgagcatacatccgagaccatatcgggcgtccggcgaaacttcacagcattcaccc

SEQ ID NO: 225905 - DNA, 456 bp, Glycine max
tgcaagcatgcaagcttggtgaacgcatatgcatgatgatgccatgactcattctaaatgtgaggctggaatatgataacggacaaatgcacgaacgatattgctagtgcttagctctacggagttttaaaagattggctaagattttgttaaaacataagcacttaaacaatgaaggaaagctggagctgctgcacatgatgtccaacgttatgccaaggaataagatcgggctgcgcaatgcacaaggcaggataaaatgtcaaatgaagaattgaagttgcaggatccacgatgtcggatacaatgttctgacatcctgcccgaaaatactggagttgctgcacaatgcataagtcaagataaaatgtcaagtgaagaattgaagctgcagaatccacgatgtcggacacgatgtcctgacatccggcccgaaaatactggacacataaatcc

SEQ ID NO: 225906 - DNA, 458 bp, Glycine max
  unsure (1)..(458): unsure at all n locations
tcttgcggatcaacttgatccgctagttgcttacggatcatcttgatccataaatttgttatggatcaagttgatccgcaagttgcttacgaatcaagttgatccgcgagtagttgataccgtaaattattatggatcaagtcgatccgctagtaacttgcggatcaacttgattcttaacaaacttgcggatcaactgaaacatatgtggatcacattataacacacgcggatcaattggaatgagttgggtgcacaaaaattgcattaaatatacctgagggtactatcgtctttcatgtatgatgctgggtgcacctagcaacatccaagtctaaaattgaagtgtgtttcattgagtttaggtcacgtgactagactntctaaattaattaagagagactacgatgtgtcgatgtgtcacaaatggagtttcctctactagcatgtgaatgaaa

SEQ ID NO: 225907 - DNA, 316 bp, Glycine max
gaccacagagcgcgacctggagatatgtcgcgggggtcacgagaccttggggacgtcaggtggggtgctattgaccaaaaccaagcttgaccaatcccgacccaacccgggcatagtcgggcagtgagaacctgtgatgtacctaagcaggcgagctcctggcagtcaacagataaaaggaaaacaacaccacaaagcaaggacgcttgtggcggctggccacctgcgaatcctgcgcaacatgtgagatatggcctctggcaatcgattaccacacgggggcaatcgaccgccaggcttataaatgaagacagga

SEQ ID NO: 225908 - DNA, 468 bp, Glycine max
  unsure (1)..(468): unsure at all n locations
aaactcaagctntccaagttntctggtgntccaaaccttganaacttgctctattcattcttttcattcccttctccctttgccaaaaagaattcgccaagcactaaccacctgaattctttttgtgtctctcttctcccttttccaaaagaaaaaaggactaaccgcctgaattcttttgtgtctcccttttcccttgtcaaagaattcaaaacgacacaatctgagaattcttttgattcttccctttcccatatacaaaagatttcaaatgacttaccgcctgagaattctcttgtatccccattcaaaatgtttcaaatgtttaaccgcctgagaactttgtcataacacattggagggtacatcctttgtggtacaagtaaatggtacatgtactcgggttcgactgagaacaagagagggtacatctcttgtggatcgcgtctattggacggtacatccact

SEQ ID NO: 225909 - DNA, 324 bp, Glycine max
  unsure (1)..(324): unsure at all n locations
agctggaggtgagaaagcgcggaagagncacttctttctactttcgntagcncaccacagagcggtacctgcagacacgccgcgggggtcaggagacctcggggacatcaggtggggcgctaatgcccaaaactaggcttgaccaatcctgacccaacccgggcatagtcagtcagggagaacctgcgatgcacctaaacaggcgagctcctgacagtcaatccacaaaagaacaaacaccaccaagcaccgacgcctgcgtggcgcgcgcccagctacggaacttgagcgatatctggacatcggccctcgacaaatgactac

SEQ ID NO: 225910 - DNA, 443 bp, Glycine max
aaaacttagcttgcaattacctaaattgaagaaacgattataatttttcttttcataattactaagaatttattacctatctttaactaaaagaacttataacactacacaataaccataaattggaggagtctgatacaatttacacaagttttatacacaaaagatagtcgtattcaccgactaacattaaactcgtgttgtatgaacacctagagagtgtgaatctcatgcatgaactatatatgtatgaatatatgtatgtgtgtgtggaacgtaatttactgatgatattattattgatgagattaattgatatgatgagaacgtgatgtttaagataatgctgatagagaattgataactgcaatgaatggcaataatttcttcaccttactattgttttaatgaaatatcgaaaaataacattagagcatgtttta

SEQ ID NO: 225911 - DNA, 415 bp, Glycine max
cacccgatgagagcacgacgatagcggatgatgcagggtttgctgttatactcccgcacgtgacacagagtgcgcgcaatcctatattgaaacaacagtctgctgagctcatgaagctgtgtagtttaaattattcatatgctatctttatttccaagtgcaagcttaccagaaccatccaaggatcatggactacaccaatccggtggcgccaacaattgaaaaattgtggcgcaagagagtataaaagatcatttgctcttcagaccaccgaactctattaacaccagacaatgacatggcgagagggcaagtctctactgctaaatccttatataagaatcaacaacgacttgatgaagaaaaaattaatgggacattggactcatgccgagtacttttgtcaaaggtattc

SEQ ID NO: 225912 - DNA, 415 bp, Glycine max
aactcagctctaaggaatcttctcagaagactatgattgacgctttctttctatacatagaagcgtgtgtaacacttgttgcaacactgatgaacgagagtcttgtgagacacaactcaaagttcaatctctctccctttatattccttcaattccaggctccccctccctctttctgtccctctttcttttcctccattgaagcattctctccaagcttcttatccaaggctcatctgggtggagaagcattcttttccatggcttattccttaatggatggcgcctcctctcacctactattcttagactttcgctgcatatacatcgtggagaaaaccattaaaggacccctttgtagctcagagatacagcttccatagaagccccaacagcaaaatcatgtgcgctggcg

SEQ ID NO: 225913 - DNA, 458 bp, Glycine max
  unsure (1)..(458): unsure at all n locations
acttctctcanaacaagctagtagcctcacccatattcttttttcttgcggtataccttacctttcaaattatgaacagaacgtggtttgttaatttcactgaaatccttccacattttcacttatggctgtgctgaaacactcttgaaaggatgctgagaacggtaggatattataaagaaatcctcacttaagacacatctgtgaccacttattaaatttttgttctctgatatgaggctatgggctactgaaaatcaaactgtatccctaattaaatgactgactattgtaatataaacacaaaataccataatgaagattgatctataatataataaatcaaaatgaattactcgttggttgataaactattttgtttattgttctcgctgtaattattaaccctttctatctactctataaagtatcttgactcatactattgatatatattg

SEQ ID NO: 225914 - DNA, 448 bp, Glycine max
  unsure (1)..(448): unsure at all n locations
gacctgagcatgcagcttggcaaacaaacactccacatttatctctacttgcattnnctttctttacccactcctcacgttctggtttttagggaaaaacaccataactaaacgcgccgcaagggatccctatcgcaccagatccaaatctacaacgatgggtgatcaagaggagacgcaggaacagatgaaagccgacatgtcggctctgaaagaacaaatggcctccatgatggaggccatgttaagtatgaagcagctcatagagaagaacgcggccaccgccgccgctgccagttcggctgccgaagcagacccgactctcttggcaactacgcaccatcctccctcaaacatagtatgacggtgaagggacacactgtngcacgatggcagccttcacctgngatacaaccgagcggcttactcttatggattgtcgcccaac

SEQ ID NO: 225915 - DNA, 489 bp, Glycine max
  unsure (1)..(489): unsure at all n locations
tgagatgaggaagtgtanaagggtgaaacttcctgcttttattcattgaccacagagtggtacctggagatatgtcgcggcggttaggagaccttggggacgtcaagtggggtgctattgcccaaaaccaagcttgaccaatcccgacccaacccgggcatagtcggtcagtgagaacctgtgatgtacctaaacaggcgagctcctggcagtcaacagataaaaggaacaaagaccacaaagcaaggaggcttgtggtggctggccagctgtgaaacttgattgatatgtgagatatggtctctggtaatcgattaccaagggtgggtaatcgattacaaggcttaaaaatgaagacaggaggctaagatggtctctggtaatcgattaccacggcgtgtaatcgattaccaggctcgaaaaacgaggtcaggaagccatgagggcttctggtatatcgataccaacgcggtgtaatcgtataccacg

SEQ ID NO: 225916 - DNA, 415 bp, Glycine max
agcttcaatccttcggttaaatagatagaatttttatttgttttagattccctctaatgaactttatgttttctttttataaacctcacaaccaacaaaatccccctatctattcaaattaactcttgatgtttgatgaatcgcgtctctagaagaatgacctaggttgcgccctattttgcaaaattattgcggatcctagcagcttttgatagcaactttgacggcgctgcaatcattatacttgtctcttttcttatcactacagcaccttctttttttcagctgaggacactcaatcttcatatgtccaggctttctacattcaaagcatacgaccccgtggtctcctctttgatctctctaaaaaattcctccttcctccgaggaatgctaacaattcttcttttgacac

SEQ ID NO: 225917 - DNA, 489 bp, Glycine max
  unsure (1)..(489): unsure at all n locations
tataagcaacagcacccacacgatcaaccacttgaaagggtacttaagtatctatgactgagcttagcattggccctctgtgcaacagaaacttgtctgtaagaatgaagcttgacaaaaaacaaggtcaccaatggcaaagtgtctttcacatctgtgcttatcagcaagttgcttcatacgattttgggctcgctataaatgaaacttcagaattctaagcatttcctccctcttgctaaggcttcaatccaccaaagcaaccttggattcaccgggaaggtaaggcaatgaaatgggaggaggctggctatatacaatttcatggggagtagcctgcgcagaagtatggaaggtagtgttgtaccaccattcagctaangagagccaatgaacccaatgatgaggtctatctgaacacatacaccgaagatatgtctccaaacacctattaacaaccttagtctgcccatctgtttctgggtaata

SEQ ID NO: 225918 - DNA, 277 bp, Glycine max
acaccccaagaaacggaccaaataaaacccacccaagagaccggacaaaaacaagaaaacaacaaaaacccccctccccccagaaacccccccggggcagcatccacaacaaggcagggcgcccgcgagggataccccggaccagggaagaaacttaacggcagaccctgcagcaaaaatcccaccacaccgacaaaagggcaactgccacaaataaaggcaccaccaaaaaaaaacaacacaagcaaacaacccacagttgaaaaggcacaggcac

SEQ ID NO: 225919 - DNA, 486 bp, Glycine max
cttctaacgtgctagagatattacattgtgatccaggcgttttcttattctatattctgtcatttctttggtattttaattcctactaaaaaaggatttaatattacaggctcaccctgatctgatacatgcattccaagctgccgcatatgctgtgggatctggaagttcatgtgcatctgctaacaaatctctcaatgctgcagtaatgggtgaggcactgcccataggaaggggaattgatgaaagggctgcacgtgcagctgctgaagtcacgagaaaggctgcaacaaggggcctgatgatacgtccccatggtgtaccagtccaagccttgcctccccttacccaacttttgaatattataaatccaggggtgacttcatatgctgcggacattggacatgcacatcgagttaagaacgaagcatatgacattccttcaagtgatctaattgataccacgaaagggcaacaacttctgtg

SEQ ID NO: 225920 - DNA, 235 bp, Glycine max
aaaactatctcgcacgccctgacacaaatatggtgaaatacctaggaacatgccaaccaaaagcccaaacatgacaatgagtaccaagaccaattgaatcagacaaccaaggcgcagctcacctgcacaagaagtaacaaacactaagatctttatagccaaacagactctcccggcccacctgaacataaaccacacacccagacataagagccacgaaagaaacccccacttc

SEQ ID NO: 225921 - DNA, 431 bp, Glycine max
taaccgatcatcacatataagaatccgctgttgttaaaattcatgattggagcacgttgattgttaatgtgacaatggaagaattgttcatgtttatacaagtaacaattatctatcataatgtattaccaaaagcatagatgatcaattgatatgtaattatttaaatttaattaaccaatagttttaagttcaaatatacatgttggattaaatattcgagaagagaaatgtgggggtttgcttaacccttaacgatcatatattcttaactaatactcgttgttagaatatttcttgcaacttatgagagatatacgacgtataaaagagaaaatatgacgtacaataattaacataattaagaaataacaaaagttgtataacttgttgtaacacttatcattatcacgtattatattttacataat

SEQ ID NO: 225922 - DNA, 371 bp, Glycine max
tctcttgcacaagatgccaaaacttctctagacgaaacatagctaccaaagtacctttaaagttgatgttgtgagtactatatgctatactcttcactcttcaaagacatactttagagaaaactccttatgagctttacaaaggacgaacacaaaatattctccatttaacggtattcggatgtatagatgcttcgttcaaacatgacaaaggaacctctgtttaactaaatgatcgagacgatgcatgattacatgcgtagccctacgatgccatatcctacaatcattaatcttgcttacaaactactaagctatgacatgatgcacgtacaagttaaccatgatataaacctaatctttactatatg

SEQ ID NO: 225923 - DNA, 428 bp, Glycine max
agcttctagcgtacccgctattgttgctctttttatcccaaaaacaaatccctcttattactagctattttgaattctttagttcctgaatgtacaactttcaaattgttgttcgctcccctctttgttttatgcaaaaaatgaaatcaatatcaaacaaaacatgcatacaattgtcatcggtattgctacttgaaccataaggaataccatctaaagaagtacttcaaaacgtttatttattttttttggtattttttgaattacaatttgacttcaatatctaattttttaatgtacttacgtggacgatgttgaccaacagaacgagaacgaagaaagtaatttaaagaagattaaggaagtgtcacatttttttttcctcaccaaggaagtgtcacatgaatgctcgctggtgaacaatcata

SEQ ID NO: 225924 - DNA, 485 bp, Glycine max
  unsure (1)..(485): unsure at all n locations
gtaatataggttagagactcagaacgtctatctatgttttcttgtatctcacataacgcgttgaacaantctattagtttcatacttccattgtacttgtctctgatttcatgcatatcattcttatcttacgtgggtgaaaagccatacatcgtgctatctcctccgtttttcatgaagtgaatattatacgatataatatggataaggcttttataaaggctatcacgtcatgctacggctttaacaaggtaaggccgaaccaaaataaaagactttgataggctataggccaggctcagacctcatatattcattgtaggctaggctcaagccttttaaaggctatcctgacctattcccacccctaattgtcaaagcctatttctagtcaaatgatcttttttataatacaaatctaaattatactcacagtcaagtatatatatatatatatatatatatatatatatatatatactcta

SEQ ID NO: 225925 - DNA, 405 bp, Glycine max
  unsure (1)..(405): unsure at all n locations
agcttccatcaatcatgaaagtagttgcttgttacctcatttacaaacagaacgatcatatcgggttctttattctttatttgtctatctagtaggatttctccgcaattaataaatcatcccttttaatttatctgcctaccaacattgaaatccttcattcatggctacactttgtttagagattaagaaagagtctagatctagaaatctcttgtgcaaaaagctaaactattttaataaagnggacattcttcatttgcgtcgacctctcaattattttttatcactgcttaatattagtttgggtagcaatgaccatgttggaatagaccacgactatggatccggtgtggacccacattcctaagccttagcctacttctttaacagataaaggatgat

SEQ ID NO: 225926 - DNA, 485 bp, Glycine max
  unsure (1)..(485): unsure at all n locations
ggccgccacggaatattccgactatgcccttgtgtggtggaacaagctacaaaaggagagagcaagaaatgaagagccaatggttgatacatggacggagatgaaaaagatcatgaggaagcgatatgtgccggctagttactcaagggacttgaaattcaagctccaaaaactaacccaaggcaacaagggggttgaggagtatttcaaggaaatggatgtgctcatgattcaagcaaatattgaagaagatgaggaggtaactatggctcaatttcttaatggtttgactaatgatatccgtgatattgttgagctgcaggagtttgttgaaatggatgatttgcttcacaaagcaatccaagtagagcaacaattaaaaaggaaaggagtggctaagaggagttntaccaactttggttcttctagttggaaagataaaggtaagaaagatggcgctgctacttctagtagttccacaccta

SEQ ID NO: 225927 - DNA, 159 bp, Glycine max
tagaggaaaaccagaaaaccgaccacttgatttatcgagccacctacgcaagaacacccctccaaggagaagccgaaacaagctcaactcccaaccaaacggctataaaaaggcccaaaatccgatgaccagaagcggaaaagctagccacacatagaa

SEQ ID NO: 225928 - DNA, 394 bp, Glycine max
  unsure (1)..(394): unsure at all n locations
agctnggcctgtctcgccaacactatgggcgatttcttcttggccctatctcgccatcactgtgggcgagtcccacgtagcttgtgtgtcgccatttgcattggcgacactctcctctctccctcctacgtggcttatatcgccactggtattggcggcactctcctctctccacctttgtcgccaatgggtatggcgggttcagccttgccgccaatggcaatggaggcttccacccaataacagaccccctccgtcatttcttttaaaatacgccccaatccgtaaatagtttttaaaataagcccccttacgtaaatctgcctcatttagcgtgtaatggaattggtggaagttatacatgttggacaaggcatggtgagacaagagatga

SEQ ID NO: 225929 - DNA, 462 bp, Glycine max
  unsure (1)..(462): unsure at all n locations
ggccgttggagctgacccatcaactgccctaactctnttatactggtgatccctaggctcttgaccttgacttgatagaacctctttttaagcgaaggcatttgacttgatcccatgttttactaaagtgaaaaaaatcggtgcgaatcaaaattctgacatctatcatgggtggaatggatgaatgcatgaagaactgtacatgatacagatgcaatttatgaatacgggagcccgggaaattgtctctttcatagatacaacgtcttggggtagcacagtgcccgacgcatgtatttaagaaggtgacacggaccctctgttggtttgccaaagagaggggatcaagacaaaacccgtgcatgatgcatatgcgaaaggcacaacacggcaatattcacaaccaaatataagcaaaggggtacatgtcactttgactatatgcatggcagtgtganaaat

SEQ ID NO: 225930 - DNA, 325 bp, Glycine max
caaaaaaataaagggtggatagaagaaagaggaaatttattttaagaagtgaggagaataggagagagaaagagaacgtaagagaaagaatagggaaggaaggagatagagtgagaaaaaaaagaaggagagaaggagagaataggcaggaaacaaggaaaagggaagaagagagtagaaggaatagaaaaaaaaagagagagggaaaatagaaggggaaaaaagaggaggggaacaaaagagagtgaggagagacaaaggttaatgagaagggaaggaatttgaaaataaggagaaaggggagaaatgataggagatgaaaaaa

SEQ ID NO: 225931 - DNA, 391 bp, Glycine max
agctcggccacaaagggttgagaatggactattatattatattttccacatacgagaaaataaataaaatcaaaacacacatttacttgctagggttggctgtcatttgggcataaagacacctaatttactcattaatggactaggtagattcaattttctgttatagaagtcaaatgaaaagaaaaccaagttaatgatcaatgcgctaaccagcaagtaaaaatagatggaattgatgacaccttggtaaacagcaatagaagagagatcaatgtctccaatatgaccagcatagatggaagttgaggagtccatgacaacctggaacaatgcaaacagttccattgagaatagttcaggactgaagtatacattcggatcactaatg

SEQ ID NO: 225932 - DNA, 445 bp, Glycine max
  unsure (1)..(445): unsure at all n locations
ttcgtctccactctatgttgagtggtatctgagcttatcattcaactnggacctgttctggctatcctcgtggatacccaacttcaaattcttcgaaaaagcatcatagaacttgttgtagtcttccttgttctccgcaatttcattgaacatctcaatgcacttcttcacaagattcttcctgatcaccttcaggatcttgttctgctgcagcagctcacgagaaatgttgaggggcaagtcatctgagtctacaacacccttcacaaatccgaggtactcgggaatgagctcctcacagttgtccatgatgaacaccctcctgacataaagtttgatgttgttcatcttcttcctggtgtcaaacaaatcatagggtgccctctttggcacacagagaatggccttgaactcaagctggccctcaacaaagaaatgtttacag

SEQ ID NO: 225933 - DNA, 423 bp, Glycine max
  unsure (1)..(423): unsure at all n locations
ctaacattntttgtttgcccaatcgaatgattatctaatttctttacatcatcatcggggagatctctacaatattattaactgttatttggatgatacctatgttgacgagaagttatgtccggctccatggtgatatgaagggggaccacagcggtgaattattaccggagaacggtgcacttatctgtgcgtgagagagagtgaggcacggacggcgaataaattgaatagtcatgagtcatgagtaagtatcaaacagacaaaagaaagaatcttgtactgagttttgtggaaggaactacattgatcatcttctgcagcgcattggaaacctaccattgcttggaggctggaccaacatgcaagattagtacgtatgggtatgaatggcaacgggcaccgtgagatagataacctgtt

SEQ ID NO: 225934 - DNA, 424 bp, Glycine max
agcttatctttcagtgtctgaaatgctgttgttctttctttatcaaacttgaatgccacatctttattcaacaggttgcttaagggtctagcaatctttgaaaaatccttgatgaatctcctgtagaaccctgcatgccccaagaaactttggacacctttaacattcagtggtggtggcagtttctctataacctctatctctggccggtcaacttcaatccctctagctgagatcttgtggcccacgactatgtcttctcggaccatgaaatgacacttctcccaatttaagactatattactctctacgcacctctgaagtaccatctctatggtcctcaagcacctgtcgaatgaggatccgaaaaccgagaagtcattcatgaacacttccatgcttttctcaccctgtctgaaaaatg

SEQ ID NO: 225935 - DNA, 463 bp, Glycine max
  unsure (1)..(463): unsure at all n locations
cgaaactgtnttctctntattaatttcaatgtgtttgattttttatacatctagtcaagtaattaattccactttataattaatttgcataatatattcttataatttattattttattcccttctctcacatcatttattttgtaacattgtatttaaattataagaactgttataaaattcgtgtaagaggataatatttcttatctttcaatcaaactgtcagaattattgtgaaaaaaaggtgcaagtaacattgttctaaatgcctagcacaaaggctacttctgtggccaacttatcacacggcttcccttttacacaccttgtcctgacactgacagcacggtcccttctacagtctccacccagcttaacacagaactatgttgctcccaaagaattaaaagaagttcacactctcattcaccaatgtcacactaaccttggcgtccatatcatc

SEQ ID NO: 225936 - DNA, 416 bp, Glycine max
  unsure (1)..(416): unsure at all n locations
agcttctttaggaatctacttaatgaatcttctctgtgaagncctctcaagacagcttctcaaggaagctacctagtctataaacagaagcatgtgtaacacttgttgcaactttgatgaatgagagtcttgtgagacatacttcaaagctccacttctctacctcttttattccttcaatatcgtgctccccctctctctttctctccctctttcttttcctccatagaagcattctctccaagcttcttatacaaggctcattttggcggcgaagccccctctttcatggcttattcccgtagggatggcgcctcctctcacctcttatcctttggccttcgctgcatcttcatggtggaaaatcaccattaaaggacctcattgaagctcaaagatacaccttcatacaagcc

SEQ ID NO: 225937 - DNA, 277 bp, Glycine max
cgtcagataaagtgctggaaaaatgcattaaataatgccccaatgaggacttttaaatgaagctgatataatgctgtatgttgttcataggactctaatttactcttgcacaaaggtggtcttatacaatgaactatataaacattcctaccaacttattgagattgatatgcgtcatatttgacacactacactatgaatgaggttcatctcttaatttttgagagttaagtattttcttatctcctattcgcacaagtgaagataacaaatgatg

SEQ ID NO: 225938 - DNA, 351 bp, Glycine max
gcgggaatgacatccactccacacgatctgaagcagaggagagctccaaccctataacgcaacgtggcggacaaaagcgggcacgaaacaggctcccttcgtctgcctaacccccgagtttcaacacttgactgaagaatgtgaaactctggtgctgggaattcacgctctgatgctggaccatgtgacactggctcagagactctctcttgctcttctgatataatcgccaacttatccacgtaaggcacgagatcatcaactgtccatgtgctcctcccttgcggcgacaccatatactggaaagtctgcacaacttcaccctacaattattagcgtcaacaaattaat

SEQ ID NO: 225939 - DNA, 459 bp, Glycine max
agtacttggaagaggctttcactacacagaattggattgttcgtatttataaagtgaaaccacctaagaacagatggtaactctaaaaaaacagccccaaaaaacaaagactactcttctggaaatgatagcattctagtgaacttgagcgctgaaaatctgttagatgctacagattgtggactatttttgatgtagaattagtttaggtaatttgtggatttttgaaatgttacaggttttatgactttttgtcaacttcccaacttaacctattggcttggtaccacttgtttgacacaaattatacaaggtggccggaatagaactgtgtagaaactaactgaatcgtacaggagtggccaatagcctgatatttcgttcaaattttgggttatttgatgtcactcggctcgttgtatgaaggaaacgagaagattatgctatttataacaaaaa

SEQ ID NO: 225940 - DNA, 333 bp, Glycine max
agctgtatatgcgcgggtcagggatacataggtcaagcggcctttatatgtctttatgatgtacccaggacattggacttggtactaccatgccctcctgatctcacactgataatatgaggagtggaggaacgcaccaggtatttacccatcgagcataatgtaaacctttactgttgtacaagctctataactgggactaagctctaaagtttatctttacgttaaagctttgtgtatttagttattgaatttataataccatgatctttcttaatgtgtcctacgtcgctacccaatctcattcagttgcatggttacttctttttgctg

SEQ ID NO: 225941 - DNA, 448 bp, Glycine max
  unsure (1)..(448): unsure at all n locations
ttaagtgactgagctgcactttaaatctaaattggcctgtgtttttttatcgnnatgagccccggccttgaacaatatctatctccctgggtgaaattatgattccttggcgacctgcataactgcttaaaactgtagaagccattgagaaatagtgggctgaataatgcaaatgcaaaataatataccaaaccatcattaatctatgatggtgggatccagggggttcctatacaggggagtaaccacctcggatagaatgtggacaaatcaaagtgccactctttggcgtaaggtgaaaaagaaaatatattattcctttggacattggataaaccagttagtgggctagctttggcactttcttttacactacttcataataataataattaatacacgaattgaattcctttggaagcctctcattggtctcaaattgttgacc

SEQ ID NO: 225942 - DNA, 480 bp, Glycine max
  unsure (1)..(480): unsure at all n locations
tgaagcanagcttgatgcanagaatgtcggtgattatgttttatctaanaagaagcaagacaatacagtccaggctgaaggaactccaaaggttgtggatgatgctattgttaatgatgtcctgattgatctcacatgtcaacatgatcatgcgtgcaatggtatccaatgcagacaatgctaatgaggttgtgcacacaagtcaacatgatcatgcgtgcaagtaagttgacacctcaaatgaagctactttagtggaggaaggcttgcatgatgtagtggtatgttactccatcaatattggtgctactcctatcaactacactgctccaacttccttaagtgaagattgagtactagagatgaatagtcacaccaccgataattttgttgagagacacagacgggagaataagtaagtcgcttacgcaatctatgcataacattatcaatgctcagctcaacaatctcggagttatg

SEQ ID NO: 225943 - DNA, 460 bp, Glycine max
  unsure (1)..(460): unsure at all n locations
taagctagttattcatggcgtttcttgcgcgatccaaattttatnttcggccctattcacactcatatgagaatattcgcgatatgatggtgagaatacataggttcattgctagaagtagacaatccatcactagacgatccattcacctcttagtgtcgatgaaaacaaagatacaacttatgatccctattggtttaaacattagtgaacaagagctatctgttgaagcacacgtgtcaacatatttctattcttagggagcttcatgatcatacactctcattcaccagaacctatctacatactaaatcatatcctacattcaatggacctcaaacactcagatgaatttgctatgatactcgttgagtgtgaaccactaattctgttgcgatgaataaaactaatgatcaataaattgtcttgtggacaatactatctctcctttattaatgat

SEQ ID NO: 225944 - DNA, 79 bp, Glycine max
attttttttttaacccatagggtttttgtgaatgacagaataattaaatgtcctgtcgcaataagtgacataagcccct

SEQ ID NO: 225945 - DNA, 417 bp, Glycine max
  unsure (1)..(417): unsure at all n locations
ngngaatctcaatatggaaagaatacagctatttctatatcaaatatcacgaaagccacacgcgataggtgactcaagtgggaagcaaagccagcaataccgggatcaaccacacaagaaagcactggggagagggtgcccaatacctcgaaagacgtttaacaccacacccaaaatgggtacacacagaaaacctagtaagacttaacaaaaaaaacggccacaaagtccatcaagcgaaataaacaagcgaaaccccaggaaactggaacatatccaagcacctccatcaagccgcaattcaagactcgtacatagaaaatgcccaatgagagcgcacgaccgaatctacctaaacggatactaaagaaactgaacagaaattcacgaagaaatctaccaccctttaatacccca

SEQ ID NO: 225946 - DNA, 410 bp, Glycine max
  unsure (1)..(410): unsure at all n locations
ctgtcattcttactaaacgagaagctctgttctcttcactttatctnaaaaacctctgggcggatccaagagctccgattattcatattgcatattcatgttatggtggcttactcaccgttgtttgatctttcacgaaattcatcataactattaaagcacttaggcaaccctttatcacccgatccagtaaaaaggataatgaatatggcgtgctataacaaatgaaggctgacctaacggccttaatagaacaaatggcttatattacggaggccgtgctcaaactacagataactatagaggatattgccactgcgaccgtcttcactattactatggaagtgtgaccggtgctacaacccgcaataaattgatgaaagattgttctcttgaggagaggctgatat

SEQ ID NO: 225947 - DNA, 434 bp, Glycine max
agcttaagaacccaaacttgtagcttctatgtcttgaaacatgcttatggctaggaatccaaaatttggttttaggattagaaaagcatgaaaatagggatttgtttgtaagaatttgggctgccccatgattggtactttgcacctaagtaacgtgggaaatgcttttcaatgatgtgtagatatatgtgtaaatataaagggcatgaaattctttgtaaagggtgaaggaatattgaggtcccttcctaaatgaatgtatgatagcacgggattcccttttgaatgcaagtatgtgcataatgttaaatatcttgccaatatgcgtaagtgtgtgtgaaacaatgacagttcgtatggtatatatattttgagtgtgtgtacgtagtttgtgatagcaagtgtctacgacatagttaagtgtaaattttgac

SEQ ID NO: 225948 - DNA, 476 bp, Glycine max
  unsure (1)..(476): unsure at all n locations
ttccanaatagcagaatttcacacttaataaaatactattatcacactctgttgaacattatctttgttatttataaaaatgttactgaaaaaaaaatgtggatttcactaattctttaataattctattcaaagaaaattatttctaataaattctaagaaataacaaagaatgtgttgctagtatttttctttaaagcttaatagatataaaaaaaatcatgcactaataatataaaattattttagactgtcatccaattataacatattatttatgataagattattattctttataaaattatcttataagtcatataaactgtgatttatatagttaatgtattattcttaaactctattgctgtaaaatgtaatataagaatggcgtggcatagaataagaacaaattgctataagaaaaatattgtcaaaatagcattttgttttatgtaaaccagtagagctctgtc

SEQ ID NO: 225949 - DNA, 409 bp, Glycine max
  unsure (1)..(409): unsure at all n locations
agcttgtccacacaagacaagatatcaccattccctttccattcacaaacctgagagtaagaagcacttgtcagtgaccaacaaaccaaccaaccaaccatgatgcctgctcatggcctcatcatctctctcatttttgtgtccattttaaccaatgaggcaagcttggtccatgtgagtcaccccctcccccccctctcacacacaaaaggtttcatttttcaatttgggtcttcgatctagctacttttttttgttaccctctgagatgtttcctgtgaattctctcttggggagtgatgtaaactgaacaagaatggttttttntatgattaggaggcaaacgggtcatttccaatggtgcccttggtggaggctgggaagatggagatgatgatggtgatgaatg

SEQ ID NO: 225950 - DNA, 452 bp, Glycine max
tacttgagaattgtaaaatgggaatcatatatgtcaacttttgttgtggctcgctgaagtggcctcttggaatgggttaagttttatttttgtccctctttttaacagtattttattttttaatttgatcttctgtgtagaagaatttcaattttattcttgctcatacgattgagaaatacagtaatgaaatcttaatattaaaaatatatgcttataaaaattcaaacttagtgtcaatttatcacttgtttccttttatacacatatatgtatgtgtttgcccagaaaacagataaccggaataggagagaagtcattaaaaggagtctaattcagttagttaaatcaattcttatggattaaaacaaatcagcaatcaattctttttctggtaaatcaagagatagcaacttaatactctagttcgacaaaacaaagtatatataaaa

SEQ ID NO: 225951 - DNA, 286 bp, Glycine max
gatatgcgttgaggtctgacatttaagaaaaacagaaacattgtctaaacatgcgtccatcgaaaacacgtgtctctttaagctgacaccataataaaaacatgcgagacttgacaccatagtatcttaagttcacaccattgatgctcgaatttatacctataatatgttccgctatctgtttgaatgaaaacttactctgaggtctgaactatgagcatagaaataattgctatagtataaatggggaccctaaaaattaagtgacatcatcacacgtatcata

SEQ ID NO: 225952 - DNA, 408 bp, Glycine max
  unsure (1)..(408): unsure at all n locations
aaaacacaatactcataagcattaatatgcattccatgcgatgagcaaccgagacaatgtcatacataaagtacagcacatacaaaattgccttagaatntgggcctaggacctaactcaatcccacaaaaccagctngattgatgtggaactaaacaccaagcaattaacacagcccccacagaggccgcaaataaggcaagccaggggtgaccgcaatcaaagtgactctccaacattatctgaaaacagcactcttaatggattcgacactcaatgtactactgccttgatcctcaccaccaaactaaacaaaccacatagtcatcattcaggctaagattctaaaatcatatcaaacaggaaacttatctataaaattccacaacgaagctagttctacacaaa

SEQ ID NO: 225953 - DNA, 468 bp, Glycine max
tggttcgaggtacttacctgttgaagatcgaagaacgatgattaacttatgattaacgtctaagaacggttcaaacctttgcgagactcctcacggaaaacgttactgaaactgttctgaagcgcctcggcttacattttcttcacggaaacaatttttccaagcaaattcataagagagagaagtgcctaaggggctgggatcctcttcttcttgcattcctcccctatttatagcaaaataggggaggtggttgccgcccagctcgcccaggcgagctcagctcgcccaggcgagcagggttgcttcctccagaagcaaccgccttctggaggaatcttctggagggcccaaatgggcctgggtgctatttgcaccaccatttttactaagtacaccccccctgctggtttatggtgaatctttctctcgtaaagttacggaaacttacgaatttcgtaacgatac

SEQ ID NO: 225954 - DNA, 423 bp, Glycine max
  unsure (1)..(423): unsure at all n locations
agctntacttatcagagcaaattgcgaaacatgttttaattctcatttcacctctattattgagttctcctgtgttccacaggaggtactatatgggatgctccagataaggggaaactactcatacattgcacagactactaattagttcaaacaaaagttccatataactctctttttttctttctacacataacgtaacgatagatagggaaagaaagcgacgttcataacaatgttctcaatatttctgatcttgatggatgaggtgtatcttattccttaccacacattacaagattgcattatcattagttcttgtgcggtgaactgatgatgggtattgcataatgacgataacctgtttactttgtatctggggtccatatatggacacaaaccaccatgctaggaccacagttc

SEQ ID NO: 225955 - DNA, 435 bp, Glycine max
  unsure (1)..(435): unsure at all n locations
cgaccttagaaactcaagctttatagattgtagtgatattcggatacttcatgctgatgttggcttagatgctcacatattaaactggagtctttggtcatgtgataatcctacaatgcctgtgctactgcagcttccatatatatgggtatttcctttcccctcattaataattcaattaactaattatcacctatgcttgcaattgagtgcacttctttaatatgaagattctcaaaatgtctactgaatcaggaaaaacatcaaatgggccacataagtattactctttatataggcgacacaacaaatcgcttatttggaatctttaatgtcattcccatcgatgccaacacttatggttgaggaatatttccagaaattcatgttagaaacaatcaaatgtgttcacactaacatatataactngctaat

SEQ ID NO: 225956 - DNA, 440 bp, Glycine max
  unsure (1)..(440): unsure at all n locations
agcttgtcaagcccccaagtgtagacaaatgttttctgtgctgcttctgttacgttgttcggggtgaacatgcttttgattntgtaggcgaagtctgacgtgtcaggtgagggaaattcatgtattttacaactctacccttttctaaccattggagagtacattgaagatagatgttacatttcatcctttggtacaagcatgtgcaacgcacgcgcaatactcgtgcatacatgtcactcgtggagtaggtacgtactggagatgtgttgcgtgggtgagtggggttacgtcgtggtgcacaaaactaggacaccactttagctcccaccagttaccgaagagtctatcttctctttaaatggagtggacatttgatttgtgaccatgatcactctanatttctatctctttcctctcaaaacttcttcttcttcatg

SEQ ID NO: 225957 - DNA, 487 bp, Glycine max
  unsure (1)..(487): unsure at all n locations
tgattcattntagaanacttactttagatccattcatatggtcataagtagcacacaacttgcatgcatagaaaagcaaactgggctttgggaaaacgacttttaggatgcgtgtgaaagagagctgtgtatcagataagatgaaacacgaaattaaacaaattaaggtttagaaagagaaaaaaaaaagtaactcatactgacaaagtgaacgtacaccatgttaggattatctataactcgtatacgtgacaatcaaggcccagccaaccatgtttcgatttgtcattatcagcattatgtttgtgtcgagagaaagagaaaaacatttaaaacatcattcattatttgattttatgaagtagttagtacaaatgagtgtggttntattgttaatttattatattataaatgtgaatgatgtaattaatttattgatggttaatctctattatntaatcttagttgaagattttcacttaaattt

SEQ ID NO: 225958 - DNA, 57 bp, Glycine max
agcttgtacatattatacagggttctctttcttttgtgttaagcatcgacatagacc

SEQ ID NO: 225959 - DNA, 59 bp, Glycine max
  unsure (1)..(59): unsure at all n locations
cgcgtgcctggaggtcgactnataggttctcttgttgtttatgtacaactctgcctgag

SEQ ID NO: 225960 - DNA, 428 bp, Glycine max
  unsure (1)..(428): unsure at all n locations
agcttgcctcaaagagggccaggaatgtttatgttttcgaaggaactacatccgctcctgagtatgacagtcaccgctttaggagcgctgtacaccagcagcgcttcgaggccatcaagggatggttatttctccaggagcgacgcgtccagctcaggtgatgaggacatgaccaagagcaagggcaaggatccacttgaaggacttggaggacctatgacaagggctagagcaaggaaagccaaggaagctcttcaacaagtgctgttcatactatctgaatacaagcccaagtttcaaggagaaaagtccaaggttgtgagttgtatcatggcccaaatggaggaggactaaatgacaccacctngtctcaantttagagtgcttacgttggctaaataatggccccatccttgtaaagttggctg

SEQ ID NO: 225961 - DNA, 419 bp, Glycine max
tgctcaaaactagaggataacggcttttgatctcatttcgctcccgaatatgacagccaccgttttatgagtgctgagcaccagcagcgcttcaaggccatcaagggatggtcatttctccgggagcaacgcgtccagctcatggacaacgagtataccgacttccacgaggagatagttcgccggcgttgggcatcactggatacccccatggccaagttcgacccagatatagtcctcgacatttatgctaatgcttggcctacagaggagggcgtgcgagatatgcgatcctgggtgaggggtcagtatatcccgttcgatgcatatgctctcagccagttcctgtgataccctttagtgctggaggagggccacgaatgctagtatggccatagaatgaacacggctgatgggtt

SEQ ID NO: 225962 - DNA, 468 bp, Glycine max
  unsure (1)..(468): unsure at all n locations
tgcttgtgaagattctatggaggctggatctttgagctctttgttgtccttcaatggtgatntttcaccatggagatgcagcggaaggcaaaggagaagaggagaggggaggcaccatccactatggaataagccaaggaagaaggagtttcaccaccaagaattgtcttggataagaagcttgaagaggatgctttaatggaggaaaagaaagagagaaggggggagcacgaaattgaaggaataaaagagggaaagaagtggaactttgaagtgtatctcataagactttcattcatcaaagttacaacaagtgttacacatgcttctatttatagactaggtagcttccttgagaagatttcttgagaaaacttccttgagaagcttatttgagaaaacttccttgagaagctagagcttagctacacacacncctctcataactaagctcacctccttgagaag

SEQ ID NO: 225963 - DNA, 394 bp, Glycine max
catgccagctctaaatcatgtccattactaaagtttaactattatcgctgacagcaccaacaggagtctcaaacgcctcaaatgctaatgccgatggcgcattgaatgccaaagcaaagaggaacaaattacaggggaaaagagcctgcgcaagacggcttaagctctttacattcaacaacaagaaagagtatgaacggatgaccgcccaagaaacaaatttactaccattgcccaaggtcacttctatctttaaaaattataacttacatagatcgaccctttctattattacgacacaacctgctcctgctgaatcctctcgcttgcctcttcacaccatgcgttgctaatccagataatcgctggtttcttaccacctattcataccacc

SEQ ID NO: 225964 - DNA, 468 bp, Glycine max
  unsure (1)..(468): unsure at all n locations
tgagggatgaggggaaaatgtttagaaactcatatgatatgatacgtaggtgcatatatttatatgctgagtgagacacacattatggggcagagagagcagagcccaacaccacaacatgccccatccacgttgcacggaccactaaatatcatcattttttttacataaaataccttcgtatcaccgtttctgttgagttatttttattttatcagaaattcttaatttaaatctatccatgcaattcagttaaatactcaaaaacataattatatcaggtattatgttcttattccacctaaatatattatttcatgtgaaaaatacatgttgtctacagaaaacaattaaaatacattaccgcacgtgtaacaatatatattaaataagcattaattatattggcaaattactatgtaacaatcgggtggtcgagtagatatgtngagtatacaagcattatat

SEQ ID NO: 225965 - DNA, 430 bp, Glycine max
agctttgaccttttataaagtaatgaccagttttgacttactcattttaaacttgatttctatttatttgcacatgttttgaaaatggttttttatttgatttaactaatccttgaatttgtctgttgaagataacagtactttctacatgtagtcgtagaaagactacaacttatgaatggtaaattaattaaccctctcttaacatcaattactcattgtatatacataatttttattactcattattagcttttacttaatttaatattatataagtatatttattcactattagtaatatagataatttttattactcattgttaggttttaattaattaattattattttattatatttattgattattaaaaatataaataacttttagaacttattcttagttgtgatatataaacaattatt

SEQ ID NO: 225966 - DNA, 406 bp, Glycine max
  unsure (1)..(406): unsure at all n locations
acgcgacactatgaaactcagctttacctttcatttaatccttagaactttccggccaacattgtcatagataaagcaatgttgatgttcaaaggatactttaaatcccttnttaatcaactgacctacacttatcaagtattggtcaatgttaggtacataaagaacatctgatattaatttgatacctgaacacgttgaaattgcaatagttccttttccttttactggaatatagccaccatttccaattctgacctttgagacattagttggcttcaaatccttgaatagatagagtcttatcatatgtcatgtggtgtgtacaaccactatcaatcaacaaactttcacttgattcactactcaagaagcatgtgaccataaatagttgatcctactcttg

SEQ ID NO: 225967 - DNA, 482 bp, Glycine max
  unsure (1)..(482): unsure at all n locations
gtaggatatggggtacccatcacatgtggtactatgtggcggtcgggctattgtgtacaacaagttttccacatccacaatgcgcgcataaacccaccatcccctgtngcccacctccaactgagctcacgtactcccacgtagcccatatcctcgtttctctcaacaccgggtccccatcaatcctcccaagcttccacaacatccaagcaaaacaacattcaaacagcacaagctatcacagccaagcaaaacagagcaaaggcagaaaactctgctcaacacatcaaccaaaatcacaggttttctcacttaaagaccacagtaaaaagtccttcgatccaattcgttaaccgttggatcgactccaaaattttactggaagtctatagtgcataagcctacatnttgaccgctgggatctactagcaaacatngagaactcattctgcactatactnttcacagccaaccacacacaa

SEQ ID NO: 225968 - DNA, 238 bp, Glycine max
  unsure (1)..(238): unsure at all n locations
ataaaaacaaggataatatgcctaatcatcatggatcaataaaacttttcaagatcacaccttgaagaaattttggcttgggttgctctagtccttccttttttttggcgggagtaggggagcgggcatacagatttagttagtaatttaaaccggcgatcacttcccatccnctcacgtcttgaccaaattactaatcgttgccttcctttttactctttaccataactctgtacat

SEQ ID NO: 225969 - DNA, 433 bp, Glycine max
  unsure (1)..(433): unsure at all n locations
agagcttgnggccattataaggcttttttacaacttgagatcttaacagaaacacttggtaagtttaactaaactgtctactggtcaaccttcccattcttctgttttgcaggttatacgttgtaccatctatggtgaggctcatgaattaagtcattgtattcccattgaagaacacactcacgaagttcattacatgagaaatcaacagagacaaggatacaatcaaggaggattttcaggattccagcaaggtccctacaatcagcaaggacaatggagatcacaccttggaaatcacatcaataaggaccaaggtggaccttccaacaggccacttcaacaaggaccaaattattttcagagaaccaccaactggaggagacactaacttagttatgcacgtgaccatgtctaccataagagactgagt

SEQ ID NO: 225970 - DNA, 451 bp, Glycine max
  unsure (1)..(451): unsure at all n locations
cctgttgcatgcaagcttggtttgtaatagtaaagcttgtattactacaatactccttattgttgnttttgggggcacttcacatccaacattcactgtatagagcaacttgtaacttccaaattcatgtatttaagcatagctcccatgccattctaagttacatagccaataaacaaaggtgaatgagcttttactcaattaagttcctttatgggtgcaaagttgatagaacaatcctctttatggccactatcaaactcattaattagtgtaatcaagatacttgtattaagaagaatggttttattgatgaccattcctctttactgattaggctaaaaacaaacattaagcatagaagaagaacataagaatcttaattgaaaagaaacaggtaaaatacacaaagggaccattcataaatccaacaaagaaacaattactctga

SEQ ID NO: 225971 - DNA, 401 bp, Glycine max
tcaagtcaagctgaaatatggatatttaccatcctgtttaattgggcaaaagatgaatcgagtcacatcactgcttcgtctactgccaaacatatttaggattattgatgtcctcgttacttccagtttcaccttgacaaagatgtcatggaccatgttgaaaatctaaattgattcaaccccatatcctgcgtaaaaaattcgcaatacttcgactgtacatcattcgcatgcatccatgcttttcattggttgcattgctcattgcattctttccttgaaaaataaaataaaataaaatgaacttatcaaaaagaaaaggagacgctttacggcgcccttaccgaactcgtgctagagctagagtaatgggtgaagcatagaaggtgcaagagaagatg

SEQ ID NO: 225972 - DNA, 464 bp, Glycine max
agcttgacatccttgtgagggtgcttctttaacaataaactgactgttgttgttgttatctccatcaagatcttttcctctagacacagtcaggtgcttaacccttggtggctaagctttgataccaaattgtaaaggcaaatatcacaagaaaagggttgaattatgattttaagaattcttctacacctttttctaaaacaaaaaattattgtttgaaaataaccttgaaaatagataacagttttcacaaataaagactcagacgatagaaacaaatatgtgttttcaaacaaaatcaaattcaaaccctaagtcaatttaaacatagagagtaaacaaactatcaaacacagagatatataccggtttgtctcaaccaccaagactacgtctagttcatggtaaacaccaagttccaccaactttgtcaaagttacaagtatttatcactcccacatatg

SEQ ID NO: 225973 - DNA, 453 bp, Glycine max
  unsure (1)..(453): unsure at all n locations
gaccccangcctaaaccagcaacctctccatcttgcactgcaatcctgtaagttttggttaaggattgattgtattgagctatagcttgactctcgcctgtaaatgatgcaacctgcattggaggaatgtgtatcttttatattctactgtctacaaacatgtaaaagaacaagattgacaagttccattatgaagattggcatacttgtcgaattgaatcaattgtgcgctctactacagttgctgcttcagaataagctgcttgtccacgggatgccaactttgcaaaagcaaagctcatcatggaaccagagatgacaagaggtggaatacaagatagaaggacaagggttagaagccaacccttgatgaatgctatgactaaactctctaaaaaacatgccacacacttgtatgaatttcctacctagtattatcacacacaggataaa

SEQ ID NO: 225974 - DNA, 299 bp, Glycine max
tgaaagcattatttcaatggtaaatgctagagggacagtatggtatgtggctcccgaggtgtccaccaaaatgtttggaggtgtttcacaccaagttgatgtttacagctatggaatgatgctgctacaaatggttggagggcagaagaacatggacgttgaacctagtcgttcaagcgagatatatttcccgcagttggatatttataataagcttgagcaaggcaatgatttgggacttgatgggatattgtccggtgaggaaaatgatatacccaacagaatgactttggtgggtt

SEQ ID NO: 225975 - DNA, 396 bp, Glycine max
aatctcgcgaagatatgcatcgctagcagtaagaagctgtctcactaacatattttatttttttctctatatctcacttcttatcaccttatgtcacctattatctctataattttttttctcctttttggtctctcactagtaggtgttgattagcatgttgaatgttcaaacatatttttcctgagaaaaattcctacacttggaaataatagaaatctattacattgaaacaggtttcagatagataatggatttgcgtacggtaccaatgagtcaagtgtcaatttgagagtgaaaactctaaaattatctatctctgagctgaagaaagagtatcttttgcttgtcataacaaattacacactcaaatactctcccactcgaaactgaagt

SEQ ID NO: 225976 - DNA, 383 bp, Glycine max
agcttcttgtggatcgcctgagagagcgtttctatatactcggaggttcggggcgatgaatgaggttcggacatttccgatcggaatccgaagcagaatcggatgaagcgaacaaaaccctagcgccctaatttttccgatccagacgtggcttgggcatttttctagcgacggaaggaattaaatgttgacggagaaaggttggtttggttttggtgtgttaattaaccgaaccggaacgcaaccgcttttctacgatctttgttttgaaaatgaagtgtgtagaaagaaacgtggaaaagaagaaggttagatagagtgtggcaggggtttgttttttatgcagaaactaaaaaactaaaatgcgtttgtgttttactgga

SEQ ID NO: 225977 - DNA, 412 bp, Glycine max
  unsure (1)..(412): unsure at all n locations
taatgttttcttttcaatattctcagatcctacagaatctcagcttccctgactcttggctagtaattcttaacccggttntcttaccttttatcattaaggaacatgagtaatataaacaaaaaatatgcgtgtaaacattcaatccgatgcccacatgttgttctcaacatcaagtaaattttcttctgagatgaataaatctaatttgggcatcactaaactctaattttctggtgcacgtcttaatcaatactcgatcatcttctactggtttcaaccctatctttgatgacaaggaaactntntctagtcaatggttctttcgctaaataggcaaacgtcacgtacttaatgtatagtctcanacatacagccagaaataaaantgttatttatctataagattatc

SEQ ID NO: 225978 - DNA, 420 bp, Glycine max
  unsure (1)..(420): unsure at all n locations
agcttgcatggcggagctaggagttccttattctaggaacctgngtttcaccaggtaattaattattcacctaaatatgtttttagtttctctaagtttattattttattagttttggtttcagtatgaaaaataaatttaagccttaattatttaattntattgtatgtcaagtaataatatcattattaggagtgcttggtgatttgattctttatttattgaagaatctgaaatttgcatcatcatgtatatttcttccttaattgcttatgcagtatgatgtgtatggggaccttntaggccttctgggggcgcatcctgtggctccactagtgacattgcaccatcttgatgtggtgcaaccaatattcccaatgatgaatcgagtgccatcttacaacaactaatgatatctgt

SEQ ID NO: 225979 - DNA, 398 bp, Glycine max
  unsure (1)..(398): unsure at all n locations
ntatagaaatgctcaagctccttcttattccattgtgttcttaacatgtcagtcaattntctattgtgcaaatcattgaaattaaaaaaaattataagttaagaaatagaatccataatgcctaaccaagttaaccaaatttttttcaatacctaagtatacattgacaaaatgctaaataaaattataaaactggaggagcttgagcatttctataaagcttactgtaaatatgggaaagattggaagaaggttagttctagttagtcataaggttctttttattgaataaaggctataggtcaaatttcacaatcaagatttgggacatgctatgtgcacctcacaaatttttggaatgggcaaaaatgctcttgtgccacattgtttatcggaag

SEQ ID NO: 225980 - DNA, 395 bp, Glycine max
agcttatcttacctatctatctcccaaatgtctttgcaaagattcaatggataaaaaacatgaagttctaattcaagatgttttctttgttgcatgggcataatgcaatcactctatgtctagcaatgattttattaagatgtccctacctttgagttctactaaaaattatcctctctcgagcgactaatccctaaaactgatgcatataaaaccttcaatgtatttctactaaggattaccctctttcaagcgccaaacccctaaagatgatgcaaggatgaagcatataatacatttgttggcattttaggcctgccaagccctaactaaacgggtttagcctttcattgtcatgagagaactttacactttagggggttgatatgaatgga

SEQ ID NO: 225981 - DNA, 358 bp, Glycine max
agcgttaatggatgtatagaatgacagttatagagagagagagagagagacacagagagagacacagagacagagactggtctggaaaattgaaggaagggagacaagttgaactttgaagtgtgtctcacaagactctcattcatcaaagttgtgaacagcgttacacatgtttctatttatagcccaggtcactaactaagatgaaaggaattttattttcatttcatgtgaatctaagaggaatattctaacgatatggcaaaggaatcttacaatattccaagaatatgcccaatgcctcttataatatcccaataatatgccaaaggcatcttagcatattccctttagatgt

SEQ ID NO: 225982 - DNA, 442 bp, Glycine max
ctttccaaagaggtcttcggcattatatttaaactcgtatttattgtcgataagtacctttgcgacaacgtggtccatgcatctcaccgacacatgtagagccttgttgtgtcctctcccctcaacgggaatctcttcttccgcaaacgcgatataattgttggtggttatatgattaacgatgccctcgaaaccctctactgagatatcatgtgctacatgggcattgttaacgaccttcatcaacagcgcacgatgaggcatggattttatgagtaggtcaagctaagagaaccttgctggagttttattcagatgctcgactaccttaaactctctctgttggatgacgcggatgaactcatgggtcttttacagagtcactgattttccttgaagaccttctttcttttcagctcctcttgccactataagatctaac

SEQ ID NO: 225983 - DNA, 376 bp, Glycine max
  unsure (1)..(376): unsure at all n locations
attttctaccatgttgtaattggccctgtctttgctctctgacacaccattatgttgtggtgtatatgcacgtgtaagctctcttcgaatgccatgttctacacaaaaaatttcaaattctttggagcaatattcaccacctcgatctgtgcaaagagtctttatagactttcctgctctattgtcaacacttgctttgaagcttttaaatgtaaaaaacacttctgatttttcctgttaaaaataaccccaagattntcttgaaaaatcatcaatgaagcaaattaagtatctcttacctccattagaagatagcgttattggaccacaaatatcagaatgcaccacgtccaagacattttttactctccatgac

SEQ ID NO: 225984 - DNA, 448 bp, Glycine max
  unsure (1)..(448): unsure at all n locations
taaacttttgtttgaagactatattatccaatngcttgtatgactcttattnntgtaacgattgtaattaaattttaataatgatattgtattatatattcatatttattatttttagattcttttataattcatactttctatataagagaaatagactttaatataaaaaatgaatacttgatcatgctttttcttctttacttcatattgatcatgtgagtgagaaattatataaaagtgtaaaatttactcatatcaattgatctttatgatactgcacatgagtaacttggggttgtcattgtgatatgaaatgcatatgaggtgggggaacttgtgcacaagtatatgctcgtctttaagtctatctatatttatgaagattattatctgctttcaacatgtaattacgtgaaatgtttctcttgtaaacatgaatgaatgt

SEQ ID NO: 225985 - DNA, 272 bp, Glycine max
  unsure (1)..(272): unsure at all n locations
acaactcactctaacctttgaaagctttaagaaacctgctcaccctaattccatctaggtataatggttttatcattgctaattgaataacagtgtttagcaccggttacaatgcaaggccaaggggtcacttacggttcgatggttgattgtcaaatcgaaaaacacaaagccacaaggaaaggggaaaatggtcatttcctagaattntttggacctaatctcacccaggctaacatctaggtcgcttaggccatgaaattttttcagtc

SEQ ID NO: 225986 - DNA, 421 bp, Glycine max
tagatgactgtgtttgagtcgataatactttattatttattcggacaagtttgaatatgatgtagaagaaaatgaatgtgagcctttctcccctttgaaagacttgtaaaaaaaatgttttaaaaatacttttaattaatatttgaattttttttccttattagtatatatgtgaggggtagagggtgtcacaaattgccctaaaggggctacttttacaaacttattcctcaaatggtgctatcttaaaacaaattccagcatgggtctcttttgctacgtaaaatgcatgcaacttcaaagaaactgccagccccattggcgagtttgcccaagatgtgacacgtggctaggtttctccactctcattggcgatttggcctgcaacgggagtagccagtttgactggcgaattgcacat

SEQ ID NO: 225987 - DNA, 436 bp, Glycine max
gcaagcttgttccttatagttctaagatacaatatatcttcctatgttatgacatgtttaacatgtgtttttcctatctcgcttgtatcctataaagtccgaatctaaaaagccaattagatttaaggatgtacctttgggataccacaaaccaacattggttgtgcccttaaggtacttaacgatccttttaacaattgttaactgagattccttagggttagcttgataccttgcacacaagcaaacactaggcataatatctggttggcttgcaattaagtaaagaagtgagccattcatacctctatactttgattaatccactgaattacctttttcgtctaagtcaagataagtggatgctgccattggtgttgatgccttctttgcacttttccatactgaaatttttaattagatatgtacaatattt

SEQ ID NO: 225988 - DNA, 371 bp, Glycine max
  unsure (1)..(371): unsure at all n locations
aagtaaagcggaaataaatgcacagcggatagtaaaagagtatggaagaaggagacatatacacaagagtttttacactgattcggcaacaacccgtgcctacatccagtccccaagcgacctgcggtccttgagatttctttcaaccttgtaaaaatccttttacaagcaaagatccacaagggatgtaccctcccttgttctctntgaaaccctagtggatgtaccctccactagaactaatccacaagagatgtaccctctcttgttctcagtcaaacccaagtagatgtaccctctacttgtaccacaaaggatgtaccctccaatgcgttaagacaaagatctcagggtgtaaacctttgatactt

SEQ ID NO: 225989 - DNA, 440 bp, Glycine max
  unsure (1)..(440): unsure at all n locations
gcttcgaaaatgcatgattctgtctttttctagnggcactattgtgaagcaataggactgaacaagcacgcacacctaacttttagttcacttttttgctgccattctgcattcatagatcctctcaaaagaaatgatagccaatggaatgaaaaatcaatcataaaatacggatctagcagggaaacaattttcagaaagggaaaagcaaagggtattatatctaatctggaaaccttttacagcaataaatatttatagatgagctattacagcaagatttaagcatctacagaaatggcgaggaaactcgttgtataagatgccacaagtatgacatgttacccttcaaaaaccacaactgttattcatattacacttaactaattgctacctggctctattgactcctacaattccttcatttagtgttcctctat

SEQ ID NO: 225990 - DNA, 426 bp, Glycine max
  unsure (1)..(426): unsure at all n locations
taacagtttctnttgcttttatcggntaaaatgaacctttcaaaagtttaaaaccgaccctacgtttaattttcttgcttttaaagagctacgtaagtctgagttcctcgtcgcatttgaggatacgtacgagcaaggtcgtgctcttgtcgaccccaaaagataaaaaaacataaaaaatgaaaaataaataaatcttgaagtcatgttttgcacacttgataaaaggttgtcgtcccttgtgacggacgtatggggtgctaatatcttcctcgcacgtaaacaactcccgaataaatgttttcctagcgttttcttataattcgtagagccccttggtggtttttctaacgttttcctcgaataaacataggtggtgactnccgtgcattttccttccctggaagatgcaccctagagtctcgc

SEQ ID NO: 225991 - DNA, 409 bp, Glycine max
gagctgcaacttcattgtcaataagaatttaataattgagccttactaataaaattaataacatgtaataaatttaatgcatatgtattgagaatgtaaaataattttacactatcattcaatcatatattaccgtttaaattactttaggataattattttaaaaattaataaatttatcatacatgataaattgtgattaaataattacgtaaaatctaaatataatgtctttttcacatataataattcaaattaataattaatatatattttttaaaaaaaatatacaaaattttaagccttaaataatttgggggctaaggcaactgtaaatgactcggtcctgtactgtgggattattaggaggaaaggagaggttgcaacgcacaccacaggctacattgta

SEQ ID NO: 225992 - DNA, 190 bp, Glycine max
ctaagcgccacactcttgggcttagcgcgacgaaaattacaaaagagagctgaatggtcctaaccaccgcttatcttttaagcacacgctttatacatctgctaagccagacaagtgcgctaagcccaaatatactaatgggcgcctaagcagtttatacgtgcgctaagcgcacgagctctactagggc

SEQ ID NO: 225993 - DNA, 364 bp, Glycine max
tcgactatttcgtgagcattattgcttttgaaaaattaattatctgtcattaatccagctctcgccgcagcttcagattgatcgggcagttgtttccatgccattatttttcggacatcgaatggattcttctgtttattatttttgggtcaatatgtatagatcgatgaacaactttattactaacaaatcatattatgtttcaaactttacaatggatatcagtttgaacgtcacattcacaactaggggctctcattctctataagaacatatatcacgaatggattgttgaaggaaatcaaaccttttattcaaaaaatccaacaacgtacttgcaagcacttgacaaatctttacacta

SEQ ID NO: 225994 - DNA, 429 bp, Glycine max
  unsure (1)..(429): unsure at all n locations
cttgatggtgttatattaaacattttttcgccatcaccacaaaggggtagaatgtgaatgctcgcatacttgattttgacgatgtcaaacaataatctcacaaggctgctctaaatgataagcctttggttcaagaataatcccagatcgcttcaacatcacaagccttgtttaaagattgattactgagcaacccttgccttaaaacaaagtgcttttaacacatgcacggctctggcaattcactaccagcatgtgtaatccggtaccacaagacccggttgacgacaagttgtcgaaagagctctgaacttgaattctcaacatgtcactcactaccatatgtcttgtatcgatcaccatcacncgtactcttgcaacctctagtctcaagtcatgcccctttactttttactgtgtatctatccc

SEQ ID NO: 225995 - DNA, 322 bp, Glycine max
agatttatattgggttggcaacaaccagtgtctatatccatccccaagcaaccaacggttctttagatttctttcaaccttgtaaaatcctttacaagccaaagatccacaagggatgtaccctcccttgttctctttgaacaatcaagtggatgtaccctccacttgaactgatccacaagagatgtaccctctcatgttctcagtataacaacccaagtagatgtaccctctacttgtgtcacagaggatgtacccttcaatgtgttagaacgaagaattctcaggctgttaagtctttgaatctttgtaagcggaaaca

SEQ ID NO: 225996 - DNA, 273 bp, Glycine max
  unsure (1)..(273): unsure at all n locations
agcgaccacaccaataaactagcancgctttatgcacgtatgtaaacaaagaaagaacgagcagcacacccataaatcgcaaacctaccaaaaccccccaccggagtggccacaaaggcaaacagaggttggcaacctaaaacctgcaccccgccctgccgtggcggaaaaagacgaacccggatgatgctaagcaagccacttgcaaacaaaggcctggcataaaaaaggggaaatcaccttgcgccacagcataacagtgagaagcaaaac

SEQ ID NO: 225997 - DNA, 403 bp, Glycine max
  unsure (1)..(403): unsure at all n locations
cagtatgtagatggcactgttattntaaaaaaatttggacatacgtctcatgggtattaggtacttgagtagcctagttcattgaaatttcaatctaatagttgcaaatccccatcttgattcttgactgtattgttgttgttgtctaaatgtgcagttcggtgagggcaggggacaggataaagaaggtgcaaatagccgctccacgttcttgagtgtttgtaatttgctttatttatggcttcgggaaaccctatgaaaatgtatttttctgattctgcgtttaatcatgtccattatctgataattatttgcttcaatactttttcattattgtgtctgggaggggcatgtttaacgcagatntatacattntatgtaatgtaaatagataaaattattg

SEQ ID NO: 225998 - DNA, 349 bp, Glycine max
  unsure (1)..(349): unsure at all n locations
actcatgttagttcacgcgnagcaggaacattgtaagtattgtaaattacatctcactgaagaagttggaaaattcttattttgttttgtttttccccttgaaatggtaaagaaaacttcacaatctcaaattttaagacttgaaccctccccctcaatttccaagcttcatattcaagatcttttacttgcacatcgatgttaacaagactgatcacatcctgtataatatactgttttagtggtgacacaagattgagtcagtcctgtgcactaatatntagttcaaaaactgcaatgtacacataatctgactggtccaacttcatctgattgaaccaaatccccg

SEQ ID NO: 225999 - DNA, 372 bp, Glycine max
  unsure (1)..(372): unsure at all n locations
tccgccattgatgaataacacatgtcgttgcaactgatttatattctctaagncgtttacttctctgtttccttatgaattcctgtttcgatattagtttcaaatgaatggggagatgtcgtcaagtatttgtgctgtggttatggatgtttttgcagagaaagggctctcataggaagcataggatgtgttttacaaggaaaggaacttatcatggtggaaaaaggatgttttagagtgcaatttcatgatccaaagcgtatggcaaagccaaactttatgacaaggttgtttctctctttaaggggatgaaaaatcatgggacttggcctaatgaaagcacgtataattcccttgttcacatgctgtctg

SEQ ID NO: 226000 - DNA, 411 bp, Glycine max
gcaattacaactcattaatatgtttaaacaactatatatataaacatactatacaatcgaatgaaattggaacagagataccatctatatgctgtatctaatacattcatggtgaaaacaattttgaaatatgacggtatccgactatatttttcggtgaaaaggaagttattatatttttacaatatatttttatagcaagtttttacatttacccttttcttttatctctctattatacgctatttatctcattctgcactttttttcctttttttatttcacttttaattatataaaaagtttaataaaaaataaaaataatacttctctaactgaattgacatctttttaagggtatggtctaatatgttctttgccattataagataatacgtgttcccagattat

SEQ ID NO: 226001 - DNA, 294 bp, Glycine max
acattttcctgatatgtggtcttaagatggaaatagatttggtaaaagtcttcgattaactccttggccccaactgtcacatcccactatatggatgatttacaagtctcacgatcattaatggtactattgtctgaaagatgagccaaacctgtagtgacaatacagtgtctggattgttttttaacacaagagctcctttcctgttggctttgattcttatgaatatattttattgagagttttgttgatacacactcttttgcttacctctttttgaatggttcaataaag

SEQ ID NO: 226002 - DNA, 414 bp, Glycine max
  unsure (1)..(414): unsure at all n locations
ccggcatgcttttaaccgacatcggacggtgtatagccctgactgatattcttcaaccgacattgcacaatattctttacaaacgctggtcgataatattattttacggtagaggatgcttcttagttcggtggtgccgcaaaaatatacaatggacgtcagctaggttttttagttcgagctcaaccgaagttatggttcgaccgacagctgaatgttttcatttgctcagcaacaaaaacattagctcacctcggaaaaaaacttgattcgtcgatactgatcgnatcataagctagctgacgtctacaaggaagaacaacgatcgaggtttatacaagacgcatcactggatgacgccgatcaacattttcttcacacatcatcaaaattattcaggagtgatagaaatac

SEQ ID NO: 226003 - DNA, 322 bp, Glycine max
  unsure (1)..(322): unsure at all n locations
actttcgagacacatattcancaccttcttaatttctcctttttacctgaaattgaagtgaaacttacattaattccatgaggaaggtctctactgagcaaaaataaaaaataaacaagaaatatttacaatcctgcaaaaagaaccataaattggggaaaatatatacatttgggaaaacttttctatacaaaagttagtcataaaagacgactaacagtgacgttgtaatggcctaacaccttctgaagttggctattgcaaaagtgagagcccctatcactaattaggatcctcgacactcccaagcgagaaaagatat

SEQ ID NO: 226004 - DNA, 446 bp, Glycine max
tcttccacgccaataggttctatctcagcaagtaatgttatatggacaaagtcaccatcagctgtaatcaaggaatctgggaatatctcatagtcatccagccttgcaggggcttgtctatttctctgaggtctcgttgatactgcttcatcatgaacaacattgtcttctgtccctacatcagtgtttagaccttcaattttggttctcaattcagatgtgccttgcttatcactccaattccaggattgacccttatcaaacttcaaatctctactcaacactagtttctgagtttgaggattaaaaaccctgtatgcaccagtagaatggtactcgagaaatatgagtttctcactcttgtcataccaatttctccttattgcatctggaacgtgcttatagtagatagacccaaagattctgagatggctcacacttggtct

SEQ ID NO: 226005 - DNA, 399 bp, Glycine max
  unsure (1)..(399): unsure at all n locations
tgagattcatatagggcatatccatgtgagaacctctcttattatgaatagtcagaactacaaatccataccgtccaaccatatataaattatcaaaattataagttccactaaaaaatgttgtgctttctttttaaaaatcttaacattcaaatatgatctagcagtctatattcatagtttcatttctgacaataagaagagttttctcatttgatatgctccctatatatatattcatagtctctctccattggccttttgttagcatgtagaaatgaatatcagtatgatcttgaatgcaatgcttaagatcatngtaaagtcacactcaatggcggaagaagatggatgccaccggggaagaaaaatttgaactctgactaatacctcatatta

SEQ ID NO: 226006 - DNA, 368 bp, Glycine max
  unsure (1)..(368): unsure at all n locations
cttttagtaatatttttcaatcaaaattaaattacgaacaccttaccgtaataccgtaattttgtaagttcttttaacaatattttaaaattggagtttcacttatgtaattcatgtaaaaaaattattatttgaacatataagtcacaatttaattagaaaatcatccaaaaaaataaacaaactaggaaactagcacataagtttcgtgactttgtctaataaaaatatatatatctaacatataaatttaattgtaaaaactacatatctaagttntgccactgtctcttttcaaaaaaaaaaaaaaattgtggactttgtcactggtaaataaaacatctaagttccaactcatttcatcacat

SEQ ID NO: 226007 - DNA, 331 bp, Glycine max
  unsure (1)..(331): unsure at all n locations
gatggcgcatcctttcacctcttctcctttgtattccgctgcatctccatgggggaaaatcaccattaaatgacctcattgaagctcaaagatcctgcctccatagaagcaccacaagcaagcctccatcacatgggtaccagccccgcatgggtttgggctggaacgatgatggtgtggcgagcttaatagagttcatacgcaaccgcggaaggttcgggctgggatatgaacctacacgcactgatgtgaagagaattttcctaaaaaaaaagagaaggagcatgggccacccgngatgaccgcaagtgatagggattcccttatgttg

SEQ ID NO: 226008 - DNA, 296 bp, Glycine max
  unsure (1)..(296): unsure at all n locations
ttgcgttgaccaaaaaacagttcttgaatttactatctcgttaattgttatcaagctcacaattattgaatctgtgttaacatatcattgcttgcatttttcttctgccttgatctctgctattgtaatgaaaatccctaacatcgggattctacagttataacacagactaaaatatagatttgatggtctaaataatagagaattaagatgaagcaaaaatcaatattatagaaataatctattaaaaaatctacatcttgaatttgtngagattaattaacacatcaatatta

SEQ ID NO: 226009 - DNA, 427 bp, Glycine max
  unsure (1)..(427): unsure at all n locations
gagtcgagaattctttattatttatttggacaagttttaatatgatgtaaaagaaaatgaatgtgagcctttttcccctttgaaagacttgtttaaaaaaaatgttttaaaaatacttttaattaatatttgaatttttttattccttattagtatatatgtgaggggtagagggtgtcacagaacacctgtgtcgttgccaaagagccatattccaaccaatttctaagcatgagaacccccactcactagtagcttcaatcccttcttttgtaagcagaaatcatcttagaaaagtttctcatttatggcacatgaacataatgaccctaaataaaagcatcatttcctcataactaactaaacattcacactcgcataatagcatcccncaagacaaggaatgattcataaagaacaagaaaat

SEQ ID NO: 226010 - DNA, 446 bp, Glycine max
gactagcttatgcatctagcgattatttctctaccttcatagatgagtcagtttaagagctgttatcattgtcagaatgagaaatgggctcttaatgagctcattttatactgtgcaataataggaaaggcttgaacactaaaggactgatagtgctcacattgtaagtacctctaaagacaagggctacttaaaataactgatgagcccaagaatgaagctactaatggtccagcacagaagaaacaaaatcaatgagacaattgtttcttttgcagtaagcctggacatgctaagaagaaatgtaccggatatcatgtttggtgtgcatagaaagggttgtctaagctatctgaagccaattgattctgacagacggatatatgttggacatggtaaatccgtggacgtgtgagctatagggcatattacaaaattaatatgta

SEQ ID NO: 226011 - DNA, 366 bp, Glycine max
taaccaccgtggctgcagcttggaaaggtgttttaccttttcctaagccaatctgctggtttagcgagcgtccgctaagcgcaacactcatgggctaagcgcgaggaagactctggaagaagatgagctgtacaggtttgctaagcgcaccgcttcatctcactaagcgcaccgcttcagttcatctgctaagcgagaaagacacgcactaagccaaaattcactaatgtgcactaagcggtccataagtgtgctaagcgcacgagcacgaacaaggccacttatttaatcctgaaatcatattttagagagggagtttggattgggatctagagctttacatgtctaggggttttagagagagaa

SEQ ID NO: 226012 - DNA, 440 bp, Glycine max
  unsure (1)..(440): unsure at all n locations
tggaggctagagttttagctttaagaactctttttggtgatttcaaccatggagatgtagcataagataaaggacaagaggtgagaggaggagccatcctttatggaataagccatggaaggaggagcttcaccacccagagagtgccatggataagaagcttagaaaggaagcttcaatggaggaagagaatgaaatatagagagagagagaggatgggctcgacattgaatgagaaacagagggagagaagttgaactctgaagagtgtctcacaagttttacattcatcaaagttatgacaagtgttacacgagtttctatctatagcctangtcattaactaaatgaaagctttcttgagaagcttccttgtgaaactgcttttataaaatttcttgagaagctatagcgttactacacacacccctctaataact

SEQ ID NO: 226013 - DNA, 372 bp, Glycine max
  unsure (1)..(372): unsure at all n locations
aaggaaagagatatataatgtcatctagccataaaaaattatcattacataattcttatattcaaatattctctttatcgccttacctctatttcttctcataagatgaaaatgtcttttaaatactaaattaataaacttaaaaaacacattaatggcggatggcagaaggccaaaattctgccagatacacacgccattgcgccttatggtgggcctcctctcacaaattgcctatggcggctggcaaaaaatccaccatggccactatttaacaacacttgaacaagccaaacaaaagctctatatttttccaaccagccaagcctatgttttaatcttaagccaaccttgaccaccatatntttatgc

SEQ ID NO: 226014 - DNA, 414 bp, Glycine max
gctcacattggcatcacccgcaaaatatatctgacttcaagttatgcagtctgcaatttcgttgcataactgacgacctaaataggttgtcatgtcaaacaaattttaaaaactaaaatataaataaatgttaactaatttcgtcctattcaataatatcatatgtaaaaaaccttattcaccaaacaaaatatctaaaatatccttaatttaataagagttttatttttaactacgtttttttcctgtgcagttaaatgtaaatgatactttaagaaaataattaatgtttaaatgagactattaaaattaaatgatgttaacttatttcttaattagcatgcaaattcttttcttcttaaatttagtcttctcaacgtagtggtggataacaaagtttaatcattataaaaa

SEQ ID NO: 226015 - DNA, 408 bp, Glycine max
  unsure (1)..(408): unsure at all n locations
taagtcacctgcggcatgcaagctngtacatatttaaacaatnntntttattaaatttacaaatacaataatctcattttctttcgatcatcaataatattaattgtataaaataaaattaaataatgtttgtcaataacatagatatttgtagtaattataataacaatcatatcaaacaaaaaaacatgtccaacaattgttgcaaatcttttttatatatttattttcttatatatgagttaacttttgttacattaaatatatatatatatatatatatatatatatataaagcnccaggatatggttgaaagtatataaaaaattatgaatgtctaacaaagatacaagggattatataagacaaaaaaaaaacatgtcaattgagaggaaaagattgaaata

SEQ ID NO: 226016 - DNA, 407 bp, Glycine max
  unsure (1)..(407): unsure at all n locations
cagctttganatcaaactctgccactgttaatcgattaccatattcctgtaatcgattaccagagagtaaaaactctggtaacttagaaaatttggagaaaaactcttttgaaaaacaaaactgtgctatgtttttttttttaaaaatcttttcaatacttcccttgtgaagtcttcttgatttcttctcttgaatcttgaattcatcttctcttgaatcttgaaatcaaacttctcttgattcttgaatcttcttgatttcttctcatgaaacttgaaattaaacttgatcttgaacttgttgactcaatcttgaaatcattctttgggctctttgtcatcatcaaaactacttgaatcaacttgattcatcatcatgaagcttgcttctacacgtttttcatctt

SEQ ID NO: 226017 - DNA, 401 bp, Glycine max
ggcctgtttatttgtaattatttagttaaagtattagagatggtggtttcatttcacatcataaaaaaggtcaacattgtcaatactaattcacataatcctgatgatctactaattatcgtttgttggtgaaagtggcaaagatttatgctagtatgaaatattcgagtcaattataatactttctttaacctaaaactaagaaatatatatgttgctcatatagtaccaagagtaacactttttccctttttctcttacagggaacacttgatgatggaagagttatcgctgtgaaacaactatctgtacaatccaatcaaggaaagaatcagttcatagctgagattgccactatcttcgctgtgcaacatcgtattcttgttacttatatggatgtt

SEQ ID NO: 226018 - DNA, 443 bp, Glycine max
  unsure (1)..(443): unsure at all n locations
gggagaggatgcttcatggatgtgttgatagagggttagaatgagagaggggggagcacganaatgaaggaagtaaaagggagagaagttgaactttgagttgtgcctcacaagactctcattcatcaaagttacaacaagtgttacacatgcttctatttatagactaggtagcttccttgagaaactntcttgagaaaacttccttgagaagcttctttgagaaaacttccttgagaagctagagcttagctacacacattcctctcataactaagctcacctccttgagaagttttcttaagaatattcctaaagaagctagagcttagagacacatacctctctaatagctaagctcaccttcttgagatgagaagctagaagcttactcacaccccctattaaactagctcacccctgacaaatcatgaaaataaaaa

SEQ ID NO: 226019 - DNA, 308 bp, Glycine max
  unsure (1)..(308): unsure at all n locations
attcctgcgaattgtattgggtcttaaattgggcaaatccttgctggaccgtntttgggaatatctctgggattggtccaaagaagtcccaccattgcaaaaaccaatngggaaaattgcaaattgtgctggtcttgaaatatactacccatgaatgcttgaagcgggtattttggtgccaaaacaccttattccaagcatcaacgtaatcccaataggtataacctaccggatcaaatggaactgaaaatttctttcctttgttcaagccaaaccatagtgtcttggttgaagaacttttaatattt

SEQ ID NO: 226020 - DNA, 363 bp, Glycine max
ccctgcttacagtgttgaacttattcatcaacaactctggttatgcaaaaataattctttctacaaatttgtaacgagtttattcataaaatttaatcaagtcataaagttcacaatattgtgatgtgtattagattcagatatctaacaaaaaataaatgatattgtttataatttataaagccatgtaaaatgcatcaacacaggggagaagacacaaatattcacaattccattcgagcaaatattattttagatcatgatgagcatgaataatcattgttgcagaaatctataaaaacccccaaattaactcaacacatagaggggtgaaatctaacacagaacaaaagtctaacacac

SEQ ID NO: 226021 - DNA, 265 bp, Glycine max
aactcgcctgtgcttttactttcatgcgttaagtaccaaagccattgatccacgcatgtttgatgagttggaaaatgagcgccgccactttactgtgccagttggagatgtattttccccctgctttctttgacatcatgattcactggattgagcatctggggagagaaaccaaatgttgtggtcctgcttatctatggtggatgtacccggctcgacccatcatgaataccttaaaagggtatacacattatctatattcatc

SEQ ID NO: 226022 - DNA, 268 bp, Glycine max
tgcttaatgatcttttatgactaattgatgtatgtgatgcttaatcacatactgaatgccttatgctaaatttcacttagtaatttaattgacgggtggattaactggcagaactgactaacgataaactttcgtaacctacgataagagacatgcttgcgaatcatggagaagcaacatgctgtaattctgataatttctaattcacatttattcactgtttaatttactaaagcaaacaacccctccctccacttctccaagttgt

SEQ ID NO: 226023 - DNA, 445 bp, Glycine max
agcttgtactagtcttatatatgttacataacaacgaatgcatagaactgaatcgattattgcagatacagaaatacttaaacaaacctggcaattaggggttttgcggctttttgcaaattccgcccatgtttctggatcaaggccatacttgactgtaggatcagatatttgctgaccttcattgtcagcaaagacaaattttgaagtcaatgaagacttaaattgcctccatcttgctgcaactgttgacatcacctttttttttgcattttcaccttcagggatatcaaatttgggctgcacaacaaaaggagttatgtaacagtatgtaaatgaatcctttaaaagtaacttaccaacaaaatcatgaatacaagtgtatttagaattacttaccaaaatatctctccatattaagctctttagatcgtcggggacaaca

SEQ ID NO: 226024 - DNA, 451 bp, Glycine max
actcagcttgtaaggattattgaatattttgtatgatcttgtaatgcaaaacaaatccttgctcttatagactcttcatgtctggttaagacaaccattagaagagttatgacttttagaaaaacttaaaaaccaatttgaaaaagtcaaaaactatttgaagagttacatcttttgattttattcagaaacaatcactggtaatcgattaccaaattagtgtaatcgattacacaaagcttttatctgaaagggtgtgactcttcacttttgaatttgaatttcaatgttcaaaggtactggtaatcgattaccaaaacattgtaatcgattactaacttttgaaattaattggaacgttgtaaattcaatttgaaaactttttcacaacaactttgctattggtaatcgatacaacaatctggtaatcaatttacgtgagaggtaaaac

SEQ ID NO: 226025 - DNA, 385 bp, Glycine max
  unsure (1)..(385): unsure at all n locations
agtctttaagntctcctttttgataattttcaactnggagagccaatctaaccctcgtgtatgaactttcagtcattcatgataaccaccgatgatgccattacggatgcccctaagttctttatctttccttaacagtctttcccacgccttgtggactctttgtacaatcttgaaactttgcgcgccgaaatctttcacaaggaaaggcgaaaggctctcttccgtcggtgcccccctcatggggtaccctaactgtcttatagcaagtgcgggattgtagttaatacaagccctcatccctatcaacagaatgtttgggtagtccccacatgagaggagaactccctcattctcttccttccatcgaggaaaccagttgatt

SEQ ID NO: 226026 - DNA, 419 bp, Glycine max
agctttaaatattgcatgttacatcatgtatagagctttaattagaccaatcttgaagaaaactccatatgaattatataacgaaagaaaaccgaacatttcacatcttcatgtgtttggatgtaaatgttttgtgctaaacaacggcaaagataacttaggtaaatttgatgcgaaatctgataaaggtatattccttggttattccttgcatagtaaagcatttagaatttataacaaaagaactatgattattgaagaatccatccatgttgcttttgatgaaactaactccaatttgccaagaaaggatactctagatgatatttcagattctttggaaggaatgcatattcatggtgaagatcacaaaggccaaggaaaaggaaatgatgaagattttcaaattgatgaaacaa

SEQ ID NO: 226027 - DNA, 431 bp, Glycine max
  unsure (1)..(431): unsure at all n locations
ngctagtattactngtactctggaagtgcatgtntgtcttatcggactgttatgcccttgctaaagatatatggaaaatgaaatgtctttttctagtacagtttcaatggaaacttcaggagtttaatacgatttgtatgttcactttccattctgtgtacagtagaattctcattcaatattcacacggatcaagaacataaataaaaatcttcaaagatcatatntttttatttacaaaattttaggggaagaaaaaataacctcaacttagttaagatatgtaggaaaaacctttccctcataaaacaacttatatatacacttcatccgcaagaaatgaatggatgtgatttggagttataagactctaacggtgttcagataatattataaaatcaagtttacccncataaaactatggtgataac

SEQ ID NO: 226028 - DNA, 390 bp, Glycine max
  unsure (1)..(390): unsure at all n locations
agcttccagatgggtataccatgctacatgttgntccggccaagctgtcttgaaagaaatggaccaacagcttttcgtccgtagaatacgcccccatctttcggcaatacatctgaagatgccctttcggacatgtcgtccctttgtacttatcaaagtccggtactttgaacttgggaggaatgacgatattgggtacgagacataagttcgctagatccaagaatgggtaattgccgagaccctctacttctcttaacctctcttcaagcgcctcaatctttcccttatcttccgtgaagggaacagattcttttacgggtgtgggtgaagccgcgatatggcggactatgtttggttggggtagttcatggggggagggatctttga

SEQ ID NO: 226029 - DNA, 436 bp, Glycine max
  unsure (1)..(436): unsure at all n locations
gaccttgaatctcagctttgatgacagatgattcnagaagtttgattattctaaggtgatgataaaaagctcaaaggtcaagaacacttcatgataacaaagatgatgatctcaagaatcaaagaatgagttcaagattgaatcaagaacacttcaaggttccagaggaaatttgatttcaaaaatcaagaatcaagtttcaagattcaagaatcaagagaagacttaatcaagataagtatgaaattttttttttcaaaaactgagtagcacatgaatttttctcanaacttttttaccaaagactttttactcattggtaatcgattacgagtagcagaatggttttcaaaaagctttcaactaaatttacaacattccaatggatttcaaaatgttgtaatcgattacaatggtttggtaatcgattaccagt

SEQ ID NO: 226030 - DNA, 434 bp, Glycine max
  unsure (1)..(434): unsure at all n locations
gcatgcaagctngagtgagcgaaagagagagaggctcatgcttgttgctcgtgtgctgaagngtgtgtaagctctacatgtgagcgaatatgttgaggatttgatggaacctgctatttataggagtggagcgtagctgtgggtccctgtttgtaggggttgttatagtctttgcagataattaccgacttatagataatacccgagagcttgtacataatgttagagataaattgtagcttatagataaaagctagaagataattgtaccttgtagatagtgtgtggctttatagataattaactacctaccaatagataaagatattcaaatattaataggttagagataacctgttagttagggaacctggttgctaagggccaagcatccgcgctcttgttgcaagatngacttgaagggttgacacatg

SEQ ID NO: 226031 - DNA, 425 bp, Glycine max
  unsure (1)..(425): unsure at all n locations
tatgcttctagcttancaatagatgatctgcgtggtttataatgnngatgtatctcacaccttataattggagacctgttttcccgttggtttagattttccaattgggacagggatgcagacctgttttaaagaaggacaagcgtgcaaatccgttactaccatgataattntgcatgagttcttctttatattttattgtttcagttttttttttttacttagtcaataagtgattcctacacttaaagagcaaatagtttgtaatccaaggttgctggaatcttggtaacattattttttgttagaatggagatcatcttttttatattntgcatataataaaatctatcagctatgcaaattttatgttttcttatgtaaaaatcagttagacaacctgtagtacgtaaaatttatatact

SEQ ID NO: 226032 - DNA, 459 bp, Glycine max
  unsure (1)..(459): unsure at all n locations
agcttctgcctcccttgattctggacattctggagaaagttgtgttcgtgctttaacaaatgctcccttgtcatctcatacaaattcctactcaaatattctatttaaaattctcctcaaatttatttgttgtcattttttttaatgagttgtgcttaattttgccccaaccttttggttatttatggctatgcgtgacatatatttattctttgaattgagttattcatatgcgagaagcaaagacatgtaaagttacaattgtgtccccgttgtacgtacttaagcattggtcattgtgcctatgctataacttataacaaaaaaaaaaaaaaaaaagaatgatagattgatgattagtatctctcatcttacatggtcatgtgtataacatngttatagagaanaaaaaagctagtgtgggatccatactttttaaacttattacacgttgaatca

SEQ ID NO: 226033 - DNA, 429 bp, Glycine max
  unsure (1)..(429): unsure at all n locations
tgtgcgatcctcaccatataagctggtttcatggggtttagtttggccctaagctcaaattcttgtagcttatttgaaataacatgtgtaaaggtttgggactctgttatttgtttaatatgccagagtagataagacaaaagaaaagttaatgttttatctgacaaggttttcctgtccattatgtatgtagaatacagatgatgctcaaaattcttaccaaaaatgcatctccaatgtttggcctatggtgctatactgttagtagtatttagatgttagtataagcccacaatagatgtctttcaggaggcatcgatagtgcattaattttgatctctgtctgaagatgaacagttatgtactgttaataaatcaatattcattcttgattcctttaatcattnatggacacttcatatatgctct

SEQ ID NO: 226034 - DNA, 389 bp, Glycine max
  unsure (1)..(389): unsure at all n locations
gccacctgttgcatgcaatctnggatttcctttagtagggaatctatccatcctaagatgataccaaacccagtcaccctcattaagaactatctcttttcttcctctattgcatttagttgaatacacctttgtttggttctctatttggttcttaaccctctcatgcaacttctttacaaactctgacctagattccccttctttatgaataaaagtagtatctagtgggagggggatgaggtctaatggtgttaggggattgaacccatagacaacctcaaaaggggacttcttggtggctctatgaacccctttgttgcaggcaaattctacatgaggaagatactcatccccagacttactgtttccttttagaagagccctta

SEQ ID NO: 226035 - DNA, 442 bp, Glycine max
  unsure (1)..(442): unsure at all n locations
acattccttcaatcactagaatcagattgtatttangtactctgtattattgaacccttactttaagccaatggcgataactctcatccgcaccacaacttatttttcctaagtcttttcctcttttgataactcgttcccatgtgttcttcatctntgaaaacatttatggacttacttgttctacctcaaaaaaggtgtaattgactctctatcggtgggcccaacatgggataaccctattgccttaaagccaaagagggattataattgataaatcatttggtccaatgagtggtatattatggtagctctctcattagtagtgacttctcccatattactacactntggataccaactaaatgtctcctctatgaaatctgtcaaataatgagtttattacttttgttggaaatatgcgaatggcaagccacacaca

SEQ ID NO: 226036 - DNA, 459 bp, Glycine max
  unsure (1)..(459): unsure at all n locations
agctntcttacatgcatgccttattacattatatctcaatattcgtagctaatggtttgccatgtaaccgcctaacagaatccattattcctaactaacttgaacacgtgcttaatctagtaactcacacgtagatgtgaacctgactagaagcggatcgcttgatagaggctgtagagtttttggatgacgccacttccagtgaaggaagataagtcagggtagacgccacaaggattaccttgataagtctgataattggttcaacaaggaacctagagagaaactctcacccaattttatgacaaatgccaaaagtttttttattgaaaacaaaaaccaatacttatagtgtatctgaacaaaaagataaaaatagacatgggccttcaaaacatgttgggccaaanaaattataaataaaataaaaacacaatagaacatatttattatgggcct

SEQ ID NO: 226037 - DNA, 467 bp, Glycine max
  unsure (1)..(467): unsure at all n locations
tcgtcaccgcagcaacactgtagaaaccttanagctttcttcatcgacacctactggttcttttcctactaccgccttccccttttttttcgtcggttagtaattgtttaatttcaactgattgtggttttaaattgaaacaattaacacaaaggtagcagagaagaagaagaagacaaatttgggtttatttgcaccgcctagtagtagcagacacagagaagaagaaaaatttgggtttgtctttgaaaggttaaatattttatgttatatagaagtactaacattgtgaaaatgggtcccatatttttcaagtttatctaaaatctcatatggtgaaattataatattgtatcatactgataacttcaataaatttcattataaaaaatatttactttataatatattttgtcattttgtgtgctgctaagtgtcacgttaagctactacacagcaagattcat

SEQ ID NO: 226038 - DNA, 396 bp, Glycine max
  unsure (1)..(396): unsure at all n locations
ntgagcagattcagacgacaatattgatgtactcgtatgtctggttgagtcccgtattatattgagacgctcgaaattgaatgttgaagctttgagcaaattcaaacgacaataaccttttactcggatgtctgattgagtcccgtaatatatcgagacgctcaaaattgaatgttgaacctctgatccaattcaaaggacaataactttttactcggatgtctgattgagtcccgtaatatatcgagacgctcgaaattgaatgttcaacctatgagccaatttcaacgacaataactttttactcggatgtctgattgagtctcataatatatcgagacgctcgaaattgaatgttgaacctctgagccaattcaaacgacaataactttttac

SEQ ID NO: 226039 - DNA, 431 bp, Glycine max
  unsure (1)..(431): unsure at all n locations
agctnggngtaaatcttgatttgtaagtgtctaaagnggtagtggtaaatacttgcgactttatgaagttagcagaacttggtagttaaccaagagttggatgtagtctgagtgatatagacaaacaagtatagctctctgtcttatattcataaactgacttagtgtttgaatttgattttgttcgaaaaaataatctattttgcaaaatttgtttctattgtttgaacttgccactagaaattttttttatctgttttacaaagttattcttcaaatgaaaactttngttttcacaagaaaggtttataaaatttttaaaatcacaattcaatccttctacttgcgagtattgcctttacaaattttttgttaaatataactgtgtgtgtcgtgtgtgggataaagagacaatgaatctagtgagaata

SEQ ID NO: 226040 - DNA, 355 bp, Glycine max
tctcctccatgttcctataaatatggggagaagtgattttaaaaaaggttcaatcctcctggtatctgagattcacttaaaattagtgagaaaaattgtttccatgaagaaaatccacgccgaggcgcttccgtaacgtttctgtaacgttttcgtgggtgatttcgcgaagattttcaaccattcttcgacgttcttcttttgatcttcgtcgttcttcggtcttcaaccggtaagttcccgaaatcgaactttttaattcattctatgtacccttggtggtccccatttgtttcgcgtactcttaatttccgttcatttactcttcgtaactccttttgacgcgctttagtca

SEQ ID NO: 226041 - DNA, 243 bp, Glycine max
atgaataacgccaagatttagtgcatgaaaaacatactaaggaaaggtggacggcgtattcccacaacttatttaatgatggatatggatatgactctaccagtctagacacacgagaagaggaccggaactataagtactatctccggattcacaaacaggaagtaatcgaagcgttgaaaacaatgagtaatgtgaatgcgggggggccacacaacatcctattgacgtgtggaaactctg

SEQ ID NO: 226042 - DNA, 455 bp, Glycine max
  unsure (1)..(455): unsure at all n locations
ntgaatgctgtattcaacggagttgttatgaatatctttatactganctccgctcgcacagcggccaaagatgcatgggagatcctgaaaatcactcatgaaggaacctctcaagtgaatatgtccagattgcaactgttggccacaaaattcgaaaatctgaatgatgaatgatgaagaatgcattcatgacttccacatgaacattcttgaaattgccaatgcttgcactgtcttgggagagaagatgacagatgaaaagctggtgagacagatcctcagattcttgcctaagagaattgacatgaaagtcactgcaatagaggatgcccaagacatttgctacatgagagtatatgaactcattggttcccttcaaacctctgagctaggactctccgatatggcttgaaagactaagtataatctggccttcatgttcaaagatgaaagag

SEQ ID NO: 226043 - DNA, 390 bp, Glycine max
  unsure (1)..(390): unsure at all n locations
agcttcagctttttggtgtttagtactttatcgtngtttattttttctattgctagatcactgatctataacacttgctcccattgtagttncttagggaagctacctacttatgagatttcccgattataccgttggataatcattccaacttatttatcattatattacttccaaaacaggtgcccccaagtcactagtttctcacagaagttgccgacttattctatccactaataagggtgtgcgaaaaagactttgtatagatgtgtgttcctcgaaatgtgttttggacatagttcttttcattatttgagcagtattggcggggcgccacacgcatttcaaatcatgttaagatttgtgctcatacggcttcaatttttcctt

SEQ ID NO: 226044 - DNA, 449 bp, Glycine max
gacctataaaactcagcttcatgagaagacattctctttttaagttgcttatggttatcacttcttttggtttctgggtaaaggaatcatgagtgcgcatcctctctctattttttcttttttgaatctttcaagtaatttgttgtgttcattttctctggtgcagggttctcgctatgtatctgaagtgaagctgcttttactcatctgtatgtactatagcattattatgcaaatgggccacatccgttacgccttgtctaccatgatagacagcaatcaaaggaataatttttgtttcaacaagtgaccgttttgttcccagaggctggtgccaacttgcacaggacatggttcaataagtcatagtatgacgactcactgactcagtagagacaaagtcattgtgagaatggtggggtatcttcagagtaattttgagcgtacac

SEQ ID NO: 226045 - DNA, 438 bp, Glycine max
agctgtggtttgggcaatagcaccccacttgacgtccccaaggtctcctgacccccgcgacatatctccaggtaccactctgtggtcaacaataaaagcaggaagtttcacccttcaacacttcctcatctcaagcttgtaggattatggggtacccatcacatgtggtactaggtggcggtcgggcgatggtgcacaacaagtttttccacatccacaatgcgcgcataaacccaccatcccctgttgcccacctccaactgagctcacgtactcccacgtagcccatatcctcgtttctctcaacaccgggtccccatcaatcctcccaagcttccacaacatccaagcaaaacaacattcacacagcacaagctatcacagccaagcaaaacagagcagaggcagaatactctgtcaaacaccaacaaaaataca

SEQ ID NO: 226046 - DNA, 432 bp, Glycine max
tgttgaactaggaagcatagttattaatctcatcatatggtgtttagcaaccagtcccaaaactgctatagtgtgatagagcatggcaaaatgaccactatttttaagtttataaatacaaattaactaatttaactactctcacacatatatgctcagaaataataaaaaagttatttaaaattgtttaggaataattaataatattcaaaatggtagttttctctaaaaataatagaacacatgaggataccctgccactctgaacgcgacatggaaagaaagtaagaaaagagaaaacacaacacatgctgaaaaaaaattgtgattggcctgaaatggtgtctaagtgctgggtcagtgaccagatatggaggtcagccttagccgagtttcttggtctaaactctcaaataccagccaagtgtgaaa

SEQ ID NO: 226047 - DNA, 436 bp, Glycine max
tatttgcagtaacatatattaaacatctttaggagggttatggagttgtgttactccatattattataactaataccttagtcaacaaggatgtaattgctgagatcgatcaaactccagaagggatgtttagtttcaacattggatagcaccaattgcatgaccaccttcgaatcacaatattccagaataataaaacgaaatcccttgtcccacgcaatttgcaaagctgttaagatgccccacaacttgggaattaaggtattatcacttactatattcttggcaaaaccgtataaccaatccccaaaagtgtgacttatgaatgtattcgtttttctttcttctttttttacattatgagtcaagcaaccgttctagtgcaaatgcttacaaatccaaagtaacatggaaacataaaacctagtcacatttt

SEQ ID NO: 226048 - DNA, 396 bp, Glycine max
tattattctctaatcaaactgatgtttctcctccataattcatgtaataaaaatttgtattaaaaattctatatatgaatcgaattgttgtagttcagttgacaacaacacacaataaatctatggaagaggatgatttgagtttgattttcacataatacatgtgattaagttccagatcaatgattagtcccataatcgacccaaacaccctaagtacaattgttaaaaaaaaattagtatatattacgaaagtaaaattttaatttggatcgaaaaataacacaaaaattacttatttttgtgtaaaaataatatctgatagaaatattataaatgatgaaagtttctttttaaacattcattactgattcattatgctgaaatcatatatta

SEQ ID NO: 226049 - DNA, 335 bp, Glycine max
agcttagagaggaagcttaatggaggtttataatgagagagagagaaggggggcacgaaattgaaggagaaaaagagggagacaagttgaactttgaagtgtgtctcacaagtttcacattcatcaaagttaccacaagtgttacacatgcttctatttatagtctaagtagcttccttgggaagctagtgttacacccttccaatagctaagctcaccccatgccaaaatacaggaagggagaaagcttccttgagaagtttccttgggaagcaagtgttacacccctccaatggctaagctcaccccatgggaacacacaccccttcaatagc

SEQ ID NO: 226050 - DNA, 450 bp, Glycine max
acctataaaactaagcttcaaatgtatcctttgcccttttagttgggtatttttcgcattccttaccgaaacatcgaaaaacctttcatattggacgacaactagtgccaagcagctcaattctgctagcaagaatcaaaactttaacaaatgattgtccctagatgaaattacggcatgacatcattgaacaaatgcctttctttactgggaaacatcaggaggatcatgaacatgcaaatcataacgatcatgatgaaggtttatgggagaacattcgtacataattgcgtatgaagaaagtaatgtatatagcatatcttataattgtaatacattcttgtatgttgatatagaatcttgtggctatatgttggttatataaatgatgatgtcctaactcaaattgtttgacttacgcacactaatatggcaacaccctcaggatcc

SEQ ID NO: 226051 - DNA, 396 bp, Glycine max
  unsure (1)..(396): unsure at all n locations
agcttaagatttctatttattngctaacttatgtagataataatgtaaaagctttaaaatttctagtacaacctttgttaaattttaaaaaaaatggtaaagttagaaacatgctgaccacaaaagtagtttttccaatatggcaatcacccaacaagctgatcttgaggttcaccaaatcggaatcggagtcatagccgccagtggtggttgtagcggaaaagaagacgtcttcagcgtaggacggcggcgaagaagaggggtcccggacgggtagtttccggtactgagatggccttccggcgacggagcaaacaagaagtctgttccaaatgaagcggaaaaagtgtccaacgaaagatacccttttgaggacaccccaccggacgtcgacct

SEQ ID NO: 226052 - DNA, 450 bp, Glycine max
  unsure (1)..(450): unsure at all n locations
tgaacaattactatcactgaacccttatctagtttctttatttcacttgcaatgtgactntattaatactatctgaaacatataaaataaaattaaaacaatcttttttaattcgttactatgtctatctctcctagtttatataacaaacaaacaaataggcattgtatactttattttttatctcaattataataaaaaatgtaaacatattttctaatatattaattgttattttttttatacttttaacttatgctaaaaaaatatgtaaatggtaaagtttgtttacaaagacgtgtttaataattatgtacgataatataaaataattntttatattatcaattaattagaaattaccattaaatattaataagaattttaaggtggatattataaaaactattataatanacttctcatatatggtagtggtagtatttcaat

SEQ ID NO: 226053 - DNA, 369 bp, Glycine max
atatagcacgacaccttgcgaaataataccagcatgcaacgcacgtaggttaaaaaataatagacaggaagagctaatttcagttatgcatatagtcaaaattaacttgaattatgtttttattttttacaatctcttttgatatgtatgtcatataatgtgggtattgtcttgctaacatgtgtttggttagttataaatttaattttagagtgttttggtttgataaatataatttaagtacaagcgcattgaaattaagttaacgtatttgaaaacctatatataaaaaatggccttgatgataaaataaataacattagaataatgttattcaaaattacttttgaattatagtataaccaaacc

SEQ ID NO: 226054 - DNA, 431 bp, Glycine max
atctctctatctcaaagagtgtctcgaaacttttctctgtctaggttctcaccatgtgtcactttcggtgttttttacagaagaagaagaagaaaaaaaaaaaaactgaacattatcccacttaacttaacagtctctcactctctctctcttgagttccagaagataatactcccctcacacgaacaacaagaagaatgaagaataaaaagagtgaaattaagaacctttaacttctctctcacacacacaccattagctagatcaaaataatactatcactaactataaaataaataatagagaaagtggataagagttagttagcatgagttaggacttacgagttggtgagtgaaacaataaagtatagagggagggatggtgggaagttgtgcataaagaaaactaaattttgctgttgcaatgtc

SEQ ID NO: 226055 - DNA, 398 bp, Glycine max
tcacccttttatcgtcgccacctgaagcgtctctacaaagaaagcacaaaggcaccaagaagaatctctagtcctcaagtaccagataaaccaacgtgcgtaagaggaacaagggaaaaaggttttgttactcgcctgtggttgaaggttaaaggtttactatggaagaagcatgaaggtgaagaggggagaaaccagccctcgaaagcattttgagaaactcttcctgtaaagagtcactcatatatgcagaggtaatgcttaaaactcaggttaacgaagtttttaatttacggtctgaagaacaattaaaataaggcgcaaccatgcttaaaacattcctaagttctaagtcgcagccatttagtatatcgttcaatgaaattatatatgacagc

SEQ ID NO: 226056 - DNA, 464 bp, Glycine max
  unsure (1)..(464): unsure at all n locations
cactgcggctgcagcttatatagatctgnncggaattgttagtggcaataaaccaatttggataatgataccgtttaatgggtgacacatgtcttcaatcatatagtatatattaaaagtttaaagggaaatttcaatttgtagcaactaaaatttgtgattgttatagtcagatgcacggatcaatgaagtgccctggcggtggaagtagctaatgaagcgtagtatctatggaagagaagacaggatattccaagttttgggctaccagaatggagaagaataaaatgacgagaatgatagggactaaaggataattgcttcatgttcatgaaaatgatatgtggataatatttgacatcatactaaggttataaactattcataaggagcatcttatttatgtatcggaagaagacaaagtgtaattgacttttaatcgtgaccctataatatacttcttt

SEQ ID NO: 226057 - DNA, 310 bp, Glycine max
ggagatacttccattggaggggggtttgttcactttcaaattgatccaaagatatttgtcttttggcttaagggggagaattgtagagtttcaagctaaaaaatagggtgcatttaatgcatactgtgaattgaatttttaccactaaggcttacgtggtttaaatgtaaagtggaagattgtattttattacgtaaaacttatttgaatagatgcattaaaagctgtgtttgcttcaactttcaagagaaataattcattatagttggtgaatataatcactatatatagagaaaacaattagtggaga

SEQ ID NO: 226058 - DNA, 434 bp, Glycine max
agctcgtaggaatatggggtacccatcatatgtggtactaggtggcggtcgggcgaaggtgcacaacaagttttccacatccacaaatcacatataaacccaccatcccatgttgcccaccttcaactgagctcacgtactcccacgtagcccatatcctcgtttctctcaacaccgggtccccatcaatcctcccaagcttccccaacatccaggtaattcaacatccaaatcatcacaaactaacaaaccaagcaaaacagggcaaaggcagaaaactctgcccgaaactcaaaccaaaatcacagtcttttctcacttaaagaccccagtaacatgtccttcgttccaattcattaacccgtggatcgactcgaaaatattcctggaagtctctagtacataagtctacatttcgacccgtgggatctact

SEQ ID NO: 226059 - DNA, 392 bp, Glycine max
ttggttctagaattagaaaagcatgaaaatagggacttgcttgtaagaatttgggctgccccatgattggtactttgcacctaagtaacgtgggaaatgcttttcaatggtgtgtagatatatgtgtaaatataaggggcataaaattcctcgcgaagtatgaataattgtttttctaaatgaatgtatgatagcgtggaatgcctttttgaatgcaaatatgtgcaagatgtaattagctctccaatatgcatataaataaatatgagtgaaacaataaaaattcgtatggaagtgtgttttctttttcacaatgtatatatgtgtatggcaattagaatatattagatgttcttgtatgtcgacatgaattataggatattgtctacaca

SEQ ID NO: 226060 - DNA, 369 bp, Glycine max
ttcatcggtctttgcaagatgaaagatccttcataacgcattcttacaggagttcctatattgttctatctcctccaccgaaaccccctcgatgtcctaagacagatcattatgttctctataaagcgctctccctcacttcttctaggagggacgtgacaatcagattgtgctgtactatccttgctcccaggtccattactagctgggatgaccttaagagggttcttggagaaattcttccttgcatctaggaccactggcatcacaaaagacatttcaggaattaggcattctagtggagagagcttgtatgactattgggaaagattcaagaaattgtgtgcaagctgtcctcaccaacagatt

SEQ ID NO: 226061 - DNA, 368 bp, Glycine max
tgcctcagagaggtccaggaaattattgcggccgattgtatctagttccgctcctgagtatgacagtcaccgttttatgagcgctgtacaccatcagcgcctcgaggccatcaagggatggtcgtttcttcgggagcgacgcgttcagctcagggacgacgagtatactgatttccatgaggaaatagggcgccggcggtggacatcactggttactcccatggccaagttcgatccagaaatagtccttgagttttatgccaatgcttggccaacagacgagggcgtgcgtgacatgagatcctgtgtaacgggtcagtggatccctgttgatgccgacgctattcgctagctcctgggatattcgt

SEQ ID NO: 226062 - DNA, 402 bp, Glycine max
  unsure (1)..(402): unsure at all n locations
gcttcaacatttatattggagcgtcttttttattactgtactcaatcagacatccgagtaaaaatttattgtcgtctgaattggctcacagcttcaacattcaatttcgagcgtctcgatatatgacaggactcaatcagacatccgagtaaaaagttattgtcgtttgaattagctcagagcttcaacaatcaatttcgagcgtctcgatatatcacgggactcaatcacacatccgagtaaaaagttattgtcgtttgaattagctcagagcttcaacattcaatntcgagcgtctcgatatgtgacgggactcaatcagacatcctgagaaaaagttattgtcgtttggattggctcagagattcaacattcaatttcgagccgtcttatatattaccg

SEQ ID NO: 226063 - DNA, 356 bp, Glycine max
  unsure (1)..(356): unsure at all n locations
ntgagccaattcagacgacaattattgattactcggatgtctgattgagtcctgtcatatatcgagacgctcgaaattgaatgttgaagctctgaaccaattcaaacgacaataactttttactcggatgtctgattgaggcccgtaatatatcgagacgctcgaaattgaatgttgaatctctgagccaatccaaacgacaataactttttactcggatgtctgattgagtcccgtaaaataacgagacgctcaaaattgaatgttgaagctttgagccaattcacacgacaataacttcttacttggatgtctgagtgagttcgcgcatatatcgagacgctcgaaattgaatg

SEQ ID NO: 226064 - DNA, 331 bp, Glycine max
ctgagaaccctagccttgcaacaagtcctagggaagtagacaccgagatggacaagaaaatccgcagtatggtgagtagcattttgaaagaagcctctgtgcctgaagctgatgaagatgttccaacatcttccaccctaaatgttcctatgcctgatgttgagaaagatgttccacacatcttccggcccaaatgatgaagtactctcttcctccccagagagagatcaacagaggaagatgatcaagtcccagaggagacccctgtaccaagggcaccagaacctgcgtcacgtgacctcattgacttataagaagtcgaatctgatga

SEQ ID NO: 226065 - DNA, 380 bp, Glycine max
aagctctgccacatgtgcctatttgattggagcaaaaagggcccactttctctttttgactgtgacccatactcagtcacaaaagtggggaaaatttgacctctgaaacgctaaaatcctgcctcggtttgcatgccgtttctctggttccagtttctcgcgtttctctgcgtccgtcggggccagttttcgaaagtaagcaatatatatatcaaaacgctcagaataaaaccccgagcgtggttcagaggttggtttcgttaaattctaagtcgcacgccaaacgatgatttttaactcattaattaagaataacccataacctcccagttatggatttctctccttaattacccaacccgcatatcttgccccactat

SEQ ID NO: 226066 - DNA, 305 bp, Glycine max
acacctattatgctcttgcctttccaaacggtgtatggaaaggcatgccacctcctggtgcagctggaacaccaagccttctacgctctcaagtttctaaatttttttattcaactgcatccgaagacaagaagaacctccacttatgtgagatggaggaaatagactcactgcttttgagtcctccaaactgttaaaggagaagactatggcctaccatgacaagaagattttgaagagttcaagccaggacaacaagctgtactctacaactctcgacttatactatttgtatggaaactaaa

SEQ ID NO: 226067 - DNA, 314 bp, Glycine max
  unsure (1)..(314): unsure at all n locations
acagactatgttcaggagtatagaagtctctccgttggttagtaattttgaggcatttaattaatctaacgtatcagattttgagtttcacacacaacaataattccttttactgtggatcacttgttattgttgcacgcgtaactttctcacagtgtgaatgtgatgaaactgggggttattagtcaatcttgctcttaattgattgtgtcaaacactcaatgtcatgttaatccctcattctatccccctagatttgggcttgcctaanacaacacctactcanacctaacacctggtcgacgaaaagatat

SEQ ID NO: 226068 - DNA, 390 bp, Glycine max
aaactctcgcttctgtccatgagaaaccggttatttttgacaacacgtagtgaagattgctgttaaccctagtcttgcgacatgtcctacggaagtagacacggagatggaccagaaaatccgcggaattgtgagtaacactctgaaggatgcttctgtgcctgatgctgagaaagatgttccaacatcttccaccccaagtgtttctgtgcctgatgctgagaaagatgttccaacatcctctgcttcaaatgctgaagccctcccttcacccagtgaagaggaatcaacagaagaagaggatcaagcctcagaggagactcctgtaccatgggcaccagaacctgcttcaggtaaccttattgacttataagaaagtgaatctgatga

SEQ ID NO: 226069 - DNA, 465 bp, Glycine max
cgggatctttaagtcacctgcggcatgctattgttaagcatcacctatataggcatatataaggcgctcaagtaatggtttcagctccaagtaaggcggctgaatggtggaagacaaatataaggatcagaacttgcacctgcatcataatcagagtgaattgctgaggaaatctctacacaaatactacatacaatagcagactcattagaatcattataggtagagtcaaaaggaccaagatcaaagtcataaaagttagaaaaattagaaaacaaatctataaaaatatctatactatctaccacatcatcaatgatatctacaaggaaaacaaaatgctcatttgcaggatgtctcatagccacaaaaatgttggaatgcataacatcattaccaaactccctggggaaagagttcctgcatgcacatcaattttggtcttggttgcataaaaaatggtct

SEQ ID NO: 226070 - DNA, 448 bp, Glycine max
  unsure (1)..(448): unsure at all n locations
tatcatttatattcctgangattatgtcctangattgtttatctggaatatgtacacaagttctccccctcttctagcactacatgggtcttcaaaaatgtgttgaaggtatcctcatcaaacttcactaaatgacctctcaccctcacctgcttaggtgatttatcttctaggtcatataggttggcataaaactccttcacaatgttgatgtctatactgttgtcaaaaaaatcactcagctattcatcccaatggcgcctctcgagttcctccttgaactcgtcaaactctgtataatagactacctcattcctctctggtagtagcttccgtggcaccactatgtcagtgtatctctcccaagtctcttgggatgtgaatctggatcaattaaatttggcttgggtaggtgtagagggtgctttccttttcttagatgccatct

SEQ ID NO: 226071 - DNA, 348 bp, Glycine max
  unsure (1)..(348): unsure at all n locations
atctttttatccaaagtttatctnggtgtttaagctccttcttccaaggctcattccctagttggaggcgcctcccctcttctcttcttctttgacttccgctgcatctccatggtggaaaatcaccattaaaggacctcattaaagctcaaagatccaacctccatagaagccccacaagaaagcttccatcacttacgctctcttgaattgtgttattcaagataattgagcataagcaaacacaaattgtaactatccaagccttaagcaacataaacactactcttgatttctaggtcgaaatcgctggtgctggcagcttgaacatacaaaatngtataaatt

SEQ ID NO: 226072 - DNA, 386 bp, Glycine max
aatgaggaccttcaatggtgatcttccatcatggagatgcagcggaagacaaaggagaagaggtgagaggaggcgccatccatagggaataagcaatggaagaaggagcttcctcaccaagaatgtgccttggataataagctcggacaggatgctctaatggaggaaaagaaagagagaagggagcacgaaattgatggaataaaagagggagagaagtggaactttgaagtgtgtctcataatactttcattcatcaaagttacaacaagcgttacacatgcttctatttatagaggacgtagcttccttaataagctgtcttgagaaaacttgcttgagaagcttcgttgagaaaacttccttaagaagctagagcttagcta

SEQ ID NO: 226073 - DNA, 409 bp, Glycine max
attaactttatgtttaatttatcatgcagtatttcaatgatgctagaccactggaaccagagagattgaaggcacttcgcatccagtgggcaaagtattatttgaaagttagaaatgaaacttaggatgtttaggcaattttataattttagtttaggcaattttggaattttacttattgctttacattctttacaattcatgtctcctttaaacattaaatattctctaaattcttagttattaataaatttatcatggaatttatctgctaaaaactgtttcaaaacagaatgaaaattatatatgttgtgctgtgtggtctgatttaaaatttgaggttaatttttgcgtttatcgaaaaacacatagtgtattaaaaaattcctaaaacaacatcgcgctttta

SEQ ID NO: 226074 - DNA, 456 bp, Glycine max
  unsure (1)..(456): unsure at all n locations
gtaagttaccaacttaattgtattctggacaacctttaccctctnttgttttgcaggttgtgttatatgtggtggagcacatgattctggttgctgcattcccacaaaagatacagtacatgaagtgaactatatggggaaccagccaagaccaaactttaatgcaggtgggtattctggatttcaacatggccagcaatataatcaataacagggacagtggagaacccaccctggtaatcagttcaataaagaccaaggtgggccatctaataggccacagcaacaagggcctagtctctatgatagaacgacaaagttgaaagaaactcttgctcaattcatgcaagtatccatgtccaatcaaaagagcacagattcagtcatcaagaatctagaagtccaggtgggacaaatggcnaaaaactggcaaccgaccgtcagcagtgttgagct

SEQ ID NO: 226075 - DNA, 442 bp, Glycine max
  unsure (1)..(442): unsure at all n locations
attaaaagactatgttgaaagcttttttataagaagagcaaaacaaacgttacttaattgtgtaatccacatctccaagataaaccttgcatccaaaataatgattgagtaaaggaaaagtaagcaaatggagtagagtattgtagcttgaacttgggtttaagggtgttgagtaagttataatgattcagacttaacttttagtttcaatggacatatgtagactagaattctctagcataaggtgctaaggtaatctttggctaacacattattataaagagatatttctctttaaaataaatattaccaacatattctttggccaacacattattgctaattgaaatatattagaaaaattatataataaatctacttttatttacaaaactcgttattntataacaaattgtcccgccaagtgaatgggacccaaccc

SEQ ID NO: 226076 - DNA, 447 bp, Glycine max
  unsure (1)..(447): unsure at all n locations
ttgccttctctcgttgacatacatgttcctgatggaatttattntactgtttgtggtgatgtgcatggtcaggtaactggtttattacaatagttgaattgtttataacattttttgggtcacagacatgattttgaacataaaggcagctgaagttgataggtgactttggaatatggtaaagcatattgttgcttctatcttcatggtgtcttctgttacttttagaagaaacccatttgaaataatgattttatcccttatgagaagcaactgtgaaaacctgtcctttaaaattcaggcattcatttttatcaatgattgccatttgccaatntacagcctacaggatctactgcactcctgtacagggcttttcccatacatctcttaccaaaaccttggaaatgacattaaaaactaaaatttgttatcaaatgcatttgt

SEQ ID NO: 226077 - DNA, 242 bp, Glycine max
gaaaatctaaagcgttgatgctgaatgttacacaagctcgaggtaaaccaatataaacttctctcagggcacgatccctctttatagcttctcataaatctatcctggttgcataacatgctataactattgaaaagaaaaaaaaaaattgattttactcaagcataacattatctacaaccaaaaggttttccaaattcggtatgatcatcaaaacgaccacttattcttcacaaagaaag

SEQ ID NO: 226078 - DNA, 430 bp, Glycine max
  unsure (1)..(430): unsure at all n locations
ccttacaggggatggaccttntcagggtttggagtgtatcaatgacaatgcctataggttggacctcccagaagagtatggagtcatcaccacttttaacatttctgatttaattcattttgcaggtggagctgatattgaggaggaggaactaacagatttgaggtcaaatctttttcaaggagaaggggatgatgcaatcctccctaggaagggaccagtcactaaagccatgagcaagaggctccaagaggattgggctatagctgctgaagaaggccctatggttcttatgaacctcanggtagatttttgagcctataggccaagtttgggtccaattctctttgtacatattagactangatttcattatatttgatccttgtatttanggcttcatattgtaggtagggtattctagaaatat

SEQ ID NO: 226079 - DNA, 368 bp, Glycine max
  unsure (1)..(368): unsure at all n locations
caaatgtaaggtaagtataaagccattaatcttagcttagaggtgaaaattatacaccataccaaaagtcactcagactatatgggtttcattatactaaatggcggagaaatatagggaagaagaaaccatatgattcaagtatgttggattaaatggagttattcaagttatttgtaagcaaaaggtactcaagctttttggaaaattttgctgcataagacctatgatgtatggaactaaatattgggtagtaaaagctaagagaataaactcaatgtactagaaatgagaatgttntattggatgagcacacatcatacttaacatgatttgattaggaatgaaagttggggtctcatttatgg

SEQ ID NO: 226080 - DNA, 417 bp, Glycine max
  unsure (1)..(417): unsure at all n locations
tctcttgttgttagggttcttatcagggtgccacttcatggctagccttccatatgctttcttgagatcctcatctttggcgcttctatctacctgaagaatcttgtagaagtccacgcccatgctttctctgtttttttcttcactgctatgaaacaagataaaggaggaattgggaattatctcatatctctctctctttacagcatcatgatatcacgttccttctgatacaatacaggtaccgggaggaatagatgtcgatgctgctgctagtccaatcccaaatgtggtataaatatatcatttanttataatcttatgttaatttaacctagctaatagttgaataataataataataataataataataataataatagggtaggtatatattccttgaaattctttaac

SEQ ID NO: 226081 - DNA, 422 bp, Glycine max
gcttgtcacccttgctccttaactagattgtgggattgatatattcttggacactattttacgatatttatgagaatcttacctttagtaaaccatacagtattaagaggtttagtccggctcacaaatctaaatattactaataaattataaggagttagtttttctattttcaaaagttaaataatccaattgcttaattcaacacaaattttcaactaaaattatattttaatacaaaattaaccaagactttgttatgtaagaaaattaatgaagagggatggggtttcgatctcaaagactaagaaaacatttatagaagtatttatatttaccttagtccaactcagcatcaccaattcccctccctttattaattggagtacagcctgggttgaatttcgcttgcaacagcaaac

SEQ ID NO: 226082 - DNA, 425 bp, Glycine max
  unsure (1)..(425): unsure at all n locations
agcttaggttctattatagcattcatttatataataaccttcacttttntattcattccttccccataattgcattttntcttaggcacttaggtttcatacctaaaattatagcatacacacttattaactttatttatgcttacaacttttttttaacacagaaaacagacacaatgtgtatatactattttctttgaccatttcaatccgtatccagtgcctcccccaaatttggaacaaatttaccttgataataactcccccaaatttgggacacaattgccttgagccatcttttgtggatgatgctctcctacaacctaaaatgaggtagcagagatacaactgaataggctcgaggttcaatcaatcaattaattcattcagctcacattgggtgcaagggatatattattcaatca

SEQ ID NO: 226083 - DNA, 358 bp, Glycine max
  unsure (1)..(358): unsure at all n locations
tcccagatccgatcatggaaagataaggtgactgccttttttangcagtaccaatacaatacagatatggctctcgatcggaaccagcttcagagtatgaccaagcgagaacatgagtccattaaggagtatgcccaaagatggaattgatctcgcagcccaagtcgtgccgcccatgatagagagggagatgatcacaattatggtagatacgttacccacgttctactatgaaaagttgataggctacatgccagctaactttgcggatctcgtcttcgccggagaaaggattgaattcggactacgaaaagggaagttcgaatatgctgccaatatggccctcaacaacaacaga

SEQ ID NO: 226084 - DNA, 385 bp, Glycine max
  unsure (1)..(385): unsure at all n locations
gttaaatacttggaactntatgaagttagcagaacttggtagttaaccaagagttggatgtagtctgagtgatatagacaaacaagcatagttctctgtcttatattcataaactgacttagtgtttgaatttgattttgtttgaaaaaataatctattttgcaaaatttgtttctattgtttgaacttgccactacaaattttttttatctgttttacaaagttatttttcaaatgaaaacttttgttttcacaagaaaggtttataaaatttttaaaatcacaattcaatccttctacttgtgatatttgcctctacaaatttttttgtaaatataattgcgtgtgtgtgtgtgtgtataaagagacactgaatctagtgaga

SEQ ID NO: 226085 - DNA, 445 bp, Glycine max
  unsure (1)..(445): unsure at all n locations
tctcccgcattntcctataaatattgggagaagtgaatttttaaaggttcattcctcctggtatctgagattcacttaaaattagtgagaaaaattgtttccatgaagaaaatccacgccgaggcgcttccgtaacgtttctgtaacgttttcgtgggtgatttcgcgaagattttcaaccattcttcgacgttcttcttttgttcttcgtcgttcttcggtcttcaaccggtaagttcccgaaatcgaactttttaattcattctatgtacccttggtggtccccatttgtttcgcgtacttttattttcgtttcatttactttccgtaactccttttgacgtgctctagtcatttactcgcctaatcaaaaataaaataaatttccaccgatcatttgaattgtacatcctttaatttagttaatgagatctgacgttggtca

SEQ ID NO: 226086 - DNA, 334 bp, Glycine max
cacacaaagttgtccttatcaacctcatcaatcctgcgttccacatacgtgaaggggaaagctgcacaaaaaaaaataaagacacataccagaaaattttccaccaacagatagagatcttttcatatatataacctcatactcgattaattccactttagttcgtcaaagtatttgtgctaacctccaacaaagttaacttgctcaatgcttccagcttccccatcttcttggatcaaattgacctcttttatgatctgtggtaatagctttggcagcaaagttctagagtcactgatcaaggccttgacatgcgtgatggagcacaggggat

SEQ ID NO: 226087 - DNA, 364 bp, Glycine max
  unsure (1)..(364): unsure at all n locations
ntgtaaccatgacanactcaaaatcatatcagcactttatatttctaaggggtggaggtcaaccggaaaagaaatgccttgcactaaaattggaacatcatagctgcaggtgttgcaccatataaaatcgtcgctaccgacaaaaactttgaatggttcaatattagtgacgtgaacccttaaacgacgagcaactgcaggttttataaaattgaatgaactgccattattcaccaatatgttaaaggtatgtccctggtatgttcctttcagtcgtaacgtgcgaggactatattctcctgatagggcgttaaaactaatgtctggaacccccgtttccttcatggctgcattggtacttgca

SEQ ID NO: 226088 - DNA, 369 bp, Glycine max
  unsure (1)..(369): unsure at all n locations
tgcttaaggaatttttatgttaccactattatactctgctattcgcgcctagactacacatgttagcccacttaatgtaaaggatgagtttaccactattggggttagagtgaacatgtgtatggattcttacacgatcaaattgcggttaattttggggcgttctatcggttttatatttgcccataccacgataaatattaattgcttatgtttgacaagatatatgatgcccggatgcgaattgaattgttaaatgaatgttggctttgaatgtaacaacttaaaattagaaattctgattcttgctgtttcttgaattgattaccggtgttgaccccatgagtgacacctgtntatatatccgct

SEQ ID NO: 226089 - DNA, 386 bp, Glycine max
tggcactcggatgctgcgatggttatgtgggagtgattttcttgcgaacattatatcgaaagtttatctgtctcccaagctttggtatttgagggttaatgtgatagaggcacaggacctgatgccaactgataagggtagataccctgaggtatttgtgaaagctattctggggaatcaggccttgatgactagaatctctcaaagtatgagtattaatccaatgtggaatgaggatttgatgtgtgtggtggcagaacagtttgaggagcccctgattttgagtgtggatgataaagttgcgcctaacaaggatgaagtgttggggaggtgtgccattcctctgcagtatgtggagaggagactagatgagagacctgtgaaca

SEQ ID NO: 226090 - DNA, 443 bp, Glycine max
  unsure (1)..(443): unsure at all n locations
agcttctttnggaccttgaacaagcaactatctcctctntcagaaccatgctatgtgctcgcgactggtccctctcttcccttcgcagcttgagttcactattgctaccccatagagctccgcgaaatttattccggccatactcttccttgcgagccctcttggtctcttgttcaagggcccttggggtagttgcattctcttcctgtaacccggcacactccttccgaatgtgtgtagcggccaacttgaacttctccttggcaagtttcgcctttcctaactcgcttttgagagcttggacttcttcgtcctcttccggtgcctcaaaactctcttcgctgatgacttttaactnggcgagccaatctaaacctcgtatatgaactttcagccattcatggtagccaccaatgatgccattacgaatgcctctaagttct

SEQ ID NO: 226091 - DNA, 414 bp, Glycine max
  unsure (1)..(414): unsure at all n locations
ctttataataccatntctttgtaaattacctttccaaatgtttgtcctcgcaggaaatgtctccgaaaaagctttccacaaatagatctaagaggcacgtctcggctgaagggaccagtgtcacccccgagtttgatagccaccatttcaggagcgccgagcaccagcagcgcttcgaggccatcaaaggatggtcattccacagagagagacgcgtccagctcacggatgatgagtacacggattttcaggaagagatagctcgctgacattggaggtcgctggtgactcccatggctaagtttgaccctaagatagtcctggagttttatgctaatgcttggcccacagaagagggagtgcgagacatgtggtcatgggtgaggggtcaagtggatcctcttgacatagatg

SEQ ID NO: 226092 - DNA, 356 bp, Glycine max
  unsure (1)..(356): unsure at all n locations
acttacaacacaactgaggataattaaggttgattaatggngatctacattccattgaattagaataggggtcatgaactcataagagtttaaagcggagaccatttttgtaaataactatataactggtttaaaagtagaattttagtttaattacgttggtgactaattaaagtctctaattatatgatgtacaattaaaataagttatagttgtcacaccctaaaaaattacaactcacattaacaaaggaaactttgtgtttgacatatatgcatgtatcgaattatattcacaggttatatgttcttaatcatataattcccgttacgatacatgtgtgtgctgactgatt

SEQ ID NO: 226093 - DNA, 332 bp, Glycine max
  unsure (1)..(332): unsure at all n locations
ngtttgtctgttatgacaaaattagcagaagacgacttttgtctccgcatgctatcatgcgtagagtcttatagatagcaaaagaatgtttatacggataaccacttaggtatttccgcctgccccctaacttcacgagttagtctcgacagaggttgtctgcgcggaagacgacgtaaatctccgcgtgtgaacgagcttgttggccgcgattgacaaacggtgcataagacgacgttagtctctgcatgctatcatgcgctgacttttacagatagcaaaagaatgcttatactaataaccacttgggtatttctgcccgccccctaact

SEQ ID NO: 226094 - DNA, 333 bp, Glycine max
agcttagctttaaggcattggggaccctgtaaccaacaacaacacccttatgtggacacattaggtgagggacaccaagcctttcaacagcacgcaccaatcttccttcataaaacacaaacctttgatcacacaacctcaccttaatttgtgtcgtatcattcccattgtcccatctactcactaagacatggaagccagcgctggactggtcgctgggtcacataaccgcaatgagctagttgtcattcatggccatgaagaggtaatcttctgttttttgtgtgctttcatggaacagttagttagactaacagtattattatgtgggtt

SEQ ID NO: 226095 - DNA, 428 bp, Glycine max
tgcatttgtctttgacagtgattaaaggaagactattttgaacaatctatgtttagtaaaaccaaaagaatataagtgttggaaaggcgtgcaatcagaaatgcattggctattgaaatctttgaagaaaaggtttatgaagttgagaaaatttgatggcaatttagcagtctatacctgctaaagaactgtagctatgtagggagggtcgttatgttttgtttgtctattgttctttcataacaaagaaaatatcattatgcactgaatatttggatagtggttgaaacaacaacgtttagacaagatttgttgatggttgacactgatgtactctggataggttgcattggagactcaacaagatgtacaatatcaacaattgaattcttcccagtccttttagcaacaccctcatttgtaaatac

SEQ ID NO: 226096 - DNA, 320 bp, Glycine max
tgacaaagatgatgactatatgcccacgagaatgatttcaagattgagtctagaacaattcaagaatcaagagaaatttgactccagattcaggaatcaagtttcaagaatcaagaatcctgaataatcaagatcgagactcaggactcaagattcaggaatctagaaaagactcagtcaggatgagtgctaaaaagtttttcaaaacattgagtagcacatgaagtttcacaagatcctttaccaaggagtttttactctctgataatcgattaccagtagcacagtttgttttcaagagctttcaactgaatttacga

SEQ ID NO: 226097 - DNA, 387 bp, Glycine max
ttgggtattgatgttctccagtgaactgagaactttaactcagatctcttgatagaggtgaatcataaagtctatcttctgaatcatgagtgactcaaaaggactccattgatgtgcaagctctagtggagcttcaacttcttcatccatatgttccaatattcctgctactggttctccaaccattatccactcatggtagaaaaacctcattccaagcttcttgagatgcctttcagtaatatcattagactctttgataaatccattttctcattagatacatcgacattgaaatagttaatgaatcttgaggcaagcacgacataaggaaattcgtagtccaataccaccgactctttacataatgtctctatcaaaagtacc

SEQ ID NO: 226098 - DNA, 448 bp, Glycine max
  unsure (1)..(448): unsure at all n locations
gatctaccaccaccgncaccactattatcttagnnttttanttattttaagattactagtacttggttttctagccgcgtatttggctatattatgacattaggataatttagtatttctttatttgcatggtttgattgaacaattatgaattatgttatatgactatgtggtttttatatatttgatctattcatgtttcttgcttcatgattggtttaaattcttcactgtatgtcttgtgaatgattaatagtatatgattgttttatacttcttacgcactttggctttttgttgatgccaaagggggagagaaatatgaattaaatcaagacctcacataagtaatcaacttaatctcaagtaaagcataaactcaaaaacaaagggggagaatggaaaagttcagtgagtgatcgactaggaaatagtgtgtgtatgtgtt

SEQ ID NO: 226099 - DNA, 471 bp, Glycine max
  unsure (1)..(471): unsure at all n locations
tcagctntacatactcctcatgcttctcaccatgtctaataatgatcgattnctnattattgccacaccattctgatccggagaaccaggcatagtgtattgggcaacaatcctatgttcttgaagaaatttcgcanatgaacctggtgcttgtccatcctctgtgtatctaccatagtactctccacctctatctgatctcacgatcttaatttgcttttcacattgtttctcaacttcagccttaaaaactttaaaggcatctaaagcttcattcttagaatgaagtaagtagagatacatatatcgtgaataatcatctataaaggttatgaagtatttcggactatttgcatccatgtctggacaacatatgtctgtatgtatgaattctaatacaatagaactcctctttgccccttttagacttgttagttgctacccttaatgaatctaccaagtctcaaatca

SEQ ID NO: 226100 - DNA, 467 bp, Glycine max
  unsure (1)..(467): unsure at all n locations
tgttgcatgcaagctngtctngctaagtgggagtccactttttgtggctgacattacaatttgctcttagcacaactccctcagcactaagtctcgctcagcgcaactccctcagcactaagtctcgctcagtgcaactccctctttggttggaattgcgcttagcgcacccttcgctcttatcaagacatcaaaagttgttatttgcaaaatcccaacggtcagactatggcggattgtcttaggaaccttgactaaaacttttaagacaatccaacggttaacaaatccgggatcattattttactgaaataggtttaggtaaattttgaacattcataatttcaacttagttcaacaagactccacataactcaacatccacatcaagaaattcacacatgactaattcaagtcataccttaactcattcatgtcaaccatatattcaattaacttgataatta

SEQ ID NO: 226101 - DNA, 428 bp, Glycine max
tttaccttcttgcgaaactattgctggattagttagcgtccgctaagtgcaacactcattggctaagcacaaggaagaatctggaagaagatgagctgtgtaggttcgctaagcgcaacgcttcatctcactaagcacaccgcttgagtccatccgctaagcgagaaaggcacacgctaagccgccgaaattaactaatgtgcactaagtggtccaaaattgcgctaagcgcacgagcacgaacaaggccacctatttaagcctgaaatcagattttgtgaagggagtttgggctgagagctgaagctttgcatgtctagagattctagaaagagaaagaccctaagtccagacgtcgaagggttcagcgattattctttcgcggatacgactgacctatgcctggtgccggacgtcgtcattccttc

SEQ ID NO: 226102 - DNA, 321 bp, Glycine max
caaccctggaatgcatcaccattggtggaggtctaccaaaaactgcttgaaatggtgtcatacccaagctttggtggaaggaagtattataccaaaattgagcccaaggtagcataataacccaactcatatgatgatcaaatacaaagcaccttagatacatctcaagggtcttattaaaaatctcagtcaggccattggattgagggtgatatgaagagctcatggccaatgttgtgccttgagctttgaataattgtgccaaaaagtgctgataaaaattttgtctctgtcagaacaatggttcttggaaaccatgaa

SEQ ID NO: 226103 - DNA, 436 bp, Glycine max
  unsure (1)..(436): unsure at all n locations
ttgtggagggtttccgttaggctttattttcngtatatagcttgctcttagccaaagnttcatcttgggtggttagttctataaaggttctctttgttggtgtgtatgctcaatcacaaaggatggcgtgatcactgaccgccatattttctattagctccattgccccctctggtgtctttagcttaatcttcccccttgcggatgcatcaaggagtttctttgattatggtcgcatgccatctataaagatgtttagttgcaccgattcactatacccatgtgtaggcgtcttcccgagtagtccgtggaaatggtcgagcacctcgctgagggattcatcatgaaattgatggaatgaagatatttccatcttcccttcagcggtctttgactctacngaaatattcttcatgaacttctctatgacttcttt

SEQ ID NO: 226104 - DNA, 455 bp, Glycine max
  unsure (1)..(455): unsure at all n locations
acctgttgcatgcaagcttacccttatggctggcctccagacttcactccccgtatttctccggatganttgagccaagcccctaccttcgaggggcaactccttccttatgccgataattccctgcaagaagacgatgaagaagatgcccgtctaggccctctactgccgctcaaggatccggccccccatgaattgccccaaccaaacatagtccgccatgtcccgtctccacccgcacccgttaaagaatccgttccctttgcaaaagataagggaaagattgatttacttgaagagaggctgagggaggtagaaggcctcgacaactacccgttctcggatttggcggatctgtgtctggtacctgacatcgtcatccctcccaagttcaaagtaccagaatttgataaatacaaagggacgacatgtccaaaaagacatcttcggatgta

SEQ ID NO: 226105 - DNA, 440 bp, Glycine max
  unsure (1)..(440): unsure at all n locations
tcagctntataaaagaaccatggatgctgcaagactactnnnatgataaattctcagtttattattggacgaaacaactataagaattgatcaaccagtatatatcagatgtaggttaattgattagtcatacctcctttcaaccaggatatatcagtgaatgtctactaaacatatcatagcagagctgaataaattaaattagtcttgtttatgttaataatctcaccgttagctaacaactcaacatttgtttcttattctgatccattactttcttctgcacttcatgtatagtatcaataaggaaatagatggtcatgcatttgacaaaaaggaaaaaacataaagaaaaataattggtaaataaaaaaatggcaaaagatatcactagaagtctagaactacagagaaaaaaaaatatgagaacaaaaatatag

SEQ ID NO: 226106 - DNA, 384 bp, Glycine max
cctaactctccattgcttctaatatccagtattgattcagcagtggaaccttaggatagtaaccttagggtagtggaaccttagggtaaaagatgagagtagaagacgcccgaaaaaatgcggaaagggggcttccggaacttttcaaagatgttccgaaaacatctcggaagaagtgtccttccggaagcaaccaaatgtcttccggaagaactacttcttctggaagtctcccggaacacctcttccggaaactttccggaagaagggttcttccggaagacgtttggatttcccgaagaagttccagaagaatggttcttcggaagtttgtattttaaaaaaaatgtttgttttttaatgaataatatatattttattata

SEQ ID NO: 226107 - DNA, 443 bp, Glycine max
  unsure (1)..(443): unsure at all n locations
acactaagaaactcaagctaagctccttaactgcacaaggttcttaatattaattagtatcctngnggaaccttcacccgacgaagacactgacaaaaacttatcttttccttcttggacaaagtatggcaggctgggggcaagtaaattttcttcccatcagaccttggatgcaactgtgatcgtatacccatatcagctagatcttgacaggtattcaagccatccttcgtcttgccttgaatgttaaggagcgtcccaatcacactgtcacaaacatttttctccacatgcataacatcaatacaatgtctaacgtcaagatcacaccagtacggaagatcaaagaaaatggacctcttcttccatatgcaactctgacttttatccttcttttggggtcttccaaatacagtattcaggtgttgaaccccgtgatatac

SEQ ID NO: 226108 - DNA, 366 bp, Glycine max
tttttcactaccgccatacacgtcctgagactatatgaagaactggtagaaatctacgattacggcattgtataaagcacttcaggctcttataaatattcccctcactatattttgacaaatcatctgctacaagaacttgggagattacaggaaaagcttctgtatcactatatcaaagggataagaaagcgtgtggttggttccagtaagctattattcacatttgatagaatgatatatgcgacggacaaagatcaaagcagcacggaaacccacagtctccagcatgagagagataccataacaaacgcaaccatgtagccaaaaagaaagaggttgcatgaacccacactatctgatctg

SEQ ID NO: 226109 - DNA, 411 bp, Glycine max
cggttgaagaaaatttgagaaaagcgtaaagctataacctaatttgaactgctggaaaaggttttcggtaaataacaagttattattattattattattattattagtagtaatccttgtcttccaaattttggaagaatgcgcgcttttcttttcattatattcgtttttgtaatatttttttttttaaaaaatgtaaattatattaaactcaaaatgatataacaataaacatacaccgcagctagagaaaataaaaaatcttcctaatacaagaagacctatatgtgcattcgtctatacataagaaacttaatcttgctaataacctttattacagaaaatcgattatttcaagaaatagtttattcttagacagccagatgcagtaaattataattgcgatagtct

SEQ ID NO: 226110 - DNA, 438 bp, Glycine max
  unsure (1)..(438): unsure at all n locations
agctntanaagtgttcacatactgaatatactaagtctatgtgaaacaaattccctgtggatacgatactcggtcttaccgtttttttactacttgtgtgaatcggtacacttgctgaccacattcgaacaagtttttggcaccgttgctgggaaatttctttccacttagatagtatacttcagtttggaaacattcattctttattctttgattgtttcttgtgaatagttagaattcaaattttatctcttgacttggttaaatgctgctctgtttagttgcttcttgtatgcgaggtaaaacttcagcgggaatttagctccattagatttagagattgaagctacttgcaagagaaacaacacacaaaggaggagaaaagctctacaagagaggacagtcaatccaagcatcgagagaactatgtcatctgaa

SEQ ID NO: 226111 - DNA, 440 bp, Glycine max
  unsure (1)..(440): unsure at all n locations
cttgaacaaatgcctcattccacttatgagatcctaaatattgtacttcgngacaaaggggaagttgttatatctttgaaaaatgccccatttagttttacgtatggtgacatgatgaaacgcttggttccaaacattatggttttgagggaatctggtgtgcctcaaggttccatttcttatctgttgatgcattctaggactctagcctacagggaccattccaaatttgtggaagctgtcaacactgctaaggaatttgggtttaatcctttgagaagaacttttgtcgtgggtgttgaagttcttgccattaagagatgggaatcaagggttgaggtttatgagaggtgtggctggaaccgctaaatagctcttcgagcagttcgaaagtttccagtgttgtgaagttgtcagaggaagtgtttataaaaaaaatg

SEQ ID NO: 226112 - DNA, 55 bp, Glycine max
agtcttatttagcttattattctcaaacttatggtcagactgaacgaaccattca

SEQ ID NO: 226113 - DNA, 404 bp, Glycine max
  unsure (1)..(404): unsure at all n locations
acacaatgttttgtacaccacaacaaaatggtgtatcataaatgcgtaatagaactttaatggatatgattacgagtatgttaatcaatttgactntacccgtatctttgtggatgtatgccttgaaaactgtcatgtatttgttgaatagggttcctagtaaggcagttccaaagacacctttaaactgtggacaaataggacacctagtataaggcacctgcatgtttggggttgccaggcagaaataagggattataatccgcaagacataaaattggatgcaagaacaatcagtgcgatatttattggttatccagaacatgaaaggggtatatgttctattgtcctaatcatagtatgagacttgtcgaaactaacattgaagacttattgaaaatgat

SEQ ID NO: 226114 - DNA, 390 bp, Glycine max
  unsure (1)..(390): unsure at all n locations
agtgatataagcgcgggtctgggagactttgtcaagtggtcgcgatatacaaagatgatgttccgagtaaattagatgtggtacgaccatgccctcctgatttgcagctgggaaattggcgagtggaggaacgccccggcatttacgcaacgagcataatgtaaacctttacggttttaaaagctctatagttgggcctaggctttagagtttttcattttgttaaggctgtgagtcttttgttgctgattttataatacaaggatctttcttcatctgttcctacgtctctacccattctcatccatttgcatgtntacttctttatttctaaaatggcagatccgatgacaagtaccccgaaggtactaatacctgcgacccgcctat

SEQ ID NO: 226115 - DNA, 389 bp, Glycine max
  unsure (1)..(389): unsure at all n locations
cactttcttgttgctagtctggcgtatggttctagttgggcaaaatcttgaagcttctacacgcaaggaagaagagtaattngattataaggacttacctacattgtagattagtttttagtgtacaacaagtacaaaacatattttatgaaatcataacattgctatttgttttgtctggaaaactaataggtgaaaaacatatatgtgctaagagctttattgtgctcttgcatggtagaggtaaaataatgatgcaaaaatgggatgaattatgagaataatgtagctttcccacactaaataccgctattgtagtggaaacttttacatggtaattaatgaacttagtcataccattatcaatatccttaaagggttttggttta

SEQ ID NO: 226116 - DNA, 334 bp, Glycine max
actaccttcgttggaggtgagtagggcccgctactaataaacgaataaaacatgactttccttatctttatttaatatgacgagagatgacttgactgtaatgcattatcttttactcttaacatttaatacacatttctttacaagacaagatggcgatttatgacaacgagaaacaacggattggatgggcctctcccaattgtgatataccacagacctcccaaatcaaagcaatcaattgtgatctttagttgggggttgagacagtctatactctacacatagtgctcaatatcgcaatgagccacaccatgaaactccatgaaagagt

SEQ ID NO: 226117 - DNA, 404 bp, Glycine max
  unsure (1)..(404): unsure at all n locations
tacatgcatatcatgatcattattatgagaactatttgtgatcaaagtcgtgactatttagagatctagtagtaagctggagtctagcgtaaacaattgaaaaacctgctaacatggattatctcaggacttttacagttgagaaggtatttctgtcagagcatatttgccatatatagcgtctgtctctaaataataaaacatcagaatatttaatatttaattattgccttgacacatgatacattgtttcactgatattaattntaatatattttgtttagttcgaatggttttttgtgtagatgttttgagtgggctatgtgatagagttttttttgtttctttatctcatgaagtaaattgaaatgtgatgactacactggttgtgtgaattatttaac

SEQ ID NO: 226118 - DNA, 434 bp, Glycine max
  unsure (1)..(434): unsure at all n locations
caactttaaaaatacttattctagttatatataaaccttatatngcaataaaaattggtccaaaaaacacttaaataaaataaaataaaaatttggttgcagacccatgttgttgtggtattaggttgtccttcttccacatgcaccaccatggactctcttcttccattttaggttgaccatgtaatgtgttgataacctctaaattctccttcaatctctttactcttccactctttggtatttccagaccaaccttggggtcgtcacttagagatcttcctttcacaagttcttttagtctagttaagggattctttctcttaagtatttcttatcttttaggagaccttccttgatctctatcattctctccttctttaggggaattcttcctcgaatntaagcctacgatacctacatcaaaagatact

SEQ ID NO: 226119 - DNA, 430 bp, Glycine max
  unsure (1)..(430): unsure at all n locations
tcagcttgagaaaatccaaactccnctctccatttctgatattaggcttaaatagtgtggcctcgtggtgcttgcgtgcttagcgcaactctggctcgcttagcgcacataagtgaatttcagcttagcacacgtcttctcgcttagcggatgcatgcaagcggtgcgcttagcgggagtagccctcacttagtgtgtgtgtgtccagctcatccttcttctagattcttgctcacgctcagccgtaggagtggtgcactcagccgcaggattagcacacgtcttctcgcttagcagatgcatgcgagcggtgcgcttagcgggatgagccctcacttagcgtgtgtgttcagctcatccttcttctagattcttcctcgcactcagccgcaggagtggtgcactcagaggatggctcgctaagccgaca

SEQ ID NO: 226120 - DNA, 451 bp, Glycine max
  unsure (1)..(451): unsure at all n locations
gcttgtccgcaaaaaaatcactaaaatgtattttaaggntcgtatcctcaatttttctcaccaagtaaaaatggatccttttaaggtccaatgccttaaaaggaccaccttccaagtaaaaagaatcgcttgattcgccctttagaaagaactacttaggtctgatttcctcttcgatggagggtacgtaggagcaagagccccgcttttgtcgacctcaaaaattaaaaaagaaagaagagtttagatacacaatttcacacaattctaatttaaggctattgtcctttgggacaaacgtgagaggtgctaataccttcctcaaacgtaaatacaactcccgaatctagaatattcttcatgaacgatttctttcggtttttctgacgttttccacaaataaacgttagtggngactccgcgcattntcctcctttggaaaatgcacccg

SEQ ID NO: 226121 - DNA, 373 bp, Glycine max
  unsure (1)..(373): unsure at all n locations
actgacgaagtgtgganaggagagaactnctacatatattcgttgaccacagagtggtacctgtagatatgtcgcggnggtcatgagaccttggggacgtcaggtggggtgctattgcccaaaaccaagcttgaccaatcccgacccaacccgggcatagtcagtcagtgagaacctgtgatgtacctaaacaggcgagctcctggcagtcaaccgataaaagaacaaagaccacaaagcaagggggcttgtgtggtggctggcaagctgtgaatcttgtgtgatatatgggatatggcctctggtaatcgattaccaaaggtgggtaatctattacaaggcttaaaagtgaagacaggaagctacggtgacc

SEQ ID NO: 226122 - DNA, 425 bp, Glycine max
  unsure (1)..(425): unsure at all n locations
tcttatttccaaatttgttttcaattaatagacctccaatctttaatggagagggttaccactactggaaaacccgaatgcaaatttttattgaggcaatagacttaaatatttgggaagccatagaaatagggccttatatacccaccactgtagaaagaaccacaatagatgggagcacaacaagtggaagcacaacaatagaaaaacctagagatagatggtctgaagaggatagaagacgagtacaatataatttaaaagccaaaaacataattacatctgccctgngaatggatgaatatttcagggtttcaaattgtaagagtgctaaggaaataagggacactttacaagtaacacatgaaggcacaacagatgttaaaagatctaggataaacacattaactcatgagtatgaacta

SEQ ID NO: 226123 - DNA, 452 bp, Glycine max
  unsure (1)..(452): unsure at all n locations
tctatataagctaaactcatttatcaataaacacaagtttagttntattcataatattagagtttatctctnttatcttagtgagagtgattctcctaaattcttgagtgattcaagaacaccctggctgtatcaaaggactttcacaacctttgtgtgttgccctcgccggaaagagagattctttccttcctttcatcttcaaccttgttctttcaaaccacaattccagaaaatccacttctgcccagaattatcttgtggccataactcccgttttacgcactcaaattaagtgattcttgagcctaaattgaatttcaagacgagacctttcacctcgttttggaatcacctcatttggagccttgtagctcgagttattgtcatttctatatttctgtccagccaccacttaaccctacgtttctcatctcattattccattttat

SEQ ID NO: 226124 - DNA, 446 bp, Glycine max
tgcggcatgcaagctttcagcgccaactatgcgttccatttgcattacagaaggctttggggctccattccgaagcctgtttctgcgaggtaaagattttgtggcgggaactggaattgaaggtttggtttgatcagaatcgttgttctggggaagagtggcattagccacaatgggtttgatagtagaaaggttagataagcaaaacatggcgagtctccctgttttcggttaaatgcttattcaaaacgcctagccatacaaaatgcagtaaatggataagaccacgccactcttaaaatatctgcaagtcagcaacactttatatatctccaacattttaagtatttaggttccttacattttatctcttttataaatagatattttacactcttaatttggttcaattgatccttaaatttatcctttttgcaaatagatat

SEQ ID NO: 226125 - DNA, 448 bp, Glycine max
  unsure (1)..(448): unsure at all n locations
tgtccttatatccctcttgttggactagacttagactttacaacattattgtaacaacatacttaaaaccaaaacttaatccgcacatccctcttgtaagactaagtttcaattatgtttcattcaagttctaaggcaacaatacattttccaatgttaaaatcacctaactaggcacacaaatggttgattagaccaagagcatacataatttaagcactgaaagaagcattaaaaataagaaacacaatcaattagatattaaagtaattacatcataggatgtgtacaagtagccatcaagcccttaatagatatgggtatagatgcagcaattttaatgtgccttagagacattaggcataacannattgaagactccttaataggaaccgtagaaacaagcctangacaaggtctgatatactttaattgttatcccaaacaa

SEQ ID NO: 226126 - DNA, 200 bp, Glycine max
ttttttcttagggaaacgaatcatttcccattaattgtttaccccaccccttcccattgtcttttcccgcctcccgctctcaaaccaaaatataaaattcaatcccatactaacataaaacccgaattaataacttttaatgtggtatatatcaactattaacgggtgagctcgcgggcgcattccggatggatattgaa

SEQ ID NO: 226127 - DNA, 436 bp, Glycine max
  unsure (1)..(436): unsure at all n locations
ncatctatcatactctcgtcatatagtatctaangtataagtataaaaacatgtgtttatgagttaatgttcttgaggggaaaaatgaaaaacgggggaatattatagatatccttagaagcaatgtggacacttgatcagaaagagatttggttcttaagtgtatgcttcttgacacttgattgacctaccttttgtcgtaatttgttcattatggttgaataatgatccctattttgattttagtattatattatataatttgttttggttgtaggctttcagtgacaaaagtagagactatacagtgccagattctagtctgctagcagcacaaggtcctgctacagcttggcaaaattctcaggctgcacctatgtaccctggaaagtgcccttgttatcatacctaagttctggcggacaagtgccacatg

SEQ ID NO: 226128 - DNA, 435 bp, Glycine max
  unsure (1)..(435): unsure at all n locations
agctntgtattccagggcgcgaatttgttctgaatgctgaatgagcgccctggaagctcctgaggaaggatttgacaaccttggcccagacttggagtgtgttatcatactccaaccttgcccccacctctcacacgttcgatcataatatggacagtgcgaggttagtctatgggttggttatgaagatggacatggacgtgggtttcctcatttcacactagatctcacagatggcccagtccaactcctctaggcttggttttcctgcactaatttcagcattgtgcacagccaaaggagtcatctcagattctctgacttttgagtcccttagccctgccattaatttggcatacattanagaagaactgctagaaccaggaagatcccacgatcgaatttccaggacccgaaggcacggcctcaggatct

SEQ ID NO: 226129 - DNA, 436 bp, Glycine max
tgtagaatggctagacatgatacatgtcagggcttggttaggttcaaggatattatggatgccccacattatttccatgacacaaatgcaaaaatgatgatttggaaattttatgcaaaactggtcatgcatgcgcctatgtggacgctcaagtgtcaaatttttatggtcatgtgatgctagggctcaagattcattttctctattttaaatcaacccaatgtttccaaaatatgttcttttatcaatttgtgcattcatccgagtccattttgggcgtccgggaaaattttcacagcattcacccttcaggtgtatacacatttttttttcaaaaatcgattatgatcaatgaattttttaaagaaaagttggaagtcatctcttttcaaagcatgttggttttcagctagacaactattttctcttttttctt

SEQ ID NO: 226130 - DNA, 390 bp, Glycine max
  unsure (1)..(390): unsure at all n locations
aaaggaaaaacctaaagagttgatgctgaatgtaccacaagctngaggtaaactaatataaattctctcagtgtagtatccctctttattgcttctcatatatttatctttgttgcatacatgctataactattgaaaagaaaaaaaagatctgattgtacttaagcataacattatctacaaccaaaaggttttccaaattngttttgatcactcacaatagcatatatttctcacaaacaaagaatactagaatctgttttgaaacatagcatgtcacctcgaatttttgtcttttagaacaacctcttattgcataacctcaattggttcttataacgctattattatatacccagttacaaagaacagttctttgctctaacccac

SEQ ID NO: 226131 - DNA, 387 bp, Glycine max
tagtcttagaggggatggacctatgtatgttttgcatatgatcaatgacaatgcctattggttggacctctcacaacagtatggagtcatcaccacttttaacatttgtgattgaattcatcttgcaggtggagctgatattgaggaggaggaactaacacatttgaggtcatatctttttcaaggagaaggggatgatgcattcctctctaagaagggaccagtcactatagccatgagcaagaggctccaataggattgggctatagctgctgaagaaagccctatggttctcatgaacctcatggtagatttttgagcctatacgccacgtttgggttcaactctctttgtccatattacactaggatatccatatatttgatc

SEQ ID NO: 226132 - DNA, 448 bp, Glycine max
  unsure (1)..(448): unsure at all n locations
agctnggattaatgcttcaatggaggaatgtttgagggagagaaagagagaggggggagcacgaaattgaaggaagaaaaagggagagaagttgaactttgagttgtgtctcacaagactctcattcatcaaagttacaacaagtgttacacatgcttctatttatagactaggtagcttccttgagaagctttcttgagaaaacttccttgagaagcttctttgagaaaacttccttgagaagctagagcttagctacacacacccctctcataactaagctcacctccttgagaagcttccttaagaagattcctaaagaagctaaagcttagctacacatacctctctaatagctaagctcacctccttgagatgagaagctagagcttagctacacaccccctataatagctaagctcacccccatgagaaaaaacatgaaaat

SEQ ID NO: 226133 - DNA, 410 bp, Glycine max
  unsure (1)..(410): unsure at all n locations
ntaagcaaattcaaatgacaatatctgttgactcggatgtccgattgagtcatttaataattcttgacgctagaaattgaatacataagctctcaccaaatttaaatgacaataactttttactcagaagtctgattgtgtcccgtaatatatctagatgctcaaaattgaaaacagaagctctgagcaaattcaaacgacaatagctcttgactcggatatccgattgagtcatttaataattcgagacgctcaaaattgaatacagaagctctaagcaaattcaaatgacaataacttctgactcgaatgtccgattgagtcattttataatttgagacgctcaaaattgaatgcaggagctctgaccaaagttaaatgacaataatctnttactcagaagtctaatt

SEQ ID NO: 226134 - DNA, 437 bp, Glycine max
  unsure (1)..(437): unsure at all n locations
agctntaataattatggttgggagaacgtatactaattatgatgaatatatacgaaaagatttaataattgacaaatccactatcagttttacctcaagcaatagcaatgtatgaagtaactctcgatataacagtaaacgcataacggatcaactcattaagtttaggttgatgactatatacgaaaatatttagtttagttagttagataaaatatgtgagttattaatttagttagttaaaatatgatgaatatattggtggccttaatctcatattttgttcctctaatctagaattggtgtaactttgattnttcaagttttattttttaattcgtgtaaaaaaagtttttttaattaggtatttctttntattttttaaatctaacaaatttggtctctcaattatttttttcaatctaaaaattaataat

SEQ ID NO: 226135 - DNA, 433 bp, Glycine max
  unsure (1)..(433): unsure at all n locations
ntatgattaaagaaattcatattttgngaactgaaataactaaaagtgtaaagtgtgtaaaattagtgtcaattttttttcttttacttttaaaaaagatgatctcatagagacaacacttattttttttaaggggcaaacaatatatttaaaatattcaaagtaaaaaaatttacttttatggcgtagttgccccattattgtctatgtacacccaccctttatcttaagtattgttctcttctcacgtgggttttcatgatcttgttcttaaaaagtgcctctcaacactcaataggttgtgtctttttataaatagtctcttgtctcaatttctaataaatgtgagactttttagtatagaanaatggtttacaatattgatacatcaatttatcaccttcatataaactatcttgcagaaanattatat

SEQ ID NO: 226136 - DNA, 205 bp, Glycine max
agaacacaatttcggatactgtgcaactcatttgccttaatgcggacaatagactgattaccataatacatttcaagacatctaaggacatataaccctaataagtataaaaaaatgtcacttatcatcgtggagtctatcaaccgaatcatagaaaacacaggatactcaccctctgaacacttatatcaagatcctactacaa

SEQ ID NO: 226137 - DNA, 344 bp, Glycine max
aacataactgtatcttcagattctgaaaacatctccaaggggactccagtgggcagagtatattattgaatttaggtgggaaagagaaagaaacagaaagacagaagaaacagaatggagaggatagaaggaaagagaatagaaacagaggtcagaaatgtgcactgcactctgattatcattcagtttgtctaaaatacaaaaaaacctgccttatttatagacagctacctaatagccataaaataacaatagctggctaaaactaactaattgacataaagttgtgccttggtgacttgttggtcatgggttcgaatccggaaacagcctctttgcatatg

SEQ ID NO: 226138 - DNA, 419 bp, Glycine max
  unsure (1)..(419): unsure at all n locations
tattctatattatngttcatatgcttganattgagattataatgtggctatatatagagaaaacaattataactgtttgtaattgattaaaatggcaatgtaatcaattatctcgacagagtaatcgattagattctctttttaatcgattaaagtgttattcccaaaaccttgaaatatttccagaacaatgaaatcaattaaattcttaatttaatcgattaagtgttcttgatcacttctgggaacactttcaagaatgatgtaatcgattattataacctcgtaatcgattaaagcagaaacccaagaaaatagacatggtctcaaaagaaatgtgtaatcaattataggtatgtggtaatcgattaaactagaatgaagatatctctgcaagcttctcanaagacttatgtaat

SEQ ID NO: 226139 - DNA, 137 bp, Glycine max
atagatcgaagatagaatcatgtggccacacttttgactcctatcaggatgatggcaacttatattgcgctgcattgttgtgatgaggttaccgacatatcaatgaaattcgtacgcctcccatgagccatatgaca

SEQ ID NO: 226140 - DNA, 301 bp, Glycine max
  unsure (1)..(301): unsure at all n locations
tggagcctgtggagcactacatcacttactcctattctgtcctcacatctagaaccctaaagagctggctctctagacatttgcattccagggtgaggatatgcgcttaatgctaagagcgcgcctatgaagtcttttaagaatgacattgaccaccctagcccagacctggagtgtttattatacttcaaccttacccccacctgttacacgtncgatcttaatatggacagggtgaggctagtctaccgactggtcataaagatggatataggctttggctcgctcatttcaggccaat

SEQ ID NO: 226141 - DNA, 355 bp, Glycine max
cgcctgacgaatctgagggagcgcagtagtgatttattctctcggcggcacactactcaatgggagccttcgttagaggtatagcgacgagtctaaccacaatccgggattagagaagaatcatgtcgtggggatcctttagaggaacacaactgggaatctattctgggacattcatcgcacttgaaatactacctttatgactgtaatcatgacactgatatgtatgacgaacacatcgatgccttaatgcaaatcggtgataaaattgccgctcatggagaacgagtttactaaccctccagattcctttgcaattagtagattatggaaactggagagggaattgctcccc

SEQ ID NO: 226142 - DNA, 190 bp, Glycine max
  unsure (1)..(190): unsure at all n locations
tgcaagcctaaagtaagctcatgtcggatgctgctactaacggaaatattggtctgaaaactccagaacagataagtgaaatccttgaatatatctgactcaatgatcatgagcttcactcagaacatagaggtaatggttcanacagagactatgatgtcaatttctcttagaaccttttgatcaacat

SEQ ID NO: 226143 - DNA, 415 bp, Glycine max
  unsure (1)..(415): unsure at all n locations
agctntagttaggatcaggtctctattattttaagcatatttacacagaagctaattaagtagcggatgtcttagagaggtacgtatgttctttctacttcaattgccatgaggttatctattctttagcctggttttatctctttgtacttgctagtagattctgccggtttaagttataattgagggttttgagtggcctttaaacccttttgcgcataanaaaaattgttttttgttttcttaaataattacttcagtacattagttaatatttttgatcgattaaatttagatttaaatatatttttaattcacaaaaatatgaaagtttttattttaattcctacatctaatataaagtactactaatataattttactagtctcttatgaaagcttattgtgcctatat

SEQ ID NO: 226144 - DNA, 91 bp, Glycine max
caagttcgtttgatatatttgatcttttctctactttaccttattattctctaattaccccattatatatatatttcccatttatgcgatg

SEQ ID NO: 226145 - DNA, 274 bp, Glycine max
  unsure (1)..(274): unsure at all n locations
ttaggacatttctaatccacatgtctaatgattatatcctcagaactaacaaaaaacacagactctaggtggctaattgtcacattagggtacctaaagatgcctctaaattcaggatcaattattcactgatttttcaaaatggtcattctaatgagatcacttacatcacaattctcattagggaagtcaatcaaggtctgcaagttnttcaagttagaaacattgctatccttcaatgacatatgaccacatgactttggtagaaaaaatg

SEQ ID NO: 226146 - DNA, 469 bp, Glycine max
  unsure (1)..(469): unsure at all n locations
gaccttaagcacctgagctgcagctgcatatgagacacagttcttaattttatgangcgggtaggataaatctacctaattgataaagaaaaatccaaaaatccatacatcttaggcaaacaaggcatgctaggtcctaacattctcatcccattgaattctctattgattatcttgcttcctattattttctttttctacaattatctgttattaattcttgttccctttatatttacctctctttatcttttctcttataaattgaaaattatacaatacaagtacaaaacaaagtccctgtggaaatcgacactcagacttctgagtttctactacatggacatttagtgcactttccaaaccgttaacaccaacttagactagggtattttttgccaacgttgaccaatgatgtttctcagccgagggcgggtatgttctattgtccacatcgcccaactatttt

SEQ ID NO: 226147 - DNA, 190 bp, Glycine max
tcccgcccaaaaaattctaaattcttggacgatatgatcacccgacctggcgaagagtctgtatagactttcctgcttcactgtcgcacttgctttgagccttaaatgtagaaaacgcttctgacttttcctgtataaaataacctccgagttttcttgaaaaatcatcaatgaagctaattaagtcatc

SEQ ID NO: 226148 - DNA, 300 bp, Glycine max
tttgcgtgaaaagggactgggtatttcagagaggacgtaactattggtaagataaccagacaaaacaccttatgtgtttgcttctatgatggacctataaaatcgaacctagaattgtgatttgggagacaccctctaccccatacatatatgtattaataataacaggaagtaaatttcaggactgaatacgagtatttaaagcattgtgttaattccaagcctatcataagggtaaaagactcacattcccctttctaacatcaaaagaaacctgtctataaaatataaattcacttg

SEQ ID NO: 226149 - DNA, 233 bp, Glycine max
tctgatctaactcaacctggaaccccgagagcatgctcacctactcttattacttcgtgattcactctcgtctttatatttgatggctctgaacttgcataaagacagactcttgctccacttattggaccatgttatgcactgatatataacaccctgtcccaggagtagatctccacactaattgccttttttatggacactagacttccatcgcaatctccatgttcttc

SEQ ID NO: 226150 - DNA, 323 bp, Glycine max
  unsure (1)..(323): unsure at all n locations
agcttgcattggagaagggtaattgtcattttttatncaaccgctagaancatacatccgaggttatgggtatgtccatttgaaactttcgagagcctccgttggtcaattttgaaccgtcttatattttaagcgcctgaatatgccattctatcgcaaaagtattaccattcgaacttctcgagagcttccatttttctattttgatcatcttgatatattatgcgcctgaatcggacctccgtgtttaatagtttgaccacttgaatattgcaagagcatccattggctattatcgaggctccggatttattatgcccctg

SEQ ID NO: 226151 - DNA, 282 bp, Glycine max
attccttggattatatggatgaaccaagctcatgcttctataataaggttcatcaaggtcaagttggaatatggaagtaaccgctctgcaaaattggggcaaaagatgaattgagtcacatgactgcttcggttactgccaaacatatttaggattattgatgtccttgttactttcagtttcaccttgacacagatgtcatggaccatgttgaaaatctatattattcatccccatattctgcgtagaaattctcaatacctcagcttacatcattcgcat

SEQ ID NO: 226152 - DNA, 369 bp, Glycine max
ggatcttaagtcacctgaggcattgcaagctgttccttatagttctaagatacattagagcttcctatgagatgacatgtctaacatgtgtttttcctatctcgcttgtatcctataaagtccgaatctaaaaagccaattagatttaaggatgtacctttgggataccacaaaccaacattggttgtgcccttaaggtacttaacgatccttttaacaattgttaactgagattccttagggttagcttgataccttgcacacaagcaaacactaggcataatatctggttggcttgcaattaagtaaagaagtgagccattcatacctctatactttgattaatccactgaattacctttttcgtct

SEQ ID NO: 226153 - DNA, 328 bp, Glycine max
  unsure (1)..(328): unsure at all n locations
tacagaagtaaagcggaattaatgcacagcggatatgttaagagtagggaagaatgagacaaatacacaagagttnttacactgattcggcaacaacccgtgcctacatccagtccccaagcgacctgcggtccttgagatttctttcaaccttgtaaaaatccttttacaagcaaagatccacaagggatgtaccctcccttgttctctttgaaaccctagtggatgtaccctccactagaactaatccacaagagatgtaccctctcttgttctcagtcaaacccaagtagatgtaccctctacttgtaccacanaggatgtaccc

SEQ ID NO: 226154 - DNA, 306 bp, Glycine max
gcccatgcccctacttatcttccctagggcgcctctctttacatcggcacgcgtgggcttatagcctagcccaaacctctcgcgattttccttgaatttgaccaagctggccacaccattattgttctttcctaagcgcattctgggctcatattcgtgccctaacatcacacgggctaccatcatcacaacattagacatgcatggtctcatcgggagggattccacagaagcgtcgctcactatctcaaaggacttaatagccatcttccaaggatttcttcacaacttcaacatatggaatag

SEQ ID NO: 226155 - DNA, 370 bp, Glycine max
  unsure (1)..(370): unsure at all n locations
agctngcccagagaaagaatccacggagtgttttcttctttctctaaagactgaaaagcagtttctaatgactcctctgccgcctccacataaagcatagaggatgggcagctcaccaagatgtctttctcgcctgatacgatgaccaaatgcccttcccctacgaatntcaacttttggtggagtgtagaaggaacaactcccactgagtggatccacggatgccccaacagacagctgtaggggggggttaatatccattatttggaaagtaacttgacaggtgtgagggcctatttgtactgggaggtcgatctctcccctaacctcctcgggggtgccatcgaaggcgctaaccaccattgaactt

SEQ ID NO: 226156 - DNA, 348 bp, Glycine max
  unsure (1)..(348): unsure at all n locations
tacatacccctctaataactaagctcaccctcttgagaagctttcttgagaagggttctaaagaagctagagcttagctacacacacccttctaatagctaagctcacctccttgagatgaaaagctagagcttaactacacacttctataatagctaagctcacccctatttcaaaaatacatgaaaataccaaaaaaaattccctactacaaagactactcaaaatgccctgaaatacaaggctaanatcctatactactagaatggtcaaaatacaatgcccaaaagaaggaacaacctattctatatttacaagaagagtggacccacctggcctatggctcaa

SEQ ID NO: 226157 - DNA, 431 bp, Glycine max
  unsure (1)..(431): unsure at all n locations
tgcaagctttgccgcagatcccgtagttaagactacacctgattanacaggcctcttaggtgtagactaacttaaactgagtttcatccgcaaatccctcatgtaagactagactcagctcaagtagcttaccaaaagttagcctaatttagcctaagctttgtccgcacatccctcatgtaagactaggcctaaactaaacagcattattgtaacagcataattaaaaccaaaacttaactcgcagatccctcatgtaaggctaagtttcaatcctgcttcaatcaagttctaaggcaacagtacatttctcgatgctaaagtcacctaactgtgcacacagatgggtgatcagaccaaatacatactaatattaagcattgaaggaagcattgaacataaaaacataatcgactagatttagggtatta

SEQ ID NO: 226158 - DNA, 359 bp, Glycine max
  unsure (1)..(359): unsure at all n locations
actcagcttaggtcgggtgcttacagttacaatcatgtgtctttgtactgatgctcttgaaaactgttggcaatctaattacatgtccgaggaacattacagtntggcagaagtgtggtttgtggtctcgtatcaatccgtagctgcttaatattgaatcttttaaagagttggtgtgtatcttatgtcgctcactcaatgaagatcaatctactttgnttggtatgactatgtggaaccttcggaggagtagaaatgagattctttggaattcaagtgatgatcaagatattggagttttgaatagagctagattggttcttgcagattggaagttgtctcacgctgtcaccaaagtt

SEQ ID NO: 226159 - DNA, 425 bp, Glycine max
  unsure (1)..(425): unsure at all n locations
tccacaaaaccataatgtgattgggattccttatttgttaaatgcatgnncatgactctataggcgagtgaaacaatagtgacagttttcacaattgtcggactaagatgtggtggttaaattctggagattagttgtggttgctgttgagatgacttaaaaggagctgaagcaaatacagtggttatctcgtgatgttgagctgcagttaaggtaattgcaatgcttattgcaattcactgcgatgggaacaaacagggatgttgggagtcactccttcattgctgtaagggtgatgaagtgcaaaccatcatgtcttttcatcttattattttgctctgattctgagataacgtgttcatgatgctcacagagagtgattcatggagtgatctcacaggtggttgtgcacgatgattgatgac

SEQ ID NO: 226160 - DNA, 403 bp, Glycine max
  unsure (1)..(403): unsure at all n locations
aaagggggagaatgtgaattgttgtatacacgactttgatgatgtcaaaagaagaatccaacaaggctcatttgcttcaagattactacaagattgtttcaacaaataaaggcttaattcaagatttcttcaagatcaagccttgcctcaaaacgaaaggtntcaagtcatccaaggcacatgtaatcgattaccaatacatgtaattgattaccaatggtttgaaagtgtgtaatcgattacacatcaaatgtaatcaattaccagatactctgagagttgggaattcaaattttaaataaagagtcacaactgtcaagaanataactgtgaaccgatacactaatgctgaatcgataccagaaggatttcaaggatattgccacagcacatctatcattga

SEQ ID NO: 226161 - DNA, 433 bp, Glycine max
  unsure (1)..(433): unsure at all n locations
agcttgtaggattatggcgtacccatcatatgtggtactaggtggcggtcgggcgatggtgcacaacaagttttccacatccacgatgcgcgcataaacccaccatcccctgttgcccaccttcaactgagctcacgtactcccacgtagcccatatcctcgtttctctcaacaccgggtccccatcaatcctcccaagcttccacaacatccaagcaaaacaacattcaaacagcacaagctatcacagccaagcaaaacagagcaaaggcagagaactctgctcaacacatcaaccaaaatcacagcttttctcacttaaagaccacagtaacaattcctgtgatccaattcgttaaccgttggatcgactccaaaantttactggaagtctatagtgcataagccctacatttgaccgttgggatctact

SEQ ID NO: 226162 - DNA, 466 bp, Glycine max
  unsure (1)..(466): unsure at all n locations
tgtaacgncnctggcaatggcgggagcgtgtatgcctctatngacagcagcggaacagggatgccaacgtgcgcagtcccgccattgggtcctgcggcacaccttaaaagagttgttggaggacgatgcgagaaggagaatgtggtggatcttgttattgtgctgtgaatggaagatgcacaagagagagttgtagaaggcggagtctgcaaggtgagtgacattttcggatgagagagattatgacgccaaactcggtcactcggttacatcttttgaattaaataacagtatttaaccagatctaaacacctgtctatagttggacaccaacaacttaaatttttggtttccaatacattattttacaacactggtttgaagaaaacattcattacttaataatgtggtttaatttactaacttatttagtacatatcggatggatgttaaacttcaaaaaaat

SEQ ID NO: 226163 - DNA, 335 bp, Glycine max
accctgtttgttcaaacgcgtcatttaacaaatcccatatcatagtcactgccttgacacttaaaccacccaaaacttttatatgaaattattcgcttataaaccctagttttgtgtactcgcttccttcatacaatgtttggctcccatcgcttagatactcatacaagccattatgatcttctcttgattcatcatttactattccatcttcatttaatgagggtgatgcacctacattatggtcatgttgcctattattgtcaaatgcgtcattgatcctcatttccattgtgtgttgacggtgaacaccactttcctggaaaacatcttcc

SEQ ID NO: 226164 - DNA, 331 bp, Glycine max
  unsure (1)..(331): unsure at all n locations
atgcaagcttcctcgtggcttctgtgagaaactttctctagaggcttctntgagaagctagatccttatctatccacacccctctattaactaaattaacttccttaaaataattacggatgaaaataacgcaacaaataatcaaacatcaaacataattactaataatatatagatatatatatcaaggtgttacatttattcttttcacaagtgttgagggaagaagcctatagtttcaagaacctctggattttaggtcaaatccttttcaagggggagggaatgatgcaatcctaccccctaagggcattggatagaagacaacaag

SEQ ID NO: 226165 - DNA, 336 bp, Glycine max
ataacaatttattatcccaagatacagggttggacttcaactatcctagatcctatacatatacaatagctaccatgctatctaggttgggactgcagttacttcatggctcacaagtcaatcaactgcatgagatagctagcctcgcaaaactgcaaagtcaacatttttaacaaaatggtaatcaaataattctcactaagtagaccactgtactggtaaatacatcaaatagatagatatcacataccttaagatcatcattttcacttaaattcacagtagactatggaatagccaaactgaaaacgcaagagattcgatggtcttgggtga

SEQ ID NO: 226166 - DNA, 460 bp, Glycine max
agcttcttatccaaggctcatcttggttgtgattctccttcttccatggcttattccctagtggatggcgcatcctctcacctcttctcctttgtattccgctgcatctccatggtggaaaatcaccattaaatgacctcattgaagctcaaagatcctgcctccatagaagcaccacaagcaagcttccatcacatgggtaccagcccggcatgggtttgggctggaacgatgatggtgtggcgagcttaatagagttcataggcaaccgtggaaggttcgggctgggatatgaacctacacgcactgatgtgaagagaatttccctacaaagaaggagaaggagcatgggccacccgtgatgaccgcaagtgatagggattcccttatgttgcattagcgaaagctttgtcagcgtgggctggatgtgtgaaggacgggtcaccatgatccacaatga

SEQ ID NO: 226167 - DNA, 472 bp, Glycine max
  unsure (1)..(472): unsure at all n locations
gcttcgacaccctatttcaggcttagaataatcatgtgaagttctctntttcacatcaaancatgntgagtcgttgaatttgtgttgaccaaaaaaaagttattgaatttactttctcgttaattgttataaagcctaaaattatcgaatttgtgttaacatataattgctttcttttttcttctgctttgatctctgcttttttaatgtaaatccctaacatcgggattctacataaataacaaagattaaaatataaatttgatggtctaaataatagagaattaaaatgaagcaacaatcaatattatagaaataatctatgtaaaaatttacatcttgaatttgtagagattaattaacacatcaatattagaaattaaaattatacaaacaaatatggaattattcacataattccttaacctcatcgtangttacaatttggtccctatctgttaaaaatttaaat

SEQ ID NO: 226168 - DNA, 330 bp, Glycine max
gcagcttgccgagaggcgaggagactacccgttttacgcctccagggtagacaactaacagaggtcatccgtaaacctcagaagacagacccactaagagctaccaaggtaagcaattaaccaagcctgccgcaaccctaaggagacaggcccaacaacagcttattgaacagcaactaaaccaactaaccgcgaccctatgaggcaaagtcacctgtcaacagccaagcacgacattttgagcaagcacaacggcccaaggggacaacaaacaacaaatagctcgaagagcttgaaaaaacaaacatagaatagagacacaagtataaa

SEQ ID NO: 226169 - DNA, 270 bp, Glycine max
ttacatgttcgaggaacattaccagtttggcagaagtgtgggttgtgggtctcctatcaatcccgtgctgcttaatattgaatcttttaaagaagtggggtgtatcttatgttgctcactcaatgaagatcaatctactttggttgatatgactatgtggaaccttctgaggagtataaatgagattcttctgaattcatgtgatgatcaagatattggaggttttgactagacctaaattggttcttgtacaatggaagttgtctcatg

SEQ ID NO: 226170 - DNA, 223 bp, Glycine max
ccgcaaaatcgaggaaaagatgatctcatgccagcggcaggctttgagacacatgccgcagagagaccaaaaactcagtgagaactcgacttaaatcaatgtggtcattggcaaactgtactccacacaaaagtttgacgcggtaaactgaataaacgactttcgcccaaaaatcatgactttttgaactctaaaacctaaaaaaaaaattgtcagtaaaact

SEQ ID NO: 226171 - DNA, 247 bp, Glycine max
attctatattcattattccccttaaccctcccctaactatgaaaacatgagccccaagccctgcttcactgatgttaaaacaaccagtttctttcctagccattatgggcctaacgggcctatgatctactgaccaagctaatgattcgttctggtaaagtgctctgaagacctcaggaagacgggacacttagacgcctaaccttcggacaggcttttgacgccagggtgttcgaagaatcttata

SEQ ID NO: 226172 - DNA, 227 bp, Glycine max
ttcttgaggaccagcaacaatttaaatttgagtcaattcggccactgctatttataagtatatagtggggctaaattatataagaatttgaccgttttctctcctaagttttccttttagagcaacatctggttaaattaacatcatttaagttcttgtgcatataatattacaagtgacggatttatgaagcttacaaagtaaaataaagcctacaaaagcataaa

SEQ ID NO: 226173 - DNA, 243 bp, Glycine max
gaatctctcgagcccaggggcccggctctatacactccattttacttagcacccgcagctttctgggatgcttagtgaaagaacctaaaccactaactcgcacgatattgtttataacgaatgatcggaactgtcgatactaattatccttcttttatttctgagtccggactcacaatgactaaatgggtccagccctccaggacaaaaaatggagccccgcaaagtccgaaaaatcggatg

SEQ ID NO: 226174 - DNA, 458 bp, Glycine max
  unsure (1)..(458): unsure at all n locations
agcttataagaacaaaattgccgctantatttccttatatgcacgtgaattaggacgcatcaacaagaatcaagccaaggctattgtgcaagcaatcaatggggcaaaacacaccaaatgattatgatgatggatggctcaaattctcacaaaggtaaactcatcactttcaaatagagctttcaaaactatcatgacatgtagagaagaatcaaggatttcaagtcacaaaatgtcaagaacttttattttcaaaacaattacccatttcttgaacatatcctataattcaaagaaaaacatgcaaattcgcacgtgcacacaaaattgacccaaaatattaaactgtaaatccgacgaaactaacacattaacaaattaacacaactaacaaatatacaaaaccaactaaactagcaaaaccaaagaacactccctcccatactataaacaacaca

SEQ ID NO: 226175 - DNA, 348 bp, Glycine max
ttgagaaagattctgacatgggtctatattaaggagaactactgcaattaatcctattggcctctatgtggtgatctattgatcactgggacaacatgtataaatctcaaagtcaacacttgtgtgaagtaatttaaatgactgcctggccactatctatttctggattaattcaagaactgaatgggtgggatgcatcaagtaatcacatgacatgcttgtaggtttaatagcattgtatcactgaactcatgaacggatttgtgagctgatggaggaaacactatctcctgtcaacaatgtgctactcagatggtatcaaactactacttttgtggactacagttt

SEQ ID NO: 226176 - DNA, 469 bp, Glycine max
  unsure (1)..(469): unsure at all n locations
ttaagtcacctgcggcatgaagcttccgattggataccatgctacatctgctccggccaagctgtcttgaaagaaatggaccaacagcttttcgtccgtagaatacgcccccatctttcggcaatacatctgaagatgccctttcggacatgtcgtccctttgtacttatcaaagtccggtactttgaacttgggaggaatgacgatattgggtacgagacataagttcgctagatccaagaatgggtaattgccgagaccctctacttctcttaacctctcttcaagcgcctcaatctttcccttatcttccgtgaagggaacagattcttttacgggtgtgggtgaagccgtgatatggcggactatgtttggttggggtagttcatggngggagggatctttgaggtggagcangggaccgagatgggtatcttcttcctcatcgtcttgcccgggatagtcgtca

SEQ ID NO: 226177 - DNA, 473 bp, Glycine max
  unsure (1)..(473): unsure at all n locations
taatgatgaacaagattgattcanagaagttntgatgattacaaaggtgatgataaaaagctcaaaggtcaagaacacttcatgataacaaagatgatgatctcaagaatcaaagaatgagttcaagattgaatcaagaacacttcaaggttccagaggaaatttgatttcaaaaatcaagaatcaagtttcaagattcaagaatcaagagaagacttaatcaagataagtatgaaattttttttttcaaaaactgagtagcacatgaatttttctcaaaacttttttaccaaagactttntactcattggtaatcgattacgagtagcagaatggttntcaaaaagctttcaactaaatttacaacattccaattgatttcaaaatgttgtaatcgatacaatgttttggaatcgataccagtggcttgaacgtaanatcaattcaatggaagagccgtctttacaaaaact

SEQ ID NO: 226178 - DNA, 464 bp, Glycine max
  unsure (1)..(464): unsure at all n locations
agctttgcttggagcttcaatggagaatgtttatatttataatggcaacgngagggagagagagagctgtctgaaaagtgtggtgggggctgagtgaaaagagagaaaagctttttggttttaaataaagggttttctctttttctattattttattcaagctctgccacatgtccctatttgagtggagccaaaagggcccactttccctttttactgtgatccatactcagccacaaaagtgagaaaaacctgacctttgaaacgctaatatcctgcatcggtttgcgtgccgtttctctggttccagtttctcgcgtttctctgcgtccgtcggggccagttttcgaaagtaaccaatatatatatcaaaacgctcagaataaaaccccgagcgtggttcagaggttggnttcgntaaattttaagttgcacgcacaacgattgattttaactaattaatt

SEQ ID NO: 226179 - DNA, 371 bp, Glycine max
  unsure (1)..(371): unsure at all n locations
ntacagcagattntagtaatgacccactaacctagaattataatatcttaatgccattaacctagggaagtaaaaaaacttaatggctgagtgtaactgaaattgtggcaaccaaaagtcacccccaacagccaacaagtcagccaccatttggtctcccaaaaggctgatgcctaggttgccaattgggcccttattacaacttgaactaaacctaactaaagcccttttagttgattaacccaaaacatatttttggtcaaccaactttacaaggatngggccattatttagacaaactatacactctaaaattgaaacaaagtggtgtcatttagtcctcctccatttgggccatgatacaactcaca

SEQ ID NO: 226180 - DNA, 218 bp, Glycine max
gaactctgaggcctggttcctttggcgaggaccaatacgtgttttcaggagaaagccatcgccctgtattagaacgtgaaatgaaggggctaactatcgaaaggcggatgttttcacggaagtacccccctctacataaacacttatcagggcaatatcaagttatcacttagctttatttagtttatgcaattggggcaagggtctctcacgcctat

SEQ ID NO: 226181 - DNA, 244 bp, Glycine max
  unsure (1)..(244): unsure at all n locations
ggaaaaagggaaaagaaaaggggnnagaaagaaaagggagagaaagagagaaaaggaggggaaaagagagggaaaaaaagggggggaaaaaagggaaggggaaggggagaaaagaaagggaaaaagggaaaaagggaaaggaggaagaaaaaaaaaaagaaagaaaaagagggaaaagggggggagaaagaaaaagggggggaaaaaaaaaggagggagggagggaagaaaaaaaggagggaag

SEQ ID NO: 226182 - DNA, 417 bp, Glycine max
agcctttcgtcgtagagacggcagttttatattggttattctgagcaccactcgagtgtgttcgccagtctacgtgactcaaatgcgagtatgactgatcttgtgagcgcggaatatgacgtatatctccgcgtgctcacgggcttaactgctgatatcgtccaacggcgcacaaaaccaccttagtctttgcgtgctatcacgcgtttctacttacagacagcggaaaagaatgttatacggatgaccactctgtgatttccgcctgtctgcgggactttaatagcagtatacagatcttgcggccgcgacgatgcgttaatctcgctgctacaggcatgtcggcgcattgacagggccataaaaatgtaaccttgccgcttcagttctcccttaagccaacaatagaagctttcg

SEQ ID NO: 226183 - DNA, 195 bp, Glycine max
aatgcgagaaaggatgaccctagggctgctttctctcaatcccgtgggtatggtctttgaaaggggggaaaagaagtctttgaatgcacaaaacgtcccccctttcatcattcttataatttggtgcaagggtggctcgcccaggcgagctaacctgcactttctcttgttgtttattttgatgggaataataac

SEQ ID NO: 226184 - DNA, 445 bp, Glycine max
  unsure (1)..(445): unsure at all n locations
agctngcaagtgtattgactggatatngtttgattcttttttttagntntttatctttctgtcaggggagtttcactaggtcccatgtcaaccctctaacatggcaactaaaaaatatgagttacgtaaggataggtcattcaagtcttttttctaattgaatccagctagtatcactttcgtacagtatccttcttatcacggtaatgcgaagtgatgaataaattaagaggtttttgttttcttacaagggtgattaaattgaatgagtttataataaactaaatattattattttaattttggtntgtgagttgtacttcatatatgcaacttaacttttataataaaaatagaataaatggtttattaaaacagttatgtatttttttaaaatataataggtaaaaattaattttttttcatttaggccataattatattt

SEQ ID NO: 226185 - DNA, 424 bp, Glycine max
  unsure (1)..(424): unsure at all n locations
tttcgagaaaaggaaataattcatgaaagtgatctagatctacttacttatttgaaggtggtgatcaaagagacattcagggtacacccacctactcctttattgctccctagagaatgctctcaaccaaccatcattgatggctatgaaatacctgccaaaactaaagtcatggtaaatgcatacgcaatttgtaaggattcccaatattggattgatgctgataggtttgtccctgaaagggtcgagggtagttctatcgatttcaaagggaataactttaactatctcccttctgggggaggacgaagaatatgcccaggcatgacattgtggttagctagcattatngcttcactagctctactactgtatcacttcaactgggaactcccaaacaagatgaaacctgaggaaatgaata

SEQ ID NO: 226186 - DNA, 431 bp, Glycine max
agcttctagccaaaggacttactttgtttaattcctttgatagcccttttgagccttgtttccctttccttgttttgaagctcactacaagccttaagtgaaaaaccatgatattaccatatccttaaggaattttggagctttggaattgttttgggaataagtgtggggggtttttgtttcattggacaacttgttttgttgactatgcttcatgatgtattttgggccatacttgatgtacattgtatattggttaaatgttggacatgctgaatgaaatattgtttctcacaggcaaaaaaaaaaaaaaaattcgaaaaaaaaaaaaagaacacaataagttgagtgaaaagatcttaatggacacgatgagaaactttggtctaccttatgttaaatttacttactcctttatttctaatttttct

SEQ ID NO: 226187 - DNA, 371 bp, Glycine max
  unsure (1)..(371): unsure at all n locations
ttcataagngaaatcatgttctaccatctccctgagagttctctcacgaggtggagtttgagccatgttctcagtatgaaaattaacagtcgaatgctcaaaatcagaatattcagaatcacgagcaacaaaatgcacagaatgatcatgatgctcaaaatgcacagaatgaccagtatgcacactatgcctaactaatctatgaaaggttctatctatatcaagatcaaagggttgtaagtcacctggatttccctagtcatgcactatatgcagcaaatcatgtgtttctcacacaagcaccacgggagggttaaaactacaactttagtcaaacgatatccaaatgagctgtaatttgtgagcacacc

SEQ ID NO: 226188 - DNA, 422 bp, Glycine max
  unsure (1)..(422): unsure at all n locations
tgcaagcttcaaaccatagcaattcaaaatcnatggatctaaaacccctcaatttagcggagtttcaaggtttgagaagtgaaaatgaaaatgaggtaattctggagcaaactctcatctcacacaagtctataacattgatctaaacttgctcaaactggttttacgactaaaactccactgaatcaaaacttgacccctcaacacttcaattaccctagaaatggctcttgctttcactttggtcactcatttttcctatttgctcagcccaagcttgtccataagtcctatatgacatttcaaactaggattaactcactttaatctccaagtaccactaaagccagatttagcctttcaaccctaaagcatacatttttcactctatcactacatttcacttgtaaccctagtaactc

SEQ ID NO: 226189 - DNA, 261 bp, Glycine max
aacaatagattattgcaataatcaaaacagtacaagaggtgctgcatgaataagaaatacaaagcacctctggtgctgccttccaaaataaaacccaaactaacccatcaataaggacatctccacataggttaacccaaggactcctctatattagaggaccaatgggtgaagctagtgtagaagctagtgttgaagcctttctctctagctttagcccagaccaagcataaacatagcctgttccatgactttagagga

SEQ ID NO: 226190 - DNA, 429 bp, Glycine max
  unsure (1)..(429): unsure at all n locations
gagactttctgtgtctccttattagaaagactaacagctgntccatctggatcaataactttgttacacaattctcatactatttctgatgcacctttgcagaaagctaggacacttccatcacgaagaccgactagcacagacatcttcttccgcactgaattgataggctcaaccgttagtatcttatatgttccacgctgtgcttcaaaatcaccacctgaaagcaaaccaaattctaacaatgctgattctgttggtgttcccaatattggcatttttccatctttgaccttaacaacttcggaagaagtattttgaaatatagaccgcttaacgatgcttaaaacttcttcaatatcgttgctttaggtagcaacactctcaatacctttatcttagtgctgtttcacatatccaatttattac

SEQ ID NO: 226191 - DNA, 487 bp, Glycine max
  unsure (1)..(487): unsure at all n locations
ttaagtcacctgagggcatgcaagctgacacaaggcttaagcacgatggttatattcttacacnagaaaaataccaataaaccacaatattctaaattggtcttcaaggagaaataatctgaaacatattgtgaacaaaaacattagaacaccatactatacaactctcagaatactaatttcttctaccaatcattttcttcaactaaaacattccaaaccttcataattgatgatgaatgttcatacatcaacaagggataatgttcaagaatatactaaataaggaagaaagcaaccatttccatagccaacacatgaaatttacatacaccatggacaacaaaaccaaaacatctacaagtaaatcttctatacatgatgaaaagactaatttttaatcaatgcatgctgatgaccaactataccaaaggcaagtctctttatggtgatgtgatgactttcttatgatgatgaatgctcccaa

SEQ ID NO: 226192 - DNA, 241 bp, Glycine max
taaataagcccagaggcgggtttggttttaccagaactattaggagtttaagaagccttcctgtaataccacttggtatttattaatatttcattagtccactgaattaatcagacttcctactttttagagaagaccccctgatagatacaagattgacatttgctcacacctataaagatatacttttcttctatctccttttggactatgccagaaaagtgcaaaaatcatgtttatt

SEQ ID NO: 226193 - DNA, 364 bp, Glycine max
aagacagctgcagacattgacctctccccacaagtacctgggaagactattgcctttcaacaagctccttaccatatacaatatggggctggattttctttttgcagctccattatgctgaggtgtgtatggaggagccacttttagaattatgccttcttgatcacgaaattcttgaaattatgtagaaacatattcaccaccaccatctgttctcaatatcttgatcaatgagccacgttgcttttgtgccatatttttgagcttctcaaagacttcaaagacatcactctttcttcttataagtaaacccatactcttctagtcaaccaataataaaggaaatgaagtatctgtttccacc

SEQ ID NO: 226194 - DNA, 397 bp, Glycine max
  unsure (1)..(397): unsure at all n locations
ctactcgttattggnctctctcctctatccggtgcttaagctctctgntactgccctacatagcccctcggaaattggtctggccgtgttcttccctacgaacccttttggtctcttgttccaaagacttggtggtagctatatttacatctctcagttcggattctcttttcaaatcttgagagctgctgatataacctttctttgactgtttgggcttgctacagttctgccctaagggccaacacctcttcgttttctccggtgcctcaacttccttccctttagtgggtctcaaactctggagccatccagaccttgatgtggactttaaccacttacagtagtcgccgatggccctgtgtactgctttgagttctttgccttcttttgacca

SEQ ID NO: 226195 - DNA, 257 bp, Glycine max
  unsure (1)..(257): unsure at all n locations
aattaaactagctgggngcggcgagggggcattttgtttttgtgggaaggccgaggaccttttttatagtgacgaagtgtggcctgttgtagggtgtgctgcttgtaataatttgctataaaatcttggacttaaatatgtaaaataacattgatttaataaaggaaagaattctcctgtaataatggcatttaatattactcccaccatgataaatatttacacattgatttatgaggagaatacctgttgcggga

SEQ ID NO: 226196 - DNA, 457 bp, Glycine max
  unsure (1)..(457): unsure at all n locations
aagcttgaagctcaagaaagactcttgtttcattggntgtgtattgcaatgaagaagtcaacatgctcactagataaagagaaatacttaaagcatagagaagtattccacaacccaataacaagaagaatgttgcacacatgaacatctgcaccatgatattaacatgaagaacaacattggtgcaacacaatcataatgatattttatcaacatgatgagttcattctggacattgtgtctatagctccattaaagcaattaagatgctattggtggatatgtaaatgttgaagaaagatattcaactttccatgaacaagtcgtggtttgatcgcacttgaatcatagacaaaattgagcctcaagttgccaaagataatccgcttggacaacttaatatgcgtgaatgtaattgaagactactttagctatagaagttcatttgagatgatct

SEQ ID NO: 226197 - DNA, 258 bp, Glycine max
ttgcgcccaagaacaaacccgccgcgagacgacagaaccgactaagagccctggacaccacaacgcttagaagccgcaagggacggcagatcaccgagaacaaacggccaccacaggacaaaaacaacggctcccaggaggacacagggcccggaaaggacaaaacggacaccccaggccagcacgaccaaaaacccccgaagcaagccaacacgccaacgaaacggcggcgcaacgaagcccggcaagggcagaaaa

SEQ ID NO: 226198 - DNA, 259 bp, Glycine max
ctctcacgcgctgtatacaatgaatagacgcgtctgtacactcagattatttctggctacgtattctagttggttggagagcatgttaaactattcaataattaacagaaagctgttacgcacttataaccactcactcacaaatgtcaagcctaaacgatatgcttatgagtcgtgaggctaacatatcttaggctgtacggtgatcctattggattactatggatcagatatccaccatatgtggcgctttcctaca

SEQ ID NO: 226199 - DNA, 442 bp, Glycine max
  unsure (1)..(442): unsure at all n locations
taagncacctgcggcatgcagcttccatcagtggtatacagcactttattttttcaggtgctccttaaacctccattaattttgttgctttaccttctcttccattgttgaatcttcattcttttctccctgtatctcctcacatgtcttgtgattaatgtttttaacatgattctttagagtctccaccgattaaacttgctatagaagctagattcgattttctatggttcaaatttctagatcttgctcttgaaccatgaactgtgttgagtttacgctcctttgagttatgtcttgctattctttgtggctgaaacctaaaccataaaattcttacataaatattatagtacaataaaacctcaaaaatctagagtgacttgtacacctattgtaactctgtcatagaagtcatgtctactcatgaaacttgtcacat

SEQ ID NO: 226200 - DNA, 418 bp, Glycine max
  unsure (1)..(418): unsure at all n locations
accttgagtcacctgcggcatgcaagctttacttatgtggagggcggcgttcnttttntcttgtctcaaccgcgagctttgaccaccgcccttccttcctgcaatgcttctctttacatctgcctgagtgggtttatagcctaaaccatacttcccacgatttcctttggcatttatcaagttagttatgccgccgttgtctttgcctaaacccattccgggttcgtaaccgttccacaacataactcgggccatcattactgctgcatcggacaggcaagcttgcccagaaaaggagtccacggaggaaatgcttaccacctcaaaagaatggaaagcgcgttctaatgactcctctgcggctttcacataatgcataaaagatgggcacctcaccaagatgtcttcctcgcctgaa

SEQ ID NO: 226201 - DNA, 377 bp, Glycine max
  unsure (1)..(377): unsure at all n locations
gacactctanaaactcagcttggaaggatcttaatggagagaagaagagggtatatatgattatgggggaacacgaaagtgaaggaacaagaatggagagaaatctaactttgagttgtgtctcacaacgtgacatgctggaaatttctacccagaatttttggaaacgatgtattctgaatgagtatatatatatatattagccattaatcgagtgtatatgcatatatgtcccttgatagaagtaggaatagtgagggcaacatatgcgggttacgctaactaaggaagagaaatccataactggcaggttatgggttacattcttacataattacctcaaagatatcggttcgcgtgtgacttaaaattcaatg

SEQ ID NO: 226202 - DNA, 433 bp, Glycine max
  unsure (1)..(433): unsure at all n locations
agcccaacatctatagagatatatttgngctantctcnaactacnacaaagaactcgagctatgacattgaatgaaggatattgtatttaggcaacaataatgaacatagctattgaatctaggtaatagtatatgtccaactattgtatttagcttaacattgaatgatggatattgcatttatcaaatatagcatgactattggttctttcttcttagaatagtaatctttcttagaagataaacagatagtgtttctaaaaacaattgtctgatatatcattctcacccgttatgaacatacttgggtagatatagtgctctgttatattcttttcagaacctagtagctctcaaaactaacataaaacttcttcactagcaaattgtggtgtgaaattagaagggctatatgtaaagatcgcattcata

SEQ ID NO: 226203 - DNA, 267 bp, Glycine max
aatttagatttcctaaccaatacattttcagagtttgaaccattaaccatacaagcagctcataatgtttaaagagcaattaatcaatcaattatatattacagggcacattaaatttaagaggatataaacgacatatgaatgtgttatagtagtcaactatgcttcaataatatggtattgactattatacatgggtaatcacatgtataaatactaatgactttgactcatacatatttattaatggcataactaataaaggta

SEQ ID NO: 226204 - DNA, 320 bp, Glycine max
acttaaagtaaatatcattaatggtaaaaatataaaatcatatcatttcattatggttattctactaatggtctctcattttatttaattaaactttaaatttgctaaaagatcaaataaatcttaaaaacagtgacgcgttcttaatattttaacaaataaactattattgacccatgcttattaatttaagatattaaatggaccgattaacaaacttaaaaaagtaattaggagcaatggttgactactttgattcattaatttgtcatataatacagttcaatctttcaagtatttgtgttaaacggtatgggtat

SEQ ID NO: 226205 - DNA, 441 bp, Glycine max
ctgcagcttgagagggggagaatataatttcttgctcgcatgtcgcactgatcccgatctaattttatactagatagccagtccaaatctacttctaaagttccaattgaagtcaattaagcacactacatagcatatatagttcattcacacagaactagaaccgtttaatatattggcttgagaattcaatgcttcaagctagtaacactggtccctggcccacaagctatatatatatatatattctagaacccgagccaaaaacaagagccttaatgcaagcacaaggaccacgaaacattgtgatgcatcacgcaaagcttaatataaatagtacacgaaagagcgggtgagaagtcttgtttagttgtcttgcgatcaaaggactcctgagaaatcatctaagactgaatcttcttagcccaagatccatatctg

SEQ ID NO: 226206 - DNA, 251 bp, Glycine max
aacatgactggcaatccaatggtgcatttcgcgaaacaacttaattagcacttgccaattacataaattgctagtgcttacatatgattccaatgtaagcacttatgtatatgttactttataaatgaagaagaaataacattcaattataacttctaatctgttttataagctattcttaagagctcattgaaataaactgataactgtgtatggacatatcaatgcctatttcataaactctcctaaaa

SEQ ID NO: 226207 - DNA, 246 bp, Glycine max
caacaggagtcaaaggaacgggaagacccacagggggcccaacacagaacaagaagagaggaagccacacacccgccgggccgaacgagagaacgcaggagacaacagaaacaaagaagcaaaggcgaacaaagacgggacgcaagagagagcagaccagcaaagagagggatagaaacgcaagcagaaagccatagagcagaaaaactagcaacagaacaagcacacgcacaaaccggaaaaccc

SEQ ID NO: 226208 - DNA, 381 bp, Glycine max
  unsure (1)..(381): unsure at all n locations
cctgaggcatgcaagcttgagcaattaaacgacaaaattttttctttttgtccgggngagtcccgaattatattgagacgctcgaaattgaatgttgaagctctgagcaaatgcaaacgacaataactctttactcggatgtttgatcgagccccgtaatatatcgagacgctcaaaacggaatgtcgaacctctgagccaattcaaatgacaataacttcttactcggatgtctgattgagtcccgtaatatatcgagacgctcgaaaatgaatgttcaacctatgagccaatccaaacgacaatatacttttactcggatgtctgatcgagtcccataatatatcgagacgctcgaaattgaatgttcaacctctgagc

SEQ ID NO: 226209 - DNA, 410 bp, Glycine max
  unsure (1)..(410): unsure at all n locations
caacattcaatttcaagcgcctcgagtattacgggacttaatctttatccgacgttaaagtcattggcgcttgaagtggatcagaggattaacattcaaattccagcgtctcgatatatgacggaactcaatcagacatccgactaaatagtattgccgttgaattagctcagaagttcaacaattcaatttcgagccgtccgatatattaaagcactcaatcggacatgcgagtaaaaagttattggcgctngaattggcttagaggttcaacattcaatttcgagcgtcntgatatattatgggactcaatcatacattcgagtaaaaagtaatggcgcttgaataggctcataggtcacctttaatttctacggctcatatatacgggactcaatcaacttcgagta

SEQ ID NO: 226210 - DNA, 431 bp, Glycine max
  unsure (1)..(431): unsure at all n locations
agcttaagganggaacactgacttgagggtgattaacaatttcgcaaaaccgaatcaaaaatgcgaaaaaggatggccctaaggctgcaaacatcgcaatcccgtgggtatggcttttgaaaggggggaaaagaagtctttgaatgtaaaaacgccccccccccctatcgtcattcttataatattggacaaggggggctcgcccaggcgagcccagctcgcccatgcaactaacctgcactttcttgtttattccggaggggaatataaacaatgtcccctccctgttacaggaataacatcttgcctaactctgaacttaatcaggttaaaatcaggcgttgatacttatttactacttgtaaacaaacaaatgtaaagaaaaccgcaaaaaaaaggaaccgggcgctctgccagacatttctgctgtt

SEQ ID NO: 226211 - DNA, 369 bp, Glycine max
ctccatccatgtaagcaaatttaaagtatgatggacaagtctgcaagttaatcagaattcaactaattagtagtcagttataattctaacattgaatgatattaaattttattcttttcctgataaacgtgtccacaagctttttttcaagcaagagatgttgggtttgtgtgtatgtaaccgaacacaaaaaaaataaatctataaatttaagttttgcttgtcagtatagttatttaatccaatattcatcataccaaagaagcttcgttttatcttagtaattaacagaagccgttacccaacgtgagacatatttggtgaggatcatcccccctccaagtactgtgaggttttttttttaagaca

SEQ ID NO: 226212 - DNA, 196 bp, Glycine max
cacaaaaacgagagaaggacaaaagggaaatttcaagaagcccacacgccaggaaaaaagccacacccacaaaaacggcacccccaggaaagcgagcggcaaaaacaagaaaaacaacgacaagcgccacgaccggaaggacaacaacagaaaggaaacaagaaaacgggcgacgaaacccacgaaaaccccaacc

SEQ ID NO: 226213 - DNA, 328 bp, Glycine max
  unsure (1)..(328): unsure at all n locations
caagctcaacctttggtgcccatttctgctttcttatcgcgaaaggaggacattttcggagtcttgaagcacgtctctacgtgtgggacttcgaaatttcaggtttgggtggacttctntctcctttgattatcgtgggtatggggttttgggagatatgatgggtagtcttgctaggtttctgctttatgatgattatttgtgaagaaacttgttgaaagcttgttgaacttgccatgtttggatgagttaaacatacccattcagttttagggtttttatgatgatgcttgtgatgttgatgtgctgaaattgcttatggaaactg

SEQ ID NO: 226214 - DNA, 355 bp, Glycine max
  unsure (1)..(355): unsure at all n locations
cttagatactcagcttatcccatgagctctggatagtaagcttatcagtatgttatgaaangcaactaaaagagtgttataaccaatttgggatatacaactggctaaaactggatacttttaacttaaatagtaatgacacatgtacctatagacatgaattggtaagactgataagatacttcatatcatatatgttgcgagcaatagaagtagcatttatttattgataaaatatttaccgctcgactactttaaaatcatatcttgtataatatctataaacttaacgacattacatgatgaatacatgacaaccatatttatctcttcttgttacatgccgaactggata

SEQ ID NO: 226215 - DNA, 395 bp, Glycine max
atctctttccctggctggtaaaactactggcatggatgatatcagctcaataagcacaacccaaaagctatacacatcactcttgtccgtgataatggtataaggtcccactgcagagatagttccaaggggaagaatataattccaactgcagagatgataatcatattttgaagccaaaaaccacttattgagaggcataagacaacaactggttagtctgacaaatatgccaaaacagctctcaactctaataacaatcaccccattttcaaattgttggatcaagggcctcagaataatatagaagggcggtggattacatattaatgaacctttactaattaaaactctatccttcttaatgttactaaattcattaggctttactataa

SEQ ID NO: 226216 - DNA, 425 bp, Glycine max
  unsure (1)..(425): unsure at all n locations
tgactatgcctccaacacctgatgagaactttgcacatatcagcataancgatntcgcatataccatgcgcaaccttgtgattgaaccttcctgaagctatggagaaagaaaatctaaattgtgacttcaataagtatatgatgttccttctatatacctatctaagaatatgattaaagtccttgtatgttggtgattgcttttaataaattcaaaatcatttcgtgattgcttgtaattgtgtcttgagtagtgtgaaggtgtctctttaatagactaccagaagaacacagagtataaattttaaactatacggacttatatcgtgtctacaagtcaaattgcctacgtattcagaccaaatggagttcctaatttaaataatgaagctaagttctgtttcatatgcctttatctaaaaatt

SEQ ID NO: 226217 - DNA, 258 bp, Glycine max
aaaattcgatttaaattccgagccctatatttaccactcggcactttgatcccgaacccacgactcagtattggcccatggagacattacatgctcaattagatcaactgtatgtttgtttatagcgtcaaaccgctgtctgagctaaatgaacttaccaggcattctaccctcctttaacaagctacttcctgaaatctaatacatttgtatattggcactcttcttgcctaaatacacaagcggcgtagactcctt

SEQ ID NO: 226218 - DNA, 235 bp, Glycine max
aaacccctcctcacaggcatatacccaagaggatgcgacctactctcaactcttattctatagccttctcgcgcatctccatggtgaaaaaccaccattaaaggacctcattgaactcaataatccaccctcctagaacccacacagccagttctaacacaagcatacagcattagattccgaacttagcatacaaattcacgaactgcataactacctaagtttcaaacctaac

SEQ ID NO: 226219 - DNA, 339 bp, Glycine max
actaggaaacactaacataatgggaggtgagtagggtccgccactaataaaagtataaaaaatgacattcctttcttttattaaattggatgagagaagacttgattgtaatgcattctcttttactcttaacatctaatagacatttctttacaagacaagagggtgtattatgacaacgagaaacaacggatgggatgggcctctcccaattgtgatataccacagacctcccaaatcaaagcaaacaattgtgacctttagatggggggtgaaacagtcgaactccacacatagtgcccaatatcacaatgagccacaccatgaaactccatgaaa

SEQ ID NO: 226220 - DNA, 340 bp, Glycine max
  unsure (1)..(340): unsure at all n locations
tcagctcgatagtcaaagcggcgaggagtggtgttattctatatgtttacatgtcatttataataattattataagaactattcgtgatcaaagtcgggactatttaaaaatctagtagctagctggagtctagcgtaaacaattgaaacaccctgtaacatggattatctcaagacttttaaggttgagaaggtatttctgtcagagcatatttggcatatatagcgtttgtctctaaataatanaacatcagaatatttaataattaaatattgccttgacacatgatacattggttcactggtattaattcttatatatctctggtaggtcgaatgg

SEQ ID NO: 226221 - DNA, 458 bp, Glycine max
  unsure (1)..(458): unsure at all n locations
agctngcatttaaagactagnataaaattttaatatatatntctcatgaatttttttgaaaaagagtttttaactctcttctttgtaaaatggaaagggaaataagaaacacgctaacacatcctgggggagcacagacagttaaacctttggtatgtattcatatttaccattacaagtagcgctcttgtctcaggtaacgcattattcttcaagttggccacttgtagagcacatagtacgtacgtattacatggagttgctgagactcttttgcatgtgcaaaccctctagctcgtgtgatggtatacaaatagttttattgttcaactcaattcccacatagacatagtcacatgtgacattatctacaagtacacgtaactccgttggcagcatatacatagtgtctttntcccctggtttgaaaacaattgtcttataattaatatctacat

SEQ ID NO: 226222 - DNA, 400 bp, Glycine max
atccgaattaacatacagcaacagaaaaccgcaaactatcaacactgagactgctgactaccagcccaagacacagagacatcctcaatgggttgcccggtgcttaaacctccatattccttgatgtattgatcaatagacataaggacaaagaatttatgaagatacggggtcttcccttctgtcttttgaactgccagatactttagcctgttctcaaagattgctgccatgaaatcgcccaaaaattatataatataataatgtaataatcaatattccactgatgacaaaaagggacttacagtggatccatatctatatagctgggcaatatgtatccttgcctgtggcttcagctgctaaaaaatcttatgagaatatttcaataaactctttt

SEQ ID NO: 226223 - DNA, 269 bp, Glycine max
  unsure (1)..(269): unsure at all n locations
gcggcatgcaagctaaacggcatcgaggagagttagttcgttcgancagcaggcattccattgaactttaatcgacagaatattcgggcctaatcggcatgcgagcataacttagcccgtcgaatcacccgaatttcatgtaaatttgagcgcgcgatggcacttgcttattcaaatccggagaaagtaggccgttgtattgcgagggttaatttacctaaacactcattatatgactcaatgggaaccagccaccgttgctgccaatt

SEQ ID NO: 226224 - DNA, 379 bp, Glycine max
  unsure (1)..(379): unsure at all n locations
aactaagctatatatatcggaagctctaggatagaagaagctcattgattatctaacggncataacattgtctccggatctttcaataacgaaagtaacctatcgcgacgctcaaaatttaacatggaaaactccggtgaattccgaccggctaaagatttgactcggatgtcccattgaagcacataatatatcatcgcccttgaaagtagtaatggactgaccacgcaaattcggacagtcataacgtttgactcggattcccgattgaagctcataatatatcgagatgctcttaggataaaaatgaagcccatcgcaagacaaacgggcctaacttgtcctcagatctccaataaagaaagtaacctatcgcgac

SEQ ID NO: 226225 - DNA, 426 bp, Glycine max
  unsure (1)..(426): unsure at all n locations
tctgagagagatatgctatctctagttgcttcgcannctactgatgtggagattcattaagctaataaaagtgctgcttatcctgctggtttcataaaggatatcttaattagagtcagagaactaattttccctagtgatttatatgttttgaatatggaggagggattatctcacggatcagttcccatcattctatgcagacctcttatgaaaactggctgaactaagatagatgtatatgcaggcacactatctatggagcttggtgatataactgctcattttaatattctcaatgctctgacacacccatctgaagatccttctggatttcgtgctgaaataatcgaccatatagttgatgaatacatgactgatcttcattctaatctgcacgcttgtcactcttcatgcattgaatct

SEQ ID NO: 226226 - DNA, 288 bp, Glycine max
ttggcttccgctggatcctcatggtgaaaaatcacccttgaaggacctcattgaagctcaaagatccaccctccataaaagcttcacaagcaagcctccatcaataacttttcacacggattgccgattcggcgcataatatgtcgagaggctcgaaataacggaagcacttgagaaattcaaatggtcataacatttcacacggatgttagaataaggcgcatcatatatagagacgctcaaaatgaacacggaggctcccgggaaataaaatggcataacttttac

SEQ ID NO: 226227 - DNA, 397 bp, Glycine max
  unsure (1)..(397): unsure at all n locations
tgaatcggacatccgtgtgaaaaggtatgactctttgattttctcaagagcttccgttgttcaatttcgagcctctcgacatattatgcacccgaatcggacatccgtgtgaaaagtcatgatcatttgaatttctcgagagtttccgatgtttaatttcgagcgtatcaatattttataaccgtgaatcggacctcagtgtgaaaagttatgaccattngaatntgacgagagcttcccgtgttcaatttcgaatatcactatatgtgatgcgcctaaattggacattcgagttaaatgttatgaccattttggattctcaagagattctgttgtcaaattcgagcctctcggcatcttatgggatcgaatcggacattcgtgtgaaaagctatga

SEQ ID NO: 226228 - DNA, 316 bp, Glycine max
  unsure (1)..(316): unsure at all n locations
accaacgcgagctcagactactggacnnccttcccacgacacntctattaatgtctgcctgagtgggcattatgcctaaaccatacttcccacgatttccttgggtttctatcatgctagttatgccgccattggtattgcctaaacccatcccgggttcaaaaccgttccccaaaataactcgggccatcattaccgccgcatcggacagacaaggttgcccaaagagggagtccacggaggatatgctgaccacctcaaaagactggatagccggttctaacgattcttctgcggcttccacattaggcatgga

SEQ ID NO: 226229 - DNA, 277 bp, Glycine max
  unsure (1)..(277): unsure at all n locations
gccacacctaaaanatgttatgagaacctcaagattccatgtcatcttatatctaattgcattactcacataataaagagcaatcagactattcagtgcttgacttgcaacaccacaaatgaatcaggttcagaacaccttgctatgcaccactaacaaagtgagcaacaggggggactctgggcaacaaggaaatagatgaaagacttacctgtgtctccagatacctgactgagcaaacaatcgagacagggaacatggcttggatatggttcga

SEQ ID NO: 226230 - DNA, 231 bp, Glycine max
atttatattttatattaacatattaaatgacgtaatacttatttaaggtacattgtaattcgtttgcttcccatatctaatatataatataataaattttactcacataaaaattcgacttaatggcagttcggtctttaaatattgtaattgcgctaatctgatttctaattgcccaaactgaatcccataagccaataaataagtcgcgcatatgatttttttggtatt

SEQ ID NO: 226231 - DNA, 412 bp, Glycine max
agcttatgatgcaaacatctacaatagacttcttgaaccttaatagcaaaatcagccacaacagaacaattatgacctctgcaataacaggtacaatctcgggtggaggaatcatcccaaccttagatggtcgagtccttcacaatagcagcaacaacaacaaccttattttcagaatgctgctggcccaagtagaccatacgttcctccaccaatccaacaacaacaacaacaacaacaacaacagccccagaaacaacaaacagttgagactcctccacaaccttcccttgaagaacttgtgaggcaaatgactatgcaaaacatgcagtttcaacaagagaccagagcctctattagagcttaactaatcagatgggacaattggctacacagttaaatcaacaacagt

SEQ ID NO: 226232 - DNA, 432 bp, Glycine max
  unsure (1)..(432): unsure at all n locations
gaccttaaactacttggacagctatctatgctattataacttgatttttctagacaactttcccaaggtgtggaagacaacaagcaccccaaatgctatagacctaaagaacctttcctaggatgaactgttgggggttcttagagtccatgaagccaaccctttcaatagatatcatatgtgtcataccctaatttcgtccggggttcattatttgatgatatacaacctctgattggccgcttcgagatactgggcaccctttgtntacaatatgtgaagtcccgagacgtgccaaaaaatcaaaaggaagcaggcttacgcgatccatgaaaattccgtaatgtgacagaaatcgaaatgaggtgtttatcgcaatccgtgagttttcgaaacttcttctgaagctaaanaagagtaaattcataatct

SEQ ID NO: 226233 - DNA, 437 bp, Glycine max
agcttgaagccatggttttaaatttatttctgtactgcgatgccagacacaatggaatgtgaagttttttgagctcatgtgactgccattgcgcctgcaacaactgcatttgcccccaatttcccagaatgtcaaggatcacgctgaaattgcatccgcaaccacaatttaaaatatggcttgaagcttaatagcacaataaccttcaaccattccatctcttcatgctggtttaggctctatttaattgacctaaattatctgtcattctggtgattaatagagaatggcctgctgaaaagatgaaagatattaagctcgctgatgcattaaagcatcccatatggagcttggggagaaaaataactattgactttgctacccttttaataaggcttgtgccttaacagcaatgcatttgatgataagtccttctt

SEQ ID NO: 226234 - DNA, 311 bp, Glycine max
  unsure (1)..(311): unsure at all n locations
tatntcgatactgaccatgggattggttagtntcacttttttaccgactccgctcttaattcatttgcgtatttactaacttttccttgaatttctatcaccgcttcaataaattcgaacctaactctgcgctttttctccttccattataacaaggtgtaacaaggcgtaaaaactgaggtagaatatgagaattgacttgtgaaataggatttttatttcttgaaatattttacattggagatgtcagatgagaatcgatcataaagaattcttatatcgatatctggattgtgacttttcattggttt

SEQ ID NO: 226235 - DNA, 389 bp, Glycine max
  unsure (1)..(389): unsure at all n locations
agcttggagaaggtgtggttnttttcttcttgctaagccaatctgctagcttagtgagcgtccgctaagcacaacactcatgggctaagcgcgaggaagactctggaagaagatgagttgtacaggttcactaagcacattgctttatctcactaagcgcaccacttcagtccatccactatgtgagaaaggcacgcgctaagccaaaattcactaatgtgcgctaagtggttcataattgcgcagagcgcacgagcacgaacaaggccacctatttaaaccataaatcatattntgtgaagggagtctgggctgggattcacagctttgcatgtctagagattctagagagataaaggtccaaggtctagagagttctgagagatttt

SEQ ID NO: 226236 - DNA, 453 bp, Glycine max
  unsure (1)..(453): unsure at all n locations
tatgagaacagaatagctcttttcattgttcaaaatgtatgtgaattaggacgcatcaacaataatcaagccaagactattgtgcaagcaatcaatcgggctaaacacaccaaatgattataatgatggatggctcaaattctcaccaaggtaaaatcatcactttcaaattgagctctcaaaactatcatgacatgtagagaagaatcaaggatttcaagtcacaaaatgtcnagaacttttatgttcaaacaattacccatttcttgaacatatcctataattcaaagagaaacatgcaaagtcgtacatgcacatgaaattgacccacaatattaaactgtaaatctgacgaaactaacaacattaacaaattatcacaactaacaaatttacagaacccaccaaactatcaaaaccaaagaacacttctctgcatacttaaacaacaca

SEQ ID NO: 226237 - DNA, 426 bp, Glycine max
agcttataatgcactcttttcaagacagcgttttatttatcaacagtggcgtggtacacaaatctggaagtctctcagatccggtcatggaaagacttggcaactactttaattaggcagtgccactacaacacaaatatagctcccgatcggaaccaactacagagcatgagcaaacgggaacatgagtccatcaaggaatatgctcaaaggtggagagacctaacagcgcaagtcatcccacctatgactgagagggaaatgatcatgattatggtagatacattgcctacgctctactaccagaagctgataagatatatgccggccaactttgcgaacctcgtcttcgccggaaaaagaatcgagtccggactgaggaaaggcaattttgaatacagctactacgctggccgcaacagcaat

SEQ ID NO: 226238 - DNA, 423 bp, Glycine max
  unsure (1)..(423): unsure at all n locations
gcttatgatagctgaccctatgacaaagggattattttccaagacatttatagaacatggtgaaattatgggcattattggtattgatgatcattaagggtaatttaccttatgtaattttgctgacactctgagctcaattatgatatgtttctgattacctgttctctatgcttgcatgcatgtttgtgttagaataatgttaacaggttttgtcttgaatgaagacattatgntggaccaattatgtactcctaactaatggtcatattaaggagaagactaatttgtagtacatggaagggactatgtcgattagatgatgtacaaccgccatgactcgaattggttcctattcttaatcatgaaattatgatgcactcaatgtatagaatagtttagtcaatctttaatgcgcattat

SEQ ID NO: 226239 - DNA, 430 bp, Glycine max
  unsure (1)..(430): unsure at all n locations
agcttcatgcttaagtatgtatggcaaaactttatttctgttgctcaagacatacaaatgagcatgtaacaaatgttctacacttggagtgatcacatgcagtcctattgaacccttaccacccactctgtcatcatgtcgagactcaggaaggccaacaggtttagccttctctaagtattctgaacaaaattcaatggcttcttctgcaatgtacctctcaacaatagatgcttctggacgatatagattctntgtatacccttttaagatcttcatgtatcgctcaatcgggtacatccaccgtatataaacatgaccacaacatttgatttctctgaccagatgcacaatcaagtgaatcatgatgtcatagaaagcagggggataatacatcttcaactggcacagtataattgcggcctcattt

SEQ ID NO: 226240 - DNA, 299 bp, Glycine max
  unsure (1)..(299): unsure at all n locations
ctcactaaaggcgacctttggttngtcaagcctcttggagattcgacaaagtgcatgttcatcctggatttttgcgagactacccaaaggcagacctctgggttgacgagcctttggagaatcaaccaatgatgcacctatcctggattatggtgaggctcactaaaggcataccttgtgtttgacgagcctctggagaatcaaccaaagacgtacccgtcctgtgttctggctatgctcaccaaggacggacctatggttcgacgagcttttgagaatccactatggacacacccatt

SEQ ID NO: 226241 - DNA, 421 bp, Glycine max
  unsure (1)..(421): unsure at all n locations
agcttctggtgggacatcttgacttgctttcttatctgacattcaccacagattctgccttcttctattttcagattgggaatgcctctaacagcacctttgtcaatgattttcttcatgcctcttaagtgcagatgtccaaatctttgatgccatattctgacttcatcttctctggagaatagacatgtggaggagtaactggtttcttgaggtgtccataggtaacagttgtcctttgatctgctgcccttcattaggacttcactcttctcatttgtcaccaagcattctgactttgtgaagtttacattgaatccttcatcacacagctgactgatgctgatcaagtttgcagtcagtcccttcaccagcagtactttgtccagactangcagtccatcatggactatgctttcca

SEQ ID NO: 226242 - DNA, 369 bp, Glycine max
  unsure (1)..(369): unsure at all n locations
ctcagctgctgtcgagcagagaatgatggcccgagttatgttgtggaacagctaccaacccggaatgggtgtatgcaaagacaacngctgcataactagcctgataaatgccaagaaatcggggaagatggtttgctataacccctcagcagatgaaagaaaacatgcgggaagaacggcgggggcaaaactcgcgttgagacaaaaaagtgaatgaagcccgccctgccacataagtagaagctttataatcgcgagtctgggagacgaatgtcaagtggtcgcaatataagaagatgatggtccgagtacattggatttggacgaccttgcccttctgatttcagctgtggaattggcgatggatga

SEQ ID NO: 226243 - DNA, 432 bp, Glycine max
  unsure (1)..(432): unsure at all n locations
agcttgagctcgntgctactgccccataaagttcctctgaacttattcctgctccattcttcctttcgggctctttttgtttcccgctctaatgcttcaaccgtagtcatgttgacatctctcagctcatcacactctttcctgacccaagtgactgccatctttagcttctccttaaccaatctcgttctttcgagcttcgctttcaaagcttgcacttcttcgcttttcttagggacttcagcttctttcccacttgggcctgttagctttgggagccaagttatcccttgcgtcctagacttcaaccacttgtggtagccacatacgacaccattgctacttcccgtaagctcctcatatttcctttccactgtattccattctttacggattctctanagtatccttgcattggcttcattgaaacct

SEQ ID NO: 226244 - DNA, 329 bp, Glycine max
catggcaaggtcaacatgctgtcaacatgtttcttcacaaaaatcatcatgaagcagagaactagcataactacccatcatatctcccaaaaccccatacccacgagaatcaagagaggaagaagtctacccaaacctgaaatatcaaagtcccacacgtagagacgcgcttcacgactccgaaaatgccctcctttcgcgatttggagcaaaaatgagcaccaaaggttgaagctttgttgggcaacaatggtggatgaagaagaacgagaatagcaacgtgagggagagggagagagagctgtctcgaaatttttctgctgagtgaa

SEQ ID NO: 226245 - DNA, 427 bp, Glycine max
  unsure (1)..(427): unsure at all n locations
agcttctncgaagggcatggatatctccaattttctgaaaatatctaaaaatctcgccaaataacagcccttctccttcttggatggtaccacaggatatagtacttccgcagcttcattcatagctctttcacttctactcttcttttcattctcattnttttcatctttttcaagctttttgttttattttttttctttttctacttctttttctttatcttggacattcaattcttttttatcgaccattatttgtttctctttttcctgattatttccacctctcacatcantttttcttccatcaatacctgtctcttcaacagctttcttcttgagtccaacactcttctcttcctcattcttcacagaccttttacttcttgtcatcatagcttcgcattcctgcttgggattcttctct

SEQ ID NO: 226246 - DNA, 462 bp, Glycine max
  unsure (1)..(462): unsure at all n locations
tcatgatgaatcanaagtgattcaaacgcgttctgatgattatcttgatgacaacaaaagatgatgactaaggtgatgaacacaaagctcaaaagatcaaagaacaactcaagtgaatcaaagaacatctcaagtgaatcaagaacaagtcaagagttcaagaatcatgaagaattcaagactcaagataaaagcctacatttaagaatcaagaatcaagattcaagatctcaagaatcaagatcaagattcaagactcaagattcaagaatgaagaacagactcaatccagattagtattaaaaagttttttcttcaaacttcgaatagctcatgagtttntgacaaaacctctaccaaagagtttttactctcttgaatcgatcaccatattgttgaatcgataccagctcacaatgagtttgagaaagtttcagactgaattacaacgtcgcaatattt

SEQ ID NO: 226247 - DNA, 390 bp, Glycine max
tgcttgttgaacttgccatgtttggatgtgttttcatacccattcttgtataggagttttgtgatgatgcttgtgatgtttatatgctgaaattgcttatggaaaactgatagaggtgacaggtatgattaacctagggttagaaagtgagaatgtgatgttatgagtggaaaaagagtgaggctttgaaagtagaaagctaaattggattctgtggcaatggacgtaaatgagttaatctagcttgaatgccattacgactatgagaaagttagctggctaagagaaaacattgacataggacaacaccttcttgggcaattgggtgtgaaagcatatttgatcgggaattttagcgacatctgttaaacaattaaatgatgtttagac

SEQ ID NO: 226248 - DNA, 409 bp, Glycine max
  unsure (1)..(409): unsure at all n locations
tatgcacagnaaatgtaattatgaaattgagatgcccgattattcaccatttcctagttaaccatgcattaggtaccatgttcaattatattgttctgtcgttgagttattttctttttcttttataaaaatgggtttatgatcccaacatggttggctcatggggcctaacacatgcaactaagaatgtattgggaagattcacgcttcccctcttttgtttntgttgaggaaaacacaacgatgagcaaacttgaaaacatatggtatgcaattttgcatatcaaaaagtctgttgaacgcatatgcttgatgatgccatgactcatgccanatgtgaggctggaattaattacggacaangcaggacgatatgtcattatgatgttgaaatttgttatccatcatg

SEQ ID NO: 226249 - DNA, 434 bp, Glycine max
  unsure (1)..(434): unsure at all n locations
agcttcaagaanaagatggcctcagcatatctccttatttccagaagggaattctatcaatagacctacaatctttaatggagagggttaccattactggaaaacccgaatgcaaatttttattgaggcaatagacttaaatatttgggaagccataaaaatagggtcgtatatacccaccacagtagaaagagttacaatagatggcagttcatcaagtgaaagtattacaatagaaaaacctagagatagatggtctgaagaggatagaaaacgagtacaatacaatttaaaagccaaaaacataataacatctgccctgngaatggatgaatatttcacggtttcaaattgtaagagtgctaaggaaatgtgggacactcttcgattaacacatgaaggaactacagatgttaaaagatctatgataaatg

SEQ ID NO: 226250 - DNA, 425 bp, Glycine max
  unsure (1)..(425): unsure at all n locations
actaagctgcacggggatagactcattacattatcctatataattttaaactctagtagcacaggaattcaaattaaattgactgaaacaattcaagaaacctccttaaaatatatgcattatgattcttgaacaagtaaacattctttcctcctaggatagtactattggagcaagaccaaggtgtaagtaaaaatgcttagcaaggtacattacaattagcaacgtttaaaatcaagtaaaataactcattcaatcaatattgtcagcaaccaatgctaaagtttaaatatggcaccacgttattagttagtttattttgttaaaatattcctacaaatatcatggatatgggtcntttgtctatatttcctcttggttgattcatcttggtcatgggtataatgactgaatagtctacaaat

SEQ ID NO: 226251 - DNA, 442 bp, Glycine max
gacctgcggcatgcaagcttataaccacaagctcttatttattgtttctttattacgcaatagcgtgtttctacatatcattaagagtataacacatctctctaatgatgattattggaataatctcatctgcttaagtgaaaagcatgaattattccggtgttcgactacctaagtactaccatattcccctttagagataatgtgatgagagttctcacgtatctcactacgtcgaatatcctagtatttctaagaggaattaccttgatttgcaagatgttaagaatatctgtcaggtcgattacttaatactcctaaggaagggtcacatttatatgttgaggcgttgaaaatactacagaatttgtcctaaccgatattcttaacaccttgacattcaacgtgtctcatacttaagtatctttcaatttattaatgc

SEQ ID NO: 226252 - DNA, 346 bp, Glycine max
gctgcgaatgaagagactaattaatattttataatttaaggctctctcaaaaaaaatatccttctataataaaatttggggtaccacgggaagcgcggctctggaacctaaaggacctctctcttaagagctctacgtgaacaaaactatttgtaaattggacacttgacgataagcgtctgattcatgttagatataacggtcaccaactgtgttaatggtaagatgcggctaccacaatgacgcttcaaataaaaaagtgtgcatgtttcatagtcaacgacgcacaactatcttctcaaacaagcctgaaaggtatcccatgattctatataagaacattacc

SEQ ID NO: 226253 - DNA, 395 bp, Glycine max
gtggcatggagggacttctttcatttgtggcctaagaagatggaccatgcccctacttctcttatctagggcgccatcttttacaacgggacgcgtgggcaaatagcctagcccaaacctctcgcgagttaccttgaatttgaccaacactggccacaccattatagttcattccaaacccatactgggctcatattcgtgccctaacatcacacgggctaccatcatcacaacaatcaacatgcaaggtcgcatcgggagggataccacagaaccgttgctcactagctcaaaggacttaaaagccatctcccaaggattcttacacaacttctacatatggaatagaagagtggcaccaagtagaatatcctcttcccccgagacgctgacca

SEQ ID NO: 226254 - DNA, 403 bp, Glycine max
  unsure (1)..(403): unsure at all n locations
acaccactatcgnnggaacaatggaaccatttgaatttataacctaatgcggagttcacaactgtctgactgcttgtctctcccaagaatgccactagttttttgtagagtcgggttacgactgaaacttgtggttttatacaactgcaccgttatgtcacatatatagatgagttgtaacattagcgctgcattttttaaagattaanaatacgcacgcacatgctctctgtatgtgttggcaactacaccaatgacgtgacatgtgttagcttgcatcagatctgcatgtgtagacatgctgtgcaaggacctttcacgcgctctatgttaatgcagacaacaatntatcatacaacgcttttcacaatgtngatgcaactcagacaatgatatatcatac

SEQ ID NO: 226255 - DNA, 426 bp, Glycine max
  unsure (1)..(426): unsure at all n locations
gcttcttggtgagacaatatttacaacatcgtgtatttatattgtaaaaaaacaanatcaagacttcggtgtctgataaatttgaaatcaaaatctttgcgattgaaagtcttatgatttgcaaactctcacaaactcgcatccatttaatagggtaattgtcctctccattttgtaaacatacacctaattcggatccgataatcgttcttagtttgtctctgaaaaaataaactttccaatgttgttgattaggttccttgtaggatccgttgattatctattcatcattgtaaaagagcatgcccattcgttaaaacttaaaagtcgtctattattctgtctaacagaacaccaaaaggaaaaaatatagagaagactgcaattcattgatggtagatgcttggacctaacataaatagcata

SEQ ID NO: 226256 - DNA, 372 bp, Glycine max
  unsure (1)..(372): unsure at all n locations
gcggatgaaaccactagtgagcgtagagagttctacctctcatattatgaaacatttcatcgaagtcgtcacctgtgttgagtgctctgccactacactgtatcaaggtgtgtggtttgctgcatcattggtacttgctcatgctcaagattttaaattgtgttcaggggtgcgcgtacattctgtatcttgatattgtgggacattgagacacatgtggcctatgttgcacaattgcagtgggtacacccctaaacctctcaaatngtgggtgaaattgcagacgctaacgttttaaaaccttggcatgctatctattgttagccttgaaattctaagtatagtaagctgtataacgtacaaaacaagcaa

SEQ ID NO: 226257 - DNA, 448 bp, Glycine max
  unsure (1)..(448): unsure at all n locations
gatccttaagtcacctgcgctgcaacttcatcaaaactcaggaacttgcttattattatttagntctattaagaagtaatgcattgttggaacaaacattgataattgatggttaaaaacagaaataaactaattctatggtaaaaatagtaaatgcaagtaagtaaaagttgacagcaataggtaaaaagcgttgggtctttctaacaaaaaagttgacgcatatgaggatatntctctaattaatcatgttcttgtgttctatgttgtagcctaagtactaaaccttgatccctcgtaagtttagactaatttaacctaagcttcgtctgcaaatctttcttgtaagactaggcttaacttaaacagcattatcatcacagcatattcaaataaccaaaactccaccatccatccctggtaatgagatatttagtcctgcttctat

SEQ ID NO: 226258 - DNA, 396 bp, Glycine max
  unsure (1)..(396): unsure at all n locations
ctatattctctcaatagatcttcattcttcttttgttcatctttagttcttccatttcttgtacacaatttcgtgaatttccattggtgatgatcatggaaggctaaacacttcatcaatccaaggatccactccgagcaaggctgaatttgaggtctggtttaagaattttaaatttagtgaatgttcatccttctcttcaatcctatattcgatctccatgattatgattatgcttangactgaaaacggactaggttatggagtcatcttccaatcttaaaatataatcacagactatttacacgattctccaacctaatttgtgatctcaaacaatttagagattgattcacttgaactttctttaatgcatgtgacataactttcacactg

SEQ ID NO: 226259 - DNA, 436 bp, Glycine max
  unsure (1)..(436): unsure at all n locations
agcttatgcgcatatttccttacgaacgttcacttgcacaagacatcctatcaactaagaaaaatgcacccatatacaatcaaggtagcttcattacctaaattatttacatgtacttccaaggtgtatttgttatttacatcacacacgcctccttggctgaatttacatacatgcatactcaaagcattntggggtaccaaaaactgcacatgcgctcatcttggtatttctaatacccctacatatacaaacttcacgatgaatcttgactacctacacaataaggtgctacatttcatgctttttttcaagtttttgctacctaaagccacatgcaaattcaagcatatnttcctttgctgactaaaattgtattcaaattagaaggtatatattnttttgtaatatgttttcttcacataacatgcaacat

SEQ ID NO: 226260 - DNA, 369 bp, Glycine max
  unsure (1)..(369): unsure at all n locations
ctgaaggtgtgtagcccaccatctnctcatagtagaatactgtttatgttctactatcattgctatcagtttttctccatcatttgaggtgccacttgagctgccaggtctctccacttttggaagtattctttgacagattcgtgcccctctttgcacatgttctgtagttgcattctatccggaaccatatcaaaattgtactgatactgcctaacgaaggcaaccattacgtccttccaagaatggactcgggaaggttccaagttagcgtaccatgtaacagctacccccgtaagactttcttggaagaaatgtattagccgttcctcatctcttgtgtaagcccccatcttccgacaatacatc

SEQ ID NO: 226261 - DNA, 428 bp, Glycine max
agcttccttttcctccaagtaagcgcatttctcttgatacaccaaattaataagattatcatcatctaaaaaatttatgaacactaccatatctctatgaccttactcagagttacctcccactttctcagatggcaaaagagtacaattgaaatcacccatcacaacccactgtccatctaaatcaaaactcacttccatcaaagcttcccacaacgattgtctcctagcgaattgggggcactgaaccactatcagaaaccaaggttgagcattgcgccatcgcactctcatgtggaccatttgatcatagttactaatcacatccacctgtaaaatgtctagataccaaagataccaaataccttggaatgcccatttggcttcttccacttaaacaccttttaagccaatcttcttaataatac

SEQ ID NO: 226262 - DNA, 453 bp, Glycine max
  unsure (1)..(453): unsure at all n locations
actaagctggatgattacactctcctatttctcaaacaaattcttcttgatatcatcaaaatcttcatgatttacattcttcccctttttgatgatgacaaccacctgtatgttaggagcaacaacaaagaaaatatctatttgcatatagtttactcccccttggttttacaatgattgcttatatgagacaattgaagatttcatatttttcatatataaaaaaaattgtctcataaaacaatagataatttttcttactattttatcttttatctttctcttccgctttatctgtctcatttgacaatgaagttcttttggaatctctctcattgtcttctgagaggataagacattnttgccaagcaaaactctgcataaaattcgtgcccaagtcacctatttatagagccttgatggccactcacaaatctaatgaaaagatgtgac

SEQ ID NO: 226263 - DNA, 429 bp, Glycine max
  unsure (1)..(429): unsure at all n locations
agcttgagttagtaactgtgtgatatgatatcatatgttactaagtagcccaccacaatttccctgtgttcgggtctaaatgaaactgcttggtttgtgtcattttcttaatgtttttttccaataccaattttcctatgaattgatttggacctgctctactttttattttgcattttattttatttaaaagtggattctgaaatgcacatgggtgaaagtttaaaaatggcatcatatattgctttttgacttttattcgccaatgagttcacgaatgttntgtgtccgggtttgattaataggcgtggaagctaaaacttgtagttgtagataacccatatatagtgatcatatctaacacgctacattaactgctttatcggngctatgctgaataaccagtaattttttatccttgtttttctt

SEQ ID NO: 226264 - DNA, 403 bp, Glycine max
tgattaatggtgatctagtattcatagaattagaaaatacgtaattaaagtcttaaagagtttaaatgttgagagtatttttgtaaatgaccatacgactagtttaaaaatagaattttagtctaattagtggctgagtatatatatggaataattaaaatatgttagagttgtaacaccctgaagaattataactcaggctgatagaggaaactctatgttgtgtcatctgtgcatgtgtgtatttaattgcaatgattatgtgcttctaattattaacttttgtgctatatatgaatatattctgtgtaaataatctggttagtctagcttggcagagatacgagaactggctacatgataattccattttaacacaattgcattgtcattgagtgacaat

SEQ ID NO: 226265 - DNA, 328 bp, Glycine max
agcttcccagcgaatgagatgcgacatgaatttgcttggtacaaagaacaacacgacccccaactgaagccacgacacagggaaaagcataccgggagaggcagaaaaaatgagtcttctggaccaccccggcaaaataaaaagagcatacggggtggctaaacaactaaagaagaagatacagaccgtggataacaggtgcccaaatctgcactcacttgaaagcacacaaaaaaaggtatctttcggctagccccaagagggaagaacaggatcaaggccacacataacaaaaaaaaaaaacacaagcttcataacaagatcgcca

SEQ ID NO: 226266 - DNA, 360 bp, Glycine max
aaagaaagaatgcgtcttttgttcaaagaacctaacctttaacaacaagactgctttcaatcctgctagaagaaaaaccactaaacacaactaaaatggacccggatgaaacttggacctagacatgaactacatcttttagacaggctcaccaaagccaatatcagagatactcattcagattttaagcagacaaaatgttaactggtcactatatagaggagtcatacagacatccttcttattcactgtatgccctaaagaaaattaaattcacagctaccaaccgctgaataatgactcagcagcagactaccgaatcgtacaacatgatagcacatatgcaggatggtcactaca

SEQ ID NO: 226267 - DNA, 436 bp, Glycine max
  unsure (1)..(436): unsure at all n locations
agcttaatcttcatgttgctccccctatctctatcatgggccaaaatataacagatttcaattttgaggaccaaaaaggactcaaaatttcgcaaggacaaattccaaacatttcaatatttattgggataaaaaacatattttagcctataatttaagttttaaaaaatatcacgtaggctcagattcatccaagcctagctctaggccaaaaaaataatacatttcaattttaagaggaagaaaaacatattgaaaattttgctgggacgaaaaacatatttaaattaattagacctttggatcatataatttccctttttatctctcttttccattaactaaaatacttcattttnngtgttatgtttataatgtttcagacttcagagggataggataatacctctcaatatctcataaccatatcatggag

SEQ ID NO: 226268 - DNA, 344 bp, Glycine max
agatgatgacaaaaagcccaaagaatgatttcaagattgagtcaacaagttcaagatcaacattaatttcaagtttcatgagaagaaatcaagaagattcaagaatcaagagaagtttgatttatagattcaagagaagatgaattctagattcaagagaagaaatcaagaagacttcacaaggaaagtattgaaaagatttttcaaaaaacaaacatagcacagttttctttttcaaaagagtttttctcacagatttctaagttaccagaagttttactccctggtaattgattaccagcttcctataatcgattaccagtgggtaaagttgatttcaaaag

SEQ ID NO: 226269 - DNA, 425 bp, Glycine max
  unsure (1)..(425): unsure at all n locations
agcttatgagttttccacctgatcacttgttctctcttganacacttcaactatctgggtgttccagcctagagtatcttccagaaatattggagagatggaaaacataaaggcacttgatttggatggccttcccataaaagaattgccattttcattacaaaatcttattggactctgtcggntaaccctgaatagatgtggaattattcacgtaccatgtagcttatccacgatgcccgaactgtctgtattccgtattgaaaactgcaacacgtggcattgggtacaatccgaagaaggtgaagaacaagtaggctcaatgatatcttcacaggaactttggtttattgccatgaactgcaatctatgtgatgattttattctacacgttccaagaggttactcgcgtcaatattatatct

SEQ ID NO: 226270 - DNA, 446 bp, Glycine max
  unsure (1)..(446): unsure at all n locations
aaacgagaatgaattcattttgacagntataactctccattggaaatcacgaatatgccaattgctaattaataatgacaaagatgaacagaaactacaaatttaaaaaagactcgaaatagaaagtaactcaacatgagaaaccatgcagaaaaagcacatagcaattcattaagctttagtttagatatacaataagcccgctggaacttcactctgtatggatcagaacttatagcaagacgctcgccatattgatccctggatattccaatgtcactgcatggataactgcaatccntgcacacacttggacaggacaccaacttgtaagcatcctcatacttctcaatacttgaccanattcgcagtgttagcgaaccgggggtgccgaaataccaccacgaggacaaccacgggatgttgatatcatagtcctaacttca

SEQ ID NO: 226271 - DNA, 409 bp, Glycine max
agctttgtgctctatctctacaggattatgacatgccttgccaaagacaacccgataaggagacattcctatgggtgttgacataccctaatttcgtctggggacctctgctcgatgacgtgcgaccattctttggtcctcgtgaggtgcttggcacccatcattaggcaatttgtgaaattccaggacatgccgaagaaccaaaaaaatattgatgcacaatccgtaagtttccgtgacacaccggaaatcatatggaagcatcgttgcataattaagtgaggttccgtaacattccgtaagtcaaaaaggtgatgattatgtaatccgcaaggttccgtaacattacggaaagaaaacaagtatcgttacgaaattcgtaagttctcgtctctttacgaaaaaagaa

SEQ ID NO: 226272 - DNA, 190 bp, Glycine max
ggactaataaaaataatatattttgagaactaataaatacttacccgaatctgaaagattaacaatatatttaagccttaaatcaatcttataaaatcagctctgaagaagaaagatgtcccacacttatatacactaatttgactatatctctagacaatgtgatctcgaacacaacctctcatgtcaa

SEQ ID NO: 226273 - DNA, 386 bp, Glycine max
  unsure (1)..(386): unsure at all n locations
agcttcttttggaccttgacaatctatcacttctctttcagaaccatgctatgtgctcgcgactggtccctttcttcccttcgcaacttgagttcactattgctaccccatagagctccgcgaaatttgttccggccatattcttccttgcgagccctcttggtctctcgttcaagggcccttgcgggaattgcattctcttcccgtaacccggcacactccttccgaacgtgtgtagcagccaacttaaacttctccttggcgagttttgcctttcctaactcgcttttgagagcttggacttcctcgtnctcttccggtgcttcaaaattctcttcgctgacggcttttagcttggcgaagccatctaaaccttcgatgcgaac

SEQ ID NO: 226274 - DNA, 387 bp, Glycine max
  unsure (1)..(387): unsure at all n locations
gntcgattcactctatgtacccacggaggtgcacattgtgtttcgnagattcttaaacccacttcatggactatttatacccccttatgacgtgcctaagccattgtacttaaggcatttctcgcttaactctaaaaaaaaacaaatcctcaccgaatgtttgaattgtataatccgttaacttccggtaaaataaattccgaccgttcgggcgtgccgtaatcacattggaagcaaaacgaggtaaaatataatataataatagaaaaaacactctttagtagataaagcggaagacaatccgacatgttcttctctggatgctcattctaatagatcgactaaaactacggtgaagctaggcgaaatcaactcgctagccagctt

SEQ ID NO: 226275 - DNA, 432 bp, Glycine max
  unsure (1)..(432): unsure at all n locations
agcttntggtgggacatcttgactagcttcctattttgacattcaccacagattctgccttcttctattttcagattgggaatgcctctaacagcacctttgtcaatgatattcttcatgccccttaagtgcagatgtccaaatctttgatgccatattttgacttcatcttctttggagaatagacatgtggaggagtaactggtttctagaggtgtccataggtaacagtagtcctttgatctgctgcccttcattagaacttcactcttctcatttgtcaccaagcattctgactttgtgaagattacattgaatccttcatcacacaactgactgatgctgatcaggtttgcagtcagtcccttcaccagcagtactttgttcagactangaagatcatcatggactatctttaccattcagtgatct

SEQ ID NO: 226276 - DNA, 348 bp, Glycine max
tcagctggcgtgtggtccatggacatactattgtatggttttgtctttgctatagaagcctgatgttaacatcatagctacgaataacaggttatgttgaaaattataaaccatttattgtgtaacaattgcgggatatgtaaacagaattttgacgttatatacgtttatagtctttgttaactatggcaatgaagacattaaccactacgtgggaaggtaaatcggatcaacccgcacctcgctggaacgaaacacagggtactctctatttaatgaataggagctgcgaattagcgacattgtgtaactttgtaagtcgaacatggcaaacatcattcatattga

SEQ ID NO: 226277 - DNA, 433 bp, Glycine max
  unsure (1)..(433): unsure at all n locations
agcttgtgaaatcaatggaatccaagatttcttttgacacaagtcgatcaattctgttcttagaaatatgacctaagagtttatgccataatgatcctgagtttgtattatcaattctacacttagtaccatgcaattctgcattaaaggattcaccataggaagctacaatatcaagtaaatatagattatcattaaccaagagtgaaccagtttcaacaatatctgaattaaaagacaacctgaacacattgtttccaaatgaacaaaaataacccaatttgtccaaataagaaaatgaaaccaaattccgtctaaatgaaggtacaacaaaagtgtctttcanatccaaataaacactagtacgtaataataatctaaagtgtcctatagcttccactntcactgatttaccatctccaacatagatcca

SEQ ID NO: 226278 - DNA, 418 bp, Glycine max
ctcaagctggccaagacaacacacacgctctctatgttcagtcctctgtacttttaatatatatcatttgtccaattactagaatcttgggtgctttgtaaattttgtgaactctcttcttcaaccatattcttctttagttcatcctacataaatacaccttacaaatgttataaaattgagaaaaacagagaaaaagtcttcgaataaaaattaaaattcttacaattacagtagcaggctcttcagtaacaacgcttccatcttttcgagtttgagtgtcaatataaatttcttcctgagaagggtgcactcccttagcctctgttttctaacattagttaaaagaatcaatcatcctatttgtattaagccaattaatattagacgaatataaaaaatgactaaccatctcatg

SEQ ID NO: 226279 - DNA, 418 bp, Glycine max
  unsure (1)..(418): unsure at all n locations
atttgagagcatgcattgggctctcttttataatgtcttgntcatttgttttgctatgtcattctgttgaggtgtatgtctcacggttctatggcgagctattccttcatttgcacataactcattaaattgcctattgcaaaattccatcccattatctgtcttgagttgtttaacctttttctctgtctgcttcttcactatagatttccattgcttaaacttaaggaatacatcactcttttgtttcaagaaaaaaaattaaacttttcatgagtagtcataaatgaaagttaacatttacctcgctccaccatgggaaggaacacttgacggaccctataggtctgaattaatataatcaatagtcccttgccttttggaacttcattgctaaactctactcttgcattttttt

SEQ ID NO: 226280 - DNA, 394 bp, Glycine max
ctcttcagaagattcctaaagaagctagagcgtagctactcatacctctctaatagctaagaacaccttcctgagatgagaagctagagcttagctacacaccccctataatagctaagctcacccccatgacagaaaacatgaaaattaaaaaaaaagtccttattacaaagacaactcaaaatgccccgaaatacaaggctaaaaccctatactactagaatggccaaaatacaaggcctagacgaaggataaacctattctaatatttacaaagataagcgggctcatacttagcccatgggctcataatctacccttaggctcatgagaactctagggccctttcttggatctctatgccaatctacttggagtcttctaaccaatgccc

SEQ ID NO: 226281 - DNA, 327 bp, Glycine max
agaatgaatgtaaacaaaaattacttcggaggagggaattgcttacgaaattaatcctatgtagcttgccgaaaacacaatgctcacaaaaattccgttcatccgcttctgaataccaatagctgatgttttcgaagatcaacataccttttcactcaatgacctacctcatggccagattgagtaaccaagatgctctatggatctgatgcacgctactaacatacagacattgtgacttgagataaaaataccctcttatcacttcataccatgagagcttctaatttatacccatttcaggtgattgacccttcattctataca

SEQ ID NO: 226282 - DNA, 419 bp, Glycine max
  unsure (1)..(419): unsure at all n locations
agcttccatcaataacccnctttgaaggtttgtgggttgttcctctgaaagagatctaaaccatggtacatagttgctcctccatcgcctccctgattggccataacttgcgccaagttgttcaaggcctcgataaggagtcgttctcgcttatttctcccagccattacttcctatgtcacgcaagaaataaaaattctgaaaagagaaaaaaataatataccaacacaatagagtacacctctaatcaaacaaaacaacacaacacatcagagtacacaaggaaacacagaaagctcataacacacatggccaaaaggttcgacctgctctgataccattaaatgtgacaccctctaccctcacaaataacgaataanaggaaataaaatcatgtggatnttttttaacacattgac

SEQ ID NO: 226283 - DNA, 413 bp, Glycine max
ctcagcttctgggggacatcttgactggctgtccaatctgtcatttaccacagattctgccttcttctattttcagattgggaatgcctctaacagcacctttgtcaatgattttcttcatgcctcttaagtgcagatgtccaaatctttgatgccatatattgacttcatcttctttggagactagacatgtggaggagtaactggtttcttgaggtgtccataggcaacagatggcctttgatctgctgcccttcattaggacttcactcttctcatttgtcaccaagcattctgactttgtgaagtttacattgagtccttcatcacacaactgactgatgctgatcaagatcgcagtcagtcccttcaccagcagtactgtgttcagactaggaagtccttcatggact

SEQ ID NO: 226284 - DNA, 438 bp, Glycine max
agcttaccacagataataccataaacaaagtattaatgctcaaatccaagaccccatcctgcattgtcttgaatccacacaactatgctgcatgatacaatggcacctagattgatagaaaagtaataccaattgaaaaacgaccccttcttaaccctttcctttggatcagtattatcaaatttacctgctccaaaagatggcacacatgactttataccaccgatcccaagcgcaatcacgtatagaccaaagtaggacacagaatattgtgcaggagtagctgaagggcatacagaacccaaacattcagaaggcttcaatgctggtaaagatgcagaaagtgtcaaggtacacattccctgcacacagtagccatatcactattacaacaataaaaagacaattaaacattccaagcatatatgtaatcaagta

SEQ ID NO: 226285 - DNA, 274 bp, Glycine max
taactttcatgtaacatagaatagggggtgatttatacaagcaaccatttattatcatggtagtttatgattacaaaacaattctaaacagaaatggaatcgcctcttatgaatggttaatgaaaaccactggagtaatttccatgtttatttaatgagcgcgcccaatcataagtaatcatatcataaagtaccctttatggacagacatgttccggattaaaagttatccatgaatcaaataagtcattataagttgggatgaacgcattat

SEQ ID NO: 226286 - DNA, 420 bp, Glycine max
  unsure (1)..(420): unsure at all n locations
agcttnttccgaattattatctgaattattattgtaactgaaaactaatattttaagctactcttgaagaggagaggtatctggaaaccattcttttgtttacttattgctacgttgatctggattaaaggattatccaattcccctttttcgatcatagaatgatggaaattaatttcatgtcttgtaagaattacaattgactataatatgaatgtcctggattcatattgtctttctatggccctaaatatacttttcctttctctctcggaaacccatgctgatggcttaacttcaataatatacggataaatcacgggaaaaacataggaagaagaaccttcaagcaaagaaagaacccaagagaaagagccaaacctcaaaaccgaagaaaccccaaatgccccactgacatgc

SEQ ID NO: 226287 - DNA, 390 bp, Glycine max
  unsure (1)..(390): unsure at all n locations
tggcagntattagnttaaaggtatcatatatcctctagaatttacgagaagagttgctacgatagtggagagataataggctntcctgtattagtaagaagttgaagtacactgcgataccactactgaaacgaaatgactataacgtcatgctggaactaataagagaattagaatcagaaagatagaaacacagcaaggtgaatcagaggaagagcagagatatcatggagaagattttcattctatatgccgtgcctcacttcttaacaaaatccttatatagcacattcggcctgttaattcgcatgctctgcctgcctaccttaatttctgcatcagctgacacatgtccattctgtctaacaaactttggcgccaatctctctc

SEQ ID NO: 226288 - DNA, 427 bp, Glycine max
  unsure (1)..(427): unsure at all n locations
agctntatggattggaagaagcaaagagttattttatttgtatattcctaagtcagggataggataatgtataatgatgttattcatatttgacaaagactgcaggtgaggaagtttgatatctaatgtttttggaaatgatgattgatgtacgtggtcattgagttttttaatggattgctgctttgtttttggaacgtgctgctcatcatcacaggtacaaatggtcttttgtaaacttttgatgttgttgttttttaccaatgtttttattacttgttcattgccattaatgacaattaatatatgctatacaaattatgttcatgatgagtaaaccttacattcccgtttgagattgaatacaatgattcttgcgggcagtttgcattaatcattgtattgaatcttgaattgtccattttgg

SEQ ID NO: 226289 - DNA, 449 bp, Glycine max
  unsure (1)..(449): unsure at all n locations
tcataaccacaananaatagaataggaagtatgtgtgatcatactattttcacgaattagacatataaatgcaagtatccaactagtttcatgtaattacagtctntgtacctctgcttataagcaacacgaaatcacagcagaacagaacataaatactaaatataatcggaatatatgccttctcacatccttactcgtaatataacacaaggtccaaagaaaatgttagaattttatggaacagatagggaatacctctcctcataagcttcaacaacatcatgaacagactctagaatttccagatgctcccaagtgttggctgtctcgggccacccattccttcagtgataaacaaacagacaaatcagcctacatacatacataaagttttcacactaggccatcttccgttggagtatgtatccatacattacacactcatc

SEQ ID NO: 226290 - DNA, 302 bp, Glycine max
  unsure (1)..(302): unsure at all n locations
ctttccaatatgctgacgaaaaatattttgcgtggaagaaaatccataccgacgtgcttctgtaacgatatcggaacgatttccgtgagtgatttaccgaaggattttgaatcgttcctcatttgattcttcatcgttaattaagtcttcaacgggtaatgacctccaaccaatctttttaaatcattctatgtacccgtggtggtccaccgtttgtttcatgcnatactattctcatattcatatacttattataccgccctttgacgtgcttcagccatttatttaagtcatttctcgct

SEQ ID NO: 226291 - DNA, 420 bp, Glycine max
  unsure (1)..(420): unsure at all n locations
agcttattcgtttgagaaaatgaatgaattgttactgttgcaactngatcatgtacaactccttggaaattatgggtatctttctaagcaactgaaatggatctgttggcgagggtttcctttaaaatacatacctaacaactttcatctgaaaagtgtaattgcgattgattataaatacagtaaacttagactactctggaaaacaccccaggtatatgttacatgccatgttcatttaaaactcataagttatttaaagtagtattagtttccacttaccactatttccctttttattttcttctattattcttttatcaaaaactatttgttgtaggttntgccgcggctaaaattcctcaatcttagtcactccaagaacttgacagaaacccctgacttttctaaactgacaag

SEQ ID NO: 226292 - DNA, 407 bp, Glycine max
tgtaggttatagcgacgatgagtgtgctagagatgattattataacaaaatcactagtggatctatgttttcaaggggaatacaacctctccttggatgtccaaaatacatttgatagccaccttttcgacctgtgaggcgaaagacataacagctacttcatgtgtttgtcatgcactttggctcatgaaatttgtaaaagagttaggcatgtcacaagaagagccaaccaagatctttgcggacaataagtcaggcattgctctagcacagaatccatgtgtccatgatcgaagctaacatattgataccttgtaccactacataatggagtgcatagcaagaaaggatgtacatgtatactatgtgaagactcaaaaccaataattgcatctttaccaattcgt

SEQ ID NO: 226293 - DNA, 429 bp, Glycine max
  unsure (1)..(429): unsure at all n locations
cgtcatagagatcactctgaatattatcgcatgtgaaggacctgtacccaggattctaatgccccacaaccgacacttatagctattttattttcgtatctgagaatagntctctattgccaccgacagcatcccaggtaaaaatcaactaaacacatttaagaataattgcggttgctcacgtataatcattatcttactaaattcggaaggattgtatatcttataaaactcttatcacaatgaacaaaatgaattgtgtttaaacatatgaattgcacaatgtcaatattcgattctgcatgtcatactgagaggctgtgaaatcaccgcattaatttcatctacacatgtcttttgaaactttcattaaaaatatcatcaatccttttatacaaaagtgatgatcatttactgtgcgatattcta

SEQ ID NO: 226294 - DNA, 449 bp, Glycine max
tcttaagtgcctgcagctgcaagctttctggaacctacctggagtatgaatattttctgcgggacacgtggtggaaatatgaagaatgagagtcttgtgagacacagctcaaagatcaacttctctccctttttgttccttcaaaaggggctccccctccctatatctctcactctttcttttcctccattgaagcgttctttcaaggcttgtatccaacgctcactttggcggtgaagcttcttcttccatggattatacactagaggatggcgcctactctcacctatcctcctttgtctgccggtgcgtcttcatggtggaaaatcaccattaaaggagcttgttgaagctcaaagatccaaacgccatagaagcctcactagcaagcttccatcaccaatgcgtggtgagtaacaagagatgaccttccggatcttggcctgaaa

SEQ ID NO: 226295 - DNA, 435 bp, Glycine max
agcttgagctaagatgcccaccagtggttggacttctttgtgtacaatatctgcccttagctctgctggcagatgctccagatcctgacaaataaatgcagtgattttttacaaacaaatcaacaaaaatcagagaaaataaaaagttttcacccgcagaaaagaaatatgctattgtcagtttcaaacctgtgttgacagattcttcatgtgaattgggtaagtgattgtgtccaacaatagagttgctggtttctctcctgcataattgatcttccacccatctttctctttctttataatagttctctcctcatcagctgagccacttgctgaaactctcacacagaactgtcacaaacacaaatacacatcatccatcattgcactattggtgaaaaaacatgggctttgtttttatagtaacataaggaa

SEQ ID NO: 226296 - DNA, 265 bp, Glycine max
agcgcacagtcgtgcttagcgagatcataaacattaaatcatttatcagaaaagatgaactccttatcgggacagggcccgcttatcgagttcatctataaatccagatattcatcaaaagtgatgaactcacttatcagcattcatcgccatttccaataaaattggtgttggatcaagtggccttgaataattaagaaggggggggggtcaatcaactattaatgaaccttacttaattaaaatctatccttcttaaggtact

SEQ ID NO: 226297 - DNA, 360 bp, Glycine max
gttctcaagactggactaatacatttgctgcccaagttggatggtcttgcaggtgaagatccttataagcatcttgaggagttccatattgtttgtttcaccatgaagccccctgatgtccaagaagatcatatctttctaaaggcttttccttattctctggaggaagtggcaaaagattggctatactaccttgctcctaggtgtattttcagttgggatgaccttaagagggtgtgttcttggagaaattcttccctgcatctaggaccactgccatcagaaaagacatttcaggcatcacgcaacttggtggagaaagcttgtatgagtactgggaaagattcaagaaattgtgtg

SEQ ID NO: 226298 - DNA, 451 bp, Glycine max
  unsure (1)..(451): unsure at all n locations
tctaggtatccataacccctcttttaatggatntcaaggctcgagaagtgaaaatgagaatggngtaaatctggagcaaactctcacctcacacaagtctataacatcaatctacacttgctcaaactgcgtttacgcctaaaattctgtcgaatcataatttgactcctcaacacccaatattaccctagaaatggctcttgccttcactntggtcatttgtttttctctcttgcacagcccaaactntctcataagtcataaatgacatttcaaactaggaataactccctttaacctccaaataccactaaattcagaattggccttccaactctcaaagcttcactctgtttccactcataacaccatattctcactttctaaccctaggttaaccctacccttcatctctacagtgtccataagcaattcagacataaacatcaca

SEQ ID NO: 226299 - DNA, 391 bp, Glycine max
atgaagctctgataccacttgttagacaagtggcctcagatatcttaaagaaggggggttgaattaaaatattccaaactggttcccctaattaaaaatctatttcactttttactcaagttatgaaatcccttaatgacaaacttcttaaatattaattcatatgaagcaacttgaatatgaatataaagcaataataaataaaggagattaagggaagacaaaatgctaactcatgtttatactggtttggccacacccttgtgcctacgtccagtccccaagcaacccgcttgagaagtgcactatctttgtaaatccttttacaagttctaaacacacaaggacaatccttcctttgtgtttatagatcctttacaacaagagactc

SEQ ID NO: 226300 - DNA, 312 bp, Glycine max
taaccatgacaataccatggaattgaaatcagcttttgcaaacggtagtagattaatttgttgtgtcttctcgtggtcctttccattcctcctcatgttgacgctttcttttccatatttcatattgttcctcttcatttctttttaatctaccttccttctcagatatatacataacattgaataacttcaaggtgcaaatagtctccaaatgattttactttctcatcactggcattttcaaagacatgtcaaaattggaaaaatgatgggggtgatataggataccctcattgcattttcttctctcta

SEQ ID NO: 226301 - DNA, 430 bp, Glycine max
agctttacaaattatacagctgataatatctctatttgcacaatacattacataattactagatttctaacaatatacatcaaatagttaactagaatttgttatactttctttctggtggcaaatgtgtgctaggacttggggcaagtgccctctctaccttaaaatttcttttggaatatgcattattggtccactacatattttaaattgccctcactaatcaataagttatataaacatggaaaaaaaaattctgttacctgcaaactacaagataaaaagttatattggtttgaaccccagacctaagaaacccccttactcttttgtctattttgcttttggtatgtgagagtcattgccatgaaataattgtgtcctcgatccattcaccacctaacctaacctctgtcacttgagcatgcct

SEQ ID NO: 226302 - DNA, 453 bp, Glycine max
  unsure (1)..(453): unsure at all n locations
ccctcatggcctgaatctgtgcgaatcatcttcggagaagatcatcagtgaaatctccgtcaaatgtnagtacccctatttctgattgggttggtctctctcacccttcgctcagagtgcttgatcttccatactgctccattgctgatctacgttagggcatgtccgtatatattttctcgcttcccagtcagtcgatgagtgctatagcgaccataggttctcggaaaacagtagacttgtgaagaacattggaaaagttgttcttgatcttacgaatcatggatttacttccatggctgaagatgcttattcttctgctatatttttactactcgaggggagcatgtctgttaattctaatactgctcttacaagtgactcaattctattttattccaattgctctacaattgtgcattatggcccttgagaactatcttggatacattg

SEQ ID NO: 226303 - DNA, 427 bp, Glycine max
  unsure (1)..(427): unsure at all n locations
agcttgctaacccatggaagctcctaatatctcctacactttttggggtgggccattcttggatggccttgattttctcaaggtccacttggaccccatttctaccaactacaaaccctaagaaaactatattatctacacaaaaagtacacttctctatatttgcatagagggtgttttttctaaggactgaaagaacttgcctgagatgtcctaagtgatcatctaggctcctactgtacactaaaatatcatcaaaataaacaactacaaatctatctatgaaatcccttaagacatgatgcataagcctcataaaggtgcttggtgcattagtgagcccaaaaggcatcactagccattcatacaaaccaaacttagtcttgaaagctgttttccattcatcaccctttntcatcctgatttg

SEQ ID NO: 226304 - DNA, 460 bp, Glycine max
  unsure (1)..(460): unsure at all n locations
atatcttgatttctagatacccattttgatgcaagctccattggagcttgtaggcctaggatcttcttcatcaatggattccttttcttcttggaagatgaatggccgtggaatggagaaaggaagagagagaggagacgccacttcaaggagaagatgaatctagaagaagctcaccaccataggaggccatggataagagcttggaggaagaaggagatgaatgaagggagagggagagaagagcacacaattttgtgctctaaatgagctctgagatctgaagtttaatattcaaatgatcaaagttgaanataatgcacacacatgacctctatttatagcctaactgtcacaccagattggagggaaattcaatttcacttgaattgaagtgaatttgggagccaatttcctaatatgatagtgatctagtatggtcagcactatcagatcattc

SEQ ID NO: 226305 - DNA, 431 bp, Glycine max
agctgcttttcctttgtcttttggatctttaatacctttttcacaatcttttgctcttcaaccaagaaagctcgaatgattctacagaaccagagacaaaagtaagcaaggtactccatcaatttgcacaaagaaaattaaacatactgtagattaagaagattgagaaaaacaaacctctctctaacagcactgccagacaacacaccaccatatgcacggttcacagtccttcggtttttgggtaaccttgatctcttatattctgttggccttaaatgtggaatctgcaattgccaagcattaataaccattatgttataccgtgtatcattcatacataatcctttaccaatcatagaaagaaaaatctagttgtaggaaccttgaacatcataatcttacttttaagacaaatgttaagttgaacg

SEQ ID NO: 226306 - DNA, 401 bp, Glycine max
catgtggagctctacaatctgttcttctcataagttagacggcaaagactcgagatagaatctatcccattcaaggtacatcaatttatcatgcaatgactaaagaccagtaggaggaacgtgcaaattaaatttgtttctccaaaaaaaaattatgtgaagaaatctcatggtagtcatctttgcaagagaattgaagctcaaacatagatccctttttaaagtatgcaaatccaaatctaaagttataccttcaataaaatcagctccctgacaaacaaatattcaaataataaaatcagttccctgacaaagaaattgaatcgatcttagaaattagaagatgatattgaactaaaacaatattaaaggatcaagtcgaacttgataacatggataat

SEQ ID NO: 226307 - DNA, 423 bp, Glycine max
agcctcgaatcgattacatcatttgtgttatttattaccatacacaaaaaagttcaaatttcaagtctaaagagtcataactcttcaaaaattaactgtgtaatcgattaccacatttatgtaatcgattaccaataaggaattttttaaaataactcccaagtgtcacaactgttcaagaagtttttgaatgaccatcaaaggcctataaataggtgacttgggatacgaaattccttagagtatttttgaacaacattgtcttatcctctcaaaatcaaattgtcttatcactctcaaaatattccttggccaaaacacttgcaaattcattaaggaattctgatcgatcttcaattgttatatctttctcttaaagagagaaaatttttctttttcttctacattcttaacctaccattt

SEQ ID NO: 226308 - DNA, 313 bp, Glycine max
tcacatgatgaccgaattgacgtgaagcatatgccactgctctctcctcttgcatcaacacacaccccaacccttgcccgcttgcatcgcaatacacttctaacggtctcttaaggtctgggaaaaataacactggagctgtccgtaacagcctcttcaactcttggaaactttgctcacacttctcattccatacaaacttctcattcttacgagtcaacttggttacgggcaatgccaatttggaagatgcctcaacgaattacctataagtatccagccaacctcaataagcttctaaactacgttggag

SEQ ID NO: 226309 - DNA, 429 bp, Glycine max
  unsure (1)..(429): unsure at all n locations
agcttgctaatgaagaatctgagatctaccctcttggtccaactgtagcccttgcctatctgtcagttttgaaggattgtgaagaacactgtttgcatgaaggttctgaggtaaaaaggcttgggggtcttcatgtgattggtacatctttacatgagtcccggagaatagataaccaggtgggtacttaagcgtgataaaagtctaagattctgcaatttgttttgctgtattgctccccttggattattaaaacaatttccttgactgatttggctatccatatgcaaggaatatttttatttttatattcagttactgttttgaattatgaataatgttaacttgatatcgaaatgttatttactcgtatgtacaaaaacatatagggtangcataattcaagcatttgatagatattagtactca

SEQ ID NO: 226310 - DNA, 405 bp, Glycine max
  unsure (1)..(405): unsure at all n locations
taaagatcacatcatctcagatnagggtagttactgactctgtggatggncttatctttataaacaaagaggtaactttcactgcttattaagctctgaatttaacaagctctgggtttaactttcaatgcatattaagctctcgatttaacaagaactataatcttaaacataaacagacattaagtgaataatttaaatttttttcacgcttaaaacgtctttgctcatgagagtatacactactacgaagaaaaaaaaatatcacaaagaattgtaatatgaaacccaaaacctacttcaagagtcagaataaaataaagggcaatttgtttaaatttaaaaaagttgatttttaagaaggagataaactttaaaaaacaaacaatatatttaaaaaaaggg

SEQ ID NO: 226311 - DNA, 406 bp, Glycine max
tagctgaattcagagcaaattgaaggtagcttattctatccttggccagcttagcataccaaatcaggctcagatgcaaaggtttgacgctaagcgtgtgagactcgcggcttatcatatgaacaaagatgcgcttagtgaaaggactgtttttcaggagaaaacatttctaagttatttatcactcctctctccaagacactgaaacccttatgttaaacattcaaagataggctgaagtactgctatgtacagatcatacatctaggtccaaatgatttaatgcatgataaacaaagataacattaattaaaaactgggttgcctgctaggaagcgcttctttaacgtcattagcttgacatttctacctcactgggagatcctaatgtttgggtcctactttc

SEQ ID NO: 226312 - DNA, 372 bp, Glycine max
ctgccagctttaaaatccaaagatctaattctatgttaatgtttcataagaaggattcccttacttatactattcgattccagggcaagccattcatttatatcttatttgggtgtagagaaaggtaagctttttatgtcttctttaaataaagagctagtggtagagaccctgactagtgggtctgtgtaacttctaatgtgtgtttgaaatatccagggaaaatttccagtagaacattcttaattgatctgatttgtttgcatttgagccaaattgatgctattctgggtatggattgcttatctctcaaccatgtcttgttaaaatattttgacaaaactggggtggtcgatgattctggagtgagta

SEQ ID NO: 226313 - DNA, 294 bp, Glycine max
  unsure (1)..(294): unsure at all n locations
tgagatgatgaatgtgtgaagggtgaaactttctgctcttattgntgaccacaaagtgatacctggagatatgtcgtcggggtcaggagaccttgtggacgacaagtggggtgctattgcccaaaaccaagcttgaccaatcccgactcaacccgggcatagtccggcagtgagaaacctgtgatgtacctaaacaggcgagctcctggcagtcaacagattagaggaaaacaaaaccacaaagcaaggaggcttgtgcgggctggccagctgcgaattttgtgtaatatgtgg

SEQ ID NO: 226314 - DNA, 422 bp, Glycine max
  unsure (1)..(422): unsure at all n locations
gcttccttgagaagctagagcttagctacacacactcatctaaaaactaagctcacctccttgagaagctttcttgagaagctagagcttagctacacacccctataatagctaagctcacccccatgacaaaaaaacatgaaaatacaaaaaaaaaaatcctactacaaagactactcaaaatgccctgaaatacaaggctaaaaccctatactactagaatggccaaaatacaaggcccaaaataagaaaacaacctattctactatttacaaagaagagtggacccaaccttggcccatgggctcaaaaatctatcctaaggttcatgagaaccctaaggccttctntatcaaccctagcccaatcctcttggagcctcttgctcatggctctggtaactggtcctttcctagggagga

SEQ ID NO: 226315 - DNA, 403 bp, Glycine max
  unsure (1)..(403): unsure at all n locations
ngaagaaactngaagaagntttgtcttttacatgcccaacttctcttagtggcatttgnattgactgtcgcattgtgtgttgcatcctaggctctatcactctcgatgtgcatcatcgtgtataagtaagaagaaacggtcctcaagtcaaagatctattcaatgtttaaaactctctattctaatttatcacaagcttatcataatcgattacattagcgtctgtagcttacagagaagtttctcgtatcatgttaatccattacaaggtaatcataatcgattatacaattcagatgagacaaagattgggttctcaggagactctgctctaatcgattatcgggtgatataatcaactacctctctcttaatagcgcttcataagcgatcactaacactt

SEQ ID NO: 226316 - DNA, 429 bp, Glycine max
cagcatgcagcttaacggtagggtgggcaccatagacatattttttagtgaaagaaggcataaagagactctgagagggtgcaagctattgagacgaagtgagatgcaaataatgggccccagtataagagccataacactagaacttcatagatgattttcaaagatcgtttttgaaatagcgaatccaattacagttctccaaagaattgtcttcaatatcaggctttgacttcattcttaaaaagcatagttgcaattttactgatatttacaacaatgagacacgatattgaaccaccaagatattggtaaaatcggtgtcgattcaccgccgctgaagcttgtgtttttagtagtgatggactcaacaaccaagcagggttagggaagactaaggaaacaaacacttatctggatcaagggatg

SEQ ID NO: 226317 - DNA, 430 bp, Glycine max
  unsure (1)..(430): unsure at all n locations
agctttgcagatntagtgtttgctagcgagaggattttagtgggtctaagaagaggaaaatttgatcatgctgctttgatgaataggaagcctggggtaaatggagagaataagaaagagagagaaacccatgttatgactgtcgttcctacatggccaaatttcccactagctcaacaatatcaatactcagccaatatcagtccttctcattacccaccactctaccagccaagaacaccaaatcatccacaaaggccacccctaaatcaaccacaaaacccgcctgctgcacatctgaggccaaacaccacccttaatataaatcgaaacaccaaccagggaaggaattttcaagataagaagcctatagaattcaccccaatttcggtgtcgtatgctaatttactcccatatctactcaataatg

SEQ ID NO: 226318 - DNA, 417 bp, Glycine max
aaactagctgtggctctaagttctacttaatctaactttttgtataacggctgtatactaaagaacaaacgaatcacgttatacatatgaaatgccagatctcaaggaaataccagagatggttgatgctagataataatataacattcaaggggctttacgtgatgggtcaaccctgcctacattgtttatgggaagctgaatcttatggagcggcccttgaaatagtatgtattccgatgaagactaaacgataaacaagattgggctttccatacaatacgctagagtatgcatatcatgatgactcaacaaggcaacatgggcatatctctacatgcctctaaaatacgaggagatgtttctgtgccatgtgactccctacgaaatccgatcaaaccatatatgggaactact

SEQ ID NO: 226319 - DNA, 409 bp, Glycine max
agctataaaagattccattgaagcgagagttttttattttccattctaaggctttaagtccacattgtattgatgttattacaatcgtaaatatctaacgatttttcttttttaccaataatagcaattttagccgtgattatatttgtcgctattttgattttatatataagaaacacaaagaaaaattctattagtcctaattatgagaaggagcttataactcaatatttttaggatattggttaaaacaaatttataaaaatatttattgtgaaaatcatacgaaaatgtgataatgattattggcaacataatttttcccttttcatcaaaaacatttgtaagttatttatacatttttataccaacatcttccataggaatttcttaactcgatttttaagtt

SEQ ID NO: 226320 - DNA, 451 bp, Glycine max
gatcctatgagtcacctgcggcatgctagctggagaggtgctttaaggaggttttttttagggagagaaagagagaggggggagcacgatattgtaaggaagaataggggagagaagttgaactctgagttgtgtctcacaagactctttatcatcaaagttacaacaagtgttacatatgcttctatttatagactacgtagcttgctcgggaagtcttcttgaaacaacttccttgagaaggtgctctgagaaaacgtccttgagaagctagagcttagctacacacactcctataataactgagctcacctccgtgagaagccttcttgagaagattcttagtgaagctagagcttagctacacacacctttctaataactaaactcaccttcttgagatgagaagtgagagcttagctacccaccctctatagaagtaagctcaccc

SEQ ID NO: 226321 - DNA, 416 bp, Glycine max
  unsure (1)..(416): unsure at all n locations
agctccacaacanccaagcgaagtcactattttacngttcatgctatgacagccaagccaaacagagcaaacgcagaaatctctgctcaacacatcaaccataatcacagcttgtctcacttaaagaccccagtaacaattccttcgatccaattcgataaccgctggatcgactacaaaattttactggaagtctatagtgtataagcctacattgtgaccagtgggatctactaacaaacatccagaactcattctgcactagactttccacagccaaccacacacaagcatatttctgcacttgtgcaaaatcctgctgcacaatttcacagctaaaatctgaccaaaatgcaaatctcgaaaaccacactttccctcatgccatcctgcccaaatcaaatcctacaagtctc

SEQ ID NO: 226322 - DNA, 435 bp, Glycine max
  unsure (1)..(435): unsure at all n locations
cttagatgaccgctgcatgcagctgaccttggttagactgattgttcttatttgggacttgcangatttgatttgggcaatatggatgaggggaagtgtggctttcgaaatctgcattatgcgcagatttttgctgtgaaattgtgcaacaagattttgcacaagtgcagaaaaatactatgcatttgctgtgtgtggaaagagcagcgcagaatgagttctggatgtttgctaataaatccccacggtcaaaatgtatgcttatgtactagagactttcagtaaatatttggagtcgatccaacggttaacgaattggaacgaaggaattgttactggggtctttaagtgagaataactgtgattttggttggtgtttggcaaattatctgcctttgctctgttcttggctggatagatgtgctgcttaatgtt

SEQ ID NO: 226323 - DNA, 364 bp, Glycine max
taactgacaaataaactttccaacttttatctgactcatctaagaagccagccactgtattccaagtgcacctttcaccacaaaagcttgaagaccatcagacctgtccaaaatctttgaaagaagagatgaatattttccatcatgtgcttcaccaacatgtggagcaccctctttcacccaaaagccatcagtgctctttttgataatcaaaggatgcaatgattgaagcgcctattagaaaggatctcttgattggaacatatggttcacaatcaagagggatgttaaagcgttgaaggaagagagggaccacatggggatatggcaatggagcattcaatcgcaatgctctatgcatgcg

SEQ ID NO: 226324 - DNA, 388 bp, Glycine max
  unsure (1)..(388): unsure at all n locations
caagcttctagaattgggctgaatgattgtttattttttcatatgaataacagagaccaaaaccctgtgttcctacttaaacttatgaatagaacatgtgtcattgtgaaattttgaaactgataatgcttctctaaactgatgcatcacccttccctctttaactacattatcatctcataaactatgcccaccacctgcttgtgacaattcttacataaaactgaaaacaatgcttaagaatatgcgactaaaacaagtatgaacattaaacaattcaagtaattaagcatggcttcttcctcaaatgtatgttctgcagcaagaacaatctttcccttaagtcctaatttggagaanaataaaacttggaactataaatgaaagc

SEQ ID NO: 226325 - DNA, 496 bp, Glycine max
  unsure (1)..(496): unsure at all n locations
tagttgttncaacttctttctctgtatatgacactggtttataagtgataaaattcactatctntcccttatgctccttgattggcatacactatctatattgttattgacaatgtcttgcattgaaaatgtctgtgtttgaccacagttattaacagtgacaaatagcactactatgcccgtcacattntgtgacagtgcatgtcacatcccattcctctataatctatatcttcctttctttttcctcatgctacttgttattattatgctgtcggttagcttagcattcctctttaagtaactatgctgtagattgatggtgaatgtgtgtctgctgtctagactctaaaccatcagactatgattttttatgtctaattttatctctatgcgtactatgattcttgatgtaaagatgattagatgaatatgtctctatttttgggtaactttgtatctgtgagcattcataagtgtagataaaacatttatc

SEQ ID NO: 226326 - DNA, 429 bp, Glycine max
  unsure (1)..(429): unsure at all n locations
agcttacacgctatgctaagctcctctctccttttaatcgcatcaaccacgtacacagcatccgaaaatgcaagctgcagaaacacaaaactcaattgaaattctacgtcacgaatgcaatataagtaaatcaccatatactctactcacaaaaacatttaaaaatccctaaaataacacaatcaccatcccaaaatcacaatagacaatttacaacacaacagagcagtgataggttaccacttactgctatctacatatatgtaaattcctagttatatcaacgagcctncaaattaacaaataatatttcaacttcagaatacaacattataaattctcatcgcatcaaccaagtatactacaccaggaaacgcaagctgcagaaacacacaactcaattgagattctacaccgagaatgctatac

SEQ ID NO: 226327 - DNA, 215 bp, Glycine max
ctgagctgcagctttattgggtgggagagacgagctcacgatctctttcctgtgctcgcaagacctacagtgagtttgttgcaagacctacacatacattgctgatccttcatgctatacatcaagcatcttgttacacgtcttgtggataacgattataaacgattctatacacgacccaccgacttaacttgctgtacaagcttgactagatg

SEQ ID NO: 226328 - DNA, 426 bp, Glycine max
agctttatatttagcgctgaataatgacagttctattttgatgtcagcaatttatgaataacatccattgaattaactctagaagatacgactcggctatggcttaacatccattgcagtaatattcatttggcaagtcttataatatatgattagcctagcctaggtagaggacagtacatgaagcaacaaagttattggctggtcacgaaaacaactagatatgcattgtagtacagtgatagatatgctataaagttagtgcctcctctttctttgactttgtgcagctacagttagtttaataacttcaatcatgtcctaagcatggaatatgtctcttttttaacaagggagagaacccaagtggaaactataatattattaagcgcttatagaccatctgatacaccttaataaataaac

SEQ ID NO: 226329 - DNA, 262 bp, Glycine max
atggaattggctaccattactaccaaaccaagtccaagtgggctcactatttgatgggcttcttaatttctaccattgacacatactctgctgcaatataacttatctaattaaatagacactaactaacagttgatgtataactccaccacactgaaacttatatatgcatgaatacatgaatattaacaccaacgcccccacaaacgtgcataaattgcgtgtatatatggtgtcacatatacatgtcactagttaacgt

SEQ ID NO: 226330 - DNA, 384 bp, Glycine max
gcatgcaagcttgtctcaacggttatgcgagacggagaccttcatgctatctttcatcgccaagcaccaagaagagttaggtctaaccactgcccacgagcatagaatcgcggacgagtatgctcaagtatacgcggaaaaagaggctagaggaagggagaacgactctttacaccaagaggcaaccatgtggatggatcggtttgctctgaccttgaacgggagtcaagaacttccccgctggctagccaaggccaaggcgaaggcagacacctactccaccccccaaaagattcatgggcttctcggctattgtcagcatatgacagacgtaatggcgcacataattagaaatcgttatgaaacttgtatggtctctcagac

SEQ ID NO: 226331 - DNA, 401 bp, Glycine max
  unsure (1)..(401): unsure at all n locations
tgagagagcccgggtagtcnaagagaagttcaagtccatattcatctaagtctgtaaagagcatgatgaacttatggacgtcaatatggccacagctgaagctttggaacgagaaaccatgaatgcccgaatggaagaacactaccatagcaaagttttgaggggctctatagggcagcaatagtgagctcaagctccgaagaggtgaaaggaatcatcactggtcaaaggcatgatcttgaaggacgagctaaaggttttggcttatgtcgaaaagaaattttgtccaacagttaagcgagactgaagggaatatgtgggccatcatcgataagtgcaaagagaatctaaatctagcggctactcacgagctaaggctatatgatgagtatgctcagata

SEQ ID NO: 226332 - DNA, 423 bp, Glycine max
  unsure (1)..(423): unsure at all n locations
agcttggtgctgtgtgctgagagagtgagcatgttgtgtanagtggttccatggaacccgtgtttatagtagtttagagcgtggttgnctggttcctagcttagtaggggattgttgcaccccttgtatataactcccggcatatagataatagctgggagcttagagataatgttcgagacaaaccattgaattataaataaaggtagaagatactcatacctctgagataatgtggcattatagataatttaataccttgccatagataagatattcaaatacatttgaatattacttacgctagagataacctcgttgttgggaagcccgactactaagggtcaaacgttatgcttttgtatgacggctgacatggagggtggacacatggtctccgggtgccatgttggatgcccacat

SEQ ID NO: 226333 - DNA, 468 bp, Glycine max
  unsure (1)..(468): unsure at all n locations
taactataacttgatagctgatactatcctggtgagcgtatttagttatccaccacgtatgaaagcaacatgttgaataactatgaatattattatttattattattgaacaggtatacaaatggagatgggtttaatgcatttatgataacttaagcatgttggataattgattttacattgatataaattatcaagcaatgcctagtcggattgagctttacctgcgcgcatataaagatgatgaagttcatttatngaggttctttgactaattgaaatagattggtaactcacattcacttctacatgttctattagagcgcatcttctgaaagtcctacagacacagtaagtaacattgcagaaagagcaaggcacagcacttgctcatgctgtgctgctggtcatgacatgacatataccgtcttagaggcactagtagatagctatggtgcatcttgcatg

SEQ ID NO: 226334 - DNA, 420 bp, Glycine max
tgtggcaaagccttcactttctttttaccttagccaggagatactggtagagcaagaagctaataaagtgcatggattacctgggcagcctttggtgaaaatcaacaatatggtggttatatcactgtcaatgaaactcaaggaagagcactgttctattggttttttgaggccactcacaaactataacaaaaacctgttctcttatggctcaatgggggtactttttttttttttactaacccagctcttcatgtatatatttatattgcaatcgcttttatgtagtgttcactctcatgactaatacatgataacttaatgaaaggtaagggtaatttctagcgaatttatcttttaaatcttataggctggttaattcttattcttttgattttaacatgtattaataggaattga

SEQ ID NO: 226335 - DNA, 386 bp, Glycine max
  unsure (1)..(386): unsure at all n locations
agcttngacttgagttatcaagagattataattatatggccatgacatgaatttcaataatcaataatctatctctcaatattctctcaacatcattcaatatctttcaattctttctacagaattgtctgattctttttctcttcatctttctaaaagtttttgttcaatactttctctttcaagaaaagttctttgaacaaaaacttgcgctattcatctttttcattctcttctccctttgccaaaagaacgaaggactaaccgcctgaattcttttgtgtctctcttctcccttacaaaagattcaaaggactaaccgcctgaattcttttgtgtctctcttccacttggtttttcaaagagaacaagggagggtacatccc

SEQ ID NO: 226336 - DNA, 429 bp, Glycine max
  unsure (1)..(429): unsure at all n locations
tgaagctttagtcgaacagaataattcaataatgttcattatttgtatgtggataaagcataacaagactctctgcgatcggattaaagatacaatctttgcatatgagaatgctttataaacattaagatagctagcagatgggcctaaaagatatgttataacctcgcaaggatacgacataaacaagtattcattttacacaagngcacatgataacaaaagtacaatgcagaacacgcgggtcaccctacgggctgaatctcaacacttctcaagtgtcaatgacgccaatccctgtgtagcttccatcccttactttgngttcattgatgagaattggaagcttactatgtcgatttactgtatgtgtattaaatggaatggattgcaacaactacgtgtgtcaccgatatatatgattacgct

SEQ ID NO: 226337 - DNA, 427 bp, Glycine max
agctctgagggttttgaaggaagaaaatggttattttttcacaaaaaagataaagagctttcaaagctttcagaacctattgtttatgtgaagcatgagaaaaagaaggagaaaaaaaaaacacctggtgaaaggagaagaagaggaaatgttatataaaattagagaccggaaagaagaaactaaacggtggtttaaaatataaaaatatatttgtatggtatcttaataatatcatgatataaaacaattattacattttaacatttcaatagcacaaaaaattggtttaaaatattaacgcaaaacaataatttaattttatcctggatgtcaaaaaagataataagtaaacttgtaccaatgtgcaatggatgaaagaaaaaacataaatattgtttagaagaaggtaaagaaagaaattaaa

SEQ ID NO: 226338 - DNA, 508 bp, Glycine max
  unsure (1)..(508): unsure at all n locations
tacggacctatgaaactcagcttgtataaaagttgcaacataatggcccttgagttgattattgaactcgcttgcaagttggtcactaaagccgacaaagttggtgatgatttctcctgaaagcaccttctctctcacaaagtgacagtcaatctctatgtgtttagtccgttaatggaagagcgaatttgaagcaatgtgaatagcatattgattggcacatattaatttagtatcttgagtagctccaaattttagctgttggagaagtttcctaagccatgtaatctcacattcagctgctgccatatcacggtaatcagcttcagcactagatctaacaactggtttttgctttctgctcctacanaggatcaacgtttctccaatgagaacacaatatcctataatggactctctatatgatggtgatcctgcccaatcagcactagatagcacacgatgacagcatcacattgtgtatgacacaattccatgactatcacat

SEQ ID NO: 226339 - DNA, 431 bp, Glycine max
  unsure (1)..(431): unsure at all n locations
agcnttgttaatttaattattcctaattccttgtacaatttaacctttttcccaattgaaaatcctaaatccttagatgaaattaaaaagtaataaacattaagatcgaaaatctctaacaatagaaagcatccaatggctatggttatgtgaagaaatgttagctttcactgcgttttcttcacatacccacaaggttctgatagagagatctccaatccattttcctcactagtgcttacagtgaccttctttgtatatgtccaaatcacctttaaccaattnttgtcatttttttctcaatcagtgccacaccaatatcatctcatatacaatcatttnggattatgtgcttggaatctatataataatgctgattattatctccaaacaggtcatttaccgaattgattatagtgaagaaatctttg

SEQ ID NO: 226340 - DNA, 356 bp, Glycine max
ctgagctgcagcctcatctattgtggaagggaaatttcttgtgttaaggaaaatgttccgtggtgtaggaggtaaccttcactagtgtaagagctgtacgtttattaggcatgttaagctcccctatcttggaccactggtgtttaagcctcttctcggcagttgtctggggtggaccatgctttgatctttcaagcaaaattagacgtgttaggtggatgaatgccttatatatgacgattctgcccttttctgatcattggaggaagcattgaagacaaatgtttcgtttttgcttttgctacaagcgagtgccacccacacatattactcttgatatgtatcactcatggagt

SEQ ID NO: 226341 - DNA, 307 bp, Glycine max
  unsure (1)..(307): unsure at all n locations
ttcataatacaatgttnactctatcatactagcgagaaaataatgagtaaacctgcgaatttacctcttttaatgaagcaataataaaactggtacagcgatgtccttattttagcactttctttatcactagcatggtgtaacccgagcatgctcttgtgtgcacatattcaaaatgtggtttgaaaaaaatatcactaagaatgttcgaacacacttttattttaacaccagacaacataccacatatcttgctatgaatatacattgaagaatcaaagcgctaactagcttgtcggaatctatg

SEQ ID NO: 226342 - DNA, 346 bp, Glycine max
  unsure (1)..(346): unsure at all n locations
gaccgcagctgcaacttgagnggcagaaataggtatttattgtctagaatcgcctaccacaatgccagaacacaccattacgcctatttcgaacaaagaactctagatgctcaaagaggagtaccttttgcatagagacctatgctatgtgatctaaacaaaaattaatagagttgtacagtgactgttagatcctgataataggaggaaggatctccccttcttgtgtaaaggaacaattatcctctcctcgtcaaaccatattacgacaagatatttctatatgtgctggcgaaacacttttgttgggaatataaacgaacaactgacgaatcactttattatc

SEQ ID NO: 226343 - DNA, 107 bp, Glycine max
cacacggtttccagaaagctctcaagagctacttgctaaaacaaagcacgggacacggggcggactaacgaagacagcttgtggacatacaccagacgacttctccc

SEQ ID NO: 226344 - DNA, 393 bp, Glycine max
agcttataccagcccaatccgccatattttttaatccgagctgggaattctctcccgactcaagtaaaaggaccacctgcaacagaaagagcgccggcccaacgcacggctccagccgctccccggccagttaataatacagcccccgacgcgacctataaatatgcacagcacccgcccccgaaagataacttctcccctattcccatggcatactccgagttatggccttcattattggagaatcatttggtggtggccatacccgggaaggtcttccagccaccctaccccaagtggtacgacccgggtgccaagtgtgtgtaccatagtggagctcccggacacaatattgactcctgcatcccgtcaagtataaagtgcagcacctga

SEQ ID NO: 226345 - DNA, 429 bp, Glycine max
  unsure (1)..(429): unsure at all n locations
tataagaacaaaattgcctatatcatttccaaatatgcatgtgaattaggaagcatcaacaagaattaagccaacgctattgtgcaagcaatcaatgtggcaaaacacaccatatgattatgatgatagatggctcaaaatctcacaaaggtaaacttatcactttcaaattgagctttcataactatcatgacatgtaaaggaataacaaggatttcaagtcacaaaatgtcaagagactcttatnttcagaacaattacccattacttgaacatatcctataattcatagacaaacatgcaaatttaatgcaacaaaactaacagaattaaactagaacccaacaacactaacataattaaactaatttaacacaactaacaaaaccaataccaaagaacactctccctccatacttaaacaacaca

SEQ ID NO: 226346 - DNA, 446 bp, Glycine max
tgccgcatgcagcttggatgcatggcttaaactagcaaaataattttaagtgaagaatgtcaaatgcaaaagtgactccaaacttgtcatcgaccaagtgaatgaagatttccaagccaaagacacacaaatgcaaagatattaccattcaacaatgtgcctactcagttgctttaatgaatatgagctcattcacatgtcgagggaagacaacgacagagtatatgacttgtcaaaactggaaagttccaagaaaccagaacaacatagaacattcatacaagagacccttattacaccgagcatagatggttaggtatctgtgccaatcagatcggtgaagcttcttagataagttcaaaatggaactatttggtaagtgaacaactaccaaatgatgaacatgaagcacaaaaaaagcgaagttgaaatcgacccattacatg

SEQ ID NO: 226347 - DNA, 353 bp, Glycine max
tacactataaccggtgttgtgacgttaatgttatgcctaaaccctaattctatagcacatggctatgttaaactggtcaatacaattctagtcgcatatggaataaggtttactatgtataaacaaatagggttataatacttatttgcctaaagtattacatagagactccaacttaccagtccgagcaggtctgaagcttgatatttatttcctgtaagaaaggtcacaaatgagtacgtgagtcggatagcctttatattttactttgaggatattgaaggggcaaaaatacatataaacatttttagcaaccattagtgagtgcggtgtcaaattcttatcttgtctca

SEQ ID NO: 226348 - DNA, 425 bp, Glycine max
  unsure (1)..(425): unsure at all n locations
agctntaaacctgcttggacttggaagtatgtttctttatctgacactttagggaattaagtactattaacctatttgttgataactatagtaaatccttttccccatgcaactagaactgtatttaccagctttaactaaccatgttgcttaaaatttgggcttacggcataacttaaccccacaataccaacttataaagtgaggactacccaagctttataagtactacttaggtcttatctctagttgatgtaacctttcaaccccttaagagtcgatctcctgatggctatacactattatgccttacttagcctttttggtcaaccccttcatagttttccttttaagacatagcaactaactctgactccatatggataattaatgcattttctacatacctctacaccttggatatg

SEQ ID NO: 226349 - DNA, 463 bp, Glycine max
tggagaggatgcttcactggaggaatagatagatggagatatagatagagggcgagcacgacatttgacgaagacaaaaggagacaacctgaaccttgagttgtgtctcacaagactctcattcatcaaagttacaacaagcgttacatatgtttctatttatagaccacgtagccttccttgagaagcttgcttgagaaaacttgcttgagaagcttctttgagaaaaattccttgagaagcttaggcttactcacacacccctctaaaactaagtcacctcctgagaagcatcttgaaagattctaaaaagctaagctagctcacataccttctaataccaaccacctcttgaaagaaaacagacttgttacacaccccttatagctagctaccgcctgcaaatactgaaaaccaaaaagccctcttaaactactcaaggctcaatcaggtgaaccttctt

SEQ ID NO: 226350 - DNA, 430 bp, Glycine max
agcttcacgtcagatgactgcaaggtgatctattctatgcaagacaaccccataattattagtgtagagatagccaactgcataatcaagaagagccttgtagaccaaggaagctcaaccgacatcttgttttggaacactttcaagcatatggatatacctgaatttgaaatcctcccacatgatgacccattgttcgattttgttggagaagaggtagggataaaagggtgtatttggctttatactaagttcgggcacgaggggccactgcagaaaaggctaaacatatgatatgtgataatgtatgctcacacatcatacaatatgttcctcagtcatccctcactaaatgccttgtacgtagttgttttaacccctcacctcgagatgaaatttacaacagatgctagaaccatcataatcgtgc

SEQ ID NO: 226351 - DNA, 388 bp, Glycine max
tataaactcaagcttggtcgcacatacgtcgcggcgatgagatacactctattgtgtataaaggagagagagacgcttcgatcctataacgcaacgtggcaaacataagcgggcagttaacttggatggccattaatgtcaatgcggaaagatttctgcgcttcactatccatgttcacacaatattgcagccggtggtcacatgagcatgaacttctcaccatgaaaagatgttgtgacacaaatgatcacatcttaataacacactccgcacaatggaggcctcttgggaatgaagcggcgattcctccttctgatgatgcaaggacacttatgcctgacccaactacaatttcgtgcgaaaggtcggcccaaatcaacacggata

SEQ ID NO: 226352 - DNA, 419 bp, Glycine max
  unsure (1)..(419): unsure at all n locations
agctnntgggctggcaaactatatcacaacactatggttctagtttaggctctctcttctcgctcccctattttcgttttagttttaggctcttctttgagacatttttttttgttttgcaattccagtagcaataaaatttcgttcttcaatttataaatttgttatctattgattaatggaaggctaagtccccaacgttgctttctcttgaggatcaagtgcagttttctttgaggatctattattactgttaaattttgtttagatttttctcttcactaattgctctgaatttgtttctattaattaatgcatgcttagtgcttgattaattgtctctgcgcttaatttacgctcatgcttaatgatcgtttatgagtaattggcgtatgtgttgcttaatcacataatgaatg

SEQ ID NO: 226353 - DNA, 337 bp, Glycine max
cgtattgatgggtaccgcgagatatctgctgcggcttgatccatgcaggcgctgaggtgacgacatgggtatctccttccctcctttttgccccaggtgcttcgatccttctagcagtggtacttgtggaggagacataatcgaactctcctctcttcaagcccacttcgattctgttctcggtgaataccaagtctacgaagctggagggcatgtagcccactaatttctcatagtaaaacatcggcaaggtgtctaccatcatggtaatcattgccctttcaaccatgggaggagccacctgcgctgccaggtccctccaaggctgagtgtactc

SEQ ID NO: 226354 - DNA, 422 bp, Glycine max
  unsure (1)..(422): unsure at all n locations
taccgcagcatgcacttcttggccaagtaaatttatttcttttaagaacctgttagtacaaaatacttatgttaatggacatttttacttgatatgtataaaagaatgtaaaaaaagttataccaatagattcaaatattcaaatcttcctccaaacaaaaaaaaaatattttaattttataagaaccaaataatatactaaaatttttaaaagaaccaagataaatttcaaaaatctctaattttatgagggtgaaaaacatattttaattntttttatataagacaactgtgtgagatactgagagattgcaaggggctgagatatatatataaaattatttactgaataatataaatttcttaataaatatgttattgccataaaaaataataaactcaagtacacattcaagaaaatg

SEQ ID NO: 226355 - DNA, 454 bp, Glycine max
  unsure (1)..(454): unsure at all n locations
ctggttataagaagagaagctcatgaagagcttgagcattcttaagaggctattgctggtgagttcaaactattatttgttgtatggacgggaattataccaacctctgaggttcgcacttatcacatctagcactgctcgtccccttgcttatgtccctaccatatgtaagggtcttactctattggtctatgtaaataacaaagaggtgttatttctccaataagaaaatgtgtcaagtgcaatgagcatattagtcaatcgcatgcgatagtggtgcgatcactgggcagcatatcataacggcccctagtcgctcctaagacactcatctgggagcgcctggctctattgtcacggcagtgccattattgtggaaatcgtggagatcacatgatttgcatgctctgatccnctcttctgtttgttcctgatggccaggtctacaccttgt

SEQ ID NO: 226356 - DNA, 428 bp, Glycine max
  unsure (1)..(428): unsure at all n locations
tgccagcttttcaaagaccgaaagcatcaacacaccagttaataaaaattttacattccaaataataatatcaacaaccaaccactactcaatagaaataattctaaactatataggagaaatgaacggctcaggaaagcaaagtggtttgctttctctggaaaaactctagtgcatggggggatctgtgcgtgtattttcttcatttatttttcctcaattctgtataaactttcatctgcattttcattctccttcacaccctctctgaagttttcctgcaacaaacatacatataaggtggttattaaatntcaaaattaatatcagttaatggtggctatttccatattaggtgtatattatatagagatatttgcacaattgcgccacatgtactatatggtctatggtctattatatctctg

SEQ ID NO: 226357 - DNA, 380 bp, Glycine max
ggagtaaattttgttaataaatattgttttatggttatcgctgtctctataatatttccattggatctaatgatgaaatctgtgcatttttaggtgaaaaagaggctatgttttgaattgcaaaaagttgcagtttggctaaactcagtaattgggctaagcgcataaccaccactaagcgcaacttcagcgcgcttagcacaaaggagaaattggcagagcatctacatcaaagtctcgcgctaagcgcgatattagtgccgtaagcacaacaagatcctttagccaagctaagcgcgagactggcgcttagctcaatttcacttcctcgcactaagcgtgaagatggcgcttagcccaacgtcataaatataaagcct

SEQ ID NO: 226358 - DNA, 414 bp, Glycine max
agcttgcagggcatgtagcactttattctatgtgatttttgacagatcctttgtgttctccaacaaagctatagatgctttatacctctctggcaccgttagcaaaattttctttataattctcaaatcagcaaaatcactccccaacaactttatcttactgccaatacccaacaatttgtttgagtattccttgattgtctctgactctttcatcctttgaagctcaaattccctccttaaattaagcactcgcatgcttcatattctatcatctccagcatattcctctctcagataatcccaaattactttgggtgttttgagagtcatgattctggtgaatatcaattgtgaaacaccagtgaacaaacatgacctcgcctttgccttcttcatctttctttccttatg

SEQ ID NO: 226359 - DNA, 432 bp, Glycine max
ggcgagtccacctagttgtacactcatcttctattatatagctaagcacttcaagttggcgtgtcctcctaaaccagattcagctcataacgtgctctacttattacttctagaatatctcaaaacttaagcaagacgagttttattcccctgtaattataacgagaacaagctatgtttctatctttctataacggtgagacgctaaatcatcaagaacttttcacaatagcatataaatcggaattgaattcacaaccgcatattttaattatttgagctcttcttcagtctgaacaaaatatggtaattgcgctgttgcttatctatatatgcgcatgaggatgaaccatcaaaacaaaaacgtcggtcaataataaaggatgagtactcaccaataatgagtacatgtgtgacattatatattaaatc

SEQ ID NO: 226360 - DNA, 370 bp, Glycine max
agcttccctggatataaacaatgtcatgcctttactagaataattatagaggaaaaccttgccatgctatagcaacaatgaagggcataatggccttaggctgcttcaacaactgtggtgcaatgatgcattattttctacttctagcaaatccctaatctgaatagttatgaaatccctgtttggatagcccattctgccattgcctactcattttttaaggaggttttttatgatttgcaaccttctttattcttgcatcagaaggattctagagatagaatcccttcatttatagaaaaaggtttatcatataatttgtgctttggtgtaactaaacccttctgcattaaatggttactggtgcctg

SEQ ID NO: 226361 - DNA, 376 bp, Glycine max
tcaaccaacgagagatggaccatctcaagtgcttgatagtatcaatgacaatgcttacacagctgagctgcccggtgagtataatgttagttccacctataatgtctctagatatatctctttttgattgcagattgagaatccgatctcgaggacactatccttctcatatattggagaataatgatgatggacatgtaccatgagcatatggctaggatccaacttgaaggacttgcaagacctattgatgatgacatgaccaagagcatgggccacgattcacttgatggacttggatgacctatgacaatggcttgagcacggataccaaggacgctctctaacagtgctgtcatactatttgaatacaacc

SEQ ID NO: 226362 - DNA, 429 bp, Glycine max
agcttgtatgacatgggatgtactattattttgttcacagttttcaacattacgaagttttgaaaataagctgaataattaggataagtaggccagtatgtcaatctctctttctgaacaaggtgctatttctttaaatcttgtctgccatttaagtttatgcatgtacttatacacccaatttctagagattctgcactaccatgactaagaaaacataaaccaataacccctcccaaatgctatgactgcatagctatgccatgtaaatttacaatggaattggtggatctcctttttaaagctattagtttaatttatgcatttatttttgtttataggaaagtgtgtatttatgtaaaattgcgatattatatgataatgatgcgtggaatacattccgaattccataaatctctggtgatttca

SEQ ID NO: 226363 - DNA, 53 bp, Glycine max
ggaaaaaacaaactcgctaacacaccctggaggaacacacacaggaaaaccct

SEQ ID NO: 226364 - DNA, 328 bp, Glycine max
tttctcaccaagttaaaatggattcttttaagggtcaatgccctaaaaggaccaccttccaagtaaaaagaaacgcttgattctccctttacaaagaactacctaagtctgatttcctcttcgaaggacggtacctatgagccagagccccgcttttgtccacctcaaaatttaaaagaagaagagttagatcacaattcacccattctaattaggctttgcctttggacaactgagagggcaaaccttctcaacgaaaacaactcccaattaaatatcttatgaacattcttcgttttctgacgtttcacaataacgtaaggcactc

SEQ ID NO: 226365 - DNA, 203 bp, Glycine max
gggctgtgtggggctggcaacaggaatctggtgaatatggatatggctctggtatcgataccaaggtgggaatctataccacgcataaagtgaaaccgaactaccggacctctggaacgatacatgcttaaacgagacagaattaaagcttctggaatattgccaagggtgatgatacacgctaaacggattgtacttaacgg

SEQ ID NO: 226366 - DNA, 397 bp, Glycine max
  unsure (1)..(397): unsure at all n locations
agcttaattgataaanaaatgtgaagaagtattttatctagaattctaaaattgacgcacgggattaaaatcacattattttaaaaaaagaaaataaaatatcttaattaattaaaaaaatagaggaattgaaattacaatatttttaaaaatgaaaaataaaatatcttaaataaaacatctaaaataacagaattaaaaaaatatgaagaagaaaattacattttatacttttattttctctaccgtacctacaaatatgatctttccgactgtaaaggctttcttttatttctggtctgtgaccttaaagcttttcttttatcgggaatcataaaaagtatgtgtaggtagttcgagctagcccaataaccaaaaaagccaattaatatttata

SEQ ID NO: 226367 - DNA, 437 bp, Glycine max
aacactgagttatttgttattatacacgctggacaatcagttcccaccacttcatatcaagcaaggctaaattaaaagaatgcacaaaatgaaagcccaatccttcctggtatttattcctagacacatatttccaattcatgcaatggaggttccttccatttgcatctcctcctcaataatagcaagctgtcagacttgcaatttcatggaaatggattgtggtagcaaaaaacaatccatcacatatgcgagaatatatcgcacaactgagttgatcaatactatcttcaacaaacttgataatctgggtttctgatcttccaataatgtggaaagacccactatttatcatgactcttcatatcttactccaagaagcctaataactattaactttatagaacacatttggatacctaatagaaaaatataca

SEQ ID NO: 226368 - DNA, 420 bp, Glycine max
agctttatttaagtcatatctctaatcaatattatactaaacacacctccttgaggctacaattaaggcaatctccaatgtggctgaaattaaggtgggctaaggatgaccacaattaaggtgactttccaacacccctttcacgcctagagctttggacctagagtgtggtgttaagaaccttgggaccacaaaagctacttattgtagttagagtttgttcttttcatacatctacttaataaagagcttagtcaagactttttatctatagttagttcttgggatttagggcctaacttaaccccacaaaaccgacattaaaaataccagcttgtaagttgaggattgtccaagccttataaagataacattggccatatttctagttgatgtgagatcttaacacacctcatgcct

SEQ ID NO: 226369 - DNA, 432 bp, Glycine max
agcttccttaagaagattcctaaagaagcttgagcttatctacacatacctctctaatagctaagctcacctcctcgagatgagaagctagagcttagctacacaccacctataatagctaagctcacccccatgacaaaaaacatgataatacaaaaaaagtccttactacaaagactactcaaaatgccccgaaatacaaggctaaaaccctatactactagaatggccaaaatacaaggcccagacgaaggaaatgcctattctaatatttacaaagataagcgagctcatacttagcccatgagctcgaaatctaccctaaggctcatgagaaccctagggccttcccttggatctctagccaatctacttggagtcttctacccaatgcccttgcggggtaggattgcatcattgggcacataacta

SEQ ID NO: 226370 - DNA, 468 bp, Glycine max
  unsure (1)..(468): unsure at all n locations
tctacttatgtggcagggcgggcttccttcactttcttgtcttcaacgcgagctctgaccactgtccttccttcccgcggtgcttcttttcatgtccgcctgagtgggcttatagcctaaaccatacttcccacgatatccttgggtttttattaggctagttatgccaccattgtctntgcctaaacccatcccggagtcataaccgttccccaacataactcgggccatcattaccgccgcatcggacagacaaggttgcccaaagagggagtccacggaggaaatgctgaccacctcaaaagactggaaagcggtttctaacgattcttctgcggcttccacataatgcatggaggatgggcagcttaccaagatatcttcctcgcctgatacgatgaccaagtgcctcttcactacanatatcagcttttgtggagtgtagatgcacaactccactgagtggat

SEQ ID NO: 226371 - DNA, 430 bp, Glycine max
  unsure (1)..(430): unsure at all n locations
agcttctcctaattttatctaatctttcgttgattntatgaaattatacagtaatatatttttcatattggtgttttcaggattcctagtgaggatgcagagtctcaactcttaaaaggcagaaaaaagtgcagtggaagcttttgagacagcccaggttatgggtgttattatgtttgacttgccaaattgccctaagaaacattgtcaactagagacatccactgttaatggagaaggatcatctacccatactgttactgcatcttttgaaactaccttgaggtgggcagagaagtagttgttgcagtcaaaactgcatttataaggcttgcaaattgtccttcttttagtaacggtgaattcaaggaactactaagaaaaaatagtgaaaatccagatacagtggaaggtaatatggacttgtctg

SEQ ID NO: 226372 - DNA, 464 bp, Glycine max
  unsure (1)..(464): unsure at all n locations
tataagaacacaantgccttaatcatttccaaatatgcatgtgatatangacgcattaactagaatcaagccatagctattgtgcaagcaatcaatggggcaaaacataccaaatgattataatgatggatggctcaattctacaaaggtaaatcatatttaaatcagctttcaaactatcatgacatgtagagaagaatcaaggatttcaagtcacaaaatgtcaagaacttttatattcaaaacaatttcccattttttgaacatatcctataattcaaagaaaaacatgcatagtcgtccgtgcacacgaaattgacccaaaatattaaactgaagatccgacgatacttacaacattatacaattaacacaactaacatattaacataacccacacaactagcatatcaaagaacactcctcccccatacttaacaacacattgttctcaatgtacacac

SEQ ID NO: 226373 - DNA, 279 bp, Glycine max
  unsure (1)..(279): unsure at all n locations
attccttctagggtatttaatcgccaacttaaatcaattattgacccacattaataatggtaaattccatttccacaataattggcacaacaaatcaatgtacgagtataatgctataaactcaaattatgatgaaccaaggttttatattatgaaatacactctagtgtaacaccaggcttactctttggtgaacgaacanagactggctgctgtttgggttctactgattgtggcggtgtaactggggttgcacgctcacttggttgtttattctgc

SEQ ID NO: 226374 - DNA, 419 bp, Glycine max
  unsure (1)..(419): unsure at all n locations
agctttccttctttgaacaaatattccttattcaaatagaatccatcttgtgcctttttcccacaactctcgtaaatgggaaagaaatgttcatctaaagcatacacgttcctaatattatcaaatcctaaaatttgggctcctagggagcaaaacaacgtgtgtcttctagagagggcatcagctaccacatttgttgttccctttttgtatttgataacatatggaaattgctctaagtactttacccattttgcatgcctcttgtataacttgctntgccgtctaatgtacttaagtgattgatgatcactatgaatgacaaagttcttggtacaacgtaatgttcctaagtttggagggctcttattaaggcatatagctccttatcataggtggggtagtggagggtggcacta

SEQ ID NO: 226375 - DNA, 474 bp, Glycine max
  unsure (1)..(474): unsure at all n locations
ntatgcttatgacgtagcctttctcatgaaataaagacaattataaagaactattgccagtcaccttgaaaataacaaatatttgtcttctcttttccctttcaaatgcatgtttccaaatattaaaactagtagaaaataacagaaatttgctcaaacagttaaagtccaattcttctagtagctaggctattagatgctatcatctaagagtccaattcttgcagtagcatcatccttgaaattgaccaggtcattaagcagcacactctactatcctaaataaaagaaatgtgctcagacaagtaaagtccaattctgttgtactaggctgtagatgcatcatctaaaagtccaaccctgctaatcatgtagttgagatttncaatcatatattcttcacatctgcaaaacacactacttgaaagtgaccacataatttctgaagaaatattgccattaatttttaatact

SEQ ID NO: 226376 - DNA, 418 bp, Glycine max
  unsure (1)..(418): unsure at all n locations
agcttcgtgggacggatatcacgtggtgcgggctttaccaactaccggtttcacaggcgaactttcgtatatggccaaaactacaaatatgactggaacgcaattcatgtgtgacttataattttttttttggtaagcctaacaatatttttgctcgctatatccaacttagttctttttttaaaaaggaaaaagttgtgtttgttcgtcgtcattttcgatacattgagaattagtcttcatggagtttgcgtaacaaaatcatgtattgggatttcattttgattctaacggcttttttggacttgataaatgctaatttgtgaacacgatctatgggtaagatggacagaggtcaaggctaggctatttattntttactatatattgatcgtgcgacttggctctatttatccct

SEQ ID NO: 226377 - DNA, 326 bp, Glycine max
  unsure (1)..(326): unsure at all n locations
tcttattntcaacagatgaagatgaatccgtggccacattatggactcctctaaggacaatagcatcatttcttgcactaaattgttgggagttggaagccatcttctcaatcaaactcctagcctcaacaggagtcatatcaccgagacctccaccactggcagtgtaacaccctgatatatatatctatatattattagtaattatgtttgatgtttgattatgtgttgcattattatcacccgtaattattnttaacgaagttaatttagttaatagaggggtgtggatagataaagatctaacttctaaagaagcctcttga

SEQ ID NO: 226378 - DNA, 319 bp, Glycine max
agctttataaaatctgaacgctggtgtctgtaagattgcacccatcaataaatacactccttccatcctttaatgctcttattgcactgcttggcactgagctttatttcctgattaccatttccaatattgtcctatagcgaataaacagtataaccagtgttagataagatccaaagtcatgttgggtgagcattaaataccaaatagaatatccttaaataatagttctcaagagtggagattaatataacttaaccaagaagcaaactctgcactaagagaatttatcaaggcattattcaaattgcattacata

SEQ ID NO: 226379 - DNA, 446 bp, Glycine max
tcagctatccaagaagaataacaagccagagagattccatgttgttatgctcttaacacgtagcctgtgcaattaagataatacatgactccattcccgtccttctgcagatatttctaaaccatctagatacaatcctgtgatatctgtaaggttttgaaacattgctatgcgttggcttgttatgcggaataatgcgaagtatgtttaagtaagttggatctcatctatatgatatgtataactagttgtcttgttactctatttggtacgaatatgataactcactccatgtgtgttgtttgtgctcggatcccgtgatgatcttgaactttggttcatgggagagatgactatgtgattgcttaaggaatctatgctaacgatgtcggacacatgtctgaaagatgtgacatgggattagtttatataatgatgaagcttag

SEQ ID NO: 226380 - DNA, 387 bp, Glycine max
  unsure (1)..(387): unsure at all n locations
agcttgcttcacataaaacacacgaatattgccgtattactcgtccaaagtgtgacatcctggaatattctacctggaantttgtaagtgttatattttaaataattatatatatatatatatatatatatatatgtatgtattatccagcgtatatatatatactcctagtagaagtatgtacattgngggaaagatacgcgggttagactaattagcgaagagtaatccataaccgaatggttatagattaattctcaattaattagtctaaaattatgcgtttgcgtgcaacttagaatttaacaaaaccaacctctgaaccatgctcagggtctcattctgagccgtgngatatatatatatatatatatatatatatatata

SEQ ID NO: 226381 - DNA, 363 bp, Glycine max
  unsure (1)..(363): unsure at all n locations
ccccttaggcatttctctctctctcgaatttgctgaggaaaattatttccgtgaagaaaatccaagccgatgcgcttccgtaacgtttccgtgagtaattacgcgaagattctcgaccgttcttcaagattcatcgttcgttcttcggtttcttcagtcttcaatgggtaagtacctcataccaaacttttcattcattctatgtacccgtggtggtccacattttgttgcatgtatttttattctttgtttcgtctactttttataccccccttttgacgtgcttaagccatntgtttaagtgatttctcgcttaatctaaacaataaataaatttcacacgacatttgaatcggatcatct

SEQ ID NO: 226382 - DNA, 356 bp, Glycine max
  unsure (1)..(356): unsure at all n locations
gccacctgagcagcagcttggattcttgaagagttcatttacttttgttaatctacncgggcggggattagataacttatgagcttctttagagatagagagtgaactattataaaaatcggtgtacttcttccctggatcttatctctcttcctcattatagtattgattaatttactgaaggttaaaataaatatcctcttggaataaagaacttcaacaaagggttttgtgtaaaggatgattgattaagtattggtttgccaaagttagtgtatcgatccgcacacaagaagtttcttttaactctgtgtataaaagtctattttgatttagaaacaattcaccccgcctca

SEQ ID NO: 226383 - DNA, 447 bp, Glycine max
  unsure (1)..(447): unsure at all n locations
gtgacacttaaaactagcttaaaatatggctagcaacttttatttcagattgttatcttctatagacctccaatctttaatggagagggttaccactactggaaaacccgaatgcaaatttttattgaggcaataaacttaaacattggggaagccatagaaataaggccttatatacccaccacagtagaaagaaccacaatagatggaagcacaacaatagaaaaacctagagatagatggtctgaagaggataatagatgagtacaatataatttaaaagccaaaaacataattacatctgccctgngaatggatgaatattgcagggtttcaaattgtaagaaggctaangaaatgtgggacactctacaagtaacacatgaaggcacaacagaatgtgaaagatctangataaacacatntaactcatgaatatgaactatt

SEQ ID NO: 226384 - DNA, 349 bp, Glycine max
gccaacaaaaaaaagccttttttaacataatgatgttcacgctaacatcagctttctagaagaaaccgatgttaacttatcatacatcaacatcggttttcaaggatttattttgggttttatttttatctggagcccaaatactttatatttaatatttactatggcgacacgataaacaaaaacatgccaccacattaagaatcataattgacatgctgggacaagtgtctaaaaagaaaaagataatcatttataatgtccaaatagtatataaccggcggaaatatctattccatattaagacttttaaggcagatgggtgtgattgcatataaggaccactttt

SEQ ID NO: 226385 - DNA, 295 bp, Glycine max
ctcattatatacaactaacttaatgctagcaaagtcgagtcatattcatagttctgatgctttcaatgataatttcattattgtggtaacgcttcttctgatgatgacatggctcttgatctgaggatgaatcttgtccaccccgaaaaggatgctgtaatgcatgattgggcatagtctacaaaaaatgtcatccgcgtcatctttttacaattgagacactttttcgaatgtatcgaccttcaaggagactgcatccctactacaatgtgtgatgatctctagcatattctat

SEQ ID NO: 226386 - DNA, 290 bp, Glycine max
tctatagcctgaaaatcatccggcccgtgacatctattttgcctgaaacacagcattttgacgaaacttacatgcttatgtgctcatcccattaccgatgatgcgtatcaagtgacactgttgctactgaaactaggatgaacactcttgaaaatacgactgatctagggtggagatacagagcatatattctgggctatggcgaacaaaagtcagaactatgaatgctcattatggggatgctattaaactattcttggatactatgaatctatgataggttttttatg

SEQ ID NO: 226387 - DNA, 330 bp, Glycine max
tttcggccttaatactagcttgtggatattgtttataaattataattttaatataacgaatcattttatagttaaataacttatcgtaattaaaagctttaaaaaaaaagaaagaaattataataactgattatttctttaaaaaaaatcttctcatatatattcaaaaattttatacactactttacatttgaagcatttgatatgccttttgtaatttgagaatttaattaataaagaaaaattgaaatgacttttacttatactatcttctaatcggaaaatatactgacgaattatgagtgacctaatgactatttttgatatcta

SEQ ID NO: 226388 - DNA, 322 bp, Glycine max
aaatatgttacattggattaagatttaaacatgtttttatgttatgttaacctcattttttttgattgctggatctatgagcacttttcgagtgtgcatcaatgcgtcacatatgatgcgtacgaagagatgtccccacgtgcttctcggtggctgacgaccaaggcacatttgaagcgaattacacctcatataagaggcacaacatcgaaaaaataggaatcggacccttctaatatggttaacgtctgaacgcaaacaattaaataaatatatgtggacattcaacacacattaactttattttgaattaaacacgccg

SEQ ID NO: 226389 - DNA, 333 bp, Glycine max
ctcaaggaagtattttaaaaaagcttcctaaggaagctacctagtctataaatagaagcatgtgtaacactcgtcgcactttgatgaatgacagtcttgagagacacaactcaaagttcaatttctctccctttttcttccttcaaattcgtgctccccccattctctgtctctccctcttttctttccctccattgagcatcctctccaagcctcttatccaaagctcattttggtggagaagctcttttcccatgggctattccttaatggaagacgcccccctcacctcatttccttgtcttccctgatctcatggtggaaatcccatta

SEQ ID NO: 226390 - DNA, 291 bp, Glycine max
taccatggactactgaatattcttgttcctttgacccgttcctttcttgttgaactataaacctatgaaaacatatttacctatcttagaattggacttgaatgttgtaatatggggggtttgttatgacactgttgtgcatctctgagatttggcatctgagcatgaatggaaagggacgcgatgaagtgtttaagcttaataaaaaaatcaagaaattgaaagaaagaagataatgagaaaactaaggcatatagaactgtcacctagaaaatactatttattctattt

SEQ ID NO: 226391 - DNA, 461 bp, Glycine max
  unsure (1)..(461): unsure at all n locations
agctntagcaactctttctttttgggagtctaaacttcnaangcncctaatcnctcttcatctaaatcaactaactcatctgacatcattttccaataatggtcgattggaatgtccatttgtttttgtaccctggctgactgcaaatgtatttcgaccggaagtacagcatcgtgcccataagtcagtcgaaatggggtagtattagttgattccttaggagaatctctacatgcccataaaacttgatctaacgttttattccaatntcttggctgttgggcaatggtgtttttaattaagttaattacaatcttattggctgcttcgacctgaccatttgcttgcgcgtaatatggtgttgaggtaataatcgaagccaatttttgggcaattcttcattttcgtcataaaaactgacctgatcagggaattgtttcggataccaactataatatata

SEQ ID NO: 226392 - DNA, 386 bp, Glycine max
  unsure (1)..(386): unsure at all n locations
tcacctgaccttgcaatttttcccatattgttggtgtcttttatcaaatatatatatagattaatggaacacatattatatctcatatttttaatcattaactataagaaattctaaaatggtatcaaagtctatcttatattcgtttttgggccacctgcattgccatgctccatgcccatagccctatgcatgaaggggttgtgttaaaatgccgtcttaattgtagtcacccctatcccacctattgtggcctctttggggacttccttaattgcaaccttaagggtggtatttaatccccacattaactagagatatgatgtaaatagtgcttataatgcttangcagccctcaacttacaagccagttttgtgggatgagt

SEQ ID NO: 226393 - DNA, 399 bp, Glycine max
attccagaagggaaaccctcttaagaggagaaatttatctttatgcaattcaaacacaaaaaccctttgtgttgaaagccagtatgggctaccaagggcgctactagtggtgttgttggtctaacactggcaaggtgtgaagtttaatgggtttgttggtaggctgtagaaatacagtggttggctagtccatcaatgaaatcctatcttgaagggggggaggactggacttatcccaagtttggtgttacccgtaaaatatcattgtgatcatcttcttttctatccttgcattgacttacaccgagaaagtcactatttctactctcctaagaaggaacctctctaaagacacattaaactgaacccgtgctaatgtcttcaataactcctttgaca

SEQ ID NO: 226394 - DNA, 452 bp, Glycine max
  unsure (1)..(452): unsure at all n locations
gtgtcctcatatccctcttgttggactatacttanacttttcaacattattggaacaacatatttaaaaccaaaacttaatccgcagatccctcttgtaaaactaagtttcaattttgcttcattcaagttctaaggcaacaatacatttcccaatgcttaaatcacctaaccaagcacaaataatgttgatcagaccaagagcatacagaatttaagcattgaaagaagcattgaacacaagaaacacaatcaattagatattaaaataattacatcatttgttctttagaaatccccaactaggttgtttaacaagccattacagaaaaacccctaataataatgagattacaaaacctangtatctctgcaaaagctgctcctcttgcttgctccagagctcttttccacaatangcactgtgtgtgctctggaatattgctcaaatct

SEQ ID NO: 226395 - DNA, 343 bp, Glycine max
taagcatgcatggattaatatcagcaacaaatacagattaattggtgaaggggaacaactgatcagaatttaatattaataacaaaaccttaaagagagctatgcttaatcctcaaaagaaaacaacacttgagatcagccttttttaacagcagaaacgaaacacaccaactggaaactaattgcaacacaaaaatgaaaatgaatctacaaacagaaaccgaaaatgaaattgcaattgaaaagtaaaactcttggagccaaagcatccacctgatcaatctaggctttgattcagccttcttcagcaggtacttcagagctgcatggcaggataaacaat

SEQ ID NO: 226396 - DNA, 336 bp, Glycine max
atgataatatactcaccccttgcatattttataccgtgtggttggtacctgtgatgaatgcaaaccttcgtttgtgggagcagaatgtacacagtattggaagataaatgagattcctttgtggagctgccaatccgatatgatgacgatgggattattttgggagagaatgtgttgtgttaataacacctccatatatggctccggaatactttatgttgatttgaagatgtaaatcacaaacttaatgatatgtatgaacaaatgtattttccattatgtgaatgatgtgtactatgttactttacctatatatatacgtattcacttaagtaa

SEQ ID NO: 226397 - DNA, 373 bp, Glycine max
  unsure (1)..(373): unsure at all n locations
tagcccaaattcaagatggatcaaagcttatcatagatctaatttcataaaaaaatgatagcatatgtctattaataaataggcaattcaagaagacataacaccaacctcattatttttattaatagaagagatggatagccgttttccttccaaagactttgtgtttatacttctccatctccatttgggactttatcaaacatctgaaaccttggtccttcctaaacgcanagttttctgacaaatctgaataaatttgaatcaagtcatctaaattgcatgtacaacgtccaaagcaggtaaacaaatcactatatacttactcatgcctcgacaatattggtgatgatagaccaatagatttggtttt

SEQ ID NO: 226398 - DNA, 315 bp, Glycine max
actagctaactaagaatcatttttcagttagttttgaccgacacgattggaagggcctcttcgcaaattgaacctcctcgacgtcaagaacttactaccatctaggtagttttttttacgacaaataatgttagaggtagtttgtggctaactatatgagatataatatcctagggcttaaaagaacacatttaagatacggcattctgtatattaaagtactggggagatcaccataacattattcaccactttttcaacaaacacttgatgcctttattaaagccatttataaaaatattacatgttaatcgc

SEQ ID NO: 226399 - DNA, 298 bp, Glycine max
  unsure (1)..(298): unsure at all n locations
cacaacncacctggcagtagatatgcttgaccataaaacgagagctctccatcgtttccccgctttttctcgacaccaccaacccctgccacctttactcacctacacaatcctgttcctactccaatacacaaattaaagttacacgtgccaaggttcgatggatccaatcctctcggctggatttacaaaataaattaatttttcgagtaccatctgactccagattcagacaaaataaccatcgcttctttcatatggagggccgcgctcttgcgtggcttcaatgaatgaacac

SEQ ID NO: 226400 - DNA, 338 bp, Glycine max
tcttgttattgtccacacatgttgtacatacttatttgtacccgagagagaatcatatttccccagctaacaggatttccatgcatatatgatataccaccttagatgattaatatcatctacatctcaagaaattagttatgcactgtctcatgagccaaagacaacattctttttttctgaagagacagtaacaacaatttggatttattcatcaatgatcacctgagctaacattctgtaaatagaaaagaagtcgatgacaaggtataaaatttgtcgagtaaaacaaatataatatattatctgataaaagaatgagaccaaatcttgtccta

SEQ ID NO: 226401 - DNA, 391 bp, Glycine max
acttactaactgatagaacctgctgatgtagccatggagatctcctcctatctccatcttgagttgatacaactctatcttcatacaaaggcaattggttagagactttgatgccataaattttctcgaacttctcccacaggccttcagtgttgtctccttcaacatgttgtgttttatctcgggagcaagggctaaccgaatcatgctcacagctctcctttggatcttagtccactctgtttcatttattaaagaccaaccttcatcttctaatgcgtgatcaagacctcactgcaccaaagagtgtcgataatactctgccaatcataaatttattctccatcatacacagttcttacaccttgtatgctcctgccatatctctgat

SEQ ID NO: 226402 - DNA, 427 bp, Glycine max
  unsure (1)..(427): unsure at all n locations
agctngcctngccgctggaatatgtgatggactcttggncactatgaatgacaaattccttgggataaaggtagtgttgccatgttttcaaagcccgtactaaggcatacaactccttatcataagttgaatagttaagggtaggaccacttaacttttcactaaaataagcaatgggatggccttcttgcatcaacacagccccaatcccaacatttgaagcatcacactcaatttcaaaagaattttgaaagtctggcaacgcaagtatggggacattagtaagcttttgcttaagaacattgacagcttcttcttgattctctccacattagaaaccaacatttatcttgagcactgtattgagaagtgctgcaatgagcctaaatccttctcaatggtctataaaacttgctaaccatgaaac

SEQ ID NO: 226403 - DNA, 447 bp, Glycine max
  unsure (1)..(447): unsure at all n locations
ataccagcttaccttctggtncctcctcataatgtggcatgagaatatctgctctatttttattctcccactccaagaatgcctgcggtacattctttcctttaaatggacgaacgttgagtctatataccatcaattccgttgttgctaagaacaccatcattacctcctctcctcctgtgttcgtcaatatgatctctattctccattgatccacctctcatggagcgcatcatctcgttgtttcattaacactctcatatgttgcatctaagcttgcatttggaattgccaaagccccactccatcattatgattagtacctgacatctgcaactaacaacatatacgtatcaagacatttatagttggtgtgtgatacctaaccactctatgtatcacacaattatggctttctgtaatgaacactctcgcctttacactcta

SEQ ID NO: 226404 - DNA, 310 bp, Glycine max
  unsure (1)..(310): unsure at all n locations
agctngaacgaaatatatggacgagggtttcttacttgctaccaaagcacatctaaaaatgttgtcttgaagcctctgatttcttcaccggaatcataccctcttcttattgttttcattcccactctactataactggccaatataccttcacaaacacattctgtctctattgcttggatataatgtttactcctctatcctatatacccctttcgcaccacctacctttatcttcaccctttctgtaccatttcctccgagtctctctgctccacattctaagatatatatacacgcaaccaattct

SEQ ID NO: 226405 - DNA, 444 bp, Glycine max
  unsure (1)..(444): unsure at all n locations
tgggctcgcagtgaacagaatcctactgggaatgtnatctttttctaataattaatttacatatttcttccttcaattctttgatttctctatgcttttcatttgtttgtttctttcaatatagaacagaattctgatgtttttatgattacaggctactgccaatgttgttccactgcattggcaacccaacaatggtcttcttatgactaatgatatctcgggcgtcaaccttgaagaagcagtaccttgcattgccctctcaaaaaatgactcatacgttatgtctgcctgtggtggaaaggtttctctatttaacatgatgacattcaaggtgtgtgtccgaatatacaactctgatatccattcaattgtaagtttatgattactctactttttatatgtatgacaacatcatgccccgcttctgctctacctctaact

SEQ ID NO: 226406 - DNA, 466 bp, Glycine max
  unsure (1)..(466): unsure at all n locations
gcttatatccactttctgcctaaatgcaaaagnggaagatatctaatgacttatgttccttacgancnctttagttgcttggagctataagagtatatccagtgctcattgtataaacaactcatttactccaaaataatttaaaataaatctatgttttgataattatattctgatctgataatgtgtgtaaaataaatctatactacacganaataaaaatattttatctttaatgatatacatttaggaagcaattcaaattcaaatcaaaatgagactaaacagaataaaattaaatacaatcatatatatatatatatatatatatatatataatccttattgattatatanataatgatcatcatatttgaatgaaattattctgtacacatatagaaaattgaaaaaattttgacatatttaaattaatgaaaatatactacgaaatatttatacacat

SEQ ID NO: 226407 - DNA, 269 bp, Glycine max
gggagggcgactcttgacttgcaagatgctgtgtccaccaaaggaatacttcgcggagtctccaccaacgtgtatttgaggaatacttctgaaaaaccggaaaagacgctatccacaaacttttaagtgaaaggttccggagttgatttacgcgcggggatggattatcacccctacgtccgtcaatgggatggacgctttaatgaatgtgaaacatgactttgatttacgtcccctttttgtccttatatctttaaccgctttaaatt

SEQ ID NO: 226408 - DNA, 263 bp, Glycine max
aattctttgtggcatatgcatcttggccacttgagtgacaaacgacaagtaattttgagcaagcgaggcttacatggaaatcataatgtgaaacctcttcaattttgtcagaattgtgtctatgggaaacaacatcgaacaaaattcctaaaggttctactcactacaaaggctatattggactacgtctattatgactattatgggcaaggtacttcctttccatcatcaatgatgaccacaaaatgacatgggtattgatg

SEQ ID NO: 226409 - DNA, 342 bp, Glycine max
gcaacatatcaagacgcctctaattgaatgttgaaactctgaccaaattgaacgacgattactgttagtcggatgtctgattgagtaccgtaatacattcaagacgcttgaaattgaatgttgaaagctctaaaatattcaaatggacataacttttttactcagatgtctgattgagtcacgtaatacttggagacgatcgaatttgaattctgaagccctgagctaattcaaacgacaataacttcttgctcggatgtctgattgagccgcgtaatacttcgtaacgatcgacattgaattctgaagtcttgagctaattaatacaacaataacttttac

SEQ ID NO: 226410 - DNA, 455 bp, Glycine max
tattgtgtaaacactctgtgagtgaattgtttacattttctatctacatccattggttgtgaaagttatgagtgacttggtgacataaaatacattgagtgcttatatctcttggtgaagatttaaggagtagttcgcatgagtgggcttattagaagtatctcgcttgctagtcacgacagtggacaatactaataatacctctggtgtgtaactcataaggatttgtattatctggaaccacttcatgttttgaaagagaactagacgtatcccacgagtcggggtgaaaaagtattaaacctttgtgttttctttaccactttgatataactagttcattctacactaccgtgttcacagtttgttatttatacacaaagtgattccgaatcccttggacgaatctcatcattcgttgatatctgtttcagaagactttcaaagttttgaag

SEQ ID NO: 226411 - DNA, 410 bp, Glycine max
  unsure (1)..(410): unsure at all n locations
tactaagcttgtnaattcaccctaattctaaagtcttgtgttgacttattctcgtatctgcgacgaaatgtaatggtagtcgcaagcctatcaaagattccccaacctccatttcctataggatacaactccaatgtgacatgttcttatcatggaggaagttcatggcattccatcgaacattgtatgaccctgaaacataaggtgccaagtctaatcgatgcacgctagctaagatttgaggaggagaatcgcttgtgaattttgatgtcatcaagcaatactatgcatgatgcttanggcaatttgaatgttgttgttagatgtttacaatgactcactacgattttcaagttcncaaatacatccttgtttatctatttaaacttccaaatgaaagtgaatggaca

SEQ ID NO: 226412 - DNA, 387 bp, Glycine max
  unsure (1)..(387): unsure at all n locations
taattgcttgcggaagcatgttctctaagcgtgtttcttttaccgcacagngctaacttcactgcacataaaatacatgacttctgctaatcgggctcatatcttggcttaccgagagtggcaggctttctgatctgtagatctcgctaagcggtatatttaactcactaagctaaggattcgcgcgctaaaaaaaaacccaaaagagtctcccgcttatcgcgagcccctctaagcggctggccttggataaccaaacgactctcccgctattgaagtgctcgctatacgggacagcaaataaccattgggtaagtgtaacttcagcacaatgacaagtgctgagtgtatggatagctggagactatgcataaactatatcatctc

SEQ ID NO: 226413 - DNA, 458 bp, Glycine max
  unsure (1)..(458): unsure at all n locations
agctatcataggtttgattttgtgcanctantttccctnagaganctctcacggagaggaggttgtgccatgttctcacaatgtccaaaantataatgttcataataataatgctcaaaatcaccaataacagaatgctcaggatgctcaaaatgtactaaatgaatgcttaccaatctatgaaatgtcctatctatctcaggatcaaagggttgtgagtcatatgaattgcctctagtcatacactatattaaccatgcacaactatttgcctccttatgcaagtaacagcgtaggtttgaactacaagtaccattaattgatatcctaatgacttgtaattttgggaccaacctcataaatgatgagaagatacacaataatttaacaaaatccaagctaactatagaactaaaacgataggtaagaaaatacacattatcctgaaataaaaactt

SEQ ID NO: 226414 - DNA, 436 bp, Glycine max
  unsure (1)..(436): unsure at all n locations
tctacatgtctatagagtgttatatatacaatgtccttgttctatanacgttgagagattttgttgtgagaagatctgtagagaccaaagcttgaaaaggaagtcgtcctgagagcttgaaatgagtctgtgagtgattgtgatgtcctataggtggaagagacatccgcactacttgtattactacaatctttcatctttcccttttttgtcttgttaagcaagcttcccaggtatggaaagctaaatcctctgttggatattccttgtaggtacttgatgtaaatatctttgttatctatttaacgatgttttgtgtggtcactgtgctattagaacttcattctaacatgctcttgccttgatcatgtatatgcatgtgtttttaggatcattcaacagttgataatagtctggttcttacaacatgatatga

SEQ ID NO: 226415 - DNA, 358 bp, Glycine max
  unsure (1)..(358): unsure at all n locations
actttgcacagttcttgatatnnaagtcgctttcaactcactatgcagactctagagtagcttgttcaattgttcgatagaatggaatcaaagtgagagttggaacctacatattgagtttcactacaacagcattaactaataactatccttataatacagtaggaagctttattgaatanttttaagggctcacctagtctaggaacgttcaacttcatttttttgtgtgcttcacatgctcaggtttttgacaaaaagagtgtcatctatacattggtataaacttttttagataagcccttatttgatacaaatcgttctggttattttgctttcttttcaatgtacatatatc

SEQ ID NO: 226416 - DNA, 348 bp, Glycine max
gcttcaaacatgtatatatatcagagtgtaattaaaatattttatacgcaatttcacctgaccaaatttatacaagtaatcatcaattcggcacatcattaattacttcaaggaaattaaaacctcacaagcttagaaaaacttgcaaaacaaaatatatacatgcacgatatatgataattgtaatagtacatataacttaattaattaatgccccgtatgcatgttaataattttcaaggctttccaatagccaaagcagacatgacaatcagcaatactaagacaagcacagcaaccaatgatgagacaactgctgcactggtctgcgcacagaagtcaccaaat

SEQ ID NO: 226417 - DNA, 410 bp, Glycine max
  unsure (1)..(410): unsure at all n locations
ttaagtcacctgagctgcaagctcaccaaggactacgcggttttaattttgggagagcccctttgagcctatgtcccctttttttgttntgaagctcattacaagccttaagcgaaaaaccatgacatcaccttacccttatggaattttggagctttggaattttttggtgaataagtgtgtggggggggagtatgtttcattggaagatatgatttttagccatgctaaatgttttattttgctcatgctggaggtatatatatattgcctacgtcttgctttaatcttcaatttcatactgttcaaaaaaaaaatgaaaataaattcagttgctgcaaattcgtactattcaataagagaaaaaagaagttaagttgaataatactggcttgattgaggattgattg

SEQ ID NO: 226418 - DNA, 413 bp, Glycine max
  unsure (1)..(413): unsure at all n locations
cttataagcgcgggtctgggatacataggtcaagcagtcttttatgcgtngataatantccgagaacttggatttggtacgaccatgccctcctgatttccagctgggaaattggcgagtggaggaacgccccggcatttacgcaacgagcataatgtaaacctttacggttttaaaagctctatagttgggcctaggctttatagtttttccatttgttaaggctttgtgtcttttgtttttgaatttataatacaaggatctttcttcatctgttcctggtctctacccattctcattcatatgcatgtttgcttctttttctgaaacggcagatccgatgacgagtcccacgaatgtactaatacctgggacccggctatcgacttcgagcgagaaatgaatcaaacgga

SEQ ID NO: 226419 - DNA, 474 bp, Glycine max
  unsure (1)..(474): unsure at all n locations
ttaagccacctgaggcatgcaagctntacctttgtagatggcttgttattcgtatattngctttgtaccgaaaaaaaaacatgacctttgtctcattttgattctcatttagcttggttgtatattgctttgaactgaaaacaaatgttgcctcattttgattttcatggggtgtgagttgatattgctttggactgaaaacaaatgtgacccttgtctgattgccattcttattttctttagtactgtttaacttcttctatatccagctctggaactgtgatttcgtttctctttttccaggtttgtattaggttttgtgtttctatccgctttgatcgatgtgtaaaaataatttattacctttgtattcgattttctttatttcctttatttatgccatccttcttttgtgtaccttataccttattgttgcgctgtcttgaagtgtgtagctattttcttctcttatat

SEQ ID NO: 226420 - DNA, 448 bp, Glycine max
agaggatgcttcaatggaggataagaaagagggagttgttgagagatgggggaacacgaaattgaagagaaaaaaaaggaagagaagttgaactttgagttgtgtgtcacaagactctcattcatcaaagttacaacaagtgttacacatgcttctatttatagactaagtagcttccttgagaagatttcttgagaaaacttccttgagaagctagagcttatctacacacacccctctcataactaagctcatctccttgagaagcttccttaagaagattcctaaaaaagctagaacttagctacacatacctctctaatagctaagctcacctccttgagatgagaagctagagcttatctacacacacgctataatagctaagctcacccccatgaaataatacatggaaatacaataaaaaatccctactacatagactact

SEQ ID NO: 226421 - DNA, 270 bp, Glycine max
  unsure (1)..(270): unsure at all n locations
acctaacgngcatttttctttacatagacatctgaaaaaaaaagtgcatctcattntaatacttaacgttagtctatatccgtcaaatgataatgtgaccaataaatgtcacatcatcacacctaatcactaaacacataggcacaagtgtccatggcattaatttttgtctctgttttaaaaaatgaaaccacacttgagacaagtgggtcatggaagcaaacacctcaatggtacccgaaaacccgaagcattctaatggttgagcca

SEQ ID NO: 226422 - DNA, 380 bp, Glycine max
  unsure (1)..(380): unsure at all n locations
cggcacaaaaccntgtgaacttctcaatgtcctatgtgtacccacctgacttgagtgttgtatattattatatctcaactgtggttattttgtacccgtgctgcatccctacttatctatttgagcataatcacagttgcaggtatgacatacttatcaggttgagaataataacaattggagaaaatcttaagatttcataattggaattgatcttggtggttgcttctgaaaacattgtcagcagtcgacaattttttttataaaatgtcccaagatatacaggatgttgaatcgatcgtgattatggaaaactaccaatcttattctgggtggatttctgctgacgtttccctgaatccggggtaatgctatgcttg

SEQ ID NO: 226423 - DNA, 271 bp, Glycine max
atttgaaaagatatgggtgcttgactaattgggtttaagggtatttgacaaataatggtttaaggttacttgacgaatttggatttatgggtatttgactaatgaggatttatatgtagttgagttaattatggtttagtgttacttggccaattaaggtttacgggtatttgacaaattatggttacttgactaataacggtttatgggtatgtgataattaatgtttatggctacttgacaatttgtggtttaggtgtatgtgactaat

SEQ ID NO: 226424 - DNA, 451 bp, Glycine max
tactaagcttagcttatgaatggagcgcctaacggattctctcttaatttgcagataggcttaacgagaaagtgaaaaacaacacttttcaaagcttgcctaatttacctgaaatggagaggaaatgattatttaacacacataatggaagtacttattatttattacctatgcttaacagaaaatactcttaacactacaaaataaaccataaattggtaagattttgatacaatgtacacatattgtatacacaatagtgagtcgtattcaccgactaacatatgtgcggaatgtgattcactgatgatattgttattggtgatattaattaatatgatgtgacattgatttaatgataatgtgatagaaacgatgttgttattgagatatattgatatattgatacacacgatgttgtgctatgatatatgatatagatgggctttat

SEQ ID NO: 226425 - DNA, 346 bp, Glycine max
  unsure (1)..(346): unsure at all n locations
acactntaattgcgcccatcccctgaacatttggtatgagggttgtaactcacgttcccaagaagaattatctaatgttagtcacaaactcaacataacaatgtgcataaaatttcttgattaatttgagcaagaacaatatattggtgatgggaggagacataaaataacttaatgttgcacgacatacatggtcttgaaagcgaggctgaaatgcatctggctattgttggaaaatagagagtgacaatgttacattccctttgttcgcaaggactcaggaatactataatattaattaatatttcttctggacgtatatgtaatggggttcctaattcctata

SEQ ID NO: 226426 - DNA, 328 bp, Glycine max
acaaaatggtacctggagatatgtcgcgggggtcaagaaaccttggggacgtcatgtggggtgctattgcccaaaaccaatcttgaccaatcccgacccaacccgggcatagtcggtcagtgagaacctgcgatgtacctaagcatgcgagctcctggcagtcaacaaataaaaggaaaacaagaccacaaagcaaggatgcttgtggtggctggccagctgtgaattttgtgtaatatgtggattgtggcctctggtaatcgattaccaaaagtgagtaatcgattacaatgcttaaaattgaggacaggaggctaagatggtctct

SEQ ID NO: 226427 - DNA, 409 bp, Glycine max
gaagagagaatgaaggtttgttgatttgatctcacaattgcgctctaaaagagctctgaaatctgaagtttaatattcaaacgataaaagttgaaaaaatgcacacacatgacctctatttatagcctaagtgtcacacaaaattagagggaaatttgaatttcaattcaaattcactcgaatttgaaattgaatctgtggaaccaaactttggaaccaaaatttcgctaattatgattagtgaattttagttatggttcagcccactaatccaagattaattccaagattctccactaagtgtgcttatgtgtcatgaggcatgtaaagcatgaaggacatgcacaaagtgtgactatatgatgtgacaatggggtgtagtaagcatatgctcacctgcccctctaaa

SEQ ID NO: 226428 - DNA, 125 bp, Glycine max
ttacattgaataaaacggtctcgtggtaccatgggggaaattatggacacccaagcagttgcctccatctattgaccaccgattaaattgtaagaactctgtaagaggtatccctgtcctgataa

SEQ ID NO: 226429 - DNA, 279 bp, Glycine max
catctcccacactctaatacataatgttggtaaatcctcccattagtactactgaggagaaaaacaaagagggtcttctaagaaggcaccatctagcacaccaacatggatctctatgaacttaactacacattgaaactgctatgatgtctctacacattttgcatgcctcttgttgaactagctgatccctctacatgaacttatatgatagatgatcatgatgaatgacagagtacctgcaaacattgttatgctccctaattcgatatgctcata

SEQ ID NO: 226430 - DNA, 436 bp, Glycine max
  unsure (1)..(436): unsure at all n locations
taataataaattgtcaaagaactgggtgttgaaaaagcataacaaaactttctgtgattgggttaaagatacaatctctgctgatgaaagcgcctcataaacattaagaaagctagcagatgggcctaaaagaaatgtgataacttggcaaggatacgacatatacaagttttccttttcacaaaagcacaagacgacaaaagttcaatgcaaaacagcggggtcaccctaagggttgaatctcaacacttcgcaagtgtgcatgatgacaatccttgtgtagcttccatcccttactttgggttcattgatgaaaattgggagcttaactatgtcaaatttactgtttgtgttttaaaatgaaatgggttgacacaacaccggtgtcatacggtgatgtngaacttgttgcacaatgacatttatcatggcagac

SEQ ID NO: 226431 - DNA, 399 bp, Glycine max
  unsure (1)..(399): unsure at all n locations
actgcaagtgaagtcaaattacttgacttaagcacgcatctcatagaatagtttgcactagaatcagaaggtacggtcaaaagagtattctttatgaaatatatctcgatacgagtcctcgaactatagaatatcagcattgctaagaacaagaaatcacgatcaaccatactatctatgcaattaaggcaaaacaccatactacaagcatatccagaattataaggttcttataataagtatacaacatacatataagaagtaaaaattaaatagttaataaggatgtatgaaggaatcacaaacttcaaccactacattcacgactacacacaatataaagggagttangtagtcatgcatttacacatcaagatagaacactcatccaaacatata

SEQ ID NO: 226432 - DNA, 449 bp, Glycine max
  unsure (1)..(449): unsure at all n locations
gcaagcttgcttctaccaatctcccctttttgatgataacaaccctgaaatcaagaaacacatacacacagtttttcctagtcgatcactcacttaactttccatattctccccctttgtttttgagtttatgcttcacttgaaattaagttaattacttatgtgagttcttgatttaatccctatttctctccccctttggcataaaaaaaaaaagacaaagtgtgtaacaaatataaaacatatataaattactaattattcacaagacgttcattgagaaatctaaaccaatcatgaagcangaaacatgaataaatcaaatatataaaaactacatagtcatataacataattcataattgttcaatcataccatgcanataanagaaatactaaattgttcanatgtcataatagtatagccaaatacacggctagaaatcaaa

SEQ ID NO: 226433 - DNA, 441 bp, Glycine max
  unsure (1)..(441): unsure at all n locations
acatccttatctatcatttacttcttagtctctttgtggcatatcatatatacttgatctttgttcaccaattctctaattgaagcccacatttatcccctaccgagcctctttatattgtacgttatgatcttcatcaatcactttcattatttcccatcctttgtgatgtaagctccattggagcttgtaggcctaggatcttcttcatcaatggattcctttgcttcttggaagatgaatggcagtggaatggagaaggaagagagagaggagacgccacttcaaggagaagatgagtctagaaaaagctcaccaccatacgaggtcatggataagagcttggacgaagaataagatgaatgaanggagagggagagaaaacacgatatctatgcttaaaagagcttgaatctgaagttaatgtcaatcatcaaagtg

SEQ ID NO: 226434 - DNA, 387 bp, Glycine max
ggggcattcttgatggccttgatattctcaaggtccacttggaccccatttctaccaactacaaaacctaagaaaactatattatctacacaaaaggtacacttctctatatctgcatagagggtgtattttccaaggactgaaagaacttgtctgagatgtcctaagtgatcatctaggctcctactatacactaaaatatcatcaaaataaacaattacaaatctacctatgatatcccttaagacatggcgcataaacctcataaaggcgcttggtgcattattgagccccaaaggcatcactagccattcatacaaccaaacttggcctgaaagcagtattcactcatcaccactttcattctgagttggggtcaccacttta

SEQ ID NO: 226435 - DNA, 385 bp, Glycine max
catgcgaagtgggtggaattcctagagcttttcccttattgtttcaaacataaaaagggaaaaggtaatattgtagctgatgctctttctcgacgtcatgcattactttctatgcttcaaacaaatatgattggtcttgaatgtttgaaaagcatgtatgaaaatgatgaaacttttggagaaatttttaaaaattgcgaaaaattatcagaatatggcttctttagacatgaaggctctcttttcaaagaaaacaaattgtgtgcctaaatgttctactagaaatatgcttgtttgtgaagcacatgaatgaggtttaatggggcatcttggggtccaaaagactctagaaacattacataaacattgttatcggcctcatatg

SEQ ID NO: 226436 - DNA, 402 bp, Glycine max
aacccctatctaatgtcagcaataacttctcctccattgttgttactctatttatcttcaagcatatcctcacatgtcttgagctaaatgttggcaccatgaatttattattactgccactaataaacttgctatagaagctacatttaatttcctatggatcaaatctcttgtcctcgatctagaaccataaatcgtgtcgagtctaggttccttagaacatagcgttgccatcttttgtggatgataccaacaccattaatttattaccaaatatattatacttaagaaaatttcataaatctatatgacattttcacctattgattttgtgcatagaagtcatgtttaagcatgacacttgacacatagatccttatgtcgtgcagaatttatttactc

SEQ ID NO: 226437 - DNA, 339 bp, Glycine max
atcgcggtctgggaaacaaaggtcaagaggacttgatatactttgtttatgttccgaagacattaaatttggtacgaccatgccctcctgaattccatctgggaaattggcgagtggaggaacgccccagcatttacgctacatgcgtaatgtaaacctttacggtgttaaaagctctatagttgggcctaagctttagagtctttcctttttgtaaggctttgtgtctattgttttgaatttataatacaaggatctttcttcatctgttcctacgtctctacccattctcattcatttgcatgtttacttctttctttgaaatgacagatccgatga

SEQ ID NO: 226438 - DNA, 223 bp, Glycine max
aagcacctgggctgcaagctctaaggaggggctgagggtttttgttgagaaccaaccctacttctagatttttcttacatacttctcctaatttctctgatgtgctatggatttctctaagaacatcccaggctttctgttataaacttgcaggtattcactatgtttaaatgtgcttggtccacgtcgttactttttcatgagagtttggtacttattacag

SEQ ID NO: 226439 - DNA, 386 bp, Glycine max
  unsure (1)..(386): unsure at all n locations
tgttcgaatgtaagaagcatcttcttcgaccttggctaattcttgaatncttcctcatcanaacccatgtacacttgtaactccaaagcatcaaacctatcaccaacaaaggtttcatgaccatcgaacctgtccaaaatcttttgaagaagagaggaatcttctccaccttgtaaatgcccttctccatcattgggttgagcaccctttttcacccaagagccatcatgctcttttcggttaccaaatgatgctatcacatcggcaccaatttagaatgatctctcgattggaacataatgtttataatcaagatggatgctaaagtgttgaacgaagagaataactacatgtggatatggcaatggagcatttaatcgcaatgc

SEQ ID NO: 226440 - DNA, 319 bp, Glycine max
  unsure (1)..(319): unsure at all n locations
atanaaactagatctatcgctagtaatttattataggcatatttatcttggctggcttacgggtctcattcaaccaatgtgcttggcaatatctagtcatgataatactgctatatcttagccaatcttaatgataaaattgttaaattaccagaatgcatcaggaagtctcggagattgatattgttttaacaaattgtaaccatttcctctatctatatattgcgattaagggatttattaattgaattcttttctttatattttcaagcatttagaagataaaatgtaagataacgagatgtctttgagctgattt

SEQ ID NO: 226441 - DNA, 383 bp, Glycine max
ggacttaagcaccgcagctgcagcatgatgagagcaattgtagcttgactttagcccaagacgccttcaagggaatatcaccaggaatgccccggaagaatgagacaggagagggggcccaccacctagggaaaagagctcatcaccaaaatcgccttggaaaaacactggagaggatgcctcaatggaggaacagaaagagggagagaaacagagaggtgggagcccgaaactgacagaacaaaccgggagagaagtggaacttcgaagtatgcccacaagactctcatcattaaagtacaacaagtggtacacatgctatctattcataaactaaggagcttccttgagagcgttctaaaaaaacttcttgagaagctctt

SEQ ID NO: 226442 - DNA, 377 bp, Glycine max
  unsure (1)..(377): unsure at all n locations
ntagccttatggtagttcaccatggtgctcattggtcgtggtctgtaagngtaccggatcgcacaagttgtataaaacagtaagaactgagtatcgaactcttggggaacttgtgttatctggtaagctatttcggtaaatacgtgtctggtatgaaaatatgattatggttatgaacagttatgtaaactatctatgcaaaaggaaagaaaatcacgcatgagaaatgttgtgtaaaaacaagtatctatgttaaaatggatgttctctatctaacaatgcccatgtattcctatgttgtctcctgtactgctagaccccgattcctcatgatagactatcttattcttgatcaagcctcgtccgcagattcctct

SEQ ID NO: 226443 - DNA, 364 bp, Glycine max
  unsure (1)..(364): unsure at all n locations
ntgaaagtcatgacatagattgcctgtttctccccangcttgatatgcaagcaatttagcagtatgcaaatgcatttcatcacaagttctagaacaacatatattgagagatcatcacacattaattccttatggttttctatgtttctacctcattctggtctcagcaaagaagttttcaatccataccacattgctaactatcaactctcattggcaaagtcccctaattacagttactaactaagtctctctctctctctctctctcattggatgtgaaatctcatttattcatgaatatgcgcaaagaaaaaacaaaaaggagctagaataaatgcatagaactacacaacatatcactc

SEQ ID NO: 226444 - DNA, 416 bp, Glycine max
actcatggactctatgtatgacaaattccttgggataaagatagtgttgccatgttttcaaagctcgcactaaagcatacaactgcgtatcataagttgaataattaagggtatgaccacttaactgttcactataataagcaattggatggccttcttgcatcaacacattcccaatcccaacatttgaagcatcacactcaatttcaaaagattcttgaaagtttggcaacgcaagtatgggggcattaattagcttttgcttaagaacattgaaagcttactcttgtttctctccccatttgataccaacattattcttgaacacctcattgaaaggtgctgccaatgtgctaaaatccttcacaaatcgtctatataacttgctagccctgatactcctacctcgtcacggc

SEQ ID NO: 226445 - DNA, 453 bp, Glycine max
  unsure (1)..(453): unsure at all n locations
actntattgaataagtatntatataccttttttatcctattttgtcttaatgngtattnggactctcgagtgtaggtgtgtttgcccatatactcatccatttgcctccctagttactcaataaatctttattatatactctttgacaattttggtgccatctttttttgtacatatcagtgtattatttacgttttacataataagctgtctatctgatataatcgatcagccaatccttgaaaacaaaattgggggtaacaagtttgtagtattctttaattaaactgtgtctttaacagtttccttaacaaatgtatatattattggtttccatgctaacaatgaacagttagtgcaactaatgtttgatacattcaacatatcanggttntatgcttccgaacaagcagtggtgtcactatatgctgtatgacgtatctctggatgcac

SEQ ID NO: 226446 - DNA, 279 bp, Glycine max
taagactaattcttcccgatgaatgggcttctaatccactaagaaatgctataaatttgctaatgatcgggatctgtattgaactgtctgttataaattactacttttcgatgaaacatgttcattataattaatacatcttggtttgaatgtcttggtgatcccacccatatcaactgtgtgcctaaattacattggaacaattgctcaagaatcctctactggttaaaagaattgtccccatccctctgttattattaacaatacgcctggttctat

SEQ ID NO: 226447 - DNA, 416 bp, Glycine max
  unsure (1)..(416): unsure at all n locations
tcacaatagtttatgtggcttgtttcaagcacctatgttttggtacaagangtttaatgagnttatgagcaactcatgattcaacagatgtgacatggaccattgctgctatgttaagaaatatactaatagttatgttatccttgtcgtgtatgttgatgacatgttgattgcatgatctagtatggcagaaattaacaagttgaagcagcagttggcagaaaactttgaaatgaatgatcttggtccagctaaacaaatccttggtatgagaattcttagaaacagatcagaatgaattttgaagctgtctcatgagatatatatacacaagttgctcgacaggttttaccttggagattctaagaccaagaataccaccttaggatctcatttgaagttttcaaagaagcaat

SEQ ID NO: 226448 - DNA, 371 bp, Glycine max
  unsure (1)..(371): unsure at all n locations
ctggatggattcaatctgactatggatcgagggttanttttttatgctacagcatataacacaaaagcatgattgattagagaaacatccttatatgcatcaactggtctgttaaagaaacccaacacttctacctattgttgtcaatgttacttactttcatttttattggttttatcctagacttagtttaatcctgttctaaatcatcaattatcaatgtttctttcaacaatgccttatgtttgaatttaaccctgtcttagactagttccctaagttcatactcagatcatccgtgtaatttaatacatgaaatctgggcgcttctacaaccggattcctatacatattgacgaaataaaatgaca

SEQ ID NO: 226449 - DNA, 472 bp, Glycine max
  unsure (1)..(472): unsure at all n locations
tcttaagcacctgagctgcagctgctagcncaaattactggctattctcaaatcagnaatggcactanaacaaanaattcatatgaaagaaaagtgatcataaaacttgaagtgaatctgggttaacaaaataagtcaagctgcttaacaacactcataactggactgattacttaagcttatatgttgcctgtttgggctttgtttatggcctacccaaacttagttagaacttagaagggtaacttgcccatataatataaaaaatctcttgcatatgtggtttgggcaaaagtgcaaaatttcaaacctggccctagataaaatacttaatgaaaacttcataataagtataaacctgttctttccagtcaattaggaaccagcttagctagggctgcaagaggcttctgtcccacatcttttcagcacggatactcactacaaagcctgaagtgtcacaaataattca

SEQ ID NO: 226450 - DNA, 394 bp, Glycine max
  unsure (1)..(394): unsure at all n locations
ttacatttataattataatagggtgataatgtggtatattgtatattccaattcttgaatattattttatggcattgatgtttggatttctctcttttgttccatccctaacttgccttttataatggagaataattatttcatacagaaacaggaaagggggatggataaatattatcaggtaacatgataaaaaagaaaaggaaagaaaagaaagagacagaattaaaatattatgagggtatgaagaggttgcaaacaatctaggtgagcaaaagccagaacccttactacaatatgccatgtccttaatgtgtggttagggaaaanatagtctctagtctctacacatacctgacttctttaagaatttcccattgatgtttacagtaac

SEQ ID NO: 226451 - DNA, 441 bp, Glycine max
  unsure (1)..(441): unsure at all n locations
accttaagtcacctgcggcatgcaagcttctaatgaggtgcagccccaccattgtgttgttgcacngaactcactggcctatgaagccgaggcacggataaaggatccggtttatggctgtgttggggcaatctcagtgctccaaaggcaagtgattaggctccagaaggaacttgatgccacaaatgctgatttgatccgttatacctgcaatgaaatgccaaccactcaagatggtataagaattatcggtgaagggggtggtggtggtggttcctctcttggcaatctcctggtactattacccttctccttgaacaatgatccgttggggatggtatcacagaggtgacaattataattatgatttcactctatccttggtaagcatgaaatgaattcctactattcgttataacgagttatatatatattatccct

SEQ ID NO: 226452 - DNA, 500 bp, Glycine max
aaaaaaaaaaatatacctgattcgtgcactaacaaactcaagctatgctgcatacatttacaatagacctcctcaacctctgttacaaaatcttccacagcaaaacaattatgacctctccaacaacagatacaaccctagatggaggaatcaccctaatctcagatggtctagccctcaacatcaacaacagcagcctgctccttccttccaaatgctgctggcctaagcagaccatacattcctccaccaatccaacaacaacaacagccccagaaacagcaaacagttgatgctcctccgcaaccttccctcgaagaacttgtgaggcaaatgactatgcaaaacatgcatgttcaacaagagactagagccttcattcagagcttaattaatcagatgggacaattggctacacaatcatatcaacaacagtcccagaattctgacaagctgccttctcaatctgtccaaaatcccaaaaatgtcaatgcatttca

SEQ ID NO: 226453 - DNA, 497 bp, Glycine max
  unsure (1)..(497): unsure at all n locations
catccttaagtcacctgcggcatagcaagctgccgctggagctgacncatcaactttcctatctcctntatactagtgattcctaggctcttgaccttgacttgatagaacctcttattaagcaaaggcagttgactcgatctcatgttttactaaagtgaaacaaaatctagtgcgaatcaaaactccgacatctattatgggtggaatggatgaatgcatgaagaaatgcatatgacacagatgcaatttatgaatacgggagcccgggaaattgtctccttcttagatacaacgctctgtggtagcacaatgcccgacgtatgtatttaatatagtggcacggaccctccgttggtttgccaaagagaggggatcaagacagaacccgtgcatgatgcatatgcgaaaggcacaacacggggatgtacatagtatgataatatccacaacaaatataagcaaaagggtacatgacacttatgcatggctgtgtg

SEQ ID NO: 226454 - DNA, 438 bp, Glycine max
tatcttaacacaaaaatgacatgctaatccctccgatttttaatcaaatcatgctcacttttaatgtaaaatatttatgcacatgcgtatgtgtagaatatcctactatttatgtcaatgtacaatgacatccaacacattctaattgccatacatatatatgcatttgaaaagaacacacattctcatgctcaaggcattgcgtcaaaatttacacctaaacatatttgaaacatatatcatacaaacttttattgtttcactcacatttatttatatgcatgttggaaagctaattacgtcatgcacacacttgcattcaaaagggaattccatgccatcatatattcatttatgaagcgacctcaatattcatttaggaagatactcgttcacacttttcaatggaattcatgcatatgtcacatattacacaca

SEQ ID NO: 226455 - DNA, 378 bp, Glycine max
  unsure (1)..(378): unsure at all n locations
ccaattatgagtgtagagtagttcattgagaaggtggcctggcttggagccgaaccttctttngtgggggataatgaaagttttacagcccaggcacctcaacagcatgagccagaaccagaaaacgatcactcatctgaagccaccatccctggagcagttgatnttgcaaaaagaagattagagacgagatccaatgaggctgctcatcctggacaagtgccagcatcagctgatgcaccatttccaggagtggatccatcttcacctcaacatgcagcagactcttccactcctgtcttatagatacatgagggccagacagtanttatattataattgtggtgttcgacaggaattgctttatgctacatatac

SEQ ID NO: 226456 - DNA, 305 bp, Glycine max
catctgaagtctgaaagctctatgctgtttttgtctgcttttatctggaagtggggctgaagtagaagatgcaatgatgccatctattggtgcaaaggaagaaggagcatcagctgctctgatcttggtcttccttgcctctataaaattaactgtttggtcattcgcattccaacagttccttatgatataagctaagtcaatggctggccttatgttttcatatgaggtaagggcatcagatcccactcccctcgatctgcacaaggttgtgatttaagatgggaagcctaagcgagaagagt

SEQ ID NO: 226457 - DNA, 460 bp, Glycine max
  unsure (1)..(460): unsure at all n locations
agcttcatgaggatgaatcnagttgatttcttgttttttgatgatatcaaagatgatgacaaaaagcccaagagaatgatttcaagattgantcaacaagttcaagatcaatattaatttcatgtttcatgagaagaaatcaagaagattcaagaatcaagagaagtttgatttcaagattcaagagaagatgaattcaagattcaagagaagaaatcaagaaggcttcacatgggaagtattgtaaagattttttcaaaaaacaaacatagcacagttttgttttcaaaagagttgttctgaaaatttttgaagttaccagacgttttactatttggtaatcgattaccaattacctataatcgattaccagtggcagagttgatttcaaatctttaactgaattgcaatgtccaattgttctaaatggtgtatcgatacaaatattggcatcgatacc

SEQ ID NO: 226458 - DNA, 376 bp, Glycine max
  unsure (1)..(376): unsure at all n locations
tactaagcttaccatggcctgctgccttacttgaaagcagttcntaattttcattttatggaataataagctcaggcattatttcaatctctatcaattaagtattgcaatcaataaggattaataattagatggacatgacgtacagagtataatatataagatacaatatgataactagaatggaccaactataataacaatgatagggcatagagtaaaaggtggaacgagatgggaaacagactgattagtaaaggaacatacaacacctatatgctcttgacactgcacacttgctattatttttgaacgtcctttgaccaagataatgaccttcttacttctgagatcccataaactcaactgtacacac

SEQ ID NO: 226459 - DNA, 417 bp, Glycine max
actgatagtttacttagggtcattcctgattctcctcaatctttcttataaatatcaaaaatgaaaacaagaagtacttccaaattaattaatgttattaatgaagatagtgaccataattcatataacacaactgaaataagttcaatatctgagatagacattaatccaataaattccaagcattggaaaatgccctccatactctatttccaacgaccaactgcccctaacctcctattagatgagaaaggcaagtgtaatttcaaaatctttagtgcatataacatctatgagtggaatatatatgcccatatggagtacaatattatgaatacactccagcacatgaccattggtaccatgggttaccaaacatcccatgagtgttcggaggatacaatcattgatattcta

SEQ ID NO: 226460 - DNA, 395 bp, Glycine max
  unsure (1)..(395): unsure at all n locations
tactaagcttgatggtgtcgagaagaaatcacatgttttgtcttcatctttataggggagaacgggaatgtatgtatacatgattctgatgatgtcaaagaagaatctaacaaagctgcttcaaatgataagcattagcttcaagaataatccaaagattgccttcaacaaacaaaaccttgtttcaagattcactaaagaccaagcctcgccttataacaaagtgctttcatgacatgcaatgctctggtaatcaattacacttcctggtatgtttattgcaatcaattttgcctttgcattctctcttccattatctcatttatgttatngcaatcaatttggcctgcatgtttataaacattattaattgattggtgtgcttctttgcattc

SEQ ID NO: 226461 - DNA, 242 bp, Glycine max
atctgaataaattacaagatgcaactcctcaaacggcctctgattctttcaaaccggcgtcaagttattctaaaagctataactcttctaaatggtcctcccgaccagacctgatgagtctattaaagcaaggcttgatttgatttccctgcactccttccaactcattctctagacaacagagttttggcaattggattctgagtctctttgaactacttcttcttccttttgcccaaaac

SEQ ID NO: 226462 - DNA, 343 bp, Glycine max
acttgtgaaattatgtgactcatgggactggttctatagccatactgcatctaagacatatacatagtctaagcagggattgagtgctatatttcattcaacacagacaatggtcattgcattttggacaataaagacatgacaacaatgaaaacgaatgattataccattaatgcgtcaaagctgaatattaacaagaacctataaatgatggaagaacatacaccaacagcattgaccaagggaaaggctgttcaaaatctatacataacgtaagagtcagtctaatgggtcagaatacaatttgaccctaacacagctcaacacctttcatatgggcatg

SEQ ID NO: 226463 - DNA, 393 bp, Glycine max
agcagcagctggtttttgtttatatccctctgaggtcccaaggttctaacacccgcgacatatctccaggtacactctgtggtcaacgaataatagtatgaagactgactacttcacactttctcactatcattcttgtacgagtatggggcacccggcatatgtgttactaggtggcgactggtcaatggtgcatatcaactcttccacatccacaaatcacacatgaacgcaccatccccatgtgcccacctttaactgagctcacgtactcacacgtagtccgtattttcgttcctctagcaccgggccccattaaccttccaacttcctaatatcaagaatgaattccaacatatgactacctgaccagaaaatagttatgtgaaactc

SEQ ID NO: 226464 - DNA, 381 bp, Glycine max
  unsure (1)..(381): unsure at all n locations
agctntttcatgagtgatgcaatcctcttatgatgtgaccaaccaccaaagccatggctaggagactccaagaagattgggccagagatgcaggagaatgcccaagggttctaatgagccttaggggtagattttgggcccatgggctaagtatgagcccacttaagttgtggaaagaaaaacaagagagaaaagaaaaaggaaaaaaaaaagagtggaagaaataagtcaagatgaaagagagaatataagagaggaataaagaagaaaaataatgaaagatatgaaaagagaataacatgcctcctatagtagtcataactcttgcaagagcctaagtgaagaacttcatgactattatgaaggaagacataggtcaca

SEQ ID NO: 226465 - DNA, 448 bp, Glycine max
  unsure (1)..(448): unsure at all n locations
tcttctctgcattctctctctcgaaatattcacccattgtgcatctgtgtcttcttttcacattttctacttacaatcacaaagcatttataatccaagtaagttccttgctttatattctcttttacttgtctaaactttagggtagaaaaccttacttttagttttagatttttagggttntaatgctttttcagaaacagtttaaagttagaattttatatacatttgtactatattcattattttgggaacattgcatgtttgatatgccttgtagaggcttgaaaagtgcaagaaaacgaactgcgttntctgcgtcttctataaaacgccatgaactcgctaagcgagcatgttgtgctaagcgagttcatcagtattcattgaatatgtgagtttttggaagaactcgcctagcgctcttaccacgctaagcgagttcatc

SEQ ID NO: 226466 - DNA, 363 bp, Glycine max
tgtctccaacgcgagctttgaccactgttcttccttcccgcgatgctatctttcatgtccgcctgagtgggcttatagcctaaaccatacttcccacggttcccttgagtatttatcaggctcattttgtcgccggtgtttttgcctaaacccaacccgggttcataaccgttccccaacataactcgggccatcattaccgcttgatctgacagactaaggtgcccaaagagggagtccacggaggaaatgcttaccacctcacatgactggaaagcagtatctaacgattcttctgcggcttccacaataggcatggatgaagtggcacttaccaagatgtttttctcacctgacacgatg

SEQ ID NO: 226467 - DNA, 464 bp, Glycine max
  unsure (1)..(464): unsure at all n locations
tactcagcttatacanaataattcacattcttattgtcaacgctgtctcatgatctctcctaatagagataaacatgagactgttcttattttgaatgatctttgcaagttttctaaatgctnggaatgcatcattcttatgagtgataaaaagagtccatgtgtatctaaaataatcatcaactattacaagagcatagtaacttcctccaaaactcatgattctggaaggaccaaacaaatccatatgtagtaattgtatgggttgagtagtcgaaacaatgtttttagatttgaaagaaactctagtttgttttaccttttgacaagcatcacatagcctatctttttcaaatcttacttttggcaaaccaacaactaaatgctttgatattaatctatttaagtttccatgtttatatgtgcaatccgtttatgccataaccatggatcatcatctttac

SEQ ID NO: 226468 - DNA, 406 bp, Glycine max
  unsure (1)..(406): unsure at all n locations
ctgcatgggggtcagcaaaggaccacaaaccacaaacccttgcgacaggtacatanttctgattcaaggccagctgtgttaccatgttgaccaacgcatccagtttgccttcaagcttcttagattcagatgatgcatatgggttggtagctacctcatgcactcctctaatgactatggcatcatctctggcgctaaactgctgggagttggaggccatcttctcaattaaatttctggcttcagtaagagtcatgtctccaagggcttcaccactggcagcatctatcatacttctctccatattactgagtccctcatacaatatatagagaagaagtgttctgaaatctgatggtggtggcacatgcacataatttcttaaatctctcccagtactcataca

SEQ ID NO: 226469 - DNA, 346 bp, Glycine max
  unsure (1)..(346): unsure at all n locations
gcaccgncttttggagaacaacctggaaggcccaaatgggcctggttgctatttgcaccccctttttactaaatacaccccttgcctttttttgctgattcttttttcgtaacgttacggaaacttacgaattacgtaacgatacttgttttctttctgtaatgttacggaactttacggattacgtaatcatcccttgtttgccttctggaatgttacagaacttttcggatggcgcactaacacttccttgtaatttccggcatgtcacggaacttcacggattatgctacaattcttcttttgactccggcatgtcttgaacttcacgaattgctaacgatgg

SEQ ID NO: 226470 - DNA, 426 bp, Glycine max
  unsure (1)..(426): unsure at all n locations
agcttctagccaaatggacttaccttgatttaattcctttgatagccctnttgagccttgtttccctttctttggtttgaagctcactacaagccttaaatgaaaaaccatgatatcaccatatccttaaggaattttggagctttggaattgttttgggaataagtgtaggggtttttgtttcattggataacatgttttggtggctatgcttcatgatgtattttgggccatacttgatgtacattgtatattggttaaatgttggacatgctgaatgatatgttgtttctcaaaggctacagagtattaaaaaaaattcgaacaaaaagaaaagcagtaaagttgagtgaataagatcttanatgacaaaagaatgatgagactctnggttctactctttatgttaaaatnntatcttatttc

SEQ ID NO: 226471 - DNA, 359 bp, Glycine max
tatcccatgatcatgtccacctacttaaacggtaaaatcatgtaacttattataatgaaacataatgtctcaatgagtactctaagaactctatgttgactctatattctaaaaatcattttcttaactatcatggattctctttttcttttcttaagcactttatctaacaactattatcccatctctatatcgtttatatctccttggaccataccttaaccttcacttatgtacctaaagttgatcaccttgaccatctctaatgctactagtatcctatgtcacctgttcgcttccggcaagtgcactatatcgcacaatagtataaacggtaaaaccgatatcgaatctcgaaa

SEQ ID NO: 226472 - DNA, 401 bp, Glycine max
atctagccacggcccacgagcacaaagtggcggacgagtatgcccgagtgtacgcggaaaaggaggctagatgataggtgatcgactcgtacttaagaggcaacaaagtggatggagcgatttgcttttacctttgaacgagagtcaagaacttccccgagtgcattcctaagccaaagcaatggcggacacctacttcacccccgaggagatccacggacttctcaactattggcagcatatgaaagactcaatgacccttataattagaaaccgcttggaaagtcccattgtcggtcagatcttgctagtataacttctgataaatgagttatccacgttttactccaaatcagtggatcaagtcattccgctttatattaccatgcatcattttttac

SEQ ID NO: 226473 - DNA, 386 bp, Glycine max
tactatgcttatccttatggcttgcctccagacttcactcaccgtgcttctccggattattttagccaagcccctactttcgatgggcaactcccgccttatgacaactatctcgggctagacgatgatgaatgagatacccatcttggccccctgctccacctctaatatccgttcccacatgaactaccccaaccatacatagtccgccatattctggcctctcccacacccataatagaatctgttcccttcgcggaagataagggaaagattgacgcactcgaagagaggttaatagcaatcgatggccttggcaattacccattctcggatatagcggatttatgtctcgtgcccaatatcgtcattcctcacatgttcat

SEQ ID NO: 226474 - DNA, 448 bp, Glycine max
  unsure (1)..(448): unsure at all n locations
cggatccttaagtcgcctgcggctgcagctttttgaaatactctttggatgtttcttgagaaacttcttgagagctagagcttactcacacacccctctataactaagctcacctgcttgagaagcttctttaagaagatatctaaagaagctagagcttagctacacatacctctctaatagctaagctcacctccttgagatgagaagctagagcttagctacacacccctataatagctaagctcacccccatgacaaaaaaaacatgagaatacaaaaaagagtccttactacaaagactactcataatgccccgaaatacaaggctaataccctatactattagaatggccaaaattacaggcccaaacanagaaataacctattctaatatttatcaagataagcgggtcatgcctagcccatgggctcgaaatctacccta

SEQ ID NO: 226475 - DNA, 400 bp, Glycine max
  unsure (1)..(400): unsure at all n locations
tgctctggtaagctctttcaaaccttttgttaatctatgatctctatcagatactatgctagatggcacaccatgtaacctgacaaccttacttatatacaaggtagtcaacttttccaaggaaaatctgatactaatgggaatgaagtgagcagacttagtcaatctatcgacaataacccagatagaatctaaacctctatgggtcctatgtagtcctaccacaaaatccatggaaatactgtcccacttccactgnggtatctctaaaggttgtaacttccctgaaggtctctgatgttctatctttgacttctgacagactatgcatgcatacacaaactcactaacctctctctttatgttgtngccaccaaacatcgtctttaatcatgataca

SEQ ID NO: 226476 - DNA, 356 bp, Glycine max
  unsure (1)..(356): unsure at all n locations
ttcgaagaacttttctatattaaaaaatttgtttctcatttactcatgaggatgtatgatgcatataagatatgatatagactaatatgaaacattgaatataacaaccaatacaaatgccacttaagggagttgcgatgtataagacaaaacatcttcaagcatttctttaagcttcatgctttattctacatgttgttcttgttgctccccctatctctaacatcatgaaagggtgaaatatcctatagaactagtccatatagtttgctgcacactgtcatantcaatacatgtttttccaccggtgaaggattccgaaaatgaagtattattgtaatctttctgttataaga

SEQ ID NO: 226477 - DNA, 378 bp, Glycine max
  unsure (1)..(378): unsure at all n locations
tttgacaacangaanaacaaacaaacaaacttactatctatctaaattccactaatctatagagtgactattcataaagaagggatgggccttgattacgcccatctaatctatctaattaaactaattacacagaacaaagcctaaactcatagcccaactaatcaagtgcagaggttctgactttcaagcctaattngacccataaaatggtaaaattgaccaaattgaatatctctttcttaacttgtcaaagactactcacacactccatttggattttataaagccctataggccctgcacaaagcaatatgtaaattacaccaaatccaaaataacccaatatcaatgactaatcattgcttagccaaactg

SEQ ID NO: 226478 - DNA, 408 bp, Glycine max
  unsure (1)..(408): unsure at all n locations
tttcgtaccttgatactagcttaacactggtatcgatacgatttgttgtntttttaaaacagagaggtttgacttatgaagaatattttctaacttagaaatttttcttttcacttactcatgatgatgcatgatgaaataagatatgatatggactaagatgctacatccaatattacaaccatttcaaattcaactcaagagagttgggcatgtaaaaaacaacatcttcataatcttctctaagattcaagctttagtcttcatgttgttcatgttgctccccctatctataacactttttactttacagccatcgactcacttctaataagtccattctgattttccattctaatgattagtttctgagcaactttctgatagcctctctgatatgcatttgat

SEQ ID NO: 226479 - DNA, 317 bp, Glycine max
gcaacacttggtctcactgctactactgttacttaattacctctcaaaccttattggccctttcatatatttggattttctgcgtcacacttggtcttattgttgacgacatggtaatgtgatatttgaacgaatggttacaattattctccgtcaagatatggtcacattacagcaaaccacgcctccacgaagcttccacattgtagcacattgtctataaacctataattgaagacacaatgggggcaagttattgttgaagagaaatgtcctcaacacagtgtataacataaccttttaaatacactctttat

SEQ ID NO: 226480 - DNA, 442 bp, Glycine max
ctaactaaataaggacatcatccattcttaggtttttttagaagaccaatatctgatgtcattgctgactgattcagaataaattgcatcatacaaaggggaaatgagaagtaagactttgactttgggtgtttgatgatgccatatgatcatgacgttttgatgccttatggaaatacgcttctcaagtttatatcatgacaacaatccgggaatacaagatacaacatccagaagatgtctagtattttatgaacggaattccaaattgtaatagccaaagggtttgccaagaaattgaagataaaaagtctctttcaataaatttactctctggttatcattaccaaacgatgtaatcgattaccagtggcctataatgatttacaacagccatgacaatattgaatgcatacttacactatgtaatcattacacatgg

SEQ ID NO: 226481 - DNA, 428 bp, Glycine max
ttgggagtcggtaaaatgcattctatattgatatcttgtagttttgtgatcatggatgacttactgtattgagacttaagagttttttgctctttgcctctctgatccctgcttcatacttcataatcagttggagggtcaagttggcctatgcgataaacaacattacaggtttcttatttgcaagatttttatactttcaggtaatgacaattttgacagcagcttctctctatgcaatcaagctttgttaaaacaccatccaaatcgtacagttagtgaggaccaactggtatccaaggccctttcaaacacatcattcattcccgcgttttggtccatggctcagctgaaggtagattgacattgcggttttgtgatgcattaacatcatatatctgaagttggattgtacctgttatgtttaa

SEQ ID NO: 226482 - DNA, 416 bp, Glycine max
tactcaagcttggggctgtgaaaattattagccttcgctcctttcttctctatggaaatcttcctgctgacattggttctcttccttctcttcagtatctctacctacaacataataacctttctggtgatatacctgcctcattgtctctccaactcgttgtactcgattggtcatataattccttcaccggtgttattccgacgacatttcaaaatttgtcggaattaactagtttgaatctccagaacaactcgctatccggacagatacctaatctcaatgtcaatctgctcaagcttgtgaatgtaagctacaaccaattgaatggctcaattcctaaagctcttcagatgtgtccaaattcttcctttgaggaaactctctcttatgtgaccacctctaaagcatgctct

SEQ ID NO: 226483 - DNA, 440 bp, Glycine max
  unsure (1)..(440): unsure at all n locations
agctngnccttggtttagacatgattgtttcacgtattgngacttgnangattcaatttgggaaaaattggatgagggaaagtgtgatttctaaatctgcactttatgcaaaatnttgctgttgaaatgtacagcagaattttgcataagtgcagaaaaatgctatgtatctgctggttgtggaaagagtagtacagaatgagttctggatgtctgttacagatcccaacggtcaaaatgtagacttatgtactagagactcccagaaaaattttcgagtcgatccaacggttaacgaattggaacgaaggaaatgttactgcggtctttaagtgagacaaatgtgtgattctggtttgtgttttggacagagtattctgctttgctctgttttgcctggtttgtaatctatgatgatgggatgtggaatttcttggatg

SEQ ID NO: 226484 - DNA, 408 bp, Glycine max
  unsure (1)..(408): unsure at all n locations
gacatacggaaagatctgggatctggcaatgatagaagtctctgtgtatcaattgtatccctctttcaatatgatgatcaaccgctaatgtgcttcacgtttggggactttcagttagtaccaaccgcagaagaatttgaagagatcttgggatgccagctaggaggaaggaagccatatctcttttctgggttatacccctccatggctatgataaccaaagtggtcaaaatcttggcgcaagagttggaccgagtaaaacaaaatagaaatggtgtagtcggaataccaagaaagtatttggaggaaaaggcaaatgcattggtggatcaaggtgaatangctttgttcattgatgtcttggcgctattggtatntggagtcgtcctctttccaatatggatggac

SEQ ID NO: 226485 - DNA, 376 bp, Glycine max
  unsure (1)..(376): unsure at all n locations
gcacgaaatatgcaactgtaaaggaactcaatatttatattcactctggaacatgaaaaatcattttaaaccccttcaaaacattttcttcattcaaaaaccaatttaaatcattttattccccttcacttgttgaattttcaattcctaaaattctctcttgaatgcttagaaccaaccccccaccagtcaaccacacatgacattcttgaacatgtctctggcgtgaacacacggtataggagaaatttcaaaaaatcatcttacatataatgtgtgctaaaaacctataacctaaaataagtaattaggcaaagacccatttagggaaatggattacgcactgcaaaatacacgttgacaatntaacataact

SEQ ID NO: 226486 - DNA, 400 bp, Glycine max
tactaagctagtaagctggctattaacaccaccattctactgctcttttgatattttgatgtttgagaaggggaatggtagggtcaggaatctggcctgcatgtgcaccataacaaataatggacacttgagaggcttcattattggttctttgtttgtcctctattatgagggaacgggagtgttgtgaatctcatgcactaagttcaaaggcactataaattccattaaaccataactaatgacacaaacatgttcatcgagatctcaagtcatgcccggagtcagtagaaacaagctcagaggtaaaaccatacaaacccatcatccttttcctattcatcaattatcaaacggacataatctgcttaactcaaaaagagttgagcttgatgacacc

SEQ ID NO: 226487 - DNA, 373 bp, Glycine max
tattggagagaaatgataacaatcaaattccatatttcgttaaacactatcttaactggacaaaagaaacacatattccaatccaaattcagttgaaataacaagaacaaaaaatagaaagaaataaaaaatatttaaatacgaaccaaaaatgaggataaaaggattggcatatccagcatcaccatgaacaaaatatcgaccacctcgtcaccaccaccacaaatatcgcaccttcgccatctcagatttccaaagtcgtttcttaccccaaacctgtcttcaactccgatgattccatcttcgacttctttagaaatgtcattaccaaggtccaaaccttataagttgtgaaggcgttgaagtcatcata

SEQ ID NO: 226488 - DNA, 423 bp, Glycine max
agggaaatctatgataggctcttatgttaatggtgagggctatcactattggaaaacccgcatgcatttctttatagaagccatagatctaaagatatgggaagcccattgaatttgatcatttattcctacaatgatagagagaaatgcaactacctaataaaaaactagagaagaaagatgatgatgatgaaattagagagaagaaggttcctctttggcccaatatgctgagtgcgaccaacttgggcacatgagattcaattgtcctgtgcttacaagaagaatggaaaaatctgacacgatgaatctcaaagagaagacagaaaagagaggatatatctcttgggaagataatgtcataaactattctagtgattcacagaagaaaatcatatgtctggatttcgtgatgaaagacta

SEQ ID NO: 226489 - DNA, 378 bp, Glycine max
gatgccacacattattttcatgacacaaatgcatatatgatgatttggaaactttatgcaatactggtcatgcatgcacctatgttgacactcaagtgtcaaacttttatggtcatgtgattctagggctcaagattcatttcctctattttaatcaacccaacgtttccaaaatatgttcttttatcaatttgagcattcatctgagtacatgttgggcgtctgggaaaatattcacagcattcacccttcatgtgtatacacattttttcaaaactagttatgatcaatgaattttttcaaagaaaattggaagcatcttttctcaaaacatgttggttttcaactgacaactatttcctttttctcttgtttcat

SEQ ID NO: 226490 - DNA, 215 bp, Glycine max
cctaacgatatctaaccatgtgggccattaagtctatcatatgctgacgatagccgataataccatgaatctcttccagagcggaaggagaattgtgacatcaaccttagcctaggctaacaatcggggaagatcttgactcccgtcctttgtaaaaacataccgatccatccacatggtggactcttggtgtaaagagaccaccacccttccta

SEQ ID NO: 226491 - DNA, 353 bp, Glycine max
actaagctgaacgaattattgtaatgaatttttttcttttaaccaggccgtgaaggtgacccttttttatgactcagctagtgggatgagatcatttctgttaaaatataggattgatttgatccgagagatgatctttaactataatctatatccataatatgatgaggctacatacatgatagacttagcttctttattctctttaatagatctatttatcattaaataaaaatgatcaaattaacaggaagaaactgtcccggggttcgttgattcttcacttgacgtaatatcagtgacggttgggtcggtttcccaaataaagtgatacgttggttgatctaaccgtc

SEQ ID NO: 226492 - DNA, 56 bp, Glycine max
gccctactgctgtatctgggaaaactaacctgactacaaacataagaataacccaa

SEQ ID NO: 226493 - DNA, 442 bp, Glycine max
  unsure (1)..(442): unsure at all n locations
gtggctggctcgactctcacttgaatgtcttctgtagcatcatnctaatcaatncatctgtcaactttgtgttaaaggtataaacccctgtccgtcaattgtctaaatattcaatcttggctagggttccatttagtgtttcaatatttggtaacttaaatatctagagcccaaactattttcaaatcataaatccttatagaagagaatatccttctaagttgacttctctaacccttttcttctatacattgtcagacacattcttctcaaagttgtttcatttcatctgcggatctgcacactcaatattcatatcangtgaatgatctaagtatttgtgctattattgggctctntctttttattatgtaaaatatttctttgtcaactattgcaccttataaagcatttaaacattatctcttttaaaatacatctt

SEQ ID NO: 226494 - DNA, 352 bp, Glycine max
  unsure (1)..(352): unsure at all n locations
tttttctcaacnngcaaacgccagaataagaaaaagaagcgggtgatggccaccttaccaagagtggtcctggctccacttttcgtctgaccttgaaaaaaattgacagatagaagacagtatttagcaaaatccacccataaattgggacacatgccaagtcaaatttacattacaaaactgtgatatttggcaatatctacacttctcataaaacaaaaatctcttctgcacttgcaagtgtcaattggtgggattaagaaagacttagaggaattgatgtggtacaagcataagtccagatgtgatgccaactctcacaaaagntgtaggcaaagaatactatacacac

SEQ ID NO: 226495 - DNA, 425 bp, Glycine max
tactaagctgaaaaatatttatttagacttgggttctcttccttgtattcttcttacacctataatgtaccctggttatgtctcccttagcattttattctgttaaacttattatccatcaagaaaaaataaacctactcttttgtagcagatttttgtttgctttatgattttgatgttggaacaggttggtcgaatgacattgggcggattattggctcttgggtacattgttgtggttagttataagcgtgcctccacaactgttaataatggcaaggtttcaatggtctttgaaaccatcgatgttcttggtgagacattcatggtgatgagaggaactaatagaaaggtatataactttttctattacactagattatgttccatctataattcaatcttcttgactgcatttactcttt

SEQ ID NO: 226496 - DNA, 282 bp, Glycine max
ctagtaacagtgctctgggtcatacacccacatcactacatgaataagctgagaatatttctggtgttacaaaggaacgtaatttggaaattccgaccacgccaatgtgaccggtgttcattgtaagttacgaaaataacatacatttcatgaaaggataatagttacaaaagtctctttctctaatgtttttcaaggaagcataagacaagcattggcggttcaaagtcataaagatgcaagacaatatgaactacatgatacatattaacctgattcctc

SEQ ID NO: 226497 - DNA, 401 bp, Glycine max
ctgcaagctttcaatataatgaggtttaatgtcttatccgcttggaccaaaagcgagcaatatgtttatgcaccttcaatacttcattcttatccatagactctcttatgttcatttgcctcaacatctccatttttctctgatggattgcattttctggattcttacaaaatttgtccattggtcctttttagtctcacactttgtctttgcacttgcagtagcattacaagagtctgcaaactcatcatcttcacttccatcacatccaattggttcaccaaattcaaaatctcttatatttgtcatattaccactgccagaagtactgtaagtaggcccactttttttggagtcatatattccttcaactctccgactacatttggtgggagttttta

SEQ ID NO: 226498 - DNA, 336 bp, Glycine max
ctaccaacttcataacaatgtcgaatttattcttaagcacttaagtgccaaaacaagtattggaaaaaaaaagttaaggcgaactttgacgtatttaacttggaagtgaaaaattctgaaagggaagaaaaaaagtaatattattagaatatgcattcctgcaacttattctatattttaatatcattaatttaatatcattaatcacaaattgctatctacaaattattaataattggaaaatgaaaatatgttcgttaataaaaatacagggatacattgtaaattatgatctaaatgataaattccatgcctgttaaaatatatatggcattt

SEQ ID NO: 226499 - DNA, 398 bp, Glycine max
  unsure (1)..(398): unsure at all n locations
tccatgggttagcaagccatgatatgaagatcgttccttatttctctacaanggcatcacctctcaatgagctggtgaagaaaaatgcggcatttacctggggtgaaaaaaaagagcaagcctttgctttgctcacagaaaagcttactaaggctccagttctagctcttcctgacttttctaaaacttttgaactacaatgcgatgcctctggagtgggagttagagctgtattgttacaaggtgggcactctattgcttatnttagggaaaaacttcatagtgccaccctcatctaccccacctatgataaagagctgtatgccttaataagagccctcatacttgtgaatattaccttgtttcaaagaatgtgcattcatagtgatcatcatcac

SEQ ID NO: 226500 - DNA, 343 bp, Glycine max
taaatcgcataaatttcaatttttcttaaatgaaaactccgcttatatgcatatgaaatatgagagtaatttttttgcaatatacattcaccaaacaacgcacaaatacttaaatgaatatatatagatatattatctgcagacacatcatccacatgacggaagggaaattagttcatacatataattaaatatgtaatttacatccccaattcaaaaagaattataatactgctataaaggagttgactaacaaaacaaaactgtctcccataataatcccaacgatattacgatagcttggtagctccaacaatagatccacactccatgtaatctacta

SEQ ID NO: 226501 - DNA, 362 bp, Glycine max
ggcgcgcacacttcaaacatggtgtgaaagatccctatggtgagattatggacaacgggcttgtgaagctgcaaaccaaattttgagatgatccaacggctaacgaaggctgggcaggatttttaccgaggcaactcatgtagcttcctcaagaaacttcattaatatgcttactcaagaaacttcctacgggcttctatgagaagttttctcacgaggctcctttgagaagctatatccttatctacccacacccctctattaactaaattaatctccttgaaaataatgacagataaaaataacgcaacatatataatcaaacatcgaacataattactaataatatatagatatatatc

SEQ ID NO: 226502 - DNA, 321 bp, Glycine max
  unsure (1)..(321): unsure at all n locations
catgcaacctacattctacagtccaacctatcttactaanaaataaaacccactggtgcacttgaattgctcgaggaactgactaataaatatagccttgaaagtacatttttatgtacatagaacaacgcgtaaaagatgtctaccaaacgtaatgcatatatattgaattatcttagagcaaaagttatatgtaattacgaactataaaaaagaataaaaactgccctatagctataccctacctgttagcatcattagatagcttaactaagcaattttgtcgctttgtccatcaagttattactattttgcttgcgc

SEQ ID NO: 226503 - DNA, 390 bp, Glycine max
taaagttacaatatacaaatggtcgtcgatcgacctctaatggttaatcgttctatcataatccggtttaatcataacctcaattatcttaaaaattggcatggattctcgaaagattatccatgaccattttatgaaactttaaagacatgggtgctttatacctttctcaatgatattctataatatctatcaagtgttaaacctatgtgacacatattcgttaaacaattaatatttgtagtagacccatcaatgcttagaatttttataaatctttctattacattactcggtttatatatattttatcccctatatatttttattgcgttggaaaaactattataaatactacttgtcgctctaaaataaacaatggtcatctaa

SEQ ID NO: 226504 - DNA, 369 bp, Glycine max
tgcagctgcagctcagcatatgagcagcatgtttagggtttttctctaacaccgccccctcacagaagatctatggtatgcacaggatgacgtcttagaggtaaagagaaaggagcgcatttctacattcttaaatagagctatacaccgctcaaaaacaaacccaaaaaatgggatattgagatatggaaaagcaccattcgaattctcttgtttcggaaaagctatccagattcgagaatatttattagaaatgaagatttcaccgctcttcctttccctccaaaactcaactcccacaaataaagataagcttgaagttgcacaatgcataagatcactctaccttgggctaattctaatctaatt

SEQ ID NO: 226505 - DNA, 427 bp, Glycine max
  unsure (1)..(427): unsure at all n locations
tcttcaactcaccaatgtcgtctggtaatctggacagtctttcacaatctgagatgtcaagacaacttatcttgtaaagccctttaacagaatctggcatctctaccaaaccagagcaagaacataaccttagaacttccaaattctcgagctttgcaatatcttgtggcagtgtagatagcctgtgacagttagtgatactaagcttcttcaacggggtgatgttactcatcccatcatgcaatttaaccagatcattacaatagtcaatgctcatctccacaagattnggcattgcatctgagatttggatagaacagttntcaaaagcctgccttgtattacacatatgaagggacaatgtttgcagattcttcaatatgcacaatgaagggactgatacctttttcaatctaattcttttcaa

SEQ ID NO: 226506 - DNA, 461 bp, Glycine max
  unsure (1)..(461): unsure at all n locations
atccttaagtcacctgcggcatgcaagcttccatcaagtggtaatcagagccatgnatcttaagtaggtgctccttaaacctccattaatggtttgctttaccttctcttccattgntgtttcttcatttttctccatgtatctcctcacatgtcttgtgctaaatgttgttaacatgattctttaaagtttccaccgattaaacttgctatagaggctagattctattttctatggttcaaatgtcttgttcttgttcttgaaccatgaattgtgttgagtttaggttcctttgagttttgtcttgttattttttgtggctgaaacctaaaccataaaattcttgcaaaaatattaaagtagaagaaaaactcanaaatctagagtgacttgttcacctattgtagttttgtcatagaagtcatgtctagtcatgaaacttgtcacataagatntcttat

SEQ ID NO: 226507 - DNA, 359 bp, Glycine max
  unsure (1)..(359): unsure at all n locations
tccgactatgctctngtgtggtttaacaatgcttcttatcgagagagcaagatatgaagatccactggttgatacatggaccgagatgaaaaagatcatgaggaagcggtatgtgccggctaattactcataggacttgaaattcaagctccaaaaactaacccaaggcaacaagggggttgaggagtatttcaaggaaatggatgtgctcatgattcatgcaaatattgaagaaaatgaagaggtaactatggctcgagttcttaatggtttgactaatgatatctgtgatattgttgagctgcacgagtttgttgatatggatgatttgcttcacatagcaatccaagtggaacaac

SEQ ID NO: 226508 - DNA, 400 bp, Glycine max
  unsure (1)..(400): unsure at all n locations
agcttctatagaaagagcgtgcgctaatgttctacttttgcatcacctctcaatgagctagtgaagaagaatgtggcatttaactggggtgaaaaacaagagcaagcctttgctttgctcaaagaanagcttactaaggcacctgttctagctcttcctgacttttctaaaacttttgagctagaatgtgatgcctctggagtgggagttggagcttgtttgttgcaaggtgggcaccctatngcttattttagtgaaaaacttcatggtgccacccttaactacccaacctatgataaagagctttatgccttaataagagcactctgaacttgggaacattaccttgcttccaaggaatgtgtcattcatagtgatcatcaatcacttatagtcatta

SEQ ID NO: 226509 - DNA, 355 bp, Glycine max
ctaagctgacaaattgtgaacggaagcagatgcgacttttctttttttgatcacattcaaaggatgaaccacaagcatcgtcattcataccatcattttattgcgaccatttgggcatatgattgaaaaatagcttcactcactttctccttaagctttatcagactcctattggggagctgtcttgactatcttctctgaaggggtctcatcaccttcacttttatttgtgcctaatcttcaaaataaagatcatgagaaagaccagtctaaacttaagcactcattaaagatatgataagcctacttaagttaagttagaagcaacagtcccaagcaccaagacattttgttc

SEQ ID NO: 226510 - DNA, 330 bp, Glycine max
ggagcttccacgggacctcttaaacgaataggatacacctttccctaacatgtgtaattagacaagctagccatttacccacacgacacttgacaagactctattactagaattgcccaatcataggtggttgcactaatattaatgactccaagtgttcagtatttcatacacccctctgttaattactaatcatctatagatttgggggcccaattgccatcgctcatctggtttttatcctatctatacaactatgagaagctgatcctcgcattagcgctcatccagctttttttttatatttcgattgcaaaacacatgtgtgag

SEQ ID NO: 226511 - DNA, 218 bp, Glycine max
catatattacgggactcaatcagacatccgagtaaaaagttattggcgtttaaatttgctcagagcttccgtattaaatttcgagcgtctcgatatattaccggacttaatcagacatccgagtaaaaagttattgtcgtttgaatttgctcagagcatcaagaatcaatttcgagtgtctcgatatactacgggactcaatcagacatcagaagaaa

SEQ ID NO: 226512 - DNA, 404 bp, Glycine max
  unsure (1)..(404): unsure at all n locations
ccttgatatatttgaaggacttatggtcactatgaatgacaaaatccttgggataaaggtagtgttgccatgttttcaaagcccgttctaaagcatacaactccctatcataagttgaatagttaaaggtgggaccacttaacttttcactaaaataaacaattggatggccttcttgcatcaacacagccccaatcccaacatttgaagcatcacactcaatttcaaaagatttttgaaagtttggcaacgcatgtatgggggcattaattagctnttgcttaagaacatngaaagcttcttcttgtttctctccccatttgaaaccaacatttttcttgagcacttcattgagaagtgctgccaatgtgctaaaatacttcacaaatcgtctataaaaactt

SEQ ID NO: 226513 - DNA, 375 bp, Glycine max
aacaaggcgaccatattattacagtatttattgctacagggcataaactgcatgtttttgttaccttttgaattactccatataggctttattttttctacctgaaacttcataagttactaccatctataattgcaatatacgaaaggaaaaacctactattgtttgaaaattaattagagtaacaatccacttcattcttaaaacgtgatgcatcatcctttatgttataagataaactaatatgttttttaaaaaaattctaaaagcacaatatgtcactcattttaattcaaaatttagatagttgcataatctactacaataacaataatagttaagtttaagactaaaatacatataatatttattttg

SEQ ID NO: 226514 - DNA, 386 bp, Glycine max
tattgcaggcagtgaatacatttctgccagtttctccattctgctaacaaataaggtaaaacaggaacttacaagaacaattacacaattgctcgattaaagttattcaagctcaaattccaataatatgaacttgaagttgacttgtccatttctattcaaacaaaatgaatgatctaacctagccctaaccagaaagcgaaaaaaaaacatgagagatgaaagaaaaattaccatcagtttcaagacaaatccggcattgaatttgttcggagggtccctcttctatgtcgatctcggtgactgtgaccggtgagggagggataagatgagaagaatccgtcatgaagtgaagtaaacggagagaaagttagaagaatgaaatg

SEQ ID NO: 226515 - DNA, 365 bp, Glycine max
gctctgctttgctttgctctgcgacttgaaacgtatgagagaggacacaccctgtgtgggttttatagcgtgaagggataaaagaaacatagtgaatttcgacacgtgcgttattgatgtggaggccacatccatttgacaattaatttatttaacaaaaataaaaataatgtgtgacaaggttcgacatatgtatggatgacggcagccgccacgtggcagtggtggagtgggcgtggcgcacgtgagagtgttcgggctttttgatgattgtgtcatggcttacgtcagttgtcgctgccgtgccttatattttcaaaatgtctgctcgatagttattagccattggtgactatagtaattat

SEQ ID NO: 226516 - DNA, 357 bp, Glycine max
tggctttcattgcatcattaccagccctcatactttcaaacacattcttctgcttgctagccagttcaatatctgctaactgaaaatgtgcatgtatttgttttaagtgtacaattgagttaagaaaaagaaaagtcaatgcacaattatctcctctaaacatgagtacaagacaccagatgggataagaactgaattatgacatataaacagacagttgtaatgccatcaatagatgcaaacaggttacaatacaattattactactggacagaaagaaacataacattgaagcaaaggttaaatatgacatgttaatacgataaatatttaaatactacttgctgctcacattta

SEQ ID NO: 226517 - DNA, 134 bp, Glycine max
ccacccgggccgtcacacccttcaccctttgtgcgtgtactttaaagagacgaaccctttctgcacatgctctgttgttgcctcctatccaaaccataatagaattgtgttgatactgcctaacacggtgacca

SEQ ID NO: 226518 - DNA, 376 bp, Glycine max
tatccttatggcctgcctccgttcttataccccgtgctcccccagaagatgtaagccaagcccctactttcgatgggcaactcccaccttatgaagactatcccgggcaagacgatggggaaggagatacccatcttggcaccctgctccacctcatatatctgtccccacatgatctaccccaaccgatcatagtccgccataccccggcctcacccacacccgtaaaagaatctgttccctttgcggaagataagggaaagattgaggcgcatgaagagaggttgagagcagtcgagggcctctgcaattacccattctcggtattagcggatttatgtctcgtgcccaacatcgtcatcccttccaagttcaa

SEQ ID NO: 226519 - DNA, 274 bp, Glycine max
acagaagaagatttggcaacttttttcaatgacatttgtattggttgtcaactacattgcatggtttttacacggtctcatgtttatgcgtgaattgctcacaacatgctaaaatagggttttctagtttgggctaagagtaagcgtctcttaagcttatattcacagagggtcctagtgtgggatgccttagtcttcttttccgggggtaaaattgtatattgattgtgattgcttgtaagaattcttgatgcatagtggaaatctaattctg

SEQ ID NO: 226520 - DNA, 310 bp, Glycine max
  unsure (1)..(310): unsure at all n locations
cttgcggcgttattctaagatgtcttaagttcacgtgcattcgtacatcgcatggctcttataccaaatcaaagataattcagtatagatttcaaagacaaggttaattttaacttttggggtcaaatacccattcaatttaaaaaaggctaaaggggtgtgttgagattcatatcaaagagaggtcattgtgaaattcttatcacgccactgagaatagggttcaacaaatgttacaaaaacaaagtctattttataaaaatgcaacttttacaacatctctntttcaggggtttctcanaggaagtgt

SEQ ID NO: 226521 - DNA, 302 bp, Glycine max
gtgtctctgcatacccaatttaaaccaacttacctatacccaggtgatggtttctcttcgaatgaaatgacattatatttagcaaactggtccaatctgtcattgtgaaaagtgctaatgatgttgctgggagtttattttacagtctaatgacttcaccctatgttttcacatttctaagttgaaagaccacacttcccattggtgtaaatggcaaacatcgctcgaacctacatatgtgctcgaagcaggggagtcactatccattctgagtagcaccctattatagcgcgcatacagtc

SEQ ID NO: 226522 - DNA, 418 bp, Glycine max
  unsure (1)..(418): unsure at all n locations
aactaagcntcactatgtggcaggcgcttcatagctctttcttttattgaactnngaccattggtcttccttcccgcgatgcttcttttcatgtccgcctgagtgggcttatagcctaaaccatacttcccacgatttccttgagtatttatcacgctagttatgccgccgttgttttttcctaaacccatcccgggttcataaccgttccccaacataactcgggccatcattaccgctgcatcggacagacaaggctgcccaaagagggagtccacggaggaaatgctgaccacctcanaagactggaaagcagtttctgacgattcttctgcggcttccacataaggcatggaggatgggcagcttaccaagatatcttcctcgcctgacacgatgaccaagtgcccctccacta

SEQ ID NO: 226523 - DNA, 433 bp, Glycine max
agcatgcagcttgagatatgaaagagaaagttctttgtttcatcaactcccttaaaaaggaacttattggtcttctgagaatatacaaaacacaccagggtgaaaatcaaagaaaacacaattatctttgggcaattaactaacaacttaacacgatttttccgaaatccgaaaagaaccatataagaacttgggaaagttaaaggttatgccaacatcattaggagatattaaatgaagaagaatcagtgttagaaatacttaaaccttcaccattgcctttgaatatctgacctagtccatcaaagagagtgaatcgtttttttggtcaacaaagataaatatatatatattgaataaaaagtacacaggtactattcaaaataaagccctataattggtcctgaaagcaaaaacacagcctgaaaggaac

SEQ ID NO: 226524 - DNA, 448 bp, Glycine max
  unsure (1)..(448): unsure at all n locations
cttgaaactaagcttatggcttccctcatagccctttttatgatagggattttatttttatcagccattttttgctcgacttatttaaaatatgtggtactatgttgcacatgagcacctcctaccattttgagtttgatggacaaattaaggttcttaattaagtactacaacattatttatgttcctttgttcatcaaaagtcttctcagggattncaaatttttagttttggcagaatggtcatacaacacttttgttcactcaagcacgagtttgactttttatgaggttacttatggtaaggcccttccatctctaccttagtatttacaagggacttcccctattaaggctgttgacaacctcttcgctactcgtgaggccattcatgctcacctcatgcataagcttactaaagcccagactaccatgaagcttctgttga

SEQ ID NO: 226525 - DNA, 431 bp, Glycine max
agctctcaccagatcatatgagataaatgttctttgctatccgcagctataatctcccaaacgttcaattctccgcctatatattcaacattcccatcactggcacgtggagtgaattttcctccatggtgcaatactaaagttatattgacattcattctacacaatcacaaaccacaaacatggtcatatattaggaaataaaaaacctacctcaaactcaaacatacgcacatcacacaacaacatgcaatgtcatctataaaaacagagcatcataaacgaaaataataaaggatcataaacctccctacgaagcgcatagacaatgcaaatgaaacctcttgaacatataaaaccccaaatcaaaccaccaaaacaatgcaaacgatatgaacgcaaaataccacccacctgacaataagcgcgaa

SEQ ID NO: 226526 - DNA, 406 bp, Glycine max
  unsure (1)..(406): unsure at all n locations
ctataaaactaagcttctagcatccttcanacccagctggaaatggttgncattatttatcttagtatgngcaaattaatttacaaatactacaatacatccgcatgataaaaatgatgcaagtggacatacttcagcaagtgttgtgggttcaagcccactcaatggcctacgttctgaagatgatggtgttctgtgcatgaaatattggctaatcctgattggaaaatatcatgattgccatgagaccactaaactatacaaaactggagcaaaattatttgaagatgataaatacgtttataacaagtaattcaaaagaaaattgtgaaactatgattaacctaatataagctgcacttcgattgtgaggatgaatggatcacctgatttgatgtattggctc

SEQ ID NO: 226527 - DNA, 319 bp, Glycine max
  unsure (1)..(319): unsure at all n locations
cagcagcaaccnacacagaaggagaaggactctttatcttaannaaacaacccaatgcgcacaacctacggaattaaaaacaacccaacggctgagagcaaccgaaaatgtggccaccaaaaccacccccaaagccaacaagcaaccaccatgtgccacccaaaggccgaagcctacgtcccaatcgggcccttattacaacttgaagcaaacccaacaaaacccctgaagccgacgaacccaacacatatactcggccaaccacacgaacaaagagcgggccaatatcaagacagaccaaacaccctacaaacgaaac

SEQ ID NO: 226528 - DNA, 330 bp, Glycine max
aactaagcttacattcatttgagctctcgatatatacgggatgtattctacatccgagtgaaaagttattgacgtttgaatctgctcagagcttctgtattccatttcgagcgtttcgatatattacgggactcaatcgcacatactaggaaaaactagctgtcgtaagaatgtgctcatagcgtcaacattcaatttccagcgagccgatatgttacgggactcaatcggacatccgacttaaaagtaatggacgttggaatttgctcagagctttgggattccatttcgagcgcctcgatatatgacgggactcaatcccacatctga

SEQ ID NO: 226529 - DNA, 418 bp, Glycine max
  unsure (1)..(418): unsure at all n locations
ggctgcaagctgnacaaactactggatagcnncctttattccctccaatataaattcgccgctattcttttgtatgtgcgatagaaaccggaatgaccaccttgaggagtagcatggaattcttccagaaattttggaatccaagttgatttctcagggatgactaggggatttttataataaagtaccccttgtttatatacaaatctagcattgatattttccccctgtcctttcttcacttcttcgattatttttctcaacttctcatctgcgtgcacctcagcattgatttcttggcaatccagccatactgggaagtaaatcatattgttcagttccattttatctttactacgggacagagcatcaactcctcggttcttctttccaagcttataaattatctcaaaattat

SEQ ID NO: 226530 - DNA, 453 bp, Glycine max
  unsure (1)..(453): unsure at all n locations
actcagcttatctctcatctagatatgagatggggattatatttttgaaaggcgaagaacgccatatatcaatatgagggaaaggaggagagtgaacgatcaaccttttatgaggtagttcactccatattaattgaccgttggagagtagcactcctctccattgtttagctcattccttanatccaaggtaattaactctatacttttttacttacattntttttagaattacataaattntaatcatgtatatatttattcttaattgtagatattatagtcatgaatggctaagtgaagattctaatcgagttcctccatatcaagacatggaactcactcgtgaaagagtaaaatgcttcaaaaggttctttcttgatgtcgatgtaaggaggaaagtgaatattgagtttgccaacttctcggatggaagagaanggtttgatgatc

SEQ ID NO: 226531 - DNA, 333 bp, Glycine max
tcagccccttggcactcctctctctctcgaaaagctgacgaaaactaggtccgcgaagaaaatccaagccgaggcccttccgtaacgtttgcgtaacgtttccgtgagtaattacgcgaagattcttgaccgttcttcaagagtcatcattcgttcttcggtttcttcagtcttcaacgggtaagtacctcaaaccaagcttttgaattcattctatgtacccgcggcgaggcatattttgtttcatgtatatttgctatcgcattcattgactatttttacccccttttgacgtgcttaagccatatatttaagtcatctatagcctaatct

SEQ ID NO: 226532 - DNA, 442 bp, Glycine max
  unsure (1)..(442): unsure at all n locations
gatcttaagtcaccgcggctgcaactgccattctttgtatgaagnatttggttttttttatntagtggcattgtgtataactcgtccaaaatgttttcctctttaattacctgttttatattcttatgattctatattttcaagcatggaattaaattttatatacaggatcaatttgacactaggcgtaaaactttaacacttgcatcacttaataatttacacgaaattaactaattccaccattgattaagtttaaacaattccatacaaaacaaaaactaattgatacttaatcaatatgctgtattttgatagataatatattatgtcttttatgtgaaataagtaaaatatttagttagatgaaatttcacgaatatgtttaatctatgtgatattcgattacatgataaagaaagtaatattacataatttgctt

SEQ ID NO: 226533 - DNA, 454 bp, Glycine max
  unsure (1)..(454): unsure at all n locations
tagtaaagctaagcactaacaatatgatcaagtgcttanttcatattcaatgcatgaagagtgacaggcatgcagattataatgaagatcagtcatgtattcatcaacaatatggtcaattatttcaacacgaaatacagaaagatcttcagatgggtgtttcatagcatcaagaatattaaaatgaacagttatatcaccaaactccatagatagtgtgcatgcatatacatctatcttagttctagcagttttcataaaaggtctgcctagaatgatgggaactgatcctttagaaaatccctcctccatattcaaaatataaaaatcaacaaggaaaatcagctcaccaactctaactaggacatcctctatganaccagcangataggcaacacttctattagctaaatgaaatatcacatcagttgactgcaaggacctatagatagag

SEQ ID NO: 226534 - DNA, 428 bp, Glycine max
  unsure (1)..(428): unsure at all n locations
agcttctcccatgaggtatccattntctatcctgttaaaaaacatgaaaactgttggagtacaaatgtgaggtgaagtctcacatcatgtaggaatgagaaggttgaacaccatataagtgaaggaaagacccataaacttgagccttaagatnttgggttaaggtgtaaatctccccggtgtttacccctttcgattgcacaacaattgacgagtaagatggcgatgacagatccatggatatggaaattccttgtatcagaagtcttcctggtggatgatcccatgcatggaggcttggcagtgggtctctcatgtgttgggacggtgcaaggtactatagcatgttgacaataatcactagactagccgaggcagccacaattaagttctaagggccaccactggatacttgtgaattgaaaata

SEQ ID NO: 226535 - DNA, 436 bp, Glycine max
tgtaataatcttagatagaaatgtatgattaagttctttttgtaatccctcttgtgaggagaaaatatataatctatgaggttaatcacaaactcattttctgtaaagtccaatagtggttggcaaaagagaagtctaatggtgtagctgatctagttgaggctaggactgaagcctattgagaaattgacaggttgttgaaacccaatgatttactggtcgtgttagtgaaatctcatctttaagggtgaggactagactagctcaaggttggggtgaaccagtataaaacctttgtacactcttcccttttctctttctttactttgctttgcatagatcttaaaactggttttggtcaaatcattaaatctgttatctttctatcttaacaacaaaactttgttttacaaagagttttttactaagcaactat

SEQ ID NO: 226536 - DNA, 394 bp, Glycine max
  unsure (1)..(394): unsure at all n locations
actcagctatgatgtataatatacatatatgggggagattttattgttgacttggataaaaaatgtggcctaatttattcattatgttttggcacaattaataaaaagtttgatggggtcggtggtctggcagccatgccggctttgaaattttcactttctatatcgtgatgtgtggtatcttttaggacacactcttgtgccaggctctatagcaaaaacaactcatacacgaagttcacaagcttaacccttgaccttgtgtgccttttactatttatattcaaacctagttggntacccttttactccttcaattaatataatatgcacaggactatacgaggagtatctaggatcttactcttttaggggtgaagatcaattcatgaat

SEQ ID NO: 226537 - DNA, 355 bp, Glycine max
attcaccccattctcacttctattctggttctgattccaagaattagtctttcattgtaccatacttacccaaacaagaaaataaacaatctgaatagaaaatcaacctgcactttgaaagccaattcttgaagaaaacgaagaatattttttagactaccatattacaacatacactgtacaattgtagcattgacaacctacaaagtttcagttccttcattattcatttaagtagatcggtacaaaatcagttttaatctttgccataaaaacttgacttcatgcacgttgctatagaatctcgaaaaaaaagaagttatttgcttgtttgctccgcaagtgcaattctcca

SEQ ID NO: 226538 - DNA, 371 bp, Glycine max
  unsure (1)..(371): unsure at all n locations
ntaaatattatctaaaaattttaaactgtgtttttatantttaaaacgncatctaattttggttggaattgaacggaaaaaattatattaatgttaattatttgaatcgatgcttggcaattcgattaatctcatattaaatcatttttaaaatttaatttcaaatatatttacattatgatgtatatctttccctttaaatcgaattatttaatatatatatatatatatatatatatatatatatatatatattaactcatttacctacataaaattcatttctagttntattatgggtaattctattttaaatcacattagttcaaaaaataactcgtgcattaaatatttctcgcgaatcaatatta

SEQ ID NO: 226539 - DNA, 358 bp, Glycine max
tggacctctcccttccttaatggatgcatcattgttattcttgatcaagcttggccttggcttttcccacttccttatatacttcgtggtattggatggaggttgtttggggtcactaaggctgcaaccatactcaacaaaatcgaaatacaatgtcatttttcttttttgaaaacccaatcatttctaccttggtttctggattaaggatttgcatatttgaacaaaaccattatgcaaatgagaaataatctctaatagaaaagaggccaccgagaggagaagcaaactagattcttctaaccattttgcatatcataagggcatgggcaacattctgggggagagaccacatatg

SEQ ID NO: 226540 - DNA, 308 bp, Glycine max
ctcctggcagtcatacagaataaaggaaaacaagacccctgagcatggaggcttgtgggggctggccaactgtgaattctgcgtaaaatgtggaatggggcctctggtaatcgattaccaagggtgggtaatcgattacaggcttaaaattgaagacagggggctaagatggtctctggtaatcgattaccaaggggtgtaatcgattaccatgcttgaaaacgaagtcaagaagctagggaagcctctggtaatccattaccaaggggtgtaatcgattacccagcttataaagggaaatgggagat

SEQ ID NO: 226541 - DNA, 330 bp, Glycine max
ctttccgcgatgcttcttttcatgtccgcctgagtgggcttatagcctaaaccatacttcccacgatttccttgggtatttatcaagctagttatgccgcccgttgtttttcctaaacccatcccgggttcataaccgttccccaacataactcgggccatcattaccgctgcatcggacagacaaggctgcccaaagagggagtccacggaggaaatgctgaccacctcaaaagactggaaagcagtttctgacgattcttctgcggcttccacataaggcatggaggatgggcagcttaccaagatatcttcctcgcctgacacgatg

SEQ ID NO: 226542 - DNA, 412 bp, Glycine max
  unsure (1)..(412): unsure at all n locations
gaatgtccctcgggatgatcaaccttgtgaggagaccactcatcaagtttcttgcactagtgagaacactgagcagattccacccaaacattnggaatttgtcattcatggtaatgattgctttttgattcctgttgaatttggtgactcctttgctacaaaaagtgaaaaccaacatagatataaggtgggggatgatgggtttagtggggatgaagatgttgttttggattttgatataaattctggtgcagagtctgcacctgttattgagaattggcacacttccggngatactgtgtcactgttttcggatccagggtgtacaaaggtgttcaaggccaatggatttgagttaagaagtgaacatttggagcanaactacctagatatgaaatttgctcaatcaact

SEQ ID NO: 226543 - DNA, 448 bp, Glycine max
  unsure (1)..(448): unsure at all n locations
gatccttaagtcacctgaggctgcagcttagaaccaaacttttaagcttttttgtattataatatactcatgactagggacccaatatttggttttagaattagaaaagcatgaaaatagggacttgtttgtaaaaatttgggctgccccatgattggtactttgcacctaagaaacgtgggaaatgcttttcaatggtgtgtagatatatgtgtaaatataaagggcatgaaattctttgcaaagggtgtaggaatattgaggtcacttcctaaatgaatgtatgatagcacgggtttcccttttgaatacaagtatgtgcataatgtaaatatcttgccaatatgcataagtgtgagggaaacaatgaaagtttgtatggtatatatatttcgagtgtgtgtaggtagtttgtgatagcanatgtttaagacatagttaagtgtac

SEQ ID NO: 226544 - DNA, 398 bp, Glycine max
  unsure (1)..(398): unsure at all n locations
tcatggaattgcagggaagataaggagaagaggtgagagaaggcaccatccaaaagagaataaaccatggaaggagaagcttcaccaccaagagagtgccttggataagaagcttagagaggaagctttaatgggggaagagaatgaaagagaagggggggttgcatgggaattgaaagaggttagggagagaagttgaactttgaagtatgactcacaagtttctggttcatcaaagttatgacaagtgttacacatgtttctatttatagcttagcacatgaaaagctctcttatgaagctagaggaagaaaacttccttgagaagctagaggggggtcactcacacncctccaatagctaagctcaccctatgccaaaatacatganaatacaat

SEQ ID NO: 226545 - DNA, 409 bp, Glycine max
agcttcacgtatacgagtcggtgtccactagtactttttgaagaaatcaaaaacatatttggggattgtggcacgtgataaggtggacatcacctacgataactgataggaggtccctattgcttataaggacctgatttgggaggatattcaggtatttctcttttcttatttgattttatgtaattaatagccaaaaaatactttattgtaacaaataaactttgtttcatgttgtcaggcataatttgatatcccagaggcttctgacagtaggacgaaaaggaagttactacagaccgtgggggagagatggaggcaatttaaatcagacctcacgaggaaatgggcccttgcagccgatcaggatggtgttgaggacactgtctgtgacaaatactacattagc

SEQ ID NO: 226546 - DNA, 411 bp, Glycine max
ctttcatatatcttgagctgtcgagaagcataggccactacctgcccctactgcataagcactccacccaaacccatcttcaatgcatcacagtacaccacaaagggttcactcgggtcaagtaacactaaaactggagtagtggtcaacctttccttcagggtacgaaaactactcttacactgggcatcccacacaaaaacttgacccttacgagtaagcttagtcaaaggtaacgctagcttataaaaaccctctatgaatctacggtagtatcctgctaaaccaaggaaactcctaatctcaaatactgacttaggactctcccaactcatcaccgcttctaccttggaaggatctattgctatccctcctctggatataatgtgccctaagaagctcacctcgtct

SEQ ID NO: 226547 - DNA, 431 bp, Glycine max
  unsure (1)..(431): unsure at all n locations
atactaagcctgcataatgcttaaccaacatagatagaagcaaacatgttgtaccttttaaaaggaacaagttggcctatgacaaatgctaaaccaccataaaggtggaagcaacaaagcttaaccaccaatattagaatctacacatgatgcttaactactcaagatagaagcaaacaaatggcaagtgcttaaccaccatatcggaagaagcaacatatcttaaccatcaagagcagaagctaaatatggtgcttaaccacttaagacaaaagaataacacaatacttgaatgcttaacccccatagaggcagacgctacacaccaacacttaaccatctatggaataatatttatatcgatgcttgaccatcatggaccanaacttgacttcagaatttgaatatgggtcaaaagcttgcccaagaga

SEQ ID NO: 226548 - DNA, 439 bp, Glycine max
  unsure (1)..(439): unsure at all n locations
gaccgcggcatgcaagcnngngaacaggagggagagccagcactattttttcgccaaaccccacgaaacccgagctgggtcagcagaactcttcctcattccaaccacctgagttgcattcctgactctaacgtttgttgaaggagacgatctactataccatactaaaaaaagatcgattcactcgtcacgataaaaacgtctatggatgagatagcacatcccgtatcctgacaccggaggggagattcggaaacatgatggcgctgctaggaaagacattctaattatcaaaaatgctatgcccgaagaaccaaactgattgtaccctatttgtaaaccgggtaaacaagctntcttaaaaagtgtttggtttaagcacgggatgagaaaacaattaaagaaaaaatgcgcagacacaactctcttcccactggag

SEQ ID NO: 226549 - DNA, 430 bp, Glycine max
  unsure (1)..(430): unsure at all n locations
agctttnggtacagagaagaagaagatgttatattatttcacggctcgcaaaagatcgatcgaataagtgtaaaagtgtattgaaaagcaaatcaaagccttgcttttatagactcttcatgtctggccaagaagaccatttaaaagagttataacttttagaaaaacttaaaaccaatttgaaaaagtcaaaacctttttaaagagttacatcttttgatttatcagaaacagtcactggtaatcgattaccaaataagtgtaattgattacacaaagcttttatgtgaaaggatgtgactcttcccatttgaatttgaatttcaacgttcaaaggcactggtaatcgattaccaaaacattgtaatcgattacaacatttctgaaataattggaacggtgtaaattcaatttgaaaactttttcaaaa

SEQ ID NO: 226550 - DNA, 452 bp, Glycine max
  unsure (1)..(452): unsure at all n locations
ctttcgataattcatgtctctgaaccctacaatctttttttgtgacatgaaaaataattaaatgtgttcgatctattatttaaataataaaaattagagtagatacctattttgttcttgagaaattagatgataaagatgttggtaaaaattctatcataattcttataattaatcacatatataagtcatatggtccttttttaaaatttatgtatagcatatgtatgaattaacgagactaataaaaattgatattttgtttatattttgtaaaacacataagtgccaacagctatttgttgtaacttttattcatgtattcaatatgttntagttntggcataatcaacaacctttatatttttatatttcaagttgtcaaaatttaataatataagttgaaaaaaaggtaacattntataggatgatacaaataacgtaacaacgat

SEQ ID NO: 226551 - DNA, 418 bp, Glycine max
  unsure (1)..(418): unsure at all n locations
agcttcacgagtggtcttctccagataatttctatcaatgnngcatttctcatcaggaatatacccagcaatagcaacaacctccattctatccaacaggggattaggtatcatttcaacaacatttgcagtgcaaacaaaaagaacctgcagtgagatttccagcgcataactgcttaagtaattatggtaaaaacaagcctactttgcctacagggaactgaatgaaaggaatacattcaagaactatttgaccatcctatgaactacctatcagcaatgaacacaattaataaaccatgtacaaatgctgactatatcacaacctcactataaaggctccagattatacattaatacctctgatagatcaatggtaacatcaagatagtggtcaagacaattagcattctgctct

SEQ ID NO: 226552 - DNA, 440 bp, Glycine max
  unsure (1)..(440): unsure at all n locations
tgccaccacaggtganaagccaggccctagagatagtttttgtgctgntcttgtagggcacaaaatgatagtttttggtggcacaaatgggttgaagaaggtgaatgacactcatatattggaccttgttaccaaggagtggtttcgtccaaaatgtgaagggactcctccttctccaagggaaagtcacactgcaaccctagttggggatgaaagactagtgatttttggtggcagtggagaaggtgaggcaaactatttgaatgatttgcatgttctagaccttcgaaccatgaggtggacttctcctacggtcaaaggtgattttcctgtgcctagggacagtcacagcactcttgcaattgggaacaagcttattatgtatggtggagactgtggtgaacaatatcanggtgatgttaatgttcttgacatggata

SEQ ID NO: 226553 - DNA, 363 bp, Glycine max
ggattattgatgttcttgtcacaatcaagcgatagttgatgtctccatatgtgcgtacactgtgaatatgttttccgttctagaattcatttggagtatctactggtgattctaaatgagtgatccttcttgatttaaaattattgtctcctaatcaatcgagtgttcatcttattattggctgctcatcttccaatcatgtctagttaaactgcttgataatctttcttgttgtacttctaattcgaaaaagagagacttcacctttgacaatcacgttaagatgtcttgagaggaaaactcgagttacctgatcattgttacctatagacaaagttaacttactaaacgtgtcctgtgttc

SEQ ID NO: 226554 - DNA, 394 bp, Glycine max
  unsure (1)..(394): unsure at all n locations
ntaccaactctcanaacagggatatcaattgctttctatcattttctttagtacctaccaactttttgtaaaagctcaaaatctctttttcaatactctcttgtgtgcacaacaaatttccatctaaatctgtcaaagtatagatgcctttattcttattttttttccttcacagttgcatggaaataagcattattgctgtcaccaagcttaagccaattgactttagatttttgcatcagaatgtcttctgcttcacttccttcaacagcaaattatcaaaaggattatgttgcagcaaattatggacctgatgtaactcctgcctaacttgctggatntgattttgcatattggtgaactgtctagacagaggtcttaacacaatttggag

SEQ ID NO: 226555 - DNA, 316 bp, Glycine max
  unsure (1)..(316): unsure at all n locations
gaccnnaagcgacgcagcagcaaccggacaacaacaagccctttgagggaagcacaacacaacgcaacgtaggctacataaacccgcggcgcacccacaacggggaaacaccctacatagagaaacaaccgggccgcgaacccctacaaaataaatacactccaactgccggtgaaggggagaaacccaaccatcacgcattcaaacatacgacagaacaaaacaccccaacaaaattacccaaccacaaaacaccgaccgataaaaccgcgaaggtacccataataaaactaaacaaatcgatcacacacaacag

SEQ ID NO: 226556 - DNA, 379 bp, Glycine max
cagcttggaagaaacgtatgtatttttttatttgcttgggagtggatgctgacattcctttctagttgcacctattactaatatttttgtttgaatttgcaaattctattttgattttaacatgacttatgtgggagcagggatgatttgcccccaccttgtaaatttgtctttgctccttggagccattctctcctttggagtgatatggccgctcattgatcgtcgcaagggagattggttccctaccaatttagatgagagcaacatgaaagctttgtacggctacaaggtctttctaacagatgctctcatcctcggtgatggcttatacaactttgtcaagattttagtttcctcaatcttagcgacatgaaaa

SEQ ID NO: 226557 - DNA, 349 bp, Glycine max
  unsure (1)..(349): unsure at all n locations
acacaaacatcatacactcgatagtcacacttttcacatgtgaaattgtacccaccaggtatatttcacaaccataacacataatgtgccatgaactaaacagaatgactttacacatcatgaagtcaaaaaagaatggtctccctctctttttgtagacagactcacacaacatcagttaaaaaataaatntaatcaccaaatctggcttagttgttcagttacatgagcaaatactactattgtgctctatcagattatctataaactattccttcgctcaatagttaatggaaacaaaatcagattcaatttagcggtggttcacttggcaggacacattattctt

SEQ ID NO: 226558 - DNA, 367 bp, Glycine max
  unsure (1)..(367): unsure at all n locations
catgctaatagattaaattttgtcctattctttatataactttatgattatccaattggttcaagagcaaagcgcaaccctacacatctgcgcggtattatggagtattatataaaaatctttccgatcatcatcaataagcaaaatacagaggttttcggcatttaattgaacaataatatattaaaatcaaaaagggttctcgtgacgcanatatactgaaaacacactcaattcacgataataagataatcaaccataaaatttataggtacgagagacaagaaaaagacacacattacaatcatagataaatctttaaagcacataacaagggaatataacaaatccctttaacaaaatttcg

SEQ ID NO: 226559 - DNA, 379 bp, Glycine max
  unsure (1)..(379): unsure at all n locations
ntcttcctctagcttcccaaggaagttacctttcttacttctcaaggaagcttcccatgtgctatgctataaatagaaacatgtgtaacagttgtcataactttgatgaatgagaaacttgtgagacacacttcaaatttcaacttctctccctcttctccttcaatttccatgcccccctctctctctcattctcttcctccattgaagcttcctctctaagcttcttatccaagacactcccttagtgttgaagcttctccttgcatcgcttattctccatggttgaaagtcaccattgaaggaccttattgatgctcaaagatccaacctccatagaagcttctcaagaaagcttccatcaagtgatatcagagca

SEQ ID NO: 226560 - DNA, 378 bp, Glycine max
atgcttccataatacccatgacaaccaacctttctgggaaggaacaaattaaagaaaacaatggagtagctgggcccagcccggaagcagcttggatgaaatctatttattcagaaaagccccctctgttacaaaggcctgcaaatatccttcctaccttcgaccagaatgataaaagaactcttgtgcaagaatttcagatgagtagtatccagaaggacttctgttttgatgaattggagagtatagtaaaaattaaacaggcagaggctaaaaggtttcaatcacgtgctgatgatgctagaaaagaagctgaagggttgaagctcattgcccttgccaagaatgagaaaattgaggaagaatatacctatagaa

SEQ ID NO: 226561 - DNA, 372 bp, Glycine max
gggagcaataatatggaaataacatatggatagtaaagatcactaaaacgctacacaatcatgcttggtatccaaccccccacaatgtgtaatttagcctctcattgtcatgaaaagctcaaaaacaagatatgaaacaatgaaatggaagaagagttccaaagtgagtgttttgcttcagacgtgcccttgctgcccactccctccaaaagcacagtgcaacctcttttatatcctccaaaacgctacacaatcatgcttttcgaaaatcaatatgtgctaacgcttagcgtacatgcatagtacagctagcttaagagaccatgcgctaagcctcctgatgtgcactaaatgcccttgcatgaataatgt

SEQ ID NO: 226562 - DNA, 405 bp, Glycine max
acctgcggcatgcaagcttggaagtactaaggagaggcccatgtgctattattgcaaagagcaaaaaaaagggagtttgttctgagatgcatataccttcgtctgcaagtcatgccattggggcaaatactgcaattcctagaatgtctccatatatgtctccactggttacaagtcaggtatatgttttgcttcttttcgccaactctggtcatgcaatgcaatgttttttcatatattctccacattcttggttctttcttaagttgcagctatctatgcactcctgataaggatactatactgaaattcaattgctctgacagagaaagttggcatacagaaggctgattgctctcatgaaattgctcttgacagtctcccaaagaaaaaaaattttggcca

SEQ ID NO: 226563 - DNA, 447 bp, Glycine max
  unsure (1)..(447): unsure at all n locations
agatactaagctttaagcctcgttctctcccctatggaagatgaanaatcctttgccgtggaaatcaacataaggcagagaataacacagccataatcattcacaagtaaaaaatcaaacataattctgtcataaaatactaagtgccaagtactgaaatattactaaagttcagagaataatgtcttcaaaaaaacatagccaaatacacggcttaaaataaaatataataataatctaaatctatgaaggtggtggtgaaaggtcgaagcaccaacgaagataactcacatcctcctcaagctgagtgatgcaggtatccattccttcatagcaagcatcaatggcatcgatacgaccatccaaggaatcaaagtgttcaccaacataggtgcggaggccgtcgtactccgaaagaacttcatgcatgaaagctgaggagtcatc

SEQ ID NO: 226564 - DNA, 427 bp, Glycine max
  unsure (1)..(427): unsure at all n locations
gctgagtcctcttaccacggtcaganctantattttgtttaacatggaaaaaaaattagtatacaatattnttaaaaacgcaaatttatataatctttttacgaaatacataatcttattgcaaaaaatttaaattattaagtttctacaaattaaaattacaattgggtcaagatgcttattagtgtcacatatgtgtgtgtttagtattagaggagtgaaatggtaacaataatgataaagcaataaaattaaaattaatttattttctctttttttcttataactttctacctttattaaaaaaatatcttatggaaataacaccctattttttataaggataatctctttcttactaaatatatacaagtaaaaaagtttgtcttgtgggaacaattgtctctaggggtgggtaaaaggacca

SEQ ID NO: 226565 - DNA, 407 bp, Glycine max
  unsure (1)..(407): unsure at all n locations
ctgcgccttttgtaagcatatatgtatttgactcaagcaccctacatatgcatgaatatcaaatttcaagtttctcttttgagaacattgttgagtgctggagtgtctatttcttttgagaacattctaagattttctgtttttgtgaatctcttgtgtcaacaattggtatcaaagcttatttgatcttgagggactgagtgagaaccttgagtgtcgagagaaaacataaaccaaaaacaaagttagagaacatccaacctgttttaagaatacccagttctgtaaatggcttccaacaatgttccactaatagcacctnctgtattctcatgaatgaactaggaaatcctggctacgaatatgagacgtcagttgaaagcttatcatctctgggagtggagaat

SEQ ID NO: 226566 - DNA, 426 bp, Glycine max
  unsure (1)..(426): unsure at all n locations
tgcaagctgctgcctctacatactgtgcccttttgcttacatctgncctttcttcccttgttgcagaagaagctgcctccatgaatggtatcttaaactctactgggtttacttcagggttacctgttttccgtccagagaaaagacaaaaacttgaaaaacaaatgcatgcttctgagtttaacagtactgatatggggagctctttttttctgggcactttacaacaaccatcagtagcaaatgtgccactgacacactcaatcagcttgcaacccataccacaacccaaccaatcacaagctgcatttgcttcaggtcccccacctcctcattcccccgtgaacccaccagcaaatcagtttgttcaatctactggattaatggttggggaattccttatggatatggatcaacaacctacca

SEQ ID NO: 226567 - DNA, 391 bp, Glycine max
atgactgccctcacgtactgtctcgtggggggtatgaactgcttgacaagaaacttatggaggagaagagcaagcgtggacatgaggaacattcgtgtactgaaagcccaacactcaacgtcgacccaccatccctagttgcaagacacttgaagtggaagatcgcccgcactaagcggcatggccaaatgacgtctgaagtggcacaagaaattgcagacaaaattgtcagttcatatatatttttggttactatcattggcaaataatgggtagctaacctagtcaaatgtgttttattcaaattcaacaattgtatatgcatgcaggattcattacaggaacaagcaacacaggggagttttgtctgcatgggcgacaggacatactc

SEQ ID NO: 226568 - DNA, 260 bp, Glycine max
ctttgttttctagtcgagtatctggctatattatgacattccggataattcagtatttctttattcgcatggtttgatcgaacaattatgaactacgttatatgactatgcggtttttatatttgatctattcatgcttcttgcttcatgaatgcgtcatattcttcactgcatgtcttgcgaacgattaatagtatatgattgccatatgacttgtacgcacttgggctttctgttgatgcccaagggggagagacata

SEQ ID NO: 226569 - DNA, 174 bp, Glycine max
cgagatgaaggaagtgaaaagggtgaacttcctgctattattcttttaccacagagtggtacctggagatatgtcgcgggggtcaggagaccttgaggacgtcaagcggcgtgctattgcccaaaaccaagcttgaccaatcccgagccaacccgggcataatccgtcaatgag

SEQ ID NO: 226570 - DNA, 365 bp, Glycine max
gttacaacaaaattccaatgatcaactaaaagtatattctaaaaatgtaacatgtagtttgtgcaatgactacacaaattcatcacatcaaatcaatgattccattaggtgttcttggatttcttggtatggacagcagggcaaggatttcatctagagaatgcccaaaagttacattcaactaaatcagatctttggtactaaattatgaatagatggaaaaacattttgctaacatcatcatcgtgtgtgtgctccatacaattgtgttcaacacaaccatcacctacgtctattgtgtgacagtaaaatgatttattataaatttgtaaccttcggtgcgcatacaaattattttccttaag

SEQ ID NO: 226571 - DNA, 415 bp, Glycine max
  unsure (1)..(415): unsure at all n locations
acaaaaactcagctcatcttcattcagaagaaggatgagaaacatgaatgattagaagaagatgatgattgcagtttcttcgtaaaaagattcaacaaattcctaagaaacaaaggaaaacacagaatgatcaaacttccaatcaaagaaaagaagagaagattcatcttctgttcaaaagtgttatgaatgtaatcaaccaggacatccgagagttgattgctcgggtttcaagaaaagaatggaaagatctgaaaggagaaccttcaatgataaaagagaaaagaaagcttacatcacttgggaagacaacgatatggattcatcctaagactcagaatatgaagtcgtgaatctaagtcttatggcanagaattatgaacacgatgaagaggtgtcatcttctgacaataac

SEQ ID NO: 226572 - DNA, 447 bp, Glycine max
  unsure (1)..(447): unsure at all n locations
cgcgactcttggcaatttctgtagaactagtcacttattaattgtgactctngaaagaatcttcagaaacaagtcacttgaagaattgtgacttttggaaatgtattttttgaaatcagtcattggtaatcattatcattaaggtgtaatcgattacacatcaacatatatgactctttattttgaattctgaaaattaaaacgtttagaagctctggtaatcgattacaagtattgtataatcgattactcaagtttaaaatactttaaaattgtttaaacataagttataactctcgaaatttgaaatcttaacgttntaaaacactagtaatcgattactaccttctggtaatcgattaccagagagtaaaactctttggtaatgaatttgtgaaaacttcctgtgttactcaatattttgaaaactttttttggacctatctt

SEQ ID NO: 226573 - DNA, 365 bp, Glycine max
accttagccaatatggtcttccaagtgggaactattatatggcctttcgagagggaactgttagaccaattaagttcaaccttatccaaaatggtcttttggaaggaaattgttagatggattgagtttaaccttagttgaaatggtcttgtccagagggaactgtcgggtaatcaaaaaagaaatcctccctgtccaaagagagtattctaaaggatgttattgagacaaaaaatagctaatgtgaatgtcttcattgataaggtttgatcaagtgttcctcattagaacctttctggaaaaaccctttcacatttttatagggataaaacactgagaaagataaagaatacattacccttaca

SEQ ID NO: 226574 - DNA, 470 bp, Glycine max
  unsure (1)..(470): unsure at all n locations
tgtctctgagccagcggntctaggaagggcgntgtgttgtgttcccaatctaagacaagggcccaatatgtggaaaaaatggctgtagatattgagaatatccaggccatcactttcaatcccattccttgatgaagagtataagctgtccttatgcaaacagctgcaatagtgaggaaatacttcaacgcgttatatccttgcattttatctttctcctcgaacagtcgccttaggcactaacaagagaaagaagattattcggcagtctcagtcatttcttaatcaaaagcatgcatatttactttcttaatcaggggcatgtttggataaacatgataagaatttaccatataagtgcttttgattcagcacacttattttgataaacttcacagcgaaactttttgaaatgagcttataagactctataagacggtcataaggcactttcattancataataactc

SEQ ID NO: 226575 - DNA, 252 bp, Glycine max
agacccccaccacggagacgcaccggaagaacaaggaaaacaggcgaaaggaggcaccatccactagggaatacaccatggaagaaagaaccccacccaccagagagcgccttggaaacaagcctaaaaaggaaaccccagttggcgaaaaaagaaaaagaaggggagcacgaaaccaaggaggaaaaaagggagagaagcgaacctcgaagcagcctcacaagaaccccattcatacaaagcacaacaagc

SEQ ID NO: 226576 - DNA, 462 bp, Glycine max
  unsure (1)..(462): unsure at all n locations
ntatgaacccctttntcatactagatcaagctgaaatattcttctttcacaagcaatccactacactcaatgcaaacaaaacaaaattaaaaataaatgactgggttgcctcctagcaagcgcttgtttaacataattagcttgacgcatagctttgttatcctggattaatcttggttctctccttcagaaccttctcatcaaactccttcacctgtaagcagacattttggtctgacaaatgtttttcttcatcaaacaagtcgaagctgattttctgattatcaatgcctaactccagctntttctttcccatgtctactacacaacttgtagtggacatgaaagggtgtcccaaaattatgggaatttcaagatcctcatctatgtccatcactacaaaatcagctgggaaaatgaaatggttgactctaaccaaaacatcttcaataacatcgcggg

SEQ ID NO: 226577 - DNA, 417 bp, Glycine max
agcttcatgatgaatcaagagcgattctttatgttttgatgataaccaagatgataacaaatgatgatgacaaaggtgatgacaataagctcaaaggtcaatcaaagaatgagttcaagatattcaagatagaatcaagaacacttcaagtttcaaaaggaaagttgatttcaagaatcaagaatcaagattcaagagatcaagatttcaagaattaagattcaagagatcaagactcacgatagattcaagaatcaagagaaggcttaatcaagggaagtatgaaaaggttttctcaaaaattgagtagcacatggatttttctcaaaacatgtctaccaaagaagttttactctctggtaatcgattatcaggttgttgaattcgataccagtagcaaaatggatttgaaaagtt

SEQ ID NO: 226578 - DNA, 312 bp, Glycine max
tgaacaatgttccttgtggatcatcgtacaatgattgtgtttaatcgagcttcgattgcctggagaagagctggctaggaagtgatgaatccgttcccgaacatccactgaaaccaactgagagcgggtccatcgaggtagaaggaagacaccataattagatcttcttctggggttccctggtagtcaaaaaactgtgtaattttgaagatccaccctaatggatcatggccgtcaaaccgaggcacgtcgagcttgaccgacaaccgtggaagtgaaagaggctggttttgtgctggagtggtggaagtc

SEQ ID NO: 226579 - DNA, 287 bp, Glycine max
ttttattatggttaggagagacactgaataggcagggagaggatactctgaagataggagggctgcctctaacatggacccttatgcggccacttccatgattgctgagacaactattgcttggaaaccataagcaacgtcaaaacaatcacatggtgccttccgcatagcattgttgtttagatggtcaatttgtttttctatgtttttgtgtgcatactagttgtgactacctcgcctgttgaagggattgtttgttggggggactcatgattaccaagcgagga

SEQ ID NO: 226580 - DNA, 402 bp, Glycine max
cccatatactgtaagagtcatggattaatgcatattttttctatgacagataacttacgattatcttcgatttagcctagggttttggaaaccctaacacaatcttcaactttgctaaaggattaaaaagtgggcacagtatcaacccccgatataattttaaataattgtaattccttaaaatactcctgattttctaaattaagacactatggttatacaacaaagctctttaattatttattaggtctgtaagaaattaagacaataaagggatatatttggaacatgaagttatcttttagaacaattgttaaaaaaatgttcacacgtgtatgtttatatttgctaaagtgtagattattatatgaaaagttaaagttttatctcacacgagtgttg

SEQ ID NO: 226581 - DNA, 360 bp, Glycine max
tctttaatgcctgaaaaacaaaagaaaacctgagggggttcaactatgcatagggaattgaagggttaaaattgtaatcttatagcgccccttcattaacaatcgccgtaaaacaaatacttcattaattgtgcaaattcaaatgattcaaaaatatttattctgtccttttaaagacctaaaaataatcaacatagttgaaaaaattacactatgaaaacattaattttacttgacaagttgaatattgctcctacaaatcggtgggtttaacaaaaaaagatacaacacacctatctcaaaaaaattttggattaaaattacccaaacttctatcctattatttagccccaaattctt

SEQ ID NO: 226582 - DNA, 331 bp, Glycine max
aacttacctacagagatagaacagcaaaaggaaaacaaagttagtactcagaacaccacattggtcacgacatttggacactcatttaaagtgagaattgagacaaaatgatgccaccatttcagggcattaattgaaatcaaagtttgtgttctttcacggtagaattggggccagtagccagttaactatataaatgtaatcatccctatcttagtcaactatataacgtgagcactgagcacattacaagtcaattcagaagcacaactatttgaatagactattggtattataacaatacatttaaggacggttgtgagctcataac

SEQ ID NO: 226583 - DNA, 423 bp, Glycine max
  unsure (1)..(423): unsure at all n locations
agctntacgagaaaccgataaaactaatgtattttttattcaanaatcaatcgagggagcttcgccaagtgtccccatcgaaattgaaaaacctttattcaaacctttcaaagttagtgagaaggctaaacggaaaattagggaacttggaaaaactaaatccttaactgagggcgtaggtgacaatcatagtgaattactaaacaagattggtagtttacttatggtcattccagatactccccaagccttggaaaatacttctaaaatggtaacaagaagtaccttcaaattaattaatgttataaatgaagatagtgaccaaaactcagataacacaactgagataggatcagcgtcagaatagaatataaatccaattaattccacaaactgaaaacaccctccaattatataccaacg

SEQ ID NO: 226584 - DNA, 413 bp, Glycine max
tgcgaaacaagtggggaccactaggggtacatagaatgattttgtttattcgatttcgggaacataccagttgaagaccgaagaacggtgaagaatcttcacagaatcgctcacgaaaacatctcggaagcgcctcggcttggattttattcacggaaacaatttttctcactaatttcaagagaatcctaaataccagaagggctgaacgaaattactctgccctctttcccctatttataggggaaaagagggaggtggttgccgcccagctcgcccaggcgagctgggttgcttccatcagaagacaccgccttctgttggaacgccctggaaggtccaagtgggtctggttggctatttgcacacctcttttactcaacacaccccccttttgctttttgctgattctt

SEQ ID NO: 226585 - DNA, 449 bp, Glycine max
  unsure (1)..(449): unsure at all n locations
tagagatgtgagtctctaattgatggcaacgggttcgatantgtaagctcatggngctgcttctgcgaatgacttcagaaccttgatggttgtttaaggaaggtgggttagagcaatatttgcggatggtggaggaggacgggcttcatgtggcttggcgataagcaattacaagatgaatttgatgatgcattgcaatggtcactaacatggagcttttctcgtattaatggtggtgtttcaaggggtatttaaaagcaccaaaagaatgttagacaaaggacatggaagtccaagaggggcgcaattgaattgtaaaaaacatttctcttataaagccattcaatcatgtcacaaaaatttcaataatttaattgatattgctcgtcaagatgtataagatggcatatatgtagtgctaacatgaatctaaccgtcaacgttatatt

SEQ ID NO: 226586 - DNA, 372 bp, Glycine max
acacaagagcacgaattattagagaaatatatttctatgcatcagcttgtttggtaaaaagaaccaacatttctacctactgctggcattttatttaccttgcattttatagttcttaacataaaaatctagtttaaattctgttcgaaattatcactcatacatgtcctctcaataatgctttgattctgaacttaaatcaggctaacattagttccctgtgttcgatactcggattcatccggtttaaattctaaatacttgatgattcggggactttctggtaacccccattgaaattccttgaacattatgaacaaaagtatggcttgggagtaacaggggtctctcactcttaaccagtgcttgtgt

SEQ ID NO: 226587 - DNA, 385 bp, Glycine max
agacaaaaacactgtgcaggcccactttttggcgtctttgcttcattaccttcctcagccacttccctatggcaagctcatccaactcaccacggattgaaatttaatccacctgtggctcttggtttccttttcttttaccgattggttaagtgtcgaaacttaatatagaagtttaaaaagcgtgcagaaaaaacagtagttactcaagtgagaacaaaaacaggcacgggcatctattattattgacttattgattatacgaaaatagaaaagttaaaggcgaatgattcagagaaaacattcttaacaacgacacaagatgtctcatatttattaaataaaatactactactcagattaaatattaattgattgaaacgtt

SEQ ID NO: 226588 - DNA, 388 bp, Glycine max
  unsure (1)..(388): unsure at all n locations
tagaaactaagcttgcctgtccgatgcagcagnaaggagggcccgagctatgtcgtgatttggttaccaacctgggatgggtttaggcaaagacaacggcggcataactagcctgataaatgccaaaggaaatcatgggaagtatgggttaggctataagcccactcaggcagatataaagaaaaacataccgggaaggaagagcggtagtcaaaactcgcggttgagacaagaatgtgaaggaagcccaccctgccacataagtaggagctttataagcgcgggtctgggggacgaaggtcagtggtcgcatatacgaagatgggttcgagtcattggattggacaccggccctctgatttcactgggaaatgcgagtggaaacccc

SEQ ID NO: 226589 - DNA, 429 bp, Glycine max
  unsure (1)..(429): unsure at all n locations
tcctcgggccattcctgcaaggcaaacattttttagttatttttaccaatgggacactactcttaaagcaaaaatggcatataacctcctcccataaatacaaacatcaatgtaaatttagagcaagcttatgcgcatatttcattacgaacgttctcttgcccaagacattctattaaccgaaaaaaatgcacccatatacaatcaaggcagctttgttacctagattatttacacgtacttccaaggtgtatttgttacttacatcacacacatctccttggctaaattcacatacatgcatactccaagcattgtggggtaccaaaaattgcacatgtgcacatcttggtatttctaatacctatacatacacaaacttcatgatgaatcttgactatctacacaatanagtgctacatttcatgc

SEQ ID NO: 226590 - DNA, 284 bp, Glycine max
tgtgaaacgaccaataacaggacgaaggtccaattctgaggaaccctctgatgagcactccgacataacattaaaatggtcaatgccaagaacaagtacttagagagaagcattctccatacagatggacttcaaggaatctttcgagttctcaacacttgacagatgttttgagacaaccttcctgatcataattataagcatttcatacggaaagaacatctctgcttcttaatacgaataacaccaaaacacttaacctcaatgttagtaatcacataaac

SEQ ID NO: 226591 - DNA, 326 bp, Glycine max
  unsure (1)..(326): unsure at all n locations
tttcctaactagatgatttaaatgatgcatattaatgtgtgtagctgatgtgtcattattttctcctatttcttaaccctttttatcatcactttaattactaattagccttaattgtcaaattaattatgcagttttatcatttgggcctacttgactaattttgngtttttaatttaattctaggataattataagcaattgggcttggatccgaaattgggctgaaccggcttggacttgaagagaatagacaactttattctatttcatttttgggcttggacttaaaacatattcgtaagctttggggctgaggaccttta

SEQ ID NO: 226592 - DNA, 291 bp, Glycine max
agaacactgcataaaccactgctacgggcatattatgactcgggtgaccttcgttaccgagataaccaatgcctacagttaggcttccatcttctaacttcaaaagacgcacttgagtcagttgctacctgatgcactcatgtaatgactatggactaatacttggcgctcaaccgcatgtagtaggaagccatcatctcaatgacactactgccttgaccatgtagcttgtatccagacgcttgtccactggcacaagatctaatactgttttccaggcatctgagtcct

SEQ ID NO: 226593 - DNA, 426 bp, Glycine max
actcagcttgaaagaattgattgaaaagtgaaaagtgattgaatgcttatcccaccttgcttttatagactcttcatgtctggccaagaggatcatttaaaagagttataacttttagaaaaacttaaaaccaatttgaaaaagtcaaaaacctttttgaagagttacatcttttgattgattagaaacagtcactggtaatcgattaccaaattagtgtaatcgattacacaaagcttctgtgtgaaaggatgtgactcttcacttttgaatttgaatttcaatgttcaaaggcactggtaatcgattaccaaaacacttgaatcaattacaactttttgaaaataattttaacatcgtaaattcaatttgaaaactttttcagaacaatattgctactggtaatcgattcaacaatttggtaat

SEQ ID NO: 226594 - DNA, 429 bp, Glycine max
  unsure (1)..(429): unsure at all n locations
agcttgagctttccactcttgtatcagcattttgtatataagagctctgctggaattgttagtaactattttgactatgtattatattggcaataatacactacgcattagctaaagattttactctgtgatgcatttaaatagtaaagtagcaaactaatttcctatgcatattggttattctttcacagcctgagaatacttctggaactatcaaagaacagcttgcagctatagcaccagtacttgaacagttatggcaacaaaaagaagaaagaattaaggagttctcagatgtacagtcacagatccaacaaatatgtggagagatagncgggaacttgaaccttaatgatgtttcacctgcagttgatgagtctgatttgccctgaagaagtggatgaatatcaatcgagctccagaacttaa

SEQ ID NO: 226595 - DNA, 400 bp, Glycine max
  unsure (1)..(400): unsure at all n locations
ttcaattctagacatagggtttgacaaatatcctttctttcttttgaattgatattttcaatatatttaaaaatatcttaattcacaatacatttatgtctgaaaaaaaatatcttcctaagatttgtcaaagtttaatgaaaaataaataaagtccacaatcatgttgatcttgtttataaaaaataacaagaaagcaaactaagaatttgcgtaaatttttatgttgaacacttttgtatgaaaaatagacgtgcatttaatgcagacatcaaatgctctaacggattaagacttcagacaaagattagagtgaaaaaatccaacggttgtgagacaacacataaaaaaagctttgaagaaacaaaaaaaactatctacgcacnatattctttcttat

SEQ ID NO: 226596 - DNA, 420 bp, Glycine max
  unsure (1)..(420): unsure at all n locations
ntagactaaataaaataactaagaagcagaatctttatatttagcttcatttcatcatcattaaaagttaatcagtggtgcaactagctaccccctattaaaataattgaaaaccattggcggatccaaaagggggccaggacatccctcttccaaaattttaactagttaaagtagtctcaaaggctcttaagtgaaaaatatcttgctaaatacatcctaatctaaaacacttaagcttattttgtactaactcgtatttattctcaaaattatgtactaactttaatcattcactaattaacataatgctttaactttaggtttgaattatatataaatttagagtttaaaaagtcaaataagttttgaattcctttttcccttcaagtacatagacaacanaactacatgtgatct

SEQ ID NO: 226597 - DNA, 405 bp, Glycine max
  unsure (1)..(405): unsure at all n locations
catgcaactgataatgagagnactttaaatatttgctgacaaggaaaacttaagtattcaattggtcacgcatacatatatacttatatatatatatatacacaatgtgtcaatgtgaaaactacaccaactcattcttggtgcaaaaatagtatatacactgttaaccaaagacccttttgtttattccttttgcctttaataaagtgggcgtgccctcccaaattaaaaagataaagttatcatatggtagcaaaatacccttacaaggcaaaaaagcagcatggaaacaaccatataaaaaagaagcatgccgacggcaaaatcaacgtgtgacagaatcaagagagtgacacattattatgaagtcaaaaagatcaaccagcctgcagaaaaaaatggagc

SEQ ID NO: 226598 - DNA, 454 bp, Glycine max
ctataaaactaagcttctattctttctacctatctagaggccctgtctttttttcaactttcttttcttattccctatcaaatgaagtaaaccaagttttgccaattttaaatgtctccttgttccctaaatcattcagatttcaattatactttagtttatgttatttttttttccaaacaaaggatttggtatcaagcattttcagaaattgcactgcaaactacgctggacacaacaaatcctaccatcgtagctacgtatcatatatttatctccatcttaataggtgtttcaaaacctattaaaaatttaaacttgttgatgatggagtgagtagggtacagagttaatttaccatctatgcttggactctaagtcacattaaatggaaaatacttattctacatctatgcttggactcttaggtcaaaaatactaagccttatatttt

SEQ ID NO: 226599 - DNA, 383 bp, Glycine max
tcctagaatacaccatgttccttctttttgagaccttacttgggttcaccccttgtgaggatacaaactgagttttctttgaaaaggagatttgtttgttatatgacaagtcggtcttatctgtagtatgcttttgcatactgagcatgcaattaagatcactattccctttgtttgattttccaaacaaatctttaaggtaggaaagctcagtttgcaaaaatctgtaatcatccatgttaaaggaagtagaggtatcatcacaagtagtggcttacattttgaaacaagcttctcattttcttgcttcagtttgttcagctcttctcgtgtaaagtcaattattgacatgcaatcttagttcacttttcacatttttgttc

SEQ ID NO: 226600 - DNA, 355 bp, Glycine max
  unsure (1)..(355): unsure at all n locations
actgatcctgaaaattctgctgacatctctctgctcttgttttcatcaaaaactggtagtacattactactcttgcaacaagaaactgaggaaactgtaggcataactagaaagaaaatgagaaacacacactaagtcaaaatcaaaaacagcatttcaaatatctaagagaaaaagattacgatgcagggagatgaatcattcaccttccagttttgccttgaatctccacaccagccatacaaagattcctaggcagattaacccccgcacaacagncgatattatcacacatctgttcgtttttccaccatcatctgtataatttgaaaacacacaagccatgtatgctatt

SEQ ID NO: 226601 - DNA, 364 bp, Glycine max
gaagtccaatcacgtacattgcaaaagacatgagattctctctcatgtgaacacacaggcatgatatttcctctcactaatgacaaatgcatgataccaaaggctacttcaagcgaatgaatcactaccaaatgctacttctctcatgttggaacttctttctcatatcacacctcttactttcttcttcattcttcttttgctattatggagctcgtttctttctctcacatctcaccattttcatacttcatacaatctcttgctgtttcttgtgaagccatggcacacacacaaccaggacctattgatggcttgtagttacacttacaacacaatcatatcttcaataaagtgtgggaac

SEQ ID NO: 226602 - DNA, 289 bp, Glycine max
tattcaccgcaaaaacacccaaaccgcagccaactggcgggcacacctaaagccgagcccaaactttagaagaaccacaaaaaagacggaaccacacacccggggaggcagatggaacgaaccaccaacatacaaaccacatatcccaaaacttataccacggaagaaggctaactgctacggtaaaaacaccccaccaggaaaactctatcaccgacacccacgggggaccaaaaaaagaacttccacacaccccaagggctccaaagacctgagagaggacaacact

SEQ ID NO: 226603 - DNA, 189 bp, Glycine max
  unsure (1)..(189): unsure at all n locations
tatagatactaagcttctaaaatctgtacaagaatgaagctctgatgacacttgcttgacaagtggcctcagatatcttaagaagggggggggggggagggtcattctcccttccctccactttatacggccngcaaacgtatatccctgtatctccgcagagctcgctagcgatccatagatcttgcc

SEQ ID NO: 226604 - DNA, 340 bp, Glycine max
ataccttcatctcccctcaaccgaatcacgatgaatcatcggaacaaccaagaaaggtaaataataataaaactgtcaatcacggggtctcactatatcaagacaggatgaactgaattatttaaaaatgattttcgaactttacctttaattcaaagaatttaattattaaggaattgatgactcacacattcttttgaagaaagaatctctggctagcaaccctacatttgtataagacgttttacataatcaattacaaaatccggcatgctgctccaaccaataatactccaagacacagacgggattcggaatgggaaggtatcaccccagaaac

SEQ ID NO: 226605 - DNA, 440 bp, Glycine max
  unsure (1)..(440): unsure at all n locations
gctttacaattattatataaaacaaatgacacgcttcatattatattcaaacaatgacattnttctaaggaaaaacttaagatgaggatatattaggacaattatttctgctatgactatgttgccggtaaagtccacatttttttctacttgctcgttcattttcgtcctcgtccatctcagtatgaatgccagctgaaacgggacgaccctttgcagtcctctttctccttggatcaggaccccactgatctccttcatattcttgccacattgattcgtgtggcaataaaccaaaggagttgtcctagatgtgcaaaatatgttgtaaagtgaataacatcggcacatatgtcatgggatcaacattgacagatttacaggcagccatgacgtgagaacactgtaaatggttantctgacattcaccacantcacac

SEQ ID NO: 226606 - DNA, 347 bp, Glycine max
  unsure (1)..(347): unsure at all n locations
cgaatctnggatcaggagagagctttaatgactattattcttgancaagacttactttgagatcgataactatgtgattaagaagatagtacccttatcaaacaaaacaaaaagttatattgttaaatgtgtgacataaaaaccattcattatgttttcatttatacattttttgagatattgttgatttattatagtaaagtatatatacaacttagaattttatttctgtacctgcttttgctctaagacaaagttaagttcacatcaactaatcacattagatatttaatgtgattaacgttttttttttcttgcttcatgggaaaggaagaacacagaggatc

SEQ ID NO: 226607 - DNA, 306 bp, Glycine max
gcagcaacccccaacgagaagaaaaaattttcaaaggcggggcgacccacaacaaacgggggggagcaaatagcaaccccaaacaacgacaccgggcccccccgagcatacacgaagcaagatcgcctcaagaggaagcaacccaccccaccagcacgagcagggcggcaccaccccccccctcaccaaaaaaaggcaaaaagagggcgcaccaaataactcacaaccccccggccaagcacacaaaccgaagcgggcgaaagaaaaagcgaccgagaagcaacaccaacccgaggagggccacaa

SEQ ID NO: 226608 - DNA, 412 bp, Glycine max
tccaactattatctataagctaagaattatctgcttttgtttaacaacccctacaaataaggacccgcaactatgctccactcctataaataccaggttccattgaaccctcaacaaatctctcacacacttcaacacacaagcaacaagcatgtgcctctctttctccctctttcgctcatttgagcttatacttaagcatatagatgttttatctcttaactcatatacttacttgagcatcagaatcctttgttttgcaggtcccccctttcatcctcttgacaagggcacctctcaaagctgatgtgcgaagtccaagagcctacttcgggcacatccacccagacgtgtgtcgttagtcggtcaatatgactaacttttgtgaaaaaaactgttgtaaatttataca

SEQ ID NO: 226609 - DNA, 224 bp, Glycine max
acaagcgaacgaatcagcacaccaccatccagacacacataccgagcccgggaaccggacatgaacacaccaacaaaagaaggcctacacaacagacacatcgaaagccactccaacaagggacccacggaaagaacggcattcccctcagagagcaggacaaaacccgaccataacaagcagcaaaggcgccacaccaccggaaagaagagaggatgcccaac

SEQ ID NO: 226610 - DNA, 314 bp, Glycine max
  unsure (1)..(314): unsure at all n locations
actngtgcgcttactccagatacgaaatattgtaaaacatggaattctttgggcttatcgcagcgtgcaagcttagcgcaacaaaacaacatgtgcttgctaagcgaacacatgcacattgagctgctagcatatttagacaacaaacaacaacaaacatttgcacttaaatgaactaacacaaatattcatagagtcatgagcataaccaaaatcaagctaacatcaacacacaaaccatctaacacaattattaaacaagttacagaaaagaggagaaagacacataccacgtaacacaattattaaacaag

SEQ ID NO: 226611 - DNA, 361 bp, Glycine max
  unsure (1)..(361): unsure at all n locations
gggcgggccattcttggatggccttgatctcctcaaggtccacttggaccccatttctaccaactacaaaccctaagaaaactatattatctacacaaaaagtacacttctctatatttgcatagagggtgattctcctaaggactgaaagaacttgcctgagatgtcctaagtgatcatcgaggctcctattgtacactaaaatatcatcaaattaaacaactacaaatctacctatgaaattccttaagacatgatgcataagccttataaaggtgcttggtgcattagngagcccaaaaggcatcactagccattcatacaaccaaacttggcttgaaagcggctttcactcataccc

SEQ ID NO: 226612 - DNA, 346 bp, Glycine max
  unsure (1)..(346): unsure at all n locations
tanatgaattagataaatctattgtactgacattggtgcgcttagaggaaagtaacaaataacataaagcaaggccacgtaacgtaatggaatttctcctggacatagtctgttatacatgatggctgtcctgtgacgcgtgggactgacgctagtgccagcgaaccatacttgcgatccaaaactagtccacaatttcccatgtcatacgttatactcatacctttcctttcttttttaatataagggatcattggtttgtttgtccgaaaagagaactgctagaactcagagaaatggtccccttaaataaaaaatgcattcttatactttactttaatttaaa

SEQ ID NO: 226613 - DNA, 437 bp, Glycine max
  unsure (1)..(437): unsure at all n locations
gaccttaagtcacctgcggcatgcagcttgaagaaaagggttgttcctttatatattcattcaaattctttctataaaaagctatctataaattcttataaagttttgaaaagctctcaaaacactttgattatcttaagagaatgtactaagtgttgagattgtatatccgtttacaagagttagttattgagaaacacaaacaacaaatctttctgatttgtatagagccaccagtggcttggtagaacaaagaataccaggttgattcaagcttgaggtagagcttgatttgttagaactagaagtgactatgaaagaagacttgtaacctgtgataagttagtggaatttagtggtttgcaaagaactagacgtagtctcagtggcagaggcaaaccaatgtaatnttctgttgaaaagaggatggtactcat

SEQ ID NO: 226614 - DNA, 369 bp, Glycine max
  unsure (1)..(369): unsure at all n locations
gtaacccatggaagctcctaatatctcctacactttttggngngggccattcttggatggccttgattttcttagggtccacttggaccccatttctaccaaatacaaatcctgagaaaactatattatgtacacaaaaggtacacttctctttattggcatagagagtatttttcctaagaactgaaagaacttgccttagatgtcctaagtgattctaggctcctactatacactaaaatatcatgaaaataaacaactataaatctacatatgaaatcccttaagacatgatgcataagcctcgtaaagttgcttggtgcattagtgagaccaaaaggcatcactagccattcatacaaaccaaac

SEQ ID NO: 226615 - DNA, 337 bp, Glycine max
ttggtttctttcttgcacctacgttgctgagcttgattctttaacatcctaatagttaggtaatttttcagtggcatgtttaaacgatgctccacggaatgaaaaacctagtgcggggcaatgagtgaggctattttattattcatatatattaataaattgtgaagatctcaaccattaaaatttaattaggacaaaaaaatagctctctgctttatatacactcttaagcgggaatataaatgatccccttttaatgcatgcaaattgacattggcctaagcttcataatttgtatagaaaacaatcaatcaaaagaagtatttatgatccaata

SEQ ID NO: 226616 - DNA, 449 bp, Glycine max
  unsure (1)..(449): unsure at all n locations
ggacacttagaatctaagctanacctaaatttaagacatatataaccctctttaataaattacctagtagtctgctacttgttcatcttaattgtattttcttgggtccacaccaaaagaagtaagctacgaaaaggaagtatcttgagctaaatctagattatgtttcatccagcaatgagcggattgtggaaaatgatgatggagacaatgaagatttggatgtggacaacttggatggggatgttccaaagatgatgaagataatggaccaaatgatgatcaaatggaggacaaattttttaattaacacaacattttagatatgataaattatatatcttgactttgacctgtatgtttgagtttcaaaaacttgatattctggtttggtgttgtaatttaaagtgttacagcatgagtatgatgaccatttatggattatgaat

SEQ ID NO: 226617 - DNA, 258 bp, Glycine max
gagtctatctgcataactctagactacaacttcgactgcgtacattacctataactagcctttctaccctttgtaggtctaaacgcaaactctagacccatgaacttagctcatggtgaaaaccaaggctagaacactacactttgaggaagcccacagcccgcgaaaagtcaattcaaacttcgatacaaatttaccccaaataaggactgaaactccttccgtacctgcctaaatcagaaaatattacaaacatca

SEQ ID NO: 226618 - DNA, 436 bp, Glycine max
actaagcttaacactcgtttgatgggtgcaccatctcttatgctgtgtgcttgtaacaaagccccattatggaatggacatccatcaactaccatagaatggacttaatttagtttattgggaccgataataatagtcgtttacaacacttgtcataaacttgtaaaaataaatgtaataaattttgtagggagataattacattattttaaaaattaatatataagtatattttccttcaattatacattgtcgtatatgataaaattgttgattttaataataattattttaaaatcatattgataatattttctattaatcaataatgttaatacaaatatatatttacttaacttacatttaaaagaatttttaaatgacctatagttctaccttttaaccaaatacagtctttttattaaaatttatgcat

SEQ ID NO: 226619 - DNA, 388 bp, Glycine max
  unsure (1)..(388): unsure at all n locations
agaggttatctcttttatcttagtgagagtgattctcctaaattcttgagtgattcaagaacaccctggctgtatcaaaggactttcacaacctttgtgtgttgccctcgccggaaagagtgattctttccttcctttcatcttcaaccttggtctttcaaaccataattccagaaaatccacttctgcccagaattatctcgtggccataactcccgtttaacgcactcaaattaagtgattcttgagcctaaattgaatttcaagatgagacctctcacctcattttggaatcacctcatttgaagccctgtagcttgagttgttgccatttctaaatttctgtccagccaccacttaacctacgttntctcatctcattattcca

SEQ ID NO: 226620 - DNA, 425 bp, Glycine max
  unsure (1)..(425): unsure at all n locations
agcttngatgtttgagttgaatgcattaatggtatatagaccaaaatcaagaaattaggtacatatagagctacatacgtcttggaattgatacatacaaacatttgtgggccatttcatacaccttcatgaaatggtcaacacatatttatatcattcatagatgattactccagatatgcatacttgtttcttatacatgtaaagccacaatctttgggtgtgttcaaaacatttaaagttgatgatgaatattatggcagacatgacggttcaggtgaacaacgtctggggccttttgcaagtacctagaggaacgtggaatcgtcctacagtacaccatgcccggggtcacctagcatgaatggtgtggcttaaagacataacagaactcttaaggatattggaagaagcatgatttgtca

SEQ ID NO: 226621 - DNA, 460 bp, Glycine max
  unsure (1)..(460): unsure at all n locations
actaagctgctgctgggagagtttaatgtgagaatgaaaatgttttttaggttaaagagaaattttgaccatgaaggggcaattgtttttttaatttaccaaacgggaacaatttttgaattatttaccaaatttcataagtcatatgaaatgctactaccattgtaaatacaaaagttgtatattttttagacttttattctttaataaagtcgtatagtcatcatgacttttcctatatttgtttattgaaaaacatacaactttaaagtcatgtcttgtcctataacttcaaagtcgagtgttgcctatgactataaaattatgcaattatttattttctattttctatttttgcaacttattttggttctaatattatgaattattatctgcaagttttttttcctaantattatgaatattgctgggacatattatcttctatgggtttgttata

SEQ ID NO: 226622 - DNA, 384 bp, Glycine max
  unsure (1)..(384): unsure at all n locations
aatattacatgtatttgggattgaaagtcatctgcttgctatgatctatacctacatttccattcttctgtatttaggagtcgttggttatatttgtaagggggagtgaactcatttaatccctaagattgtaagctatgactttgcaagtcatcactttggttcttgactcttgtaaaatgtcattcacttttgtctttaatgtcaatgaanaatgtagttaaaacaactcaagtgaatgatgttttgccaagtcaagagggacctatgaagcaccaacaccgacacggacactggacacgacacggacacgtggacaacttgtatgttcaaaatatagaaacgtatacgggtgtcgtgtctgacactgacacagacgcgtgt

SEQ ID NO: 226623 - DNA, 236 bp, Glycine max
aaaaaggggagacaacccttgcgtatctccatgggattcgggacgaacgcgccaagcacgcctgctgcgcctagcctgttcatcgcaactgataaaaactatcaaatttctgacgatcgcgctaagcagaccatgtcacgctaagcgcattcatcctggctgatgaaccataacgatgcagacgctaagagtagttcaagcgctaagctcagcttgctgagctaagcgccacttag

SEQ ID NO: 226624 - DNA, 428 bp, Glycine max
  unsure (1)..(428): unsure at all n locations
tgaagaaattnttagaggaagaacaagtcatcaagtgtatgattatccaattctcctcaagagaaagaagaacttagagaggaagggagatgagtatgataagaatgggaggaaagggaggctgttacgcataagatttgggaaagaaaggatagttgctatttgcatcttgcttcttatacaaacaccttattttcccttcttctttttataaaccgtgcgcatatacacggatccaagaacttagttcaaactcatgtaaacataccaaacattagaaacataacaatttacaattattattatctccaaagaatataattaaaatttaattcctcttctgttcaaattaatcaaacgctgaaatcatactattgggaaaatcacgatgttacacacgctattgcaggaaattcgaacgttaatga

SEQ ID NO: 226625 - DNA, 347 bp, Glycine max
  unsure (1)..(347): unsure at all n locations
cccnaagaccacgacacgacagacagagggggaactcttattttattacaggnacaacctggcgcgcgcaatatagcacattggattaagacgtcaacatattcctatgttatgataacctaactgtcttttgcagagccggatccaagaccactttccgagcgcgcaccagagcgacaccgatgatgcgtacgacgagatgtcccctcgtgcctcctgcgggctgaccatgaaggctcatatgaagggaaatacaggagccgcgtaccgggcacgttgagatgctttgacagacacagatgtgngccgcgtgccttacagtgaccatcgacgggtcacggggtttg

SEQ ID NO: 226626 - DNA, 406 bp, Glycine max
  unsure (1)..(406): unsure at all n locations
tgtaggattatggggtacccatcacatgtggtactatgttggtttcgggcgaaggcgcacaacaagttttccacatccacagagcgcgcataaacccaccatcccctgttgcccacctncaactgagctcacgtactcccacgtagcccatatcctcgtttctctcaacaccgggtccccatcaatcctaccaagctttcccaacatcaaagcaaaacgacattcaggacagcacaagctatcacagccaagctaaatagagcagatgcagaaaactctgccaaaacaccaactcaatcacagcttttctcacttacagaccccagtagctattgcttggttacggttcattaaccgctggatcgactccacaatttactggaagtcgttagtacataagcttaca

SEQ ID NO: 226627 - DNA, 344 bp, Glycine max
  unsure (1)..(344): unsure at all n locations
ntcataagtgaaatcagatgcagccatctccctattatttctctcacgaggnggaggttgagccatgttctcagtataaaaattagtagtggaatgctcacaatcagaatattcaaaatcaccctcaacaaaatgctcaaaatgcttaaaatgcacagaatgaccaggatgcatactatgcctaactaatctatgaaaggttctatctatttcangatcaaagggttgtaaatcacctggattgcccctagtcatgcactatatgtagcaaataatgtgtttctcaacaagcacctaacaagggggtaaaactacaactatactcaaatgatattcaaatgagc

SEQ ID NO: 226628 - DNA, 406 bp, Glycine max
  unsure (1)..(406): unsure at all n locations
gcatgatgcacaattaagtttttctcccaannnattncttctaaatttatcggggtcaacttggtaacttgttgaaattaaaagaggggtggatatatttcaccgctgataacaattttaaatttaagaagcttgacataatacatttaatgcccaatgctcgattaaaaagcctatagtctggaaattatgtatgtagaataaaaaattgttgtctaaaagctttttattttaaaatttcccaaaattttagcgctgaattataaaaagaatttcaacttcgtaatgaatttactaactaatttaggatgtaattgataagttttagaagacaatttttattttattttaaagtttttattttaaccttatcaatattaaatttattttcttaatcttataatta

SEQ ID NO: 226629 - DNA, 404 bp, Glycine max
  unsure (1)..(404): unsure at all n locations
ctaagcanaaagatctttcaaacattcaaacggggattgttaactcagacacagttcatttcgtagtagacaatcatgtcattagttaaactttagacatggttcacctaagattttcatccttcctaacaagctaaagtacctagatgctttaattntattactttttttccttcctttttccctacaacttttcccatatttggttgttggtgttgagatggagtctgaaatcggtcgtacattaatttgatctagacttgcgtcaatagttaaagaccccaccttcaccattaacatcacgcaaagccggatcgtgcggctttgggtggatcagtgttcttttgtcgtccttcttttttccaagtgttccaagatctgggtgactgaatggttactatcgc

SEQ ID NO: 226630 - DNA, 175 bp, Glycine max
cctttcccaccaacccacgaatgaagaaaacaaactatgcactcattagcgacaattccacctcccaccaacaaaatgtaaaacaaaccccaagtggaccatacacaggccaatgaccattccaaaatgaaaaactaaccccgctgaaaaagcccacgcaaaaactgtcgctaca

SEQ ID NO: 226631 - DNA, 333 bp, Glycine max
  unsure (1)..(333): unsure at all n locations
ttctgcctagatgaatagaatccaaatctataaagtaataactctctatctttcctcctttntcattttaatacttttcaggagctaaagagagagagagcaaaagcatcccttgctatcaattcacttcaagaaaagatggaagagaaactgaagacagaacttgaacaaaaggtgctcatttagtattntgttgattttacaagtactgttttccctctttctctacatgtctgctgttactgttatcagttactatataatacttgttaaataaaatgtatctttggtaattgcanggaaatgaagcagaattgaagttgaaacaagctc

SEQ ID NO: 226632 - DNA, 100 bp, Glycine max
aaacaccaaaacaaactactccccccccaaaacaacccccccgaacgccgaacacccaaaacgaccaacaaccccccaaagcaaaccccccgaaaaacaa

SEQ ID NO: 226633 - DNA, 420 bp, Glycine max
ctcgcaacagagccactaactcatctcgctcattagtggacacacaagtgctgatcttgacttcccttttctcttcactggtgccgaagttaacaacctcgatctcctcttgatgcggctttatctctctttcttcctgttccactattcttctcatatccggcggtgatgtgccattattttctgctatttcttaaccctttttgtaccatactaagtactgattaatcttaattgtcacactaattaggcagctatattattcgggcccattcagctaatttcatgcttttaatctaattctacgaattaatgaagcattgggcttgaatccagaattgggcttggacttgaagaggccagactattttattctataaaattctatcttatctagatattatctacattgtatctcat

SEQ ID NO: 226634 - DNA, 443 bp, Glycine max
  unsure (1)..(443): unsure at all n locations
tactaagctaagctacatggaagcctangaattaatgctcagnactgctgttatgtaagaggctaacgtaagaaaaagcttgtaacacaaattttacgttatcattgacaaatacttgaaaattaaatatcatggctggctttaattaattaaacaatatttgaataaaatacctacttccctttctttatgtgaaaggtgcacattacgtgaactcattgccaggccctcattatcaggtgttatttcagcacctatcacttttatggaaaaatcaagatctcaaacctacaaagaatcaatcagtcagtctacgaggaacaacaccaaatagatctggtactaatagacatcanatagaaatgtaagagttagtggaaataatagccgcaatgataacagaatgcatagcatggaaagagagagaaagaccgagtagaaaa

SEQ ID NO: 226635 - DNA, 372 bp, Glycine max
tcgtgagtgcgggttaaggcgagaaagacaagtcgcctttatatgtgatgaagactccccgaggaggtcgaatttggtgcagccatgccctcttggcttccagctagggaactggcgggtgaaggaatgccttgaagtttacgcgacaagcataatgtaactttttagcttcaaaccctacggttgggcctaggctttagggtttccttttgttatggtgttatgtctttttttcttgaaagttataatataaagatcttacttcatctgttcttgcgcctccacccattctcattcatttgcatgtttattttcttgttacgcttaaacaatgcagatccaacgactagtcccacgaaggtactaataccg

SEQ ID NO: 226636 - DNA, 322 bp, Glycine max
  unsure (1)..(322): unsure at all n locations
aagatcctcgnaaggaaagacggttagaggttctacacacaaaaacaattggtgttaatattgaagatgatgattcaaccgttgatacttgtctcaatcctttctttggacaaatgccgactattcgccaaccggagaaaaaataagctgaccacgcccttgaaaatcataatgatcatgatgaaggagaattaattaacatcgcataatgcaatttatttatatttacttgctttgataattgcaattacacaacttaatatagtttccacacattatttaattaatggtggtttttaacatgctcatggctacaccaacc

SEQ ID NO: 226637 - DNA, 137 bp, Glycine max
ctctccagacatcttcttggagatcacctcggtcagatcatggaaaagcgttctgtgaagttgcataccaccatctgagaagatccacctgttaatgaatggtgggcaccgtttttacagaggcatctacatgtacc

SEQ ID NO: 226638 - DNA, 391 bp, Glycine max
  unsure (1)..(391): unsure at all n locations
agcttttcgcanagcttacggtgaaattctgttcctatccatggcagaagnctccacagaggccattgcctccctcgcccagtattatgatcagctgttgagatgcttcacctttggggacttccagttatcacccatggtggaagaatttgaagaaatcctatgatgtcctctagggggaaggagaccatacctcttctcagggttttatccctcattagctagaatttctaagatagtccatatttcggcgcaggaattagaccgcagaaagtaagtcaaaaatggggtggttggagtaccgagaaaatatttggaggcaaaagcaagaatcttggcagggtaaggtgaatgggccccgttcatagacattctcccactgttgaccttc

SEQ ID NO: 226639 - DNA, 405 bp, Glycine max
  unsure (1)..(405): unsure at all n locations
acgcatcaacaagaatcaagccaaggctattgtgcaagcaatcaatggggcaaaacacaccaaatgattatgatgatggatggctcacattctcacaaaggtaaactcatcactttcaaattgagctttcaaaactatcatgacatgtagagaagaatcaaggatttcaagtcacaaaatgtcaagaacttttattttcaaaacaattacccatttcttgaacatatcctataattcanagaanaacatgcaaagtcgtacgtgcacacaaaattgacccaaaatattaaactaaaaatccgatgaaactaacaacattaacaaattaacatgactaacaaattaacaaaatcaacaaaactatgcaaaccaaagaacacttcccccnccccatacttaaacaac

SEQ ID NO: 226640 - DNA, 448 bp, Glycine max
  unsure (1)..(448): unsure at all n locations
tcgtccgcagatccctcatgtaagactaggcctgatttatacttccatcttagatttagactaacttaaactgagtgtcgtccgcatgatccctcatgtaagactagactaagctcaagtagcttatgaaagtttagcctaatttagcctaagctttgtccgcagatccctcatgtaagactaggcctaaactaaacaacattattgtaacaacataattaaaaccaaaacttaacccgcagatcccttatgtgagactaagtttcgatcttgcttcaatcaagttctaaggcaacagtacatttcccaatgctaaagtcacctaactgtgcacacaaatgggtgatcagaccacaagcatacaaacagtaagcattggaggaaacattgaacacatnaaacataatcaattagatattagggatttacatcaactggtcattatata

SEQ ID NO: 226641 - DNA, 216 bp, Glycine max
  unsure (1)..(216): unsure at all n locations
cacaaccgcgcagagaagagcagccacaccacaagccgacaaacaaccaccaacacagcgcggccacaaccggaacacancggcacacacgacaccaccacacagagcgcacaaagcagaaaccaaaggccgccaaaaggccgacccccaaagcncaccgagaaagcgacaaaggccaccacccccgggaaaccaacacccccgcccccaaaacaa

SEQ ID NO: 226642 - DNA, 369 bp, Glycine max
gaacacgtctggggaggtagattgtcttataaaggcaaaggttgaccaaatggaggagctggatatgaagctgattgaaggctactagcaagcggcaatacagagacaacaattacagctagaattttggaccacgatcagagtgaagaagagcatgatctggcaaaaatcaagagccgcgttgggtgaaacttggggattataatacccaatttttccactcttgccttggaacaaaaatgtcagaagaataaactaaagtgcgttaattctgatgcagttatattgaaaatgtggtaggggctaaggaaaaagataaacgcttctttctaacatgtttaggagaacatgtttacgacccagatggaa

SEQ ID NO: 226643 - DNA, 379 bp, Glycine max
  unsure (1)..(379): unsure at all n locations
tcggttntcataannatttaatgacaatagtgcccctatcttgtttttctttaaatttactacgccttccagttttacgcttcctttgtgtttcacttacactgtcgtgtcctgtgtgctgggtggtttttgcaagctttggtggtttttgcaagtttgttggaagtcgttgttcggtgaaggttaaatattggtggtttctatcatagttgctcttcttattccgttggaggtacgcattttatgatttttttgttttttttttgtgtgttcatgttacacaacaagcagtaaaatggccaggaaggttattcagtaaaaacttcttccgaaagaagttccttctaccggaagaagctgttctggaagttaatgctac

SEQ ID NO: 226644 - DNA, 416 bp, Glycine max
  unsure (1)..(416): unsure at all n locations
agcttgaaggaggaagngnggtttgggtttatttctactntcattcgnagaccacagagtggtacctggagatatgtcgcgggggtcaagaaaccttgggcacgtcaggtggggtgctattgcccaaaaccaagcttgaccaatcccgacccaactcgggcatagttagtcagtgagaacctgtgatttacctaaacaggcgagctcctggcagtcaaccgataaaagaacaaagaccacaaagcaaggaggcttgtgtggtggctggccaactaaggatcttgagtaatatttggaatatggcacctggtaatcgattgccaagggtgtgtaatcgattactacgcttaaaaatgaagacaatgagttaacatggcctcttgtaatcgattaccaacgatgcgtatccattacca

SEQ ID NO: 226645 - DNA, 378 bp, Glycine max
  unsure (1)..(378): unsure at all n locations
ggacacttgaaactagcttagatgcccgacattcatccctatgatatgtgttgaagtattggcgatcagaattgccattccttggattacggngttgaaccaagctcatgcttttacaaaaaggttcatcaagtcaagttgaaatatggaagtaaccgtcttgcaaaattggggcaaaagatgaatcgagtcacatcactgcttcgtttactgccaaacatatttaggattgtttatgtccttgttacttccagtttcaccttgacaaagatgtcatggaccatgttgaaaatctaaattgattcaaccccatgtcttgcgtaaaaattcgcaatacgttgactgtacatcattcgcatgcatccatgcttttcattg

SEQ ID NO: 226646 - DNA, 378 bp, Glycine max
ctacttttggatgaagaccacagagtggtacctggagatatgtcgcgggggtcaggagtccttggggatgtcaggtggggtgctattgcccaaaaccaagcttgaccaatcccgacccaacccgggcataatcagtcagcgagaacctgtgacgtacctaaacaggcgagctcctggcagtcaacctataaaagaacaaagtccacaaagcaaataggcttgtgtggcggctggccacctatgtatcttgagtggtatctgaaaattagcctctgggaattgattaccattcatgggtaatcgattgcctggcttaaaaatggagacacgaagtaaaatggcctctggaatcgataccaatgggtgtaaacaatacac

SEQ ID NO: 226647 - DNA, 397 bp, Glycine max
  unsure (1)..(397): unsure at all n locations
tgcaccagcattcattagtccaatacacattctttanatattcatcatccatccacaattccaatcattcatgctcaatatgatgcatgcacctgaccttaactcttatatgcaatgtggtaccatccccaaggaaatagcctaagcgtgtccacacgacactctcacttatgaaaactaggcagtaagtgtcgaggtcaccctgtcgtgcacatgcaactccccccccccccccccatggtgatcagcctgagtctcaagggagttccaaaccgagtgacatgccccctagtacaagtattcctcctcacgagaaactacaagtacttagtgacaaagtttatactatgtccatgtcatatgaagtatgaaacatgggcagcatcaaatgcactga

SEQ ID NO: 226648 - DNA, 370 bp, Glycine max
ttttttacgaacaccaatccaactataggggaaatgtcaccatgctctttaaacctctccataataaatgccttcactactttcttcactaccatgggatcatcaacccatctcctttcttttacaataccttgaatattattactcctcctccatttcaccactttatggaaataacaagtgctgtcacctccttcctttagccatcttgctctaaaaaaattttgaaggagaagggattcctgcctcttagataccttccaaaactcttccataagaatctctctatgttcttcctcttcaagagacaatgaacccgtattgcctttaatatcaagctccttgatctccttagacaacttaccacaca

SEQ ID NO: 226649 - DNA, 386 bp, Glycine max
  unsure (1)..(386): unsure at all n locations
tgtcgatatgatcgcaatgagagcataacccaatcacttgtgtggtactctacttctcttcttttagcatctgcgatggtcttcattttctcctgagctttgagaagctntttcctaattgtttgaaatattccctccctgtctgtcagcatttcatcaacgacattgagtttggatgatcctgcgagatattccgaanaattgaatggcttgcggccaaatgtgatttcatatggagtcatccctcttcctgcgttccatgaggtgttgtgagaccactccacccagagaaggaattttccccattgtttaagtctgccatggacgaagggtcgcaagtactactctatgaccctgttcaggacttccgtttgcccatcactttg

SEQ ID NO: 226650 - DNA, 360 bp, Glycine max
  unsure (1)..(360): unsure at all n locations
ttgctttattgcatccaacaggggtatgtttacctctacttttctaaatgtttccaagatctctttctctgcctcttccaattttttgttgggaactgctcttggagggaatggaagatggatgtgctgcttctgcaaatcagaattaccagtggaagaagattcacctgcacaaaaattgttacgtaaattnttgtcatcacctttgtgtggtgtagagtgacgttgggcangttcattngcagatgagaaaggtgctacaggttgaggtccttgacactgctttcccgaccgcaatgaaatggcactgacatctttgggatattggatagattaagaacgcagcttgtcaagattctt

SEQ ID NO: 226651 - DNA, 417 bp, Glycine max
  unsure (1)..(417): unsure at all n locations
actaagctggtgaatagntcttctagcttatacactccatttntgatgttttaccanagtcagaaagggtcggtccaattagttgggagtttggcttccttggactctttccttgcaccacttttcactcttcacactaggtcattttttgagaactctcttggttccaactttgaattaaaccttttttccatcctttgtttgcatgcctacattgagatcttttcctgatctcatagctcgtcgatgaggtcaagttcatctttcaaagcttccacatttcctgtgttgtcataatgcatttgttggaacaagggttctccaattcctactagaatcaatgcttttgtcccataagtcagccgaaatggtatttcgatggctgtggactatggcatacatagaagtcccccatag

SEQ ID NO: 226652 - DNA, 463 bp, Glycine max
  unsure (1)..(463): unsure at all n locations
tctgcatgtctagagagttctagagagagagatgtccatgttttttagagtttgagagatttcgttgtgtgaagatctgcagagaccagagctggaagaggaagtcgtcccgagagcttgagatgagtttgtgagtgattgtgaggtcctagaggtggaggagacatccncactacttgtatttatgcaatctttcatctttctcttctctttgttggaaaggaagcttcccagttatggaaagctaaatcttctgttggatcttccttgtatgtacttgatgtaaatattttntttatctatttaatgatgttatgtgtgttcactgtgctatcagaacttcattctaccatgcttttgccttgatcacgtagatgcatgtgtttttaggatcattcaacagtggaaactggtctgattcttagaacttgatatgacatggcctagttatcataatgtcatg

SEQ ID NO: 226653 - DNA, 356 bp, Glycine max
  unsure (1)..(356): unsure at all n locations
tgagcatgtgnncaagatatgctgaaaaaatttttgtttgatttgcataaaattcaacatccaaaagccaaacccaaccacaaattaaagcacatggcataattgaggattgatctatgaaaattgcccagtaaaatttaagctccatacaactatactgagtttaaaaatagaaaagaagaaaccttgaaaaatctgcaaaacctcagttgctctctaccaaacagtttaaaatactggtagcataaacttgatccctatagttcttttatgtgttagatctctattattcttatgttggcaaattctgggtcttcaactcctcatcattntatgtattggattatcaattatct

SEQ ID NO: 226654 - DNA, 448 bp, Glycine max
  unsure (1)..(448): unsure at all n locations
tgcttgtggagcttctatggaggctagatctttgttcttctatgaagnccttcaatggtgatttttcaccatagagatgcagcggaaggcaaaggagaagaggagaggggaggcaccatccactanggaataagccaaggaagaaggagcttcaccaccaagaattgccttggataagaagcttgaagaggatgctctaatggaggaaaagaaagagagaaggggggagcacgaaattgaaggaataaaagagggagagaagtggaactttgaagtatgtctcacaagactctcattcatcaaagttacaacaagtgttacacatgcttctatttatagactangtagcttccttgagaagctttcttgagaaaacttccttgagaagcttctttgagaaaacttccttgagacgctagagcttagctacacacacccctctcataac

SEQ ID NO: 226655 - DNA, 348 bp, Glycine max
  unsure (1)..(348): unsure at all n locations
ttttaggattggnctcacaaaaaacagttttgctgataatggaactttgtacactaacaaatgtcaaaagacaacaatatttactaggtgaattatgactctactccacattcttactcatttttcttttcttttcagtgagattttatcctaagaaaaaagttgtaaacatgctatgtcaccgtgttaccaaaaacaagaagagctcagtaagacaactaaaaagcatcttcagtgctgccacaattgtaatttatattcaagtactcaacatctaatttcccctacaatagctaaaaaccttntatacaactcagacaacatcctcactctcaactcttgaccgga

SEQ ID NO: 226656 - DNA, 413 bp, Glycine max
  unsure (1)..(413): unsure at all n locations
tcngaccacagcaacacagaatctaggtgtgcaaaacccttatattcaacgggacatctaggtttgagaagagaaattgagaatgacgtaaatttgaagcaaactctcacctcacaccagtccataacatcaatctaaacttgctcaaactggatttacgcttaaaatctcaccgaatcaaaattngactcttcaacgcccaaatttgccctagaaatggctctttgttcactttggtcatttgtttttctctctagcacagcctaacctttctcataagtcctaaatggcatttcaagctaagattaactcactctaacctctaaatactaccaattccagatttggcctttcagtcctcataaattcactctgtttccactcctaacaccacattctcactgtctaaccct

SEQ ID NO: 226657 - DNA, 373 bp, Glycine max
  unsure (1)..(373): unsure at all n locations
ctanacaacaaaagaacttttttctaagataatttgcattttcattatgagcgacttgaaatttcattctgagctcaaaacaattctccattatgattgattcattctaaactatcattagaaacctttctgtttgcaagggaagcttaaaatttttcagaaccccaattcaaccccccttcttgtgatattttagccgcttcagggtggatctcaacaaggaagacgagtaatggcatcaatgtcatggatgtagaggaacattctcaccatttctagagagtttcacagacgaagatggggaggatgagagaaatcaaaagagagactgacggaagtcaagtcaaacaccgtatttattcacaaatttttt

SEQ ID NO: 226658 - DNA, 377 bp, Glycine max
tcttcttccatggcttattccctagaggatggcgcctcctatcaccttttctcctttgtcttccgctgcatctccatgggggaaaaccaccattaaaggacttcattgaaactcaaagatccagcctccatagaagccccacaagcaagcttccatcaagtggtaatcagagcacaagagcttcaagtaggtgctccttaaacctccattaatttttttgctttaccttctcttccattggtgtttcttcatttttctccatgtatctcttcacatgtcttgttctaaatgttttaacatgattctttaaagtttccaccgattaaacttgctatagaagctagatttgattttctatgagtcaaatttcttgtctt

SEQ ID NO: 226659 - DNA, 382 bp, Glycine max
tctttgagaaaacttccttgagaatctagagtttattttacacaccctctaataactaagctcacctccttgagaagcttccttgagaagattcctaaaaaagatagagcttagctacacacacccctcgaataactaagctcacctccttgagacgcttccttgagaagattcctagagaaactagagcttatctacacacacctctctaataactaagctcactcttttaagatttgaagctagagcttacctacacaccccctataatagctaagctcacccccatgccaaaatacatgaaaatataaaaaaagtccctactacaaagactactcaaaatgttctgaaatacaaggctaaaaccctatattactagaat

SEQ ID NO: 226660 - DNA, 269 bp, Glycine max
ttctcctcctccatgggtaatatcctagcggatgaagcctcctctcacctcttttctttggcttccgctggatctccatggtggaaaatcaccattaaaggacctcattgaagcttaaagatccagcctccatagaagccccacaaccaaacttccatcaacgtgattgccccggaccatggtataatttttcacacaagttgaatgaataaattaagatttttttattatttaatataatagggctatatatattaaaagtttgcaaa

SEQ ID NO: 226661 - DNA, 416 bp, Glycine max
taagatctctggatgtagcctaaaacaggattcttatttatgttcagagcccaaaatctaggtgtactacaagttctcatattacatgtcatgccacaccgaactcatccaaaagctagtttgaacatgctgtcttacaaggattctaaagaaatcttaagagatatcaaaatggaatgaaatcaaaaaggcttaaatgctgagtcttaaaaatttcaggggttgaaatgaaactttcagaacttgaatatggtgagcacacgacaagtttgaataaaggtttcgataaggcaattttctctagtgtcacaacatagtctaacatactatatccaatttcacaggcacgtcttggaatggttcaaaaacacttataaatcacttgggaagtagtatacattaatatttatagtatc

SEQ ID NO: 226662 - DNA, 417 bp, Glycine max
gaaagctttgataagacttgacttttgttgtcttctactataagctaaaacagatacaaaaatctattctaaagatacacataattataactcataattataacactccccctcaagctggagcatataaatcgtagcttcaagcttggaacatataacctgaatcctaagcccccttaagggtttagtcaaaaaatctgctggctgatcacatgagttaatgaactcagtgacaatttctttagacagtaatttctcccgaatgaagggacaatcaatctcaatgtgcttagtcctctcatggaagacggggtttgaagcaatgtgaagagcaacttgattatcacaatatagcttcatttgatcactttgaaaaattaattctttaaaatttgttaacccacataagtcacacgt

SEQ ID NO: 226663 - DNA, 382 bp, Glycine max
  unsure (1)..(382): unsure at all n locations
tctcgaggaagcctcttaatgaagcttctcattgtagctacatgaagctgcctcggtaaaaacgctgcccagccttagttaaccgctggatcttctcgaaatttagtctacagcttcaccgaatacttgtccacgatctgaccattgggatctttgagaagatatctggagtgtgcgcgacgtttccattaccgagagcattactcatttgagcgtttcagcctttgctttcgtgtagcttaagaaaaacgccatttcttctcctttctttcttccaaaaccatntccaacattccaagctgtttctccatcacccacggccaccattagccaccacaaaccgtcgttggtcttcattttgaatccacaccgagaggaaccc

SEQ ID NO: 226664 - DNA, 398 bp, Glycine max
  unsure (1)..(398): unsure at all n locations
agctacacggnagacacaagctcttttgcttattagaacatgattttctattttgattaaaagtgaatatcatataagaacacaaatacgaatgaaagtccaagtactggggattactttgattgatagatgtattccaatttcctgacacgagaattggcatcatgcaataataatgcaaccatggtcataagaggttgcgtggtgaaggcaatattggcagtctttcgagttacaacagaagacaattggtttgggttggggttcaaagataaggttgcacgtgtcatttagaaagaaaggaaattactaattagcttcctttcatgccctggttagataaatataccttaattattccttatgtaggctacaatagatctcgccatctcgacatg

SEQ ID NO: 226665 - DNA, 498 bp, Glycine max
  unsure (1)..(498): unsure at all n locations
tcgattctatgctagtcccttacacatttgctcaaccttctctgctgtttttctntgggcttgcttgtatttagcaaacgtcaatgcttttcttacatcttctctactgaaccactgagcatctagataagcaaagtgcagaatcagttgttgcagattcaatatacaaaagcacaagaaatggagataaataaaaatcatctgcataagttcgttattctaagtcatgcatatataaataaagggggaatagcaaaagaaaaaagcatcatggctaaattcaaataagtacgagggaggtcaatgttgtaccttctaactctgtcttgtccacagttatttcaagggattttgcatatgcaaagaacccaaccatcagctgacatggaatgctatttggtgcaactagaaacanaaacaatagaaattgtctaattaatagacaataaagggaggaatataattataaatttgataagagacatagtcaaatacaca

SEQ ID NO: 226666 - DNA, 433 bp, Glycine max
  unsure (1)..(433): unsure at all n locations
gacctgaagcatgcaagcttagagcttaattaagttaagnggtgtgtgtgagcagtattatgattatgtgagagggtaatatttagggcgggtcgccccatgagaactaaagtaaaaattgaaatttcttcttttactttagtgaaaagagtgatatgtgaaacctaccctaatatttgttactctaaagaactaataacacatgttagtaggcctaaagtgatagtattaattattttacctttggactgagcatgaaatattatcaatatctagattctcattgaatttctaatgtctcttccagcttggagtagatacagttacacgcctcattggccctgtatcatacttggtgctctccaaacctgccaagggtggggataaatacttttgtcttctctctctcctcccanaagtccttgctatctat

SEQ ID NO: 226667 - DNA, 488 bp, Glycine max
  unsure (1)..(488): unsure at all n locations
tatgtcttgagtaaacgtgatcaattaaacactttgggaattggcttttaaaaactatagtaaattatattataaacttgtttttaggaaaaagtttcaaacgtaaattgtagtattattttaagcttactttagagcaaaagaaaaaatcaagtttcattaaaaccctaaacccagttcatttgatgtttcttttttatatatatgttctttgataaggtggtaacgtgcctttatttnttgttaaaaaatttacaagatgatgcaatcctatcccgcaagggcattagatagaagactacaagaagattgagccagagatgcaggagaaagttctagaattctcatgagccttagggtagatttgggtccatggactaagtatgagctcacttatcttngtatacattatattaggattctcattattcttgggcattgtatttagggattcatagtgtacggagggtatcctagtaatgtatgat

SEQ ID NO: 226668 - DNA, 408 bp, Glycine max
agcttcagcacttctgtaagggttcagggcttttcatcagcttctataaatcttccatatactcagccggtattaggcctcatgagctttctcatattcagcagcttactggatttagcttgggtgacttccctttcagatacttgggtgctcccattttatcatctagattaaatgtatgtcattatgctcccttactttccaagattactggcctgattaagggatggagcaagaagtctttatcttatgcaggtaagttagagttgatcagagcagttattcaaggaattgcgaatttctggatggggattattcctttgccacaatctgttctggaccgaatcaacacttcgtgccgtaattttctgtggggcaaagcagatattggcacaaacaaccccttgg

SEQ ID NO: 226669 - DNA, 479 bp, Glycine max
  unsure (1)..(479): unsure at all n locations
tgtagttnggtgtgccaatntcacattgacatanatgtgaatgtgtaatgcaagacttatgttgctttactcaatctaagtatgaggggcatgtcaagatgtttgacattgtatgttcaccatgggagtattttgtcgagtatgtgaagaatacatggttgatccctcacaaggaatgttctgtaagagcatgggcaaataaagtatgcacttaggaaacataacaagcaacaagtattttatgtaattaacttattttgacagtgtaatatattgaaactaatatcgagtttggtgattaacacgattgattatgtgcattggagcttaaaaaggttaatttataatagcatgagggacttgtgtaaatgttgggattccaagaacaacttgattacattgcagcatacagaaattaaagccccatttgagaagagtattcaatctatgggtcataatcataatgtagcattgtatat

SEQ ID NO: 226670 - DNA, 384 bp, Glycine max
ttaaatctattaacatgatttaactaattatatttagggaaatagtcaaattggaaagcgtaaaatttagattattatacaaaatatatattgactaaaatagatatattattatacaaaattcagattttaaaacatatattcacccacaaaatatcttatataatttaaataatataacaaaaatacttatatttaataatatcattttcttaataacaaaattaaattataaaataatattacataaattaatttaataaataaataatttttataataagtaagaataattttatataatataatatttaattttaataatatataaattgttttattaaaaaaaaaaggaagaagggaagttggggtgcagaacccgac

SEQ ID NO: 226671 - DNA, 499 bp, Glycine max
  unsure (1)..(499): unsure at all n locations
tcaaccaagatcactaagacattggtaagggtaggcttactttctctatattcttatcaaacatatatgtacaaggtntaaacacatgatgaaggaggggggaaatgagataataaaagaaccatgcatctaaggaaatacaaccttttcttcaagagttaatcctaagaaatgctctacagcttcaaggtgttgttctagctttagaccatcccgtgcaaaatgagtcttttgatttcatatatgctcgaagtgtgtcttacaatgttattctttttccttttgtaatatgtgagggattgttgtatngaaggtgtttcaaaaggcatgaatcatgctctacccaaaatagcttntgttcacttatctatatataaacttgtctttaaggctttcaaagtggctagtagaaggtgggaggcttgcgtgcataaacttgggccttatttgtattttatagtgctaatccatgaattgccccttatgcacgtgcaataat

SEQ ID NO: 226672 - DNA, 393 bp, Glycine max
agcttgtgcttgtgtgaagagacaccttcttggtttgataatttgagttctcccacgagcagcagcatctttgaagccattaacctctcttctcaactcaccatagtaatgagaaacaggtgcatgtctcagagtaacaacatacacatcagtggtagcatcatctgagttaccttgacacaagcatggcaaaaacagcccatagcaaaacagcaccaccaccaccaaatgtgccacattaatgttacccataaggattctatagggaaacaaaagcacaaaagctgaagacccagttggatcgaaaaccacaccatcaaaagtgaacaacaacaacaacgacgacaacattttctcaccaccccacatgctccattctcaagttgaagactt

SEQ ID NO: 226673 - DNA, 402 bp, Glycine max
ggctgttatgaaacgtttaatatctttgacaatcgatttctagccttgcgtgatcgattacaggcttactatttaaatgcaacttgtgtaagagcatttcaaaaattattatggccactggtaatcaattacagcctctggtaatcgattactacagagtaaatatcatatttaagaaatctcatataaacttttggaaaatatcctttggccatacctatgcttcatcaattaagaaactcttccttagattctatgaaccaagtgcatcaattatgttgaatttctggatacttgacttggatcaaacgcgagaagcgcttatcgttgacattatcataactgcatatgatatctgcttgtacatctactatatactattacccacataccaacatgaga

SEQ ID NO: 226674 - DNA, 365 bp, Glycine max
  unsure (1)..(365): unsure at all n locations
ccactcctcacgtttggatttttagggaataacaccataactaaacgcgccgcaagggatcctatcgcaccagatccaaatctacaacgatgggtgatcaaatgagacgcaggaacatatgaaagtcgacatgtcggctctgaaagaacatatggcctccatgatggaggccatgttatgtatgaagcaactcatggagaagaacgcggccactgccgccgctgtcagttcagatgccgaagcagactcaactctcttggaactacgcaccatcctccctcaaacatagtaggacggtgaagggacacactgtggcacgattggcatcctcacctgngatacaaccgagcggatatccttatgga

SEQ ID NO: 226675 - DNA, 245 bp, Glycine max
ggacctacgtaggaatgtttgaccatgcgacttatcgagagatccgttgtcaattcaacgtctcgtttatcataccccgaattgacttgctgcgaaggtataccattgacatattaagacatgcgtaatcgttcgagcttcatattgtgatgcgcctattgagaatccgggcgaaagtttgacatttgattctcaacgctcggtagacaatatcagcattaattatatgcgcccgattgacatcg

SEQ ID NO: 226676 - DNA, 448 bp, Glycine max
  unsure (1)..(448): unsure at all n locations
gatccttaagtcacctgangcatgcaactttaagcttggatttatcttacaattatagccccncaagagngctaaaacttaagagaccatttgatgccccttctcatcatttcacccttaattttgtcaatcattcaccacctcatattttagcgtgagtcctatatatgcttttgcctcctcaccaatgaacataattatattctatagcaatgaaatgtgtttttgtgggatacaacactactcaaaaaggatataaggcttatcatccatctacaaatagatctttttgatcaatggatgtacatttctgagcatgaactatttctccctcgaaacacttattcttacctcaatggacgcgattgaatgtgctaacacgattacttgacaagaatcatgttattgatgtatgccacacaattatgatggaatcatgatatgacat

SEQ ID NO: 226677 - DNA, 255 bp, Glycine max
  unsure (1)..(255): unsure at all n locations
tgaatgaatacattactngtatcccaatgagagtgtgatccttaattttgaaagaatactatcatttagtactgatatatgcatgaatctttgaatattgactcaatgcacgaattgaggatgatgaaagtcatatttgatgtgatagcccttaccacaaagccgaccatgtgcatgaacgaattataccctatactcancttgagctgaatgaatgaatgattgaatgaaccctgagcctatactgtgttattt

SEQ ID NO: 226678 - DNA, 392 bp, Glycine max
atggcctaatccctaggggatggtgcctcctctcacctctcttccttaatcttctgtcgcaactacatgggtgaaaatcaccattgaaatgacctcattaaagctcacagatccagcctccatataagcttctcaagaaatcttccatcattacaactctcccaccttctttagatatttcatccctgaaatttagttgactgacacaaggatggattggtttctctcatctgactctctaattcccacgttgcgtcttctcctgatgcacctccccagattaccttgaccaacgaaatctctttccctcttaactgctatgttccgctatcctcgatcctcaaaggaaactattcatatgtcattctcctttacttaaacaacatctaaat

SEQ ID NO: 226679 - DNA, 356 bp, Glycine max
attaaaagatcattgcactttttgctccacgaacgatatctcctgaatacaatcttcttaatgatttatacctacgaagcgatgtgtttatgattatccatcacctgcacattgaggagattgatggatagatgatgcaaactcgcttaatacgggttcggccacaccttggcctacgacagatccgcagcacgccgtggagagatcgctattttgaacttcttcacaagttttagcacacaagacaatccttctctgtgttaagctctctaagcatagactatgggtgtgatccttctaacgagagcataatagaataatctcctaaacgagatggtcttcaatcggcctcaatg

SEQ ID NO: 226680 - DNA, 454 bp, Glycine max
  unsure (1)..(454): unsure at all n locations
agcttacaacttatggtttcattatgattatcctcctctanaactaagctgcagaatgcctttggaaacatttatcattatttgtagttggcatctcatgtttcaggttgatattttactctgcactgattgctttcatgatgggagatttgtcactggtcattctagtatagatttcataagggtggattcaactacagattatggtgatctagatggggatagttggactgatcaagagactctgctgctgcttgaagcagtggaggtttacaatgagaattggaatgaaattgctgagcatgttggcaccaagtcgaaagcgcaatgcattcttcattctctccgtttacctgtagaagatggaaagttggaaattatcaatgtttcaaagttgtctttgttatcccatgtgaagaatcaagaggatattggaagattgcattgtttctca

SEQ ID NO: 226681 - DNA, 387 bp, Glycine max
  unsure (1)..(387): unsure at all n locations
ngaagagaagtcatccatgccaccatgcacccagctcttatgttattcgctaagcgagacaattgtctcttctgtgctaagagcgagattggcgctaagccaaatctcacttactcgtgcttagcgcgagaatggtgctaagtgtgccttcgcggacagaaagcccttttaagcctgacntacagagaatgcgagagaggtttgaatacactgcgaattatgtgcagagaacataggaaaagatgagcacggaagcataggcactaactcttagttagattctatgttaaagagtaagtcctacgttcttagaggtggaggaggaatccccattgctttgtaatctagaatttcctctgaaaccgctcttctatttgtgaaagctgc

SEQ ID NO: 226682 - DNA, 431 bp, Glycine max
cgagcatgcaaactcatccgatgaattgcgccacatttatttctttggaaattatgtatttataaaggaagctcaacttcgtgagaccaaaatgaacgccccatatgctctcaattacattgatctaattgctctcatgcatgtataatctcgcgtgaaaaattatcatagaggcttggattctatgttactcttgggcttacactcaattgaattttaaatcgcacgatttaatatctagtcataacaacattgactactatatctatggtcgatacatattttaggtaatacctatccgctacagtacatttttagtctgtgactacacaggtaataagatggaagctcacccatcttcttttctttcaataatcagatatatgctttcgtgctgtctaccgtaaaatatatgaccatgcatatattta

SEQ ID NO: 226683 - DNA, 447 bp, Glycine max
  unsure (1)..(447): unsure at all n locations
agcttagaaagtattaagttaatatttagttgttaacatataattntaaagtaatttgtcaattgcaaacttattctanaattggtttacaaaacttcactttgtattgtaatttagaatcaagaaatttgagagtcttatttttcatactctctcgactatctttgattttcatccgtatacattataattcttatctgtccgtccctctcaacctatctctatattatttcaaagtttaaaattgattacctctccaaaaaacgtttagtttaaatacgtacaaaatactatattgtcaaagcacaatgaatgcatctactctcataggaagtgagtggatatatcatctatagaatttacaataagttaagagtataaaacattaacaagtgggtctatgtttctttgaaatatgactaaaacgactctcatttatttcttata

SEQ ID NO: 226684 - DNA, 221 bp, Glycine max
  unsure (1)..(221): unsure at all n locations
ctgagatganngaatgtngtatggtgaaacttcctacttntattgttgaccacagagtggtacctagagatatgtcgcggaggtcaagagaccttgtggacgtcaggtggtgtgctattgcccanaaccaagcttgaccaatcccgacccaacccgggcatagtcggtcagtgagaacctgtgatgtacctaaacaggcgagctcctggcagtcaacagat

SEQ ID NO: 226685 - DNA, 450 bp, Glycine max
cacctgcggcatgcaagcttatgtatgaattgtgctacatttattacattggaaatttagatgaaaaaatgaaattaaacttcgtgagaccaaaatgaacgccccatatgttttcaatttcattgatctaattgttttcatgcatgtataatcttgtgtgaaaaattatgatagagttttggattctatttttcttttggtcttccactcaattgaattttaaattgcacgatttaatatctagtaataaaaacattgactacaatatttatggttgatacatattttggttaagaactatcaggtacagtacatttttagtagttgactagaaaggtaaaaagatggaagctaagtcatatttttttttttcaattaagcaaatatatgcttttgtgctttctaccgaaaaatatatgaccatgcatatatatacctttaccaaacaac

SEQ ID NO: 226686 - DNA, 499 bp, Glycine max
  unsure (1)..(499): unsure at all n locations
actaagctcgaggtaaactagatgccttggttaacctagtaacccaactggccatgaataaaaaatctgtacctgtcgccagactctgtggtttatgctcctctgccgaccaccacatagaccttngcccttatgtgcaacaatttgaagcaattgaatagcctgaagcttatgctgcaaacatctacaacagacctcctcaaccttagcagcaaaatcagccacaacagaacaattatgacctctccagcaacaggtacaatcccgggtgaaggaatcatcccaaccttagatggtcgaatccttcacaacaacaagaacaacaacaacaaccttattttcaaaatgttgctggcccaagcagaccatacgttcctccaccaatccagcagcaacaacagcaacagccccagaaacaacaaacagttgaggcccctccgcaaccttcacttgaagaacttgtgaggcanatgactatgcaaaacgtgcagtttcaaca

SEQ ID NO: 226687 - DNA, 463 bp, Glycine max
agcttgtacgcatcatggggaagattctgtcttaatgaatattatacgaatttacaaaaatagtttaaagcaaaaaaggggcaaaataatcagaagttaaaagatgttggacttaagagatacaaatgatttccaggaggaaatattattaaaaatataagctctccatgcacacattgattaacaggttacgaaagagatctcacacagaagaggcagttatttttataaaatgaaaaggtcaatataatagacactattgctcacagtcaattttgtttgcttagaaattgagagacaacaaaaccaaaattgttttaaacaatttaatagacactatttagccaaattatattttttcgcctacaagttaagagaaaacaaaactattaattataagatgaagagaacatactacataagattgaaatggacaacaaccaccaataaggagattaataaa

SEQ ID NO: 226688 - DNA, 485 bp, Glycine max
  unsure (1)..(485): unsure at all n locations
caattgcttcaagttgttgcacagaagggcataggtctgtgtggtggtcggcagaggagcataaaccacatagtctggcgataggtgcaaattcttgattcatggccagttgggttaccaggttaaccaaggcatctagtttaccttcaagcttcttagtgtcacctgatgaattcgtggctacttcatgcacccctctaatgacaatagcatcacctctggcactaaattgctgggagtttgaagccatcttctcaattaaatttctggcttcagcaggggtcatgtctccaagggctccaccactggcagcatttatcatacttctctccatgttgctgagtccttcataanaatattggagaagctgctctgaaatctggtggtgagggcaactggcacataatttcttaaatctctcccagtattcatataggctctctccactaaggtgtctaatacctgnaatatcctctctgatggtc

SEQ ID NO: 226689 - DNA, 355 bp, Glycine max
gctctcacatagggagtagagaagtcgaattcctcatcgaaagtctctgtagtataattcattatctgcatcactcctaagtcaactcaaacttatatatgaaataaatcaagctaaaaccttctaaaaatctatctagttacaaaaacaaatacagctccaaactatattaaaaaaagccgaaatgatcgacgaagggttgttaacactagataattaggaaaataaatctccgaacatatgtgacaagtataggttctggcaaaaagaatagtataaatacagtagtttcccacgaaatgtgatacaatggtcaactacttgtatatcaaaactatctgagcaatgaattaaa

SEQ ID NO: 226690 - DNA, 378 bp, Glycine max
cactaagctctgctctatgagacaactgcttctacgatgggaatttatgctttaaagacttgctcaatattgctattctctctagtaatagcatttttatctactcattgcatcttcgtttcttaaattatgctcattaaatatgtctttctctctgctcggagtgtgctatactcgctttctattctctccttttgtcgctattaaaaagacattctcatgagtcgtgcctctagtaccatctttttttgttataaaataacatgagattatatcaagcatttaaccacttctatatatgcattcttacatttgattatcgcgatacatgacaaaatttgaatgatagatatgcaattcatatatgcaagtgaagta

SEQ ID NO: 226691 - DNA, 409 bp, Glycine max
tactaagcctgagcaggaacattacctgagaatacagggaaaagatctttggttttaatcctacccacataacacggcgagccacataatctacacagaaaccaaacaactatctatccatcaacaactgggcgagcaagtctttatcacattacacacgaagaaaacattgtgagagaaagaacgtgaaagaattcacataacacgttggagtacgtaccattgaataactccacatgtagaatcacggggaatgaactgctctggttcaattcatacagcgaggaccgtgtcacaaatgtcgcactgaacattacacagctgctcggaaggaaggaggtggtccaatgataatgtgctggacaaggatgacatcttgggtaacccacttcttccgctctctaatatt

SEQ ID NO: 226692 - DNA, 486 bp, Glycine max
  unsure (1)..(486): unsure at all n locations
agtatgcaaagttgtgaatgtgggaccttccatatggtttcccaggacctatagagggaagagaggataaacggtagccttgaaactcagcaacagtgaaacacatgcaaaggttggacagagaagccatggatctatggcaccatcacaaggtggatttctgagagagagagagagagagagagaaaccacaagagagtatgttccgtgatacgaagaaatatgtaactagaataacataaatgaaattcagatattcaatgtttaatggcaataataatgattttgttgctattaaattaagtttaagtaaaaagattatctttcttctatgaactacatgtagttttcaccacagaaatggaattcttattcntcaacaagaaatgcgattncatttatgtaagtgttcgatgtcaacttttattactccattattaagatgaaatctttggaaatagaacagataacacttaacatattata

SEQ ID NO: 226693 - DNA, 232 bp, Glycine max
  unsure (1)..(232): unsure at all n locations
gacgaagagaacgaanagaacggccacaaaaaacagggaattacagaccaagaacnaaaccaagaagaccgcaccgaacgccccacagggccccaacttcactagaacaaatagacgcacgcacgaagaagacggggagaaaaacatgacagagacgggacacagaacacacaggccccccacaaagacgggaacgacgagcacaccaaacggaaacacgacaaccaaacca

SEQ ID NO: 226694 - DNA, 306 bp, Glycine max
ttacatatggggatacgatcccaacatggttggctcatggtgcctaacacatgcgactaaaaatgcattgtgaagtttcacgcttcccctttcttgtttatgtagaggagaacacaatgatgaccaaacatgacaacaaatggtatgcaattctgcagatcaaatagtttgttgaacgcatatgcatgatgaagccctgactcattgcaaatgtgaggctggaatatgataacagacaaatgcacgaaccatatgttctttcgatgctatgagagatgcttatgcgtgcctgatttaatgcattta

SEQ ID NO: 226695 - DNA, 410 bp, Glycine max
cttagagtcacctgcggctgcagctaggcaaatcatttataatcattttatgtataagcacgaaacatgaaatccaagagcagagttagagatattaggttgcctcctagaagcgcttctttaactatcttagctagatgcagggtggtgatcgagactttgtcatctcatcctccctaacctcccttttggtgtgattgatctgatcatggacctagcacctgttagcacctgccctaatgctttaacaaagaaagtgtcatcatgtaaatgtgaaaaaatactacaagatacttgtatcacctttccacttgcctctagacttacccaagttggtgtggtgctgaccatcacccaaaatgactcttcattcattatatgaatcgtacgatcccttgatgataagatgc

SEQ ID NO: 226696 - DNA, 485 bp, Glycine max
  unsure (1)..(485): unsure at all n locations
taatatcaacctattctaatgtacattctgcagagcgttgcgtttccgtgacctctagcatgaggttcttcatagtcatccacctattcatctgctcccccgaacacaagttcaagatcatcacatgatccatacacaacaacacacagggagtgagttatcacattcctagctaatagagaaacaagacaattaaatatacatattatataaatgagataccacttgcttaaacatagctcacgtaacttcaccacttcgtcattcaaaattcacttttcaattatcaatcacattacacaagaatcccacactttgatcaagatataataacacatcaattagcaagcatatgcaatagttatgctaagactcaatcctatatgcaatgtggtaccatgtcagtgataaaccaccctcgggcgcttacgagtacatcacaagacacaccacaccatgtgtntgtcatgtcactctcactaagt

SEQ ID NO: 226697 - DNA, 452 bp, Glycine max
  unsure (1)..(452): unsure at all n locations
agcttcttatccaaggcttatcttnggggttaagctccttcttccatggcttattccttaatggatggcgcctcctctcacctattttcctttgtcttccgctgcatctccatggtggaaaatcaccattaaaggaccccattgaagctcaaagatccagcctccatagaagctccacaagcaagctttcatcaggatgtcttattgagtcccgtaatatatcgagacgctcgaaattgaatgttgaacctctgagcattctcaaacgacaataacgtttcactcggatgtctgattgagtcccgtaatatagcaagacgctcacaattgaatgctgaacctctaagccaattaaacgacataactcttaatcggatgttgattgagtcccgaaaatatcgagaccctccaaattgaatgttgaacctctaagccaactcaaacactataac

SEQ ID NO: 226698 - DNA, 462 bp, Glycine max
  unsure (1)..(462): unsure at all n locations
gctanacattaatntcagcctctcgatatatactgttctatttaaacatccgagacaaacgttattggcgtctcaatttgctcagaggctcaacattcaatttcgagcgtctcgatatattacgggactcaatcagacatccgaggaaaatgttattgtcgtttgaattggctcagaggttcaacattcaatttcgagcgtctcgatatgttacgggactcaatcagacatccgagttaaaagcaattgtcgtttaaattggctcagagattaaacattcaatttggagcgtctcgatatattacgggactcactcagacatccgagtaacaacgtatagtcgcttgaattggctcagaggntcaacattcaatttcgagcgtttcgttatattatgggactcaatcagacatccgagtaaaaagttattgtcatttgaattagctgagagcttcaacattg

SEQ ID NO: 226699 - DNA, 456 bp, Glycine max
agcttagtacattcaatctatatgctccattctgtgtctaggaatctatttctaaggaattaatgtatagatagctgaatagacagattcatgcatggcaacttattattttcctaagaaatcacatttatattttcattcctcttaaatataattcattcagaaatgattataaattctaatttgccgaatgcttctatactcgagcatttcaccaaaatccaatcttaactctctgaaataaaaaactaataaaaaaagagataatactaataacgaagcagcagcaaggcaagagctacataaaaattacgatatatttgtactcatgctacatcaagcgagagacatactagcaatactcagttcctcatatgtgtaattagttgcgcgactagataagtgaacatcatgcggtaaatacatgtttcaatgtaatgataattactacaatcc

SEQ ID NO: 226700 - DNA, 232 bp, Glycine max
cgagcacctaattcttgcaccagatactaaagaaggtgctgagcccaaccacgaggtccagaaacagacctatgtatgtaatagaacaacacaggtggaccacacgtacctacgaaagttggggatggacaacaacaagtgacctgtcacgacctctactgaaaaggagaacaacaaggctttgtcgtaatagtgcaatggagaagagagcgcaagagggcacacggagaag

SEQ ID NO: 226701 - DNA, 219 bp, Glycine max
taataagcatataggaattgcttctcaaaatacgcacgcacttattcatcttaaactaaccagcttagacgaacacactactaacacatacagtacttattctattaacataactgttctttaataaatatgtctaaaccaactgagtcaaatgttcaaattctccataagtttttactcacacttatacaagtgcttgtgttatagtctagataggct

SEQ ID NO: 226702 - DNA, 251 bp, Glycine max
  unsure (1)..(251): unsure at all n locations
gacgacggaactctagccgccancgacatcaattcaataaggctaacggcatcaatcactctattgcatcacctgcgactacgggtggaggttaatcgtcacaattccatcaacatcagcacaatggattttctggtattatcgctcggacgagggcctatacatgaaaatactggcttagctgacagaaagatgcagtgtcatggcatcatccacatagactgagtacccttcctaagccgtctgaccta

SEQ ID NO: 226703 - DNA, 301 bp, Glycine max
  unsure (1)..(301): unsure at all n locations
cgggacgggctctaatagattacacctattcatctgctctctacagacaacaagtaatagattattctctcgatccttactcanagatacagagggagtgagtctttacattcatatcttattggaacaaagcactgtgtatagacctattatattctcggatcactctgtgttagaataagtgacagacgctgcacttgttgttaacattcgtccttactaacagtcacatgactcatagatcgacactgtgtggagattactacacataagctaaaagcatatgcgattgctcgctgag

SEQ ID NO: 226704 - DNA, 393 bp, Glycine max
  unsure (1)..(393): unsure at all n locations
gaaggaaagggttcagccgcttaagcacttctctctctttcgaatatgctgaggaaaattatttccgtgaagaanatccaagccgagggcgcttcgtaacgtttccgtgagtaattacgcgaagattctcgaccgttcttcaaagattcatcattcgttcttcgttttcttcagtcttcaacgggtaagtacctcataccaagcttctcaattcattatatgtacccgtggtggtccacattgtgtttcatatattatcattctcgttttcatatactttntatacccncttttgacgtgcttaagccatttatttaagccatttctcgcctaatctaagaataaaatatatttccaccgatcgttagaattgtatcatccgttatttttggt

SEQ ID NO: 226705 - DNA, 465 bp, Glycine max
  unsure (1)..(465): unsure at all n locations
tgaaggtgtgtagcccatcatctttttatagtagaatactggttatgtgtctactatcattgtcatcattnttttctccgtcattgaggtgccacttaagctgccaggtctctccacctttgggcgtattcttttgaaagattcgtgccccctttttgcacatgttctgtagttgcatcctatccgaagacattatactgacactgcctaacgaaggcaaccattaggtccttccaagaatggactcacgaaggttccaagttagtgtaccaggtaacagctaccccagtaagactttctttgaaggaatgtatcagcaattcctcatcttttgcgcatgcccccatcttccgataatacatncttagatggttcttggggcaagtagtccccttgtacttgtcatagtccagcaccttgaacttaagangggtgatgatattgggtactaggaacaactcttct

SEQ ID NO: 226706 - DNA, 472 bp, Glycine max
  unsure (1)..(472): unsure at all n locations
agcttgttgaagccgattatggctaaggattatcacagcgcgtctttgatcgatgacggtaatcctaaatgccagggacatcaattcaataagcctaatggcatcaatcaatctactgcattatctggtactatctttttattttattttcagattctatcaacatcagcaatctggattttctcttattctctcttgattgaattgtcaatttaatgattaatacatgctttagcttttaatgtttattatgacaggctaacatttactttacaagtcagatacatcaaatgaaactcagcctaatctgtctgcactatagtttttgtttccttacatctctttgatgtatgctttgtaagttttgattgtaactttgtttattagttctgaaaacttgatgcaagttcttgatgaggatgcangtatattgaattttatgatgcgatgttagtgccaatggctattgctc

SEQ ID NO: 226707 - DNA, 500 bp, Glycine max
  unsure (1)..(500): unsure at all n locations
ccgactngagancatanaagattataaatatgtgaccacggcatgaatcttaacacgacaccaatcatctatctttcaatcttgtctcacccatcactcaatatctttcaattttttttanagaaatttntaattttttttctttccatctttctaaaagtttttgttcaaaactttctcttcaaagaaaagttctttgttcaaaaacttgtgttattcatctttttcattctctgctccctttgctaaaagaacaaaggactaaccgcctgaattcttttgtgtctctcttctcccttacaaaagagtcaaaggactaaccgcctgagaattcttttggttcttccctttcccttaagcaaaagatttcaaaggactaaccgcctgagatatcttttgtttcctcttacanagattcaaaggactaaccgcctgagaattctntgtcccaacacattggagggtacatnctttgtggtacaagtagagggtacatctac

SEQ ID NO: 226708 - DNA, 505 bp, Glycine max
  unsure (1)..(505): unsure at all n locations
gaccgtatccttacagcacctgangcatgcaagcttgacataatttggatcctcatcaaattctatattagtttcaacttcaagaaattgcttaaatggagtaggaacaatgcaaccgatccgagagcatatgcgaaggaaaaatttattagggatcaaatgcaaaagtcaggtatatattgcggatcaaaaacatgtttaagcataaaaaaaatgaatatgtccataaaattttagacttcaataggcggtaaagataaaacatatttggataaccaatccatgtaccataataatctacatgctccaaataccaacacaattttatgtattttatgagtcaacaaaatattaaaaagaggaacctaattcagcaacatgcttgtacaccgtggagacaaggaattgcaatttttttgtagagaagtgatctcaagttgggagacaccctttaatttcttgtaatacacacgatcatccataaccagttccnccaaagagtaac

SEQ ID NO: 226709 - DNA, 501 bp, Glycine max
tatgctgcaaatatgtacaatatacctcctcaacctcagcatttatattctatcacagcagaacaattatgacctttccagtaacagatacaaccctggatggaagaatcaccctaacctcagatggtctagccctcaacaacaacagcagcctgctccttccttccaaaatgctgctggcccaagcagaccatacattcctccaccaatccaacagcagcaacaaccccataaacagacaacagttgaggcccctccacaaccttccctcgaagaacttgtgaggcaaatgactatgcataacatgcagtttcatcaagagaccagagcctccattcagagcttaaccaatcagatgggacaattggctacccaattgaatcaacaacagtcccagagttctgacaagttgacttctcaagctgtccacaatcccaaaaatgtcagtgccatttcattgaagtcgggaaagcaatgacaaggacctcaacccgtagcacc

SEQ ID NO: 226710 - DNA, 446 bp, Glycine max
  unsure (1)..(446): unsure at all n locations
agctttgtgaggtaactatggtgtcagttttatatgcagtcatcatgttatagtgctgaaactactatgcatttggaataaggaagcatttaaagtagagaagaagctgaggggaagtggtgtcatttacctggaagggacaagggcaacaaatggtgcaaaagtgataattaaaacatttactcgccttgtgatacagttctgaaaagaaatctgtgggaacaaatcatacaactgaaaactgcaaatagggggtgggggtggctatggctatggtgcgtattaggatactttaacaatgttagaagaccattataaagagtgggtattccttagaggatgcaagatgagggcattataaaggagtttaatgaatggattgctgacttaagaggctgaggacttggcctgtgtggngagaaagttcacctggtacagaccatatg

SEQ ID NO: 226711 - DNA, 221 bp, Glycine max
gagctcatatatgattcctaattaaaagatgaaactcattacatggtatgaagagaaggtaagctacaaagagtagcattctaaatccgaatcatgtttaagagtcgtaagactaacaaagtacgtagcttatacttatatattaatatacttatagagttcaaatgtgttaatccctataattcttgtacattttataatccctaaacaaaaattgaaac

SEQ ID NO: 226712 - DNA, 477 bp, Glycine max
  unsure (1)..(477): unsure at all n locations
cactaagcttctctactcatcctatntcatcaagctgttacttgcctttggattctctttgnctctaccagatcgctcctatatgctatcttatatggtaagaaagtgttagtcagtgaaaatgactaactttagtgtataaaacttgtataaattgtatcaaactctcccaatttatggctataatgcagtgatataagtattttctgttaagtataggtaataaatacttactattttcatcttgcatgcttaataatatatctctctcaatttcaggttaattaagcaacctttggaaagtgttgttttcatctcctcgctaagccaatctgctggcttggcgagcatccgctaagcacaacactcctgtgctaatcacgaggaagactctggaagaagatgagttgtacaggttcgctaagcgcaccacttcatctcactaagcgcatcggttcatttcatccgctaagcgag

SEQ ID NO: 226713 - DNA, 459 bp, Glycine max
  unsure (1)..(459): unsure at all n locations
agcttctatataagctaaaccattntattattaaagacaagttgagttttattcagaaaattagagtttatctcttttatcttagtgagagtgattcttctaaattcttgagtgattcaagaacacctttggctgtatcaaaggactttcacaacctttgtgtgttgccctcgccggagagagtgattctttccttccttttcctctccacccttgttctttcaaaccacaattccagaaaatccacctctgcccaaaattatcttcgtgaccataactcccattttacgcactcaaattaagtgattcttgagcctaaattgaatttcaaaacgagacctttcaccttgtattggaatcacctcatttggagccctgtagcttttgttattgccatttctatatatttgtccagccaccacttaacctactgtttaccattccattcttccattttat

SEQ ID NO: 226714 - DNA, 299 bp, Glycine max
cgtctcgatatattatgcgcctgtttgtacatccgagtcaaatgttatgcccgttcgaatatctcgagagcttacgttgttcaatctcgagcgtctcagtatatgatgcgcctgaatctgacctccgcgtggaaagatatgaccatttgaatttctcgacagcttccgatgttcaatatcgagggcctccatatattatgcgcctgaatcggacatccgactgaaaagctatgaccattctaattgctcaagagcttccattgttcaatttgaacgtctcgtatattatgcgcctcaat

SEQ ID NO: 226715 - DNA, 390 bp, Glycine max
  unsure (1)..(390): unsure at all n locations
tttccttagaggactgtcacggcgtgagggtagcgccatctattcanaatgtacaaaatcaaaatgctcataatcagaatgctcaaaattattatgctcaaaatcaggatgaacacaatcaccaataacagaatgcacatattcaccattcatagaatgctcaagatgatcaaaagggataaaatgatgcctaaataatctatggaatgtcctatctatctcacgattaaagggccgttaatcaaatgaatagtctctagtcatacactacattcagcatgcacaactagttgccttgctatgtaaataaaggtgcacgtttgaactaccactaccctcatatgatatccaaatgacttgaaatcgtgtgagcaaccttataagacgatg

SEQ ID NO: 226716 - DNA, 363 bp, Glycine max
  unsure (1)..(363): unsure at all n locations
tgagagtgtgtagctcaccatctntgcatacgagattatccttaatgtgtctactatcattgtcatcatttttttttgaggtgccacttgagctgccaggtctctccacctttgggcgtattctttagaaggattcgtgccccttttttgcacatgttctgtaatagcatcctatccgaagacattatactgacactgcctaccgaaggcaatcactatgtccttccaagaattgactcgtgaaggatccaagtacttgcaccagtgaacagctatcccactaagactttcttggaaggaatgtatcaggaatacctcatcctttgcgtatgcgttcattttttgataatacatntttagatg

SEQ ID NO: 226717 - DNA, 350 bp, Glycine max
ttgcttatcaaagacgtttttagtctcatcttctctttcctacatacacagagaccggatgatcgtgttggcgtcgacaatatcaagctacgccctgaaatattatatcggcacaaacgctatagccaagtccactttgcccttcttgcacatcgctgagctcaacggatcataacatttcgcttcaagattcaacctcctttccttcataacactaaacacatccacagactccctagccttcccatcacgacacacctgcctcatcataccagctgatgtcacgacattcaggtggcaacacatcactaacatgatgaacctcatcctctcccagcctgccatctgcc

SEQ ID NO: 226718 - DNA, 240 bp, Glycine max
aactaacgttaacataaaattcataaatctcacgaacgacatttatcattaacatccgatagaaacgcttgaacatcaccatgttatctatagaacacacaaatccaacctttttcaagatacatgttggttatgtaatggacaagctacaagactattttgccactggagattggctgcagacatgtcaatattcaacgatagatccacattttattttataactatgtacgtcaccac

SEQ ID NO: 226719 - DNA, 442 bp, Glycine max
  unsure (1)..(442): unsure at all n locations
agctgggttcggggtacttacccgctgatgatcgaanaacgatgaagaacgaatgaagaacgtcgaagaatggttgaaacctttgcgaaattcctcacggaaaacgttacggaaacatttcggaagcgcctcggcttaaattttcttcacggaaacaatttttccaagcaaattcgaaagagagagaagtgccaaaggggctgaacccttttcttcttcacttcctcctctatttatagcaaaataggggaggtggttgccgcccagctcgcccaggcgagctcagctcgcccaggcgagccaggttgcttcctccagaagcaacaaccttctggaggaatattctggagggcccaagtgggcctgggtgctatttgcacccccatttttactaagtacacccccctctgctttattttggtgattctcttttcgaaaagta

SEQ ID NO: 226720 - DNA, 490 bp, Glycine max
  unsure (1)..(490): unsure at all n locations
ngagatgaggaagtgtagaagggtgaacttcctgcttttattcgttgaccacagagtggtacctggagatatgtcgcggnggtcaggagaccttgtgaacgtcaggtggggtgctattgcccaaaaccaagcttgaccaatcccgacccaacccgggcatagtcggtcagtgagaacctgtgatgtacctaaacaggcgagctcctggcagtcaacagataaaaggaacaaaaaccacanagcaaggaggcttgtggtggctggccagctgtgaattttgtgtgatatatgggttgtggcctctggtaatcgattaccaagggtgggtaatcgattacaaggcttaaaaatgaagacaggaggctaagatggtctctggtaatcgattaccaggctcgaaaacgaggtcaggaagccatgagggcttctggtaatcgattaccaagggggtgtaatcgattaccaggcttagaaaggggactggaacatt

SEQ ID NO: 226721 - DNA, 437 bp, Glycine max
  unsure (1)..(437): unsure at all n locations
agcttatgctttattgtcctactaacgtttacttgcacaagacatcctattaactaagaaaaatgcacccatatacaatcaaggtagcttcattacctagattatttacatgtacttccaaggtgtatttgttatttacatcacacacgcctccttggctaaatttacatacatgcatactcaaagcatttcggggtaccaaaaattgcacatgcgctcatcttggtatttctaatacctatacatatacaaacttcatgatgaatcttgactacctacgcaataaggtgctacatttcatgctctgtttcttttttttttttaggggaatataaccatgtcccctccctttcatggattncatcttgctaacttgaactacttaagtagaattaggcgttgatacttattttttacttttaaaacaacaaaagaaa

SEQ ID NO: 226722 - DNA, 423 bp, Glycine max
  unsure (1)..(423): unsure at all n locations
tgagatgatgaagngttgtatggtgaaacttcctgctnttattgntgaccacagagtggtacctggagatatgtcgcggaggtcatgagacctatgggacgtcatgtggggtgctattgcccaaaaccaagcttgaccaatcccgacccaacccgggcatagtctgtcagtgagaacatgtgacgtacctaagcaggcgagctcctggcagtcaacagataataggaaaactagaccacagagcaaggaggcttgtggtggctggccagctgtgaattctgtgtaatatgtggattgtggcctctggtaatcgattaccaagggtgggtaatcgattacaaggcttaacattgaagacagggggctaagatggtctctggtaatcgattaccaaggggtgtaatcgattaccaggcttgaaaa

SEQ ID NO: 226723 - DNA, 451 bp, Glycine max
  unsure (1)..(451): unsure at all n locations
agctntcatatgtgatatcangtgctgccttttcccttagagttctctcacgagggggaggttgtgccatgttctcagaatgtacaaaatcagaatgctcataatcagaatgctcaaaattataatgctcaagatcaggatgttcaaaatcaccaataacagaatgcacagattcaccagttatggaatgctcagaatgatcaaaaggtataaaatgatgcctaactaatctatgaaatgtcctatctatctcaggatcaaagggttgtaagtcagatggattgcctctagtcatacactacattcagcatgcacacaactagttgccttgtcatgtaaataaaggtgtaggtatgaactacagctaccctcaaatgatatccaaatgacttgaaattctgtgccaaccttataaatgatgagaagaagcacataaatttcagacaaaatc

SEQ ID NO: 226724 - DNA, 489 bp, Glycine max
cgatccttgaatcttgattcttgattcttgacatcaactcttctcttgaatcttgaagtgattcttgaaatcaactttcctctcgaatcttgaagagatcttgattctatcttgaacatcttgaactcattctttgattgaactttgagctttttgtcatcacctttgttatcatcaaaacatctttgaatcaatcttgattcatcatgaagctttgcttctacatttggagagtgaacggtacaagctgtccatccaggttactattgccaatcaattcaccaacttatgctaaattgcctacctcaaaatctccaataggctcaacagaacatgttgtgtgttgttctccaaccaccactagtcatccatcaacagaaaattacaagtgctttactccttctgatgttcctgctgaatgtgcaccacactcaccaacttcaacatcaccaatgcaaccaccaccactgtccaatcatgagtgacaat

SEQ ID NO: 226725 - DNA, 493 bp, Glycine max
ttacagacacctgaggcatgcaagctagtttcccctcatttctctgatattataaggggggtcacacacaccaaacaaccaaatcacgtcgtttcatttaacaacaatcaatcttttccctctttctcttaattcccaatattcttcacattcacttctcttctgccatgtgaacaaacatcaaacatagcaagcacaaaacaaaatcgcagttccatccatagcactgcctcaattcttcccccaaaaaaatgagccagtgtgttcccagttgggatgtcgaagacaacccaccaccctcaagagtctcacttcgctccaactctaattcaactgcccctgatgttcccatgttagctctcttttcttcttcttttgcctctgtatcatacgagaaataatattataattcgagactatagctagtgtgatcaagttttatgtaattatattttgtacgacaatataaaaagtctaactcaactgatgagaa

SEQ ID NO: 226726 - DNA, 466 bp, Glycine max
tcagatccctcttggtggactagacttagaccaatcttcattattgtaacagcatacttaataccaacacttaatccatagatccctcttgtaagactaagtttcaattctgtttcattcaagttctaatgcaacaatacatttcccaatgttaaaatcacctaactaggcacacaaatggttgatcagaccaagagcatacaaaatttaagcactgaagaagcatttaacacaagacacaaaatcaattagatatgaaaataattacatcacctgttcattagaaatccccaataagggtgtttagccagccattatagacgaaaccctaacattaataagctgtcaaaacctaggtatttctgcaaaagctgctcctcttgctgcctccagagctctttttctgaaataggaactgtggtgtgctgtagaattcttttccctgagcccttgttatcctaattct

SEQ ID NO: 226727 - DNA, 431 bp, Glycine max
  unsure (1)..(431): unsure at all n locations
agtcacctgctgcatgcaagcttcttgagaattcgcanaagtccaatgtattgcaaacgttctcaagattgacagttgtgcaactctaaggacaccacatttgataaagaattatcggataaccaatttgggaattgtttaccaccatagttgatgattgacaacttgtccaggtgtttggaagggtgtagattctcaattacaatgacatccctttctttggcagaatcatcagggttccggtgccaattccatacaaactctagttccacaaggcatgttttatttttcaaatctgcagctaatgcatctgaggggttctcaatattctgcagctcctgaaatgataggcttacatgaaggttgagctcttctaatttctgaatagtgaacttgctacttttaccaacatcaaaccgactcatcaatac

SEQ ID NO: 226728 - DNA, 486 bp, Glycine max
  unsure (1)..(486): unsure at all n locations
agaatactaagcttgaaacatcaagtttgaggctcctatagctacttaggattatagttttttngttcataatctattgatgtaaaagttctgtgatatttaactctgtcgaacacacagtcatttatgtcacacctgatacatttaagccaaaacatcaggtgagccaaaaaaaaaatatgcataatagtcgctgaaacctagctacctgacaagaatattcaataaatattctacaaaacttgaaaagttatggggccggtaaggatgaaaagaggacttccaaatctaaaatcccctanattagatatcaaagactaactcttccagacattaatgcacgaattcgaactttctcacgacagcctatctactgtcagatataaaatgggtacgttgtgttagttgttaagctctcttcaagttataaccatgccactttgtaactttctcagacccaccgtgctaagcatggtgaaccataga

SEQ ID NO: 226729 - DNA, 330 bp, Glycine max
  unsure (1)..(330): unsure at all n locations
actattctttacaacaaatatcatgaattaagttttaatgaagagtttaattngatatacttttagtttaaaaattgtcttacgtcaactagctaaaaatcatcttcaatatcattgttaaatatgtattacaaaaatcaacaattcttacatatatcacaatccataattagataatagtgcaaataacatttatattattaatgcattcgatccatttaaattcattaattagaatagataacgatactacactaacacattngtttagttgaattaatacgtacacaaagaagcctacagtctcatatgattcggtggtacatattc

SEQ ID NO: 226730 - DNA, 482 bp, Glycine max
  unsure (1)..(482): unsure at all n locations
tagctgataattagctgacaggtcgaggttagtatatantcttaacatagaacacatgatcacgaatgattagagaaatatattnctatgcatcagcttgtttgttagaaagacccaacatttctatgtatctgttgccatctttatctacgcttgcaatgttatagcgtgttagcatagaagtttactttaaatcctatttgaaattatcactcatacatgttgtctcaacattgctctgattctgaacttaattcaggctagcattagttccctgtgtttgatactcggattcatccattttaattgtaaatacttgacgatccagtgcgcttatcggaaactcccatgaaatttcttgggacataaatgacaataagtaactgcacggggagcaacattgaccatctgcttagattctagccatatattgctatgatcttgctcattgatattgaattctagggacgtaagcatacaac

SEQ ID NO: 226731 - DNA, 480 bp, Glycine max
  unsure (1)..(480): unsure at all n locations
cgttcctaatatctatacagttgcatgatttctctttgagcaggtgaagacaaatgtggcattgacctggggtgaaaaacaagagcaagcctttgctatgctcagagaaatacttactaaggcacctganttagctcttcctgactattctaaaactatcgatctagaatgtgatgcctgcgtagtgggaaggataactatattgatacaagaggggcaccctattgcttattatagggagaaactgtatagtgacgacctgaactaccccacctatgagagatagctgaatgccttaatgagagccctccgaacttgtgaacatgaccttgctgccaacgaagatgtcgttcgtagagatcatcaatcacttaagtacattagacggcaaagcttgtacacaagacgcatgcgcaatgggtaagtacctatagcatatccatatgtatcactgcaaaagggaaaaacaatgtggagctg

SEQ ID NO: 226732 - DNA, 281 bp, Glycine max
ttttcctatatgtgactataatgggttaaattagttatatggtcctctaattcatcttttagatttaattggatcttctaattttttttattcaatttgatcctctaatttttaaatcgatttaattcagtttttaagtctaaacgataagaaatcacactttatgatagttcaaaatcgtcactaaatgattgtaaactgccacacaatacatagtctttactaaaaaatgaatcaattctaaaaattggaagatctcattgagctagaaaaacactata

SEQ ID NO: 226733 - DNA, 505 bp, Glycine max
  unsure (1)..(505): unsure at all n locations
cgtatcatgttcanattaagtccatatgtaacagctaaaccttcaaggccttcaaaaaataatttataagggaaacaattatgttcaattccatattacattagaagattaaattttgatttcaaacagattggaataacacacctggatctatgaatccctgtggaatagatattaagaatattaaggaaaaggcaaatgtgatagaagacaacatatccaagcggaagcacaaccattccatggcaccagcaatattgaactttggcctagaatatccatcagtcaatttcatatttgtttcctgaaatcttgatttctgatcaaagcttctaatagttgaagtgccagaaaattgttcagcaaagtgttgaatgattggtgctntgcagactgcaactaaacgtgatagttctcgggctgatgcaatataatatcgctgcagaagtacaagttctgtagatgttatctattatcacgtaatactatataatggaatgacctt

SEQ ID NO: 226734 - DNA, 449 bp, Glycine max
  unsure (1)..(449): unsure at all n locations
aagagtcgcacgagacatgttagcganatctctttttctgccattgcagctacctttgggtggcattccctgcttaaacatctcagaactttgttaatgagatcctcattatgaaacatctttcctaatgatgcaagatgatttactatatgtgtgaatctcttttgcatatcttgtatgggctcattttgattcattctaaagacttcatattcatgagttanggtgtttattctagatgtctttacatcagctgttccttcatgggttacttgtaatgtatcccacatttcttttacattcttacaatttgatactctaaagtattcatccatgcctaatgcagaggtaattatgttattggcctttaagttatattggacccttcttctttcttatcccattgtccctgcgttttctatagtgcgtttttactaccattgagggat

SEQ ID NO: 226735 - DNA, 234 bp, Glycine max
tattacctacaccaataagacgcatctactttctagcagcccatctcttaagaacttcatcatttatcgtactcggcctgcagtaaatatgggatggatgactttctatgaacgtttccagaaagcatgttagtgatgataaaacatgctataaagtcttgtgttggtttgtgggccagttcttgatcttggaagcaaccgagctgattctaaggtctcgaaaagactactatg

SEQ ID NO: 226736 - DNA, 461 bp, Glycine max
  unsure (1)..(461): unsure at all n locations
agcttatgagaataatgtgattgtgaatattaagaagggaaggaagggtggaatgtttatatagatggaacaagtcgtgggggaagagggcaagattgaatctgagccgttggattatgagagatnttgaaagatgaaaaaaacgcgcaattccgaaggactgtgatcgtgcttcgttgtaattctagttgtgctctttcttgaagccactcactcaagcctaagttgtcggaattgcttgacacgctttgaaaattgtataattatattaattaatttcaaaattgacatctattcaattataatttatactattctccttttagactttatatttttaacggtgaaaattccatttatatatgatgtatagcatccattcgtataatatagtgctcctttgacatatagggtagatcggaaaaaataatataagaatataatatcaaagactcatttat

SEQ ID NO: 226737 - DNA, 473 bp, Glycine max
tatgtatctttagaatatggagaaccattgactcaatgtgcttataatgttacataaaaaggttacacatacaattcatctgacagagattcaacttcaggataatttgctttgttccatttaaagtcctgttctgccaaatggtataaggaacattgccactcaatgaatttttttcaattgactagtcatagggaaagatttgtcttataaaatcgttggttgtattccatgtaatgagagagccacaagcaaaattaatgaatcctacacaagtaagggtgggtcatattataattattctatgcctttctctcttcataacaagaccataacaaagatgagaggatcctaatccatggatagatgaatacctcttccttcatgcatgcatccaaacacattatccgcattccataatttggtataaactctgctatacgcaatgctttggtactccccatggagctctg

SEQ ID NO: 226738 - DNA, 292 bp, Glycine max
tcctcggcgagagtgagatcctagattttgagacacactactataatttagcactgaattttgcgtgtatctctgtagtatggactgaatgcttgaaattgaggatgatcaatgccatgcttgatgtgaaagccactttcacaatagctgaccatgtgcttgaatgacactgtcccttcgtacccctatttagagatgagatgaattacgtgagtggatagaacctctgagcctatacaaaggtacttgctgctaccgtgacttacgttgatgaagagcatcattcacatga

SEQ ID NO: 226739 - DNA, 441 bp, Glycine max
  unsure (1)..(441): unsure at all n locations
agcttccatcaagtagttcttgttgaattctttttggcaaagggagaagagaatganaagatatagcacacttttgttttctgccaaagaacatggtttggaaaacagaaaacttagaaagctttttggcaaaggaagaagaagaagaaagatgagtaggaaaggtttcaaggtttctcaaaagttgttcaaagaagttctaaaggttgtaaacgttctttgaatgcaagtgaaggtcttgctcttatagactcttcatgtctagtcaagaaaaccattggaagagttataacctcgagaaaatcttgataaaaccattggaagagttacatctcttgactttttattcagaacttgtcactggtaatcgattaccataaccatgtaattgattacatgaagcattttatgaaaagatgtgactctncacaattgaatttg

SEQ ID NO: 226740 - DNA, 501 bp, Glycine max
  unsure (1)..(501): unsure at all n locations
tcttctatttataaccttcatcttcaagtatttgttgtctcttattggatggattctttactctgttcttcgtctaaagtcttgaggtcgttggagcaattaatgcttgcattaaatgcacgtcctttcttcatgcagagtccatgttgatagcatgtcttacacttcagtaggaaagtcacttcttccatcatagcaagcctacacgagtagagtgtactttttgatgaagatcaacacttccagattgtggatttcatttattattcaaaagactttgctgaatcctaggagaatgttttatgcaagagagaatcttagacacatctattaaatgaaagtcttaaatgcactatttaatgctatgttagaccatcttacatggatgtattgtttgaaaattcatatgcaaaaatatagaccatgatttgatagcacataaaacataactggtatcacttttatttatntgcatctaataattagaaagcctacttcgtc

SEQ ID NO: 226741 - DNA, 438 bp, Glycine max
cggatccttaagtcaccagacgcatgcaagctctctgtattctatagtatacaagggttacatattagctactttttcctctctcatagcaagacctgtgcatacgttgtgaaccaaacacgcatatgatatattatgaaacaaaatggactgtggtatttctattataatagaggaagaatgcattcgatttatcacaccacatgttgttaaaactgtatcgccccaaagccggacaggtacattggcatgaagtaataatgtccgatcagtctcaacaagatgcatattcttccttttggccatgccattctgctgaggagtatgataatataggactgatggagaatgccctgctctgacctagaggataaatagaagaagacaagtcttcttgtccattatcactgctacagatcgtaattgtcttaccaaact

SEQ ID NO: 226742 - DNA, 266 bp, Glycine max
tttcgattattttcacagcatgttcattggttcttctacagctaccattgttatcttaaaaagcctcaattttatctccaaactccatgaatgtggttcgattaccctctacatgtgctcttattcgaatcttttcactgcatgttcgttgtttcttctaaagctacctattttaatctcaaaaagcttcgacttttatttaccaacttcatgaatgtgcttcgtgttccctctcatgagtcttattttttcactgcatggatatt

SEQ ID NO: 226743 - DNA, 347 bp, Glycine max
  unsure (1)..(347): unsure at all n locations
agctntgagctttattaaacgacaataactttntactcggatgtctgattgagtccccgcatatatcgacacgctcgaaattgaatgttgaagctcagagcaaattcaaatgacaataactttttactcggatgtctaattgagtcgagtatataacgagacgctcgaactngaatgttgaagctctgagcaaattcaaacgaccataacattttactcggatgtctgagtgagtcccgtaatatatcgacacgctcgaaattgaatgtcgaagctctgagcacattcacacgacaataactttttactcggatgtctgatatagtccggtaatataacgacacgct

SEQ ID NO: 226744 - DNA, 336 bp, Glycine max
tcaacattcaactccgagtgtctcgttatattatacgactctattagacatccgagtaaaaagttattgtcgttcgaatttgctcagagattcaacattcaatttcgagcgtctcgatatatgacgggactcaatcagacatctgagtaaaaagatattgtcgtcttaattggctgagagcttctacattcaatttcgagcgtctcgatatatgacgggactcaatcaggcatccgcgtaaaaagttattgtcgttggattgggtgagaacctcaacattcaatttccagccgtttgatatgataccggactcaatcagacattccagttaaaagg

SEQ ID NO: 226745 - DNA, 445 bp, Glycine max
agcttctgagaccaatcaatatacactattatctttggagacaatggcgacagtttaactactttttcctctcccattgaaagatcaatgcaagcattgttatcatctaccaagagaagaggtaatgttggcaatggcactggcggcgcctttgaattggtagtatccttatttactgaatttgacaccatgttggcagcacatgcatcatcagaagaattaaaactgcattgatcagatgttgcttttgggatgcttgtttcagaagtggtagcttgttctacattgatacctttccttagcagtggagagagcatacgattaactattacttgtatatcacctcttgtgactgtatcatcacatgaaatcaacgaaacaataggtgttccatatggtttccatccggatatgatgtgtgagtcactatctctaagagaaatta

SEQ ID NO: 226746 - DNA, 309 bp, Glycine max
ttagcagctagcatgtccctcatgtagtgatgctagctactgttgtgttttaagcatcacgctctgtgcccagcccaactactgatcactattcataaatacaccaaaactatgatatatgtgtattgtatcatactgaacctcatctgaatattcatacctgcaggattctagagcaaccactataaatgtgttacaaattgttttcctgttctttacttctcatatattgaaatgatataacaaaatgtatactagttatgtcgaagactctgctaccagcggcgtgcatttgtggcaattgccaat

SEQ ID NO: 226747 - DNA, 364 bp, Glycine max
agcttgagaggattgatggtgacccggtgtgtgagaaactatgatatgggctacgtgggagtacgtgagctcatatggaggtgggcaacatgggatggtgggtttatgcgcgctatgtggatgttaaaaacttgttgtgcaccatcgcccgaccgccacctattaccacatgtgatgggtaccccataatcctacaatcttgagatgaggaagtgttgaagggtgaaacttcctgcttttattgttgaccacagagtcggacctgtacatatgtcgcggtggtgaggagacattggggacctcatgtggtgtgctattgttcaaaatctaccttagcctactccgacccgactctgtgctagtc

SEQ ID NO: 226748 - DNA, 443 bp, Glycine max
  unsure (1)..(443): unsure at all n locations
tcctgacaccattgcgacagttgtgaagcatattggaagattgttaattcttatgggaagttactgcttattaggaattcatttcctaatgagaagtaaaggcttaatggattgcttgtcgggaattaacttcctacgggaaattaagtactaagtgaaaacttggcctataaataaagagaactatttaattcagagcaatgtttttaaaaagcagccatggcggtatcatggtggacttctcatatgccgccataaaatggcaatggcatggcaagctatggttgtcgctttttgtgttgcggccatagcagaagcacccacaatggtggaatgaaggaatgaaaagaaaagatgatggaacaaagatgagtggcagaaatctaatgtgagagatagaataaaagatgggttntgtgtgttctgacctgatccaaagttaa

SEQ ID NO: 226749 - DNA, 400 bp, Glycine max
  unsure (1)..(400): unsure at all n locations
agcttcagggaagatgatagaccatgcttctatattcgattgctatgctggnatcgncgctggtggagaagaagcataatagagagatgcatgggattctctgcttcatattatcagtggacctaacaaccgtatcttatgttttgaggtatatgatatgaagactgacaccgaccgaccgactgatcacggacacggataatggaatatctgtgaacatttgtaacgttcaacatataaaacgtagtataaatgtcatattaatgttaaacattgatatgaacgcctttcatacattaaacatgacaaggaattaatgtgttcttgcatcatataatatatggaagatggctaagtgggatggtgacatggaatgtgaaggtgatgaatattgacagct

SEQ ID NO: 226750 - DNA, 364 bp, Glycine max
agcagcaactaaacatcaattcaatgcttaactcatccatggcaaaagcttaaacaatgtttaatcaccatggatagaagcttacataaataaaatacaagaatcataaaattcgccttctatgaggacttgttacaaacactatgtgaaccaacaataactaaggcttaaccacccatggcaaaagctataaacattataacattcctaataggctgaaaacaataagccataacaggccaaatatcaatgaaacaatgaaaagattattcaccacacagttggtgtgcaccttttctaaatagtgcatgacttcaaacaatagtcaatatcttcaaaatcttcaatagcatttaatcaaaca

SEQ ID NO: 226751 - DNA, 302 bp, Glycine max
  unsure (1)..(302): unsure at all n locations
gctctcattcatcaaagataccataagtgttacacatgcttctatttatagcctaagtagctctcttgagaagctagcgttacacccctccaatagctaagctcactctcatgccacaatacatgaaggaagatagtctccttgataagctttcttgtgaagcatgtgtacacctctccaacagttaagttcaccccatggaaacacacatgtcctgtncttgctaatgctaccccaacatgatacatgataatacagatagagttcctactacacatactattcagaatgcccgtgaatac

SEQ ID NO: 226752 - DNA, 493 bp, Glycine max
  unsure (1)..(493): unsure at all n locations
tctaggaaagcaactggagaccttgtcaaagaccctaagcatttttctctaacaactacatccaggtaatcctgctaatgtttctgtaatacaagtaggaggttgctctgtgtgagaggagctcatgagtcaagcacctgcacgactcaagagtaagcatcaaaagaggttaattatatggccatccaaaatcaccaagggtataataaaggaagcaatgcaagttatcatccatgaggcaaagcagattttcagcatggaacaattgatccagacccatgagggtctnttgcatcaagctagtgatgttaaagaatcgcttactgtgaggtaacccaggaattctaacattatctccttttttgtagattaaattatattggttacatagttgcatagcttntatgtaatatctcttgagatctagtgcttgctgcattataccttgactggtagaacttgctggcttaataccatgtatatcgataatttg

SEQ ID NO: 226753 - DNA, 454 bp, Glycine max
agcttgagatgaagaagtgttgaagggtgattcttcctgcttttattgtcgaccacagagtggtacctggagatatgtccggtggtcatgacaccttggggacatcaggtggggtgctattgcccaaaaccatgtcttgaccaatcccgacccaactcgggcatagtcagacagtgataacctgtgatgtacctaagcacgcgagctcctggcagtcaacagataaaatgaaatcaagaccacaaagcaaggaggcttgtggtggctggccatctgtgaattatgtgtaatatgtggattgtggcctctggtaatcgattactaagggtgggtaattgattacaacgcttataattgaaaacatgaggctaagatggtctctggtaatccattaccaaggggtgtaatcgattaccactcttgaaaacgaactcctgacacttatggtgcctct

SEQ ID NO: 226754 - DNA, 361 bp, Glycine max
  unsure (1)..(361): unsure at all n locations
taaccctctcttcatattagcagacaacagaactttctatctcttatatgggaaagcttctcataactggtggagctgggacttcaagtggagaaggagacttttcgaccatgaatatgagatggcagttgcattcatggaagaaatctctgatatttctatccagcaccaggttcaggacaagctgatttggaaagctgatgctagtggagtctattctactaaatcagcctacagcttgatgatgccttccagcaatcctttacctagcaagaggaatttccagatcctgtggcaatgtanaattccccagagagctgcggatatttcttggagattgtattgggacagacttccaact

SEQ ID NO: 226755 - DNA, 349 bp, Glycine max
  unsure (1)..(349): unsure at all n locations
agcttggggagagatattgttaccaactctatttatntcaaaaagagagtcttatctagtcaagggctgagagaccatacaagtttgctaacgatttctaattatgtgggccattaagtctatcatatgctgacaatagccgagaagcccatgaatctattcgggggcggagtaagtgtctgccatcgccttggcctatgctaacaagcggngaagtacttgactccctttcgaggtaaaagcaaaccgatccatgcggatggttgcctcttggtgtaaagagtcgatcacccatgctatagcctctttttccgcgtatactngatcatactcgttcgtgatgtatgct

SEQ ID NO: 226756 - DNA, 498 bp, Glycine max
  unsure (1)..(498): unsure at all n locations
gtgatgcancatntngagaggttaatgaaacaacatgatgattgctctcatgagaggttgggtcanatggagaatagagatcataatgaagaacacggaggagaagagggaatgatggcgttcctacacaaaaccgaattgatggtattaaactcaacattccttcatttaaaggacagaatgatccggaggcctacttggagtgngagatgataatagagcatgttttctcatgcaacaactatgaggaggaccagaaggtgaagcttgccgccacggagttntccgactatgctcttgtgtggtggaacaagctacaaaaggagagagcaagaaatgaagagccaatggttgatacatggacggagatgacaaagatcatgaggaagcggtatgtgcctgctagttactcaagggacatganattcaagctccaaaaactaacccaaggcaacaagggggttgaggagtatttcaaggaaatggatgtgctcatga

SEQ ID NO: 226757 - DNA, 292 bp, Glycine max
aaaatggagagaataagaaagagggaggaacccatgctatgagagccgctcccacatggccaaatctccaaccagctctacaacggacacactcagccgaaatcaaccttactcatcacccacatccgatcagacaagaacgcccaatcgtccacaaaggccaccccaaaattagctacacaactggcttgctgcacatccgatcgtagacaccacccctaacatgaaacaacacaccaaccacggaagataggcactagcaaacaagcatggagaattcaccccaaggaca

SEQ ID NO: 226758 - DNA, 420 bp, Glycine max
agctagagcctctttatgtctgggatatgtatgtatcatatagatccaaagacccttaggtgctttgctgatggcttcttcccattccaagcttcaattggagtcttgtcttttacagacttagttggacatctgttgagtatgtaaacaacagcgtagactgcttcagcccagaatgtgttcggtagtcctttttccttgagcatcaatctagcaatctccataactgtgtgattctttctctcggacactccattttgttgaggagaatatgcgactgcaagttgtcgctcaatgccttcatcctcacaaaatctttcaaactcgcgagaggtgtactctttgtcgcgatcacttcttaatactcttatccgttatccactttgattttcagcaagggccttgaacttattgaatact

SEQ ID NO: 226759 - DNA, 490 bp, Glycine max
tcgtctgatggagagacgaatttggcaatcaactctctgatatttacgtacaagagtttctaagtgaacaaattataatctatcttgcatctaaaatatacaatagtaataaatagagaaaaatagattcgtgtacccggatgcgcattctcaaagcaataattcttcaacagtgtgaagactttacgataaatggagaaaaataaatttgctatcaactcttgatgagtggaactctaaaaagtaaatgtttcttctacttttcaagtctaaaactagacttaaacttttctaatttgtgacgggtggcatttgtctctggtatatgtttctatttatgatgttaaagagatatggatttgagccttctttcaacgataaaagaaaatctaaataattcatatctttatagaataacatgatctatatatctatttaagaagcttctcgtatagacaatatatacatgataattatgatatcaatcaca

SEQ ID NO: 226760 - DNA, 423 bp, Glycine max
agcttctcgatatgttatacgcctgaatctgaccttcgagtgaaaagttaagaccatttgaattgctcaagagcttccattgttcaatttcgagcgtctcgacatgtgatgcggctgaatcggacctccgagttaaaagttataaccatatgaatatgtcgagagcttacgttgttcaatttcgagcgtccctatatgtgatgcgccagagtcgaacctccgagtgaaaagtaatgaccatttgaatttctcaagagcttccgttgttcaatttcgagcgtctcgatatttaatgtgccagaatcggacctccgagtaataagctatgaccatttgaatatctcgagagctttcactgttcaatttcgagcgtctcttaatgtgatgcgcctgaattggacctccgagtgaaaagtatgacca

SEQ ID NO: 226761 - DNA, 499 bp, Glycine max
cgcttctattctgaattcaagcatctcgatatactactgttcattatcggacatccgagtattaagttattatcgttcgatattgctcagagcttctattctgaatttcaagcatctcgatatactacgggacacaatcggacatccgagtaaaaagttattgtcgtatgattttgctgagagcttctattctgaattccgagcgtctcgatatactacgtgacacaatcagacatccgagtaaaaagttattatccttttattttgctcacagcttctattctgaatttcaagcatctcgatatactacgggacacaatcggacaaccgagtaaaaagttattggtcgatggatttggttagagcttctattctgtatttcgagcgtctagatatactactggacacaatcggacatccgagtaaaaaggtatggcgtatgattctgctagaacttttgttttgattccgagcgtctcgatatactgtggacacaatc

SEQ ID NO: 226762 - DNA, 438 bp, Glycine max
tagcttgtatgatgtttaaacctgttaggttctctgcaagagagattaatcctatcatggggagggtgtgtgtcaagcgcgtgtatctctaagtgaagcgcttgcagaatttcaagaatagtaacatgacaagcgcgagtagtgcacttcctgattctctaccagcacttgatggaaataatttcaatgattgaagggtaaacatgaatgccatatttggctttcaagatgttgaatatgttgtaaaggtgggatttcaggaacttgggaagaatgctactgaagaataaaagggtacccatagagctcatgagactcgatagcaaggcatagctcttgatccaccaatgtgtcgatgccttagtatttggaaaaatttccaggctaacactgtaaagcaagcctgagacatcttgataaaagatatggtgactgtga

SEQ ID NO: 226763 - DNA, 321 bp, Glycine max
attatgatggttgttaagaagcatcacatgcggtcctatggatgtctgtacttctggactatgctatagctcggaatcataaagcttttcacccccctctcccatttcaaatatgtgcttacagtatattccagacgtgagtctaatataatcatatatactcgaataccaccaccatctataattgtccctttgtgcctcgctgactatatatactaacacctacaaatgatggctaacagaatcccagatggcaactcttaatcaccttggcgtggatagcgtactgaccacggttcactattctaaccccgattgaag

SEQ ID NO: 226764 - DNA, 456 bp, Glycine max
  unsure (1)..(456): unsure at all n locations
ggatccttaagtcacctgcagctgcagcttaagtatatattcaattctgatatttattctctcatgcngtgttacgagagagaaagattcacatgaaactatattaatacaccattatttgtgtagggtccattaaacattctatagtgtctgtctcactcataacttgaggggaacatcgaataatgaacattataggatccaaattctntcaattcacacgcaattactaactgctttcagctcacagtgcataactacaccaagcaaactacatatctacctatagtatagggagattcacaattatgcgaatctcttggaagatacctcaatcttctcttttctagcaactgaatcccaatccttggctgcaattccaatattccaatcaaggtttacattatcctcaccaactcgctgactatggctatccacgcacaggcatgcaagtta

SEQ ID NO: 226765 - DNA, 346 bp, Glycine max
atactcagcttaactatgagacaacaatgttttgagaaactacactcttaagaccacttagaatcttctttatactaaataaaagacctacttagataaactggtcacgaactcattagacacaaaataaatcgaaatatttctatgaggaacaatcaacttatacacctttacttataggatctgttcattttcagataacgtaaagaaagcgggggttgagaagaaaagcacagataactttcatttccaccatccgtttgagaataaagcattaatagatttagtacaaaacatgtgggatctacccacaagtgaacagattattaaagaaagatggaggcat

SEQ ID NO: 226766 - DNA, 469 bp, Glycine max
agcttgataacacgcagagactaacgtcaactgttgcgaccttcgtttatcgcggccgacaagcccgttgacacgtggtgatttacgtcatcttccgcgctcacaagatctgtcatactaacttttgagtcacgctgacgagcggaaatacccgagtggttatccgtataaactttttgcattctgtaagatgaaaagcctgatagcacgcagagactaacgtcgtcttctgcgcccttcgtcaatcgcgatcgacaagcccgttggcacgcggagattgacgtcatcttccgcgctcacaagatctgtcatactgacttttgagtcacgctgacgggcggaaatacctgaaaggttattcatataaactctttgctgtctgtaagacgaaaagcctgatagcacgcagagactaacgtcgtcttctgcgccattcgtcaatcgcgggcgacaagcccgtttacacgcg

SEQ ID NO: 226767 - DNA, 485 bp, Glycine max
  unsure (1)..(485): unsure at all n locations
ggtcttcgccagtgaaaggatcgaagtggatctgantataggcaaatntaatcatcatactaggacgactgagaaaactggggcaaataaagagggtgaggatgagggagaaacccatgctgtgactgccattcctgtacggccaagtttcccaccaacccaacaatgtcattactcagccaataacaaacctcctccttacccaccacccagttatccacaaaggccatccctaanatcaaccacaaagcctgtctaccgcacttccaatgacgaacaccacctttagcacaaaccaaaaaaacaccaacaaaaaggaattttgcagcaaaaagcctgtagggttcaccccaaattccgttgtcatatgctaaacttgatcccgtgtctacttgataattcaatggtagccataaccctagccaaggttcatcaacctccatttctccgagaatacgactcgaacgcaacatgtgcttgtcaca

SEQ ID NO: 226768 - DNA, 468 bp, Glycine max
  unsure (1)..(468): unsure at all n locations
tctcagtcacctgcngcatgcaagcttgtatagntccccaatttatggttattgtggagtaaattttgtaaataaatcttattttatggataatgctgtctctagaacatttccattggatttaatgatgaaatctgtgcattttcaggtgaaaaagaggatgagttttgaattgcaaaaagttgcagttgggctaaacgcttattcaccgctaagcacagcttcagtgcgcttagcgcaaaggagaatctggcagagcattagcatcaaagccgcaccctatgcgcgagatcaatgcgctaagcgcaacaggtgcctttagccaagctcaacgcaagactggcgctaagcccaattccacttactcgagctaagcgcgagggtggcactaagcgcaaggttgcgtattctgagcctatatcaaagcctgtttgtgcagaattatgggacacaccttttgagacttgg

SEQ ID NO: 226769 - DNA, 508 bp, Glycine max
actaagcttaatcgaggaagcgaatgagagagagagagagagaaagagtttggcatggaaattgaaatagaatatggagagaagttgaactttgaagtatgtctcacaagtttctcattcatcaaagttatgtcaagtgttacacatgtttctatttatagcatggcacatgggaagcttccttgagaagcaaggaaggttgggaagctagaggaagaaagcttccttgagaagctagaggggggctactcatactcctccaatagttaagctcacccccatgccaaaatacatgaaaatacaatgggaagcttccttgagaagcaaagaaggtagcttccttgggaagcaaggaagaaagcttccttgagaagctagaggggggctactcacacccctccaatagctaagctcacccccatgccaaaatacatgaagatacaacaagtccttactacaaagactactcataatgccctgaaatacaaggctaaaaccctatactact

SEQ ID NO: 226770 - DNA, 461 bp, Glycine max
  unsure (1)..(461): unsure at all n locations
agctngacgtatattggccacctatgaaattgatttgggatctgtattacactntttcctttggcttgaattgaaacaaaatgtccaacagactttttaggaaagatttttaggtcacaaagcttaaaactagtgtcttgttaaatctttgtggtatttcggcttacggaacgtatctaaggctctcttacctacggaattatgattaagaaacttttatagtctgattttaacctgagcttacatgaagtatgtatgacacattaatgtgaactgagagtaaggatttggcgaaatttaccactgcatcgtttactaccaattattttatcatccttattgctttgttttcactattacacaatatggatataacatcgatcttaatcaaaactgatgataacataagtgcattacatttttgaaatgaaatgcgttgtcactgacgtaatatcattatt

SEQ ID NO: 226771 - DNA, 489 bp, Glycine max
  unsure (1)..(489): unsure at all n locations
tcagaccnaagcaactcacaatctaggtatctaacacccctctttttattggattntcaagggttgtgaagtgaaaatgagaatggggtatatttggagcaaactctcgcctcacacaagtctatatcatcaatctaaactcgctcaaacttggtttacgacgaagactctaccgaatcaaaatttgactcttcaacacccaatctaccctagaaatggctcttgccttcactatggtcattcatttttctcctttgcacaacccaagctctcccacagtcctaaatgacatttttaaactaggattaacttcctttaacctcccattaccactaagtccagatttagtctttcaaactctcaaagcattacttttttccactcatggcactacattctcactttctaaccctaggttaactctactcttcatctctagtaggttttcatangcaatctcagcacacaaacatcacaagcatcatcata

SEQ ID NO: 226772 - DNA, 139 bp, Glycine max
cgagatcactctagggatcgacctttctcctttctctaaccctgttttgctccttttctgtgtctcattttcatgttccctaatgtctggaaaaggtcacatatcttagttcacataactgcataagctaatgattctt

SEQ ID NO: 226773 - DNA, 423 bp, Glycine max
ataatcacaaagctcggaggattatgatctttggacttctaaccgggcttatgtcagattacatcttctagagcatttagctacagtctatgtgtatatcttatattaggttctcttcctgttaactgtttcaattaggtttatagtaactgaaaactctcttttctttctaactcttaactaactattgtcactgcgtcttgcttactccatactctcgatctatatatttactagctgttagatatcacgacggtattatatatatggtacttcctctcggcaggaatcattagggtgttactttatgggatccagtggttcattagattttgaatccacgggcctggatgattaaacattgacttctttcgatttggagcatacgttacatagttgttcctttgcactctactatatatc

SEQ ID NO: 226774 - DNA, 300 bp, Glycine max
  unsure (1)..(300): unsure at all n locations
agctttgntgttggatggaacatctgctttatttgttctcttttgatccacacggccttggccttgaaactggaattgaacgacgatggcccatgtgctatacgtggctgacccagtgagattttcgcacaggatcaatggaataatggttaaagccacaatgaaactcatggcgaatgcggtacccatgagaaaagttccttaccacagtcaaaactacctattgtggccaaacagtagcccaatacacctcaaactaagctcaaacgaggtcatcataagtgtaaggtcatggtatat

SEQ ID NO: 226775 - DNA, 422 bp, Glycine max
ctcaagcttattcagccccttctatcgttctacatcacattcacatgattttcttttgctactgacgatcttagagaggcttatgcttggctgagtcataacacagaacataatgataaagtaagctctataggatttcattcattctttgctgaaatggatttgaggagccttgtgtacaacttttttaccgatgttgccaactttgattgtctttgcctttatctctcacaagtgcagaatttacgctaactactaatattctttctgataaatattgctggaacttggaattaatggtgataactatcttgcattattctctgtgttttatactaactcctgaaatttacatcatgtttcgacattaaatacattgacgctgctagtaatgaaaattgactatcttcagtactttgata

SEQ ID NO: 226776 - DNA, 442 bp, Glycine max
  unsure (1)..(442): unsure at all n locations
agcttgtatgagtactgttaaagattcaattatttgtgtgcaagctgtcctcaccaccacagttgtgagcaactccttcttcaatatttctatgagggacttancaacatggacaggagtatgattgatgctgccataggtggagctcttggtgatatgacccttggtgaggctaggaatttgattgagatgatgacttccaactcctaacgattcagtgcaataaatgatgctatttatcttagaggagtccgtgaggtggccacacattcatcttcatctactgataataaaaagctcgaaggagaacttgatgccttggcaacctagtaactcagattgcatgaatcagaaatctaacctgtcgaagagtctgtatctatgtcttctgagatcacatacagattttatcttctttgacgatctgaatctagagcacttg

SEQ ID NO: 226777 - DNA, 456 bp, Glycine max
caagcttgcataatccatttacaatcctttatattttctcagatttcaaatgtcaaatccatccacatcatagattgctatatcgaatgacatatggaacgagtgagccatgacatcaccatgcgattgcaacgcctccaagcttcatgcattggatctgttggtagaggacaatgaagtgtgccatagaggaaatgctctttgttcttggatttaagcgccagaatcatatcacgttcccattgatgaaaattgctttcggtcaacgatggcgaaacaagaacaacggtaggattctctccgggatgaacaaaatatggattgacagggttgacaaggtgatcggaatttgaatgtcgattatttaacagtcatggttaatacaaaagaagaagactagaacgatcataaatgaaactgatctcatatcgagaaaacggaagaatgatgaacaac

SEQ ID NO: 226778 - DNA, 341 bp, Glycine max
  unsure (1)..(341): unsure at all n locations
agaggactctcctagtctcgtactgatatatgccaatgcaattcgtatattgggccctcatgcttctagcccaacaacactcgctgctcttttcagtgactaaaattaaattaccaatctcactctcttgtttactaccatctcttatgacatttaatatttaatatttaatattcaatatgtaatatttttgcatattcatctttctaacttgttttttatcaccgatctatccaattacataagagtgaacncctctttaaaatcgaatagaaacgacagttattcctttcttcttcttcattcgaaataacagtggaaacttaatttcattctttctc

SEQ ID NO: 226779 - DNA, 397 bp, Glycine max
catcaagctggcttgtaaactatctttacttacttgttagctgatgcagatttatgtatgagtacgtcttgatggagaggtcgggatattaaatactgcaccccatgttttctgaaattatagctgtgtaattgtaaccaagattttgttaagtcctgacaatctcatatagacgcctggatgacataaacctctttgtgaatcttacagtaaattaacttggaggagtctctggtgtattttgacatactgacatggtgcaacatatcgtatgcttcctctcaagttgtgaacatttccacgagtttgatttatgtatgaaaattaattggacaatgttgatcctcgagcacacatatgcatttataaatctgcgaactaactgtgatgctactaa

SEQ ID NO: 226780 - DNA, 89 bp, Glycine max
tcctaaccctgaagcgcgtggtacactccgactcaacatgatgatgaatacgcatgcgctgactacactgaccctgcatgatagcaaat

SEQ ID NO: 226781 - DNA, 434 bp, Glycine max
  unsure (1)..(434): unsure at all n locations
agctagcctatttaacttgaaattgtaatattatgantattacacacacaatgaaaatactaagtctttattacctatacttaacataaaatacttatatcactacacaataaccataaattgggagagttcgatataatttatacaagttttatacacaaaagttagtcgtgttcatcgactaacacaacacacattttcttttgattgcttttttttttttacacaacttatttgatatgtgtgtgctgatgctttacctttttctttacaccccattcaactccactcccccaaatttggggtaagtttgccttgaaccatatgctctcctagaatctatacaaggtatttggagattattatttaagttcggagttcaatttgaaaattgtattcatctaaaaagggtgcacaggatacctatattattc

SEQ ID NO: 226782 - DNA, 385 bp, Glycine max
ctcaacctcagcagtataatcaaccacaacagagcaattatgacctctccagcaacagatacaatcctggatggaggaatcaccctaacctcagatggtccagcccttagcaacaacaacagcagcctgctccttccttccaaaatgctgctggcccaagcagaccatacattcctccaccaatccaacaacagctacaaccccagaaacaaccaacagttgaggccccttcacaacctttcctcgaagaacttgtgaggcaaatgactatgcagaacatgcaagttcaacaagagaccagagcctccattcagagcttaaccattcagatgggacaattgggtactcaattgaatcaacaacagtcccagaattctgacaagct

SEQ ID NO: 226783 - DNA, 482 bp, Glycine max
  unsure (1)..(482): unsure at all n locations
tatgtttgaattgcagaataaactgactgtttcatgcacccatggaggttgtttctgactcagtttcttaatcatttaatgttgtttaaaaaatacactaaaaaaaataaaaggacaggaaatgcaatatcgatccagactaattgatgaaacttgaacaggatcacacaggttcttcanagaaaattacatgacaaaatagttaagccaggcctaagaagataccatataagatttaaaaaaaaaaaaaaaagatggggggcacatgcatacatcaatacataccttcatcaacatcaacagcaacaacaagtttctggggcaattgttgatcagagaaacaaaagggtttggtgggacttccacccaaagatctatcttcaacatcaatacccttctctaaaccacctaacaagggagggtgaggaacacatgcaaaaccattgggtntttcttttcttacaaagaccctattggcatat

SEQ ID NO: 226784 - DNA, 454 bp, Glycine max
acagcgacctgcagcatgcaagcttcctcggggccattatctgcgaagctttcattaggatatgttagtataccaagaaatgctactcttaaaacaaaaatggcgtacaaccttctccaatagacacaaacatcaatgtaaatttagagcaaactcatgcacatacattcttacgagcattcacttgcacaagatattcttctaactaagaaaaatgctcccatgcataatcaaggcaccttcgttacctagattatctatatgtacttccaaggtgtatttgctacctacatcacatgcacttccttggctaaatttacatacatgcatactcaaagcatcttggctaccaaaaattgcacacgtgcacattctggtatttctaatagctatgcatatacaaactctgtgatgaatcttggctatctacacaataaggcgctacatttcatgc

SEQ ID NO: 226785 - DNA, 464 bp, Glycine max
  unsure (1)..(464): unsure at all n locations
ngacaggttcaggtgcaagtgctgctactggtggaggccctttatttttgttgcacaacctangggtgaaggcactcacatttttcggattcttcacaatttatgaaggcaatttgtcagaatttagggactgagcttgattcatctgagtagccatctgccccatttgatttgtcatactctgaatggaggctcttgtctcttgctgaaattgcatattctggatggtcatttgcctcacttattcttctaaggaaagttgaggaggagcctcagctgcttgttgtattcgttgtggcgattgctgctgtattggacgaggaacatatggctttcttggaccaacaacattttggaagggagggacaagctgttgttgttgtggagtacttgtccatctcatatttggatgattcctccaccctcgattgtatctattgcttgacaggcataattaatctatt

SEQ ID NO: 226786 - DNA, 472 bp, Glycine max
agcttcggaagaaagtgatgaggtgcatgcgctaaaggcttttcttgaaagagcccgggtagtcaaagagaagttcaagtccatatccatcaaagtctgaaaagagtatgatgaactaagggacgtcaatatggccaccgctgaagccttggaacgagaaaccaagaaggcccgaaaggaagaacacgtgccagcaaagttttgaggggctttatagggcagcaatagtaagctcaagctccgaagaggtgaaaggaatcatcacgggtcaaaggcatgatcttgaaggacgagctaaaggcttaccttatgtcgaaaagaaatttgtcccaacagttaagcgagactgaagggaatatgtgggccatcatcgatgagtgcaaagagaagctaaatctatcggcgactcacgagcaaatgctagaggatgagtacgccacgatatcatctgaaagcgaagcaagggagaggg

SEQ ID NO: 226787 - DNA, 442 bp, Glycine max
  unsure (1)..(442): unsure at all n locations
nggaacatgaactgaagcatctcaagctgcaccaccaaactgtatagtactgcctcctgatggagttgatgctcccaaatacataaattgattgaactggggcaggttgctggcttgtgtggaggtagaggctgctgctgccggagtaaatgaaaattgaggagttgatgcactggagaactggcagaagtaacaaacacagtggatgacgatgatgtactaaatgtggaaccaaatgcagacttagtgggctgccaactaaagtagaacttggaccacattggagctaacagagtagaccaccgaagaggaagcaggggtgccaagttcaaaagatgtggcaggacttgaagaaggaaacaacaaattcccagaaacaaaagctgcacttgctgcacggctggacttcacagtgattagtactgattaggagacaacacac

SEQ ID NO: 226788 - DNA, 453 bp, Glycine max
  unsure (1)..(453): unsure at all n locations
agcttcgtcctcatatccctcttgttggactacgcccaattgttacagtcctcttatgtttagactaacttaaactgagtttcgtccgcagatccctcttgtaagactagactcagctcaagcagcttacgaaagtttaacctaatntagcctaagcttcatccgcagatccctcttgttagactacgcttagactaaacaacattattggtacaacataattaaaaccaaaacttaatttgcagatccctcttgaagattaagtttcgatcctgcttcaatcaagttctaaggcaatagtacatttctcaatgctaaagtcacctaactatgcacacaaatggatgatcagaccaaaaacatacaaacatttagcattgaatgaagcattgaacacagaagacatattcaattagatattaggtagttacatcacctggtcattagaaatcc

SEQ ID NO: 226789 - DNA, 472 bp, Glycine max
  unsure (1)..(472): unsure at all n locations
ngcttgagtccatagatgaatntagtcaatgtgcaagctatcttttttgggtctcccaactcaaagtattcaagttgcctcgtataacttgtttcatcaatgtcaccattgagaaattctgtcttggcatccatctgatgaaactcaagatcaaaatgtgcaactagtgccatgattttcctaaaagagtctntagtagaaactagagagaaagtctctttaaattcaatcccttccttttgagtatatccctttgccacaagacaagccttatatctctccacattaccatgtgcatcccgtttggttttaaatatccatttagaccaatggattttatatctttaggtagtgaaacgagctcccaaactcgattgtcttgtatggatttctactcttcattcattgcttcaatccatcttcgagagttagtgcttttcatgagttgatgaaaagttatcagatcatgttc

SEQ ID NO: 226790 - DNA, 416 bp, Glycine max
  unsure (1)..(416): unsure at all n locations
ngacttgcttctacaacttcaactcangattctcctgaattgaagatacaggaacacataattccttaaaatcatcattccaaggcaaactaatttcaatcataaagtataattaacacgtaactaaaaataaatattataaatacctctctcgtccatatgttgcaagcaacgcgatccgcatactggatcagcacggatgggttgctccgaccaccctggatatccctcatgctcatcctcatcacctcgcacctgtgaatgcaggaatgtctgccccagtgacctctacatcagcatggtgccatcgggtcatccgaaaataagtcatcctctacatctggtgcagggaccactggctcattatgcgccacaatcacaggtactctctgcctccgtgccgatgtngatagtca

SEQ ID NO: 226791 - DNA, 444 bp, Glycine max
tactaagctatagctgaatggcacaatatactgactgtggcatgcacgcttgtagttgttttctgactcagtttcttaatcatgtaatgttagttaaaaaatacactagaaaaggataagggacaggaaatgcaatatcgagccatactaattgatgaaacttgaacagtgatcacacaggattctcaaagaatattacatgacgaaatatttataccatgcctattaggataccatattggatttagagagatatataaaacatggggggcacatgcatacatcatgacataccattatcaacgtcagcggcaacgacaagcttctggggcagatgttgatcagagaaacaaaagggtctggtgggactgctcacccaaaatgtatatataacaacgctacccttctctaaaccacctaacaagggatggtgaggaacacatg

SEQ ID NO: 226792 - DNA, 256 bp, Glycine max
  unsure (1)..(256): unsure at all n locations
agcataacagagacacaccctccctcggtgttgtattgtcccttcccttacactatatggttaggtgacccaccactgctacgctgttttgcaatggcgttgcatcttcttagatttaacangctggagcgaccaccgctatgactgcctcaacagccttcactagacgactatggcttggcatctgacccctgcatggactgcagccaacaaaatgctctttctgatactgcaccacatggctttcattgaacag

SEQ ID NO: 226793 - DNA, 436 bp, Glycine max
agcgtgtccaaacttgtatagatgtttttgtccaaaatccaatgtagtccatgcagagattatatcacactatcaccattatgaagctctcataatacaattacctctttgatttatggaagatactttactatcaagcaaacaagataaataaaattagaaagaaacccatgaaagatgaagaaacacttgagaattttcattctagtaactaatttgttagatgatctgtactgctagatcctcccacaaccaatctttcctgaaaaatcattaatgatttaccattcttatttaaaaaatattaaggttaactcttatgaaccataatcatggatcatgttattcgaaagaaaatttataccatcatcaagaaggagaatgatactctaataatgatacttcaaattgtaccatcaacatgcaacttttaagt

SEQ ID NO: 226794 - DNA, 427 bp, Glycine max
  unsure (1)..(427): unsure at all n locations
agcttgaaggcaatgttacacaccatcttttcatattataacgtcggtaatgtgtctactatcattgntatcatctccttctccatcattgagggcgctacttgagctgcccaatcccttcacctttgggcatattctttgacagattcatgctccctcttacacatgttctgtagctgcatcttatccggagccatatcagaattatactgatactgcctaatgaaggcagccattaggtctttccaataacggacccaggaagactccaaattggtgtactatgtgatggctgccccagtaagactatctttgaagaaatgcatcacaaatctttcatcttatgcgtatctcccatcttcctatagacatcttctaatgattcttgggcaactaaccccttgtcctatgaagcttgcacattaac

SEQ ID NO: 226795 - DNA, 333 bp, Glycine max
tgaacaataaactcagcttgaaaggtagacatgatacatgtacggcttgtttggtttattgataaaacgtatgcctcacattatttccatgacacagatgcacaaatgacgatttggaagatttatgcgaaactgagtatgcatgcacctatgcggacactcatgtgtcaaatttttatggtcatgagatgctaaggctcacgatacatttgctctatattaatcaacccaacggaaacaaatatgaactggatcaatttgcgcatacatccgagctcataatgggcatatgggataatgttcacagcattcaacctataagtgtatacacat

SEQ ID NO: 226796 - DNA, 440 bp, Glycine max
gagcttggaattacattacactctattctcttaactctaccatgagatgtgtcttatatgagtcttgtttctttagtagttatcttctactctttttttttctatcaaccattgcttgttctatctttccaaataacactatttacttggcaaatcaagtgtgtcatgcctatgataccttccgatgcttggaacaggcgtttgttatgcacataaattgtttgccactccaagcgatatattgtaacaaaattattggtggataccaacatgctttttgacacttacgttgaataatatattataaagacatatgaagagtgacatcatatgcttatggagtgttaatttgaaacagaataatgtttactaatggctattcaatatgtaattgctatatataaggctagaatctgcccacgtatctacttttgggccta

SEQ ID NO: 226797 - DNA, 489 bp, Glycine max
  unsure (1)..(489): unsure at all n locations
ataaaactcagctctaagctggctatctaccttgtctgaagngctttgttagcccaatccaggtggtaccaaagaaaggtggcatgagagtcattctaaatgaacagaatgacctaatccaaacagggactgtcactggctggagaatatgcatcgattaccgcaagctcaataaagtcacaaggaaaaaccactttcctttgcctttcatggaccatatgttggagaggcttgctagacagacttattactgcttcttggatggatattctggatacaatcagattgcggtggaccccaaggatcaagagaagacgaccttcacatgcccttttggtgtctcttcctatagaagggtgccatttgggttatgtaatgaacctgccacatttcataggtgcatgttggccatatttgcagatatggtggagaaaagtattgaggtattcatggatgacttcttagtatttgggcccttaattgaatgct

SEQ ID NO: 226798 - DNA, 457 bp, Glycine max
  unsure (1)..(457): unsure at all n locations
agcttatatgctatgtggtatcatatagttataaatcacattgcggtgcttaggagtacataacatgacacaccacacattgggtatgtcaggtcactctcactaagtaaaatcatagggagaccaatcagggtcacgctgttatgcgagaatgctccaaccatgtgagatcgacacaggcttaaaggagcacttcaatctgggtgacctccaaggcctacactacgaagagtctgtcagggcctctccctcctgattcaagtccaacccctaaaatattttttttttgcacgcatacactgttcatgaattatacaatacccacgacatcacacatatatntccaacatatttaacatgtggcgctacantttcacccttgaagatcctaactaggaatcctacacttataactcatatctcacaagataagtaatatcactacaagtattaatca

SEQ ID NO: 226799 - DNA, 469 bp, Glycine max
  unsure (1)..(469): unsure at all n locations
tctaaaccgtttaatattcttaattcttattgaagagtcacattctgttattggatcgagtggcctcagaataattaagacgggggttgaattaattattcctaaacctttactaacttanaaatttactcttctaacgctgttacttatgttgttaagagaataaggagtagaagagaaacttatcagaaagtaaaagcagaaattaaatgcacagcggaaattaaaagagtagggaagaaggagacaaacacacaacagtttttatactggttcggcaacaacccgtgccaacatgcagtccccaagcgacctgcggtccttgagatttctttcaaccttgtaaaaatccttttacaagcaaagatccacaacggatgngccctcccttgttctctttaacctagtgattgaccctccctagaactaatgccaagagatgtaccctctcttgtcccagtcaacaacc

SEQ ID NO: 226800 - DNA, 440 bp, Glycine max
  unsure (1)..(440): unsure at all n locations
agcttgcacatgagttctttaaatatggtttatttactnggnttcaatataagactacatgtgtttattaattactgtgtgcaatattgtattgatagtgtaagattttggtgctgctcattgaattaaaacatcactgattgactaattaaaatcaactgatgttttgatgcagcaaggtctttcaaccatgaggtttcaattttacattgaatgcatgtatacttcatgcaatgtttacacttagtgtcttaagaaggtgtggtgtaagtcaaagttagtgtgactttgtattaaatcctctcttatggttaaatggtatgtcattgtgatggtgcaacttttcatctttagtcatgataatcaacttctgaggctattatctacaaggtatcatcaattcgcaattgtgatattttataaatggaaagcttcatgta

SEQ ID NO: 226801 - DNA, 441 bp, Glycine max
taatataaggcatgcgaattgtgtttaattcctagagcaatttccttatgttatcaaacataataagggaaaaggtaatattgtagccgatgctctttctcggcgtcatgcattactttctatgcttgaaacaaaattgattcgtcttgaatgtttgaaaatcatgtatgaaaatgatgaaacttttggagaaattcttaaaaattgtgaaaacttttcagaacatggtttctttagacatgaaggctttcttttcaaagaaaacaaattgtgtgtgcctaaatgttctactagaaatttgcttgtttgtgaagcacatgaatgaggtttaatggggcattttggggtccaaaagactctagaaacattacaagaaccattttattggcctcatatgacaaaggatgtgcagaaattttgtgaacattgcattgtatgtaa

SEQ ID NO: 226802 - DNA, 468 bp, Glycine max
agcttcggaagaaagtgatgaggtacaagctctataggcagattttgaaagagcccgagtagtcgaagagaagttcaagtccatagccatcaaagtctgaaaagagtatgatgaactaagggacgtcaatatggccaccgctgaagccttggaacgagaaaccaagaaggcccgaaaggaagaacacgtgccagcaaagttttgaggggctttatagggcagcaatagtaagctcaagctccgaagaggtgaaaggaatcatcacgggtcaaaggcatgatcttgaaggacgagctaaaggcttaccttaagtcgaaaagaaatttgtcccaacagttaagcgagactgaaaggaatatgtgggccgtcatcgatgagtgcaaagagaagctaaatctagcggcgactcacgagcaaaggctagaggatgagtacgccaagatatcagcagaaagcgaagcaagggaa

SEQ ID NO: 226803 - DNA, 509 bp, Glycine max
  unsure (1)..(509): unsure at all n locations
ggtattatcactcggatcttgactagttataactntctgaataaaatgagtttatcccatgtttttattccaaagaccagtgggaatcaagtcactcccgcattntacctctagcatgcattcatttttctttacctactcctcacatttggttntttaggagaaacaccataactaaacgcgccccaaggcatccctatcgcaccagatccaaatctagaacgatgggtgatcaagaggagtcacaagaacagatganagctgacatgtcggctttgaaaaagcaaatggcttccatgatggaggccatgttaggaatgagacaactcatggagaataatgtggccaccgctgccgctgttagttcagctgccaaagcagacccaactctgccggatggcttacccttatgacgcgggtcatgtctcttctcccatccttgaaggggagcctcctcgacagcctgacgaggttcacaaggatcatcgagagtatgcccaaggggatgt

SEQ ID NO: 226804 - DNA, 367 bp, Glycine max
ctgatattatatttcttacgtttgagtcatactctgaactattactctttttggtgtcagatggatgctgggttcttggcttattggttgaggatgggcattcaatgttagatgatgaagggtggtcttttcttttggggggcagattgcgtctaactggctaagctttgcttgctctccctatgcttgataagaacgcatgccaaactcaagatccaaaggattagcctggttcctattttcttacaacatcaacaaatgagcctcaccaatctttcttactttcttcttatgtgctctgccatactcatgaattttaacaatcccatttacaacggtagcccttcactgagtgttctaatatggt

SEQ ID NO: 226805 - DNA, 392 bp, Glycine max
tgctgctggagattctatggacgacggatctctgaactccatttatgttctttaatggtgattttccaccatggagatgcactcggaagacaaaagagaagatgtcacatgaatgcgtcttcactcaggaataatccatggaatactgatcttcaccaccaagatgagccttggattataagctcgtaaagatctccctggatgaaagaagagggcataaagaatatgtggagcatgagattgaccgtataaatgcggatataagctggactttgagttgtgtctcacatgactctcattcatcaaagttcccaccagtgttactcatgcttgtgatcatagactatgcagctttcttgagaggctctcttgagattactttcttgagaagc

SEQ ID NO: 226806 - DNA, 457 bp, Glycine max
  unsure (1)..(457): unsure at all n locations
agcttagnttgatgttagtctaaacctattatggctatctaaattgagcccagcccaacaagagggatctgaggatgaagcttggattgattcactccaactagggattgagatttagtaatttaggctacaacatataacacaaaagcatgattgattagagaaacatccttgtatgcatcagctggtctgttagaaagacccaacaattctacctactactatcaatttcacttacttgcatttttactatttttatcctagacctattttaattctattttaaaccatcaattatcaatgtttcttttcacaatgccttatttttaatttaacccggtcttagactaggttacatgagtatcatacttggatacattcgctttatatattaaatatttgacgagccggtgcgctttctatcagaccggatttcccttgaatatattcgtacgaa

SEQ ID NO: 226807 - DNA, 492 bp, Glycine max
  unsure (1)..(492): unsure at all n locations
ctaagctaagagcaaaactatggctgctaactcaagatcatgcgtgttataattcctttcatgaatcttgagatgtcgagaagcataggccactacttgtccctgctggataagcattccacctatacccatcttggatgcatcacagtacaccacacagggttcgcttgggtcaggtaacactaaaactggtgcagtggtcaacctttccttaagggtatggaaactactctcacactgagcattctacacagaaactngacccttactagtaagcttagtcaaaggtaaggctagcttagaaaaaccctctatgaatctacgatagtatcctgctaaaccaaggaaactcctaatctcacacactgacttaggactctcccaactcatcaccgcctctacgttggaaggatctactgctatccctcccctagatataacgtgtcctatgaagctcacctcctttatccaagattcacacttggacaactt

SEQ ID NO: 226808 - DNA, 417 bp, Glycine max
  unsure (1)..(417): unsure at all n locations
acgctgtccataanaataggtgtttgaagtttgtcatttcaatttctgactaagtaaaatggatcacttttaaggtccaacgccttgaaatgatcacctcttaagtaaaaaaaaaaatcacttgataagctagaactacgtaggtctgatttcttcatcgcaattgaggatacgtaggagcaaaagccccgcttttgtcgaccaccccgagagatcgttaatggtccaacgccttaacgtttctctcctttcaaaatcaaaagatcatttaatggtccaacaccttaaatgacctttttgttcaatcaaaatatatcttgctaaaagataaataacaacttaaccaaacactttgtatcgaaagaactacgtatgtctgatttcctcatcgcaaattgaggaatacgtaggagcaaa

SEQ ID NO: 226809 - DNA, 471 bp, Glycine max
  unsure (1)..(471): unsure at all n locations
gacctatgatactaagctctccctatttcctataatagggggagaagtgaaggaattatatgttgagccctcctggtnattcgagatcacttgaaattagtgaaaaaaattgcttccgtgaagaatatcgaagccgaggcgcttccgtaatgtttccgtgggtgatttcgcgaagattttcaactgttcttcgacgttcttcgttcgttcttcggcgatcttcggtcttcaaccggtaagttcccgaaatcaagcttttcaattcattctatgtacccttagtggtcctcatttgtcttcacgtgcttttattttcattttatttactttccgtacccccttttgacatgctttagtcatttacttaagtcattttctcgcctaattaacaataaaataaatctccactgatcatttgaattgtaacatccattaatttctgttataatgagatccgaccgttcggtcatg

SEQ ID NO: 226810 - DNA, 416 bp, Glycine max
  unsure (1)..(416): unsure at all n locations
agcttgagggataacttgatgccttggttttcctantaactcagcttgccatgaatcagatatctatacctgttgcaagagtttgtggactacgttcttctgcagatcaccatacagatctctgtccttctttgtagcaatctggagtcaatgagaaacctgaagcttatgctgtaaacatttataatagacctcctcagcaacaaaactaacaacagcagaataattatgacctttcaagcaatagatgcaatctaggttggaggaatcatccaaatctgagatggacaagtcctccgcaacaacaacagcctgtccctccttttcagaatactgctggtccatgcaagccatatgttccccctccaatacagcaatagcaataacaacagtcacaacaaagacaacaagcaact

SEQ ID NO: 226811 - DNA, 436 bp, Glycine max
  unsure (1)..(436): unsure at all n locations
tgaagtgaggaagtgtggtatggtgagacttcctacntttattcgttgaccacagagtggtacctggagatatgtcgcggnggttaggagaccttgtggacgtcaggtggggtgctattgcccaaaaccaagcttgaccaatcccgacccaacccgggcatagtcagtcagtgagaacctgtgacgtacctaaacaggcgatctcctggaagtcaaccgataaaagaacaaagaccacaaagcaaggaggcttgtgtggtggctggctagctatggatcttgagtgatatctggagtatggcctctggtaatcgattaccaagggtgtgtaatcgattacaaggcttacaaatgaagacaggaagttaagatggcctctggtaatcgattaccaagggtgtgtaattgattaccaggcctaaaatgggatcaggaa

SEQ ID NO: 226812 - DNA, 436 bp, Glycine max
  unsure (1)..(436): unsure at all n locations
agctagagggaaaacttgtatgcctggttattctagnagctaagctagccatgaatcagaaatctgcatctgcacctgttgcaagagtttgtggtctatgttcttctatagatcaccatacggatctctgtccttctttgcagcaatctggagtcaatgagcaacctgaagcttatgctgcatacatttataatagaccttctcagtagcaaaaccaacaacaacagaataattatgatctttcaagcaatacatacaatccaggttggaagaatcatccagatctgagatgggcaagccctccataacaacaacagcctgtccctcctttccaaaatgatgttggtccaagcaggccatatgttccacctncaatgcagcaacaacaaagacaacangcaactgaggcctcttctacaccttgnagaggagttag

SEQ ID NO: 226813 - DNA, 449 bp, Glycine max
  unsure (1)..(449): unsure at all n locations
tctatataagctgaaccatntatcaataacacattttgtttntattccgacattagagtttatctctcttatcttagtgagagtgattctcctaaattcttgagtgattcaagaacaccttggctgtatcaaaggactttcacaacctttgtgtgttgccctcgctggaaagagcgattctgttcttcctttcatcatcacccttgttctttcaaaccacaattccagaaaatccacctctgcccagaattatatcgcggccataactcccattttacgcactctaattaagtgattcttgagcctaaattgaatatcataacgagacctttcacctcgttttggaatcacctcatttggaggcctgtaacttcagttattgccatttctatatatctgtccagccaccacttaacctacgttttaccatcccattcatacattttatg

SEQ ID NO: 226814 - DNA, 453 bp, Glycine max
  unsure (1)..(453): unsure at all n locations
ngcttgaaatgaggaagtgtagaagggtgatactttctgcttttattcggtgaccacagagtggtacctgtagatatgtcgcgggggtcaggagaccttggggacgtcaggtggggtgctattgcccactaccaagcttgaccgatcccgacccaacccgggcatagtcagtcagtgagaacctgtgatgtacctaaacaggcgagctcctggcagtcaacagataaaaggaacacaggccacaaagcaaggaggcttgtgtggtggctggccaactgtgaactttgattgatatatgggatatggcctctggtaatcgattaccaagggtgggtaatcgattacaaggcttaaaaatgaagacaggagactaagatggtctctggtaatcgattaccaagggagtgtaatcgattaccatgctagaaaacgatgtcaggaagctaggagagc

SEQ ID NO: 226815 - DNA, 495 bp, Glycine max
  unsure (1)..(495): unsure at all n locations
tcaatgcaagaaaacgcactcatgactagggacccataatttgtttntagaattagaaaagcatganaatagggacttgtttgtaagaatttgggctgccccatgattggtactttgcacataagcaatgtgggaaatgcttttcaatggtgtgaaggtatgtgtgtaaatataaggggcataaaattcctcgccaagtatgaataaattgttttcctaaatgaatgtatgatagcatggaatgcccttctgaatgcaaatgtgtgcaggatgtaattagctttccaatatgcatataaataaataggagtgaaacaataaaaatttgtatggtgtacttcaaatgtacgtaagtagtttatgatagcaaaatgtttaggatataaattacgtgtaaagttngacgcaacactttgagcatganagtgtgttttctttttcagaatgatataggtgtatggcaataaaatatgttggatgtcttgatgttacatg

SEQ ID NO: 226816 - DNA, 448 bp, Glycine max
agcttaagggaagaagattgaaattgattccattgagttattgaggtcggccccacccccttctttcctttctgttgcaatggatgttggagttgaaatcttgactttctgtctcgtacctttgatctgtcatttttattgttatttattattattattattattattaagcttagtcaagtttgttaatatttaatgtctcagggagatgcttacaagcgcaagatgcagaattcagtatatagtttcagagagcaaggcactgttgggaataaaaaggtgaaacttgatgacattgatgcttcttatgttcatgaaaagaaattgggtttaaagacactatcacaagacaataaggaagaagtgaaaaactgggactcagttggaatagcaacaaaggcagcgtctcccattcgcggcattcttaagaatcacaaacacatttctg

SEQ ID NO: 226817 - DNA, 492 bp, Glycine max
  unsure (1)..(492): unsure at all n locations
tncgttcccgagagcatctcttatataagcatttcatcctctgttntcttgtagcttaggacaaagaccatatcttcttctttctttcttccaaatccatttctaaagttccaagtactttctccatcacccacagccaccattagccatcacaaaccatcattgttctccattgaaaacccacaccgagaggaacccttcatccaaagcagaatttccaacttggcttgcggtttcggtagagaacgaaaaccctaatctgatctttcgttttctttcgaggttaccatggatctattcttgattcttgttagattcatcttgtctttgcatcttttctaactttgcaaccgccattgcatgtcttatgctttctttgaaagaccttagagaaagagactatgtaaacattatcctttcatgaaatgcatgttattttcgtaacctacactgaaccncagtcacatcggcgtggtcagaagttccaaatga

SEQ ID NO: 226818 - DNA, 306 bp, Glycine max
agtgcgccctacacattattccatgctagtaaccaccgactcttatgatggacacaagcgacacacctcctgctggaaagaccttcccggatttctagaaaccagaacactcacccctagaagtgcagcagacatgcctatatgggtgagtaagcaaactaaaaccatttcagacgtgagagccgaggatagtgcataaacttaacttatacgttaacactggaactcattaatgatatctattcatatacaaactcatgtacgcaacctaaagaacttgaactaagtttaaaattgcacgcttat

SEQ ID NO: 226819 - DNA, 427 bp, Glycine max
agcttggaattagatggcgtacgaattcatcttctactgaggtcgcgagcatacaaattcatctactattgattgtgagtatagtcccagcacgtagatcttaagagtatatcttaagacataatattcatattgcatctctttacagatagaagtcatatttaaaattaatagatagagcagttatgtatgcgtgcgatcgtttcatgagattagtgtgttattgatccaacattctaatctctgcgatgtgtctaaagcataattaattgtctcaactgcatggatgtacttataaaacatatgggcttataattataaagatcggacaatcattaaacagtatataaatggaggaattaacacaatattatgacaggccttttaattaacatacttggctaaattaaacaatctctcctcacat

SEQ ID NO: 226820 - DNA, 413 bp, Glycine max
  unsure (1)..(413): unsure at all n locations
agctngtatgattgttgaaacctgttatgttctctgcaagagtgantaatcctatcatggtgagggtgtgtgtcaagcgcgtgtatctctaattgaagtgcttgcacaatttcaatgaaagtaacatgacaagtgcgagtagagcagttcctgattctctaccagtacttgatggatataatttcaatgattgaagggtaaaaatgaatgccatatttggctttcaagatgttgaatatgttgtaaaggtgggatttcaggaacttgggaagaatgctactgaagaatataaggtagcccaaagagctcaagagacttgattagcaggcatagttcttgatccaccaatgtgtcgatgccatagtatatggaaaatttccaaggctaacactgatgagcatgcctgagacatc

SEQ ID NO: 226821 - DNA, 214 bp, Glycine max
agcttctccctcaattttctataaataggtgttatttgaattgaaaaagggttcatccccttaggcactctctctttcgaatttgcttggaaaaattgtttccgagaagaaaatccaagccgaggctactcggacagacctctttctcttacttactcgcccacacttaatcgcgggctggcgttttatctttcactcggacatactctctcaa

SEQ ID NO: 226822 - DNA, 229 bp, Glycine max
  unsure (1)..(229): unsure at all n locations
ttttaagtaatcccatgtctaatgcctaanccggatatgaatggtactgaaattcaggaatgggttaaccattggcaatagcaaaaccctttttattatacgggggcaaaggaatcaataccatgaaaaaaaaaaccattaacctttcataattatactatagattattgagaaattaattaaaagacctttagaattatatatatatatatatatatgaaatccttct

SEQ ID NO: 226823 - DNA, 191 bp, Glycine max
  unsure (1)..(191): unsure at all n locations
ctgactttcccattttataaagttattgtgttttataaggggncagccccttaggcactctctctttcgaatttgcttggaaaaaatgttttcgtgaagaaaatcacatccgagcccactcggccagacctctttctcttcctcatcgaccacactaacttctggctggtcgttttactcattctcctcga

SEQ ID NO: 226824 - DNA, 342 bp, Glycine max
tactgggctgtatagacctacaacttctctatagatcaggtttgtattgtaaggaagttgcaactaaagtgagctatgatgagaatttgtatagaagcctatgagaatgccaaattctacaaggagaagaccaagaagttccatgatagtttgataactaagaaggactttgcggttggacagaaagttctattgtataactttacgctcggactcatgagtggtaagttgaggacaaagtggacttgtccttttgcggtgactcatgtttatgcttatggtatagttgagatcaaaagtgagtccacagataagaacttcaaggtcaatggacactcggtg

SEQ ID NO: 226825 - DNA, 133 bp, Glycine max
agcttcagatccatatttgagacgatccattgtttacattatactgcgcagcatatttaccgaggcagcctgttgcttcctcacgaagcttcattaagaggcttactcaagaagctttcccgtggctcgatct

SEQ ID NO: 226826 - DNA, 416 bp, Glycine max
  unsure (1)..(416): unsure at all n locations
cgcctaantaacctgacatggagaggaaatgattattaaacttacatattggaagttctaagtatatattacctatccttaacataaagtaattacaatactacaaaataaccataaattgaaggagttttgatacaatatacataattcttatacataaaagttagntgtattcattgactaacagttagccatacacagaaacccttacccaaatgagatagagagtgcaaaataaatgttgcttacacgagaaaggggatccctcctcctctgcatagcacctcacaatcactcaaacactctttaatctccctaaagatgtaaaaccctatgcttctgtgcatagatgctcctctttgctgcctctacagcactatactcaaaagttgtgcatcaatatgcagctctgatct

SEQ ID NO: 226827 - DNA, 408 bp, Glycine max
  unsure (1)..(408): unsure at all n locations
cacgtnacacgtgtcaaactatactgaaagaaatattttttcttttaactcatcacgaaagactgatgacgatctatccgaatgggttatatgttataacaaaaatgcatttacatattcctcatacaaatctaggaagacaagcccttgcttgaatacctacattgactaccataatcgacagaatatatgacggtttatatgtacttctagacctcagatatacttgttagcctagcacatgacgatagctgcgccacgggatatataacctcctattatacccaagatcttattcttgagtacatctgttcacgcaatacgatgctgactaagaggcagagtcattcacgcggattagtcactctgatctcatggtccacactctcctgatgaaagaattgactg

SEQ ID NO: 226828 - DNA, 147 bp, Glycine max
  unsure (1)..(147): unsure at all n locations
agctngggtgatgttgcgcatactgatgttttattatgtgtttgctggggtttgacccacgcgggtgccacacaccgcatgggcatcttcttcctttctttttgcccctgttgccccgattctcgtccggatcatctcatactttcc

SEQ ID NO: 226829 - DNA, 494 bp, Glycine max
  unsure (1)..(494): unsure at all n locations
ctaagccttgaataatgaatagcataacataatgccttgcacgaatcttcttgctgctatntataaagagtcactcaaagtcactgggccctattacaatactctggcccataacgaaataaacattggacaacgtaaaataaaattgcgaaatttcctaattaactgatgtgagcgctgcttagtatgccctctttatgtccataaccaaattccggattaagcccagtgtttcattaattcctgaaattagattaataacatcaaattagctaaatgagcccaaataataaaactgtctgattaattgacaattaataccaatcagtaattaatatggtgcataaagtggttagaatatagaataaaatgatggcacatcaaaagcccccatacttatccttgtgcactcctgtgctaaatgaaacacagaacaaaattcaatggtatcatagagagacaaacgaacacattcacatatttctcaatgaaca

SEQ ID NO: 226830 - DNA, 375 bp, Glycine max
ttaagagacactgctaatgacgattacatgacagttgacctctcacattattatttgactgtaataaccagtgattacttcaaatctctaccttaatcacttattaacatcgtggttcttgaacttaatcacaaatgatcattttggcctctagaagctatttttaaggtctagataagccgcacaatgtgtatgtcgaatgcaaattattagtaaatcatcaccataggtgcttactttcattccatccagggtgctcatgaatgaagctggggcagagctgactaaacccttcatcaaacccaataaaaaaatttcggcgtgaggtcgtgaactctttttacatatcccaatcacctcaatccgatcacgaac

SEQ ID NO: 226831 - DNA, 138 bp, Glycine max
agcttcactcgatgattcatcggtattggtgttttgaagagatctccacctttccctcaaccttgaactctgaaaaatatttcttcaaaaatttctccaccacctcttcctatgtccgccgctgacctttcacgagat

SEQ ID NO: 226832 - DNA, 402 bp, Glycine max
tgtcttgtgcagaattagggtacaacttatttgggaatagttctctggatgcagcaagaggaggagcttttgcagagatacctacgttttgctattaagtgtttttctgtaatggcttgctaaacacccttgttagggatttctaaagaacaactgatgtaattattttaatatctaattgattggtgtcttgtgttcaatgcttctttcagtgcttaaatttcgtatgctcttggtttgatcacctatttgtgtgcatagttaggtgactttagcattgggaaatgtattgttgccttagaacttgaatgaagtagaattgaaacttagttttacaagagggatctgcggattaagctttggtctaaatattgtgttacaatatgttgtagggttaagtct

SEQ ID NO: 226833 - DNA, 189 bp, Glycine max
  unsure (1)..(189): unsure at all n locations
ncaagcttggaacagatgcccctctgtcttatttttaaaagacatgctgaccaagaagaactcgctacatagcaatactattatagtggaaggtaactgtagtgcggtcattcaacgcatctcaccaacagtcgctgaggggaaagcaaccgtcacactccagcgcgaaaacacctcctttatcgtctg

SEQ ID NO: 226834 - DNA, 445 bp, Glycine max
  unsure (1)..(445): unsure at all n locations
tncatcatgtggtatcaagagcatcttgatctaagttatgtttctttgcttcctctatctctntgctcggtgaattatctttaattccttggtcttcatcttattctccttgtatatccttcattgacctgtggcttggttctttttagagtagattaaaaaaaaataaactgattaaatcttagaactacacttgttcttgcatttctatggttcaaatattgtagatctactcctgaatctcgttttgtgttgatttaggttctatattattcattataatattcttgtgtgaaccttaatctaaatgtcttccaaatatgattaaaaacacaaaatctaggtaatactaatcatgtgcttaatctaattcttcaaatatgatagaaaaaaacactaatcaaggtaatacttatcctgtatcttacgcatgttagtctataat

SEQ ID NO: 226835 - DNA, 194 bp, Glycine max
agctttgagttgttgacttgggtcaaattctttatatgtcacaagtgttactattcagacgtacgctcgcttatttgatatttttctttgtgatatatttcaggagcacacacaattgagatcttacatcacatctatcaaggacgtacgagtctgccagacatcctatcactactaacgagctattcaagtct

SEQ ID NO: 226836 - DNA, 178 bp, Glycine max
  unsure (1)..(178): unsure at all n locations
agctntataaatcacattacacatcttatcttatttatagtctttaacaaaacaaacctcatctcttcggaatcaaagtaatgaatgttttattaactttttccaccttagctggatcaacactcactaaaaccccagtanacatgaactactgtgtctgtaagtaatagaaacaaca

SEQ ID NO: 226837 - DNA, 427 bp, Glycine max
  unsure (1)..(427): unsure at all n locations
tgtagggcacttgagaanattcaaggtgctactagtattctttacctccacttaagaagtcatggtgatgagttgatcgaatctaacaagaatagtacattaataatcacctatagaatgagtaacaagggtccaatctttgaaagattctataagtgtcttgaggcatgtaaggctgcttttgtaacaacatgtagacctttgattgggttagatggatgttttctgaaaagttattatggtggccatctgttgacaaccattgtgaaagatggaaataaccaaatgattcctattgcatatgtagtagtcgaggctgaaaccatagactcatgattatggtttattgacttgttactaanagacttggatgggattactgataaaaagtgggcttttatctctgaccaacaaaaggtaatatttc

SEQ ID NO: 226838 - DNA, 115 bp, Glycine max
tcagcttgtgcggtgagaaataatggtttgttatgacacaaggagggggataagtaaaactacctcttcactatttatttgagaagggaaatatgaaggagggaaattatttatg

SEQ ID NO: 226839 - DNA, 308 bp, Glycine max
tgttcaagataacaaatcagtcttcccacaaaatagaccatctgttgagttaatggtattatcgtacgggaatagttatactgtattaatcaaatagtggttaatatttagataagttgttaaagttcatgtggtatacactgatgattggattgatgacttgaaataaatttgacgtggagatacctgtgctatgaggtatagagtatttgagtaaatttgggtgaatataattatacaatgagatatctagaaacatttgtactggataattacggaatatttttttgtctacaaatattgatcat

SEQ ID NO: 226840 - DNA, 119 bp, Glycine max
agctttcttagcctaatattgagggtgattctaattattttcttgatgcaagaaatactttgaacagagcagcacccttctgggtctgggcattaatatttgttcttacgtaaccacat

SEQ ID NO: 226841 - DNA, 293 bp, Glycine max
ttggagtggtgaacatttagaggggtagcttcagtggttgccacttggttactactatgattatcattttgaagagtactggcttcagcattggtcacagctggggacgaatccatcagactagctgcaattgcagcccttagatcctcatcttccatgtctaatagcatttcattttccccatgagaaagaaactgatcgtaatgctgttggtgctcgttaactctcgggtgtggagcctgtactgagttgcaagatttagttatcctctcagcatcttcgggtgaaaccac

SEQ ID NO: 226842 - DNA, 208 bp, Glycine max
agcttccaagaatcaagatcaagattcaaattaatttatgacttaatcaagataagtataaaaaggtttcacaaactgagtagcacatggatttttctcaaaacatgattaccaaagagtttttcttgaaaatgctcacagttaagttcaaatcctatgtcacgatcatagtgacacgtacgataaatcagagactcaactgtgcgtg

SEQ ID NO: 226843 - DNA, 295 bp, Glycine max
ctaagctctccccaatttctataatagggggagaacgaagtgtttagttgttcgccccttagcacttctctctctttcgaatttcttacaaaaattgctccatgaagaaaattcaagccgaggcgcttccgtaacgttaccgtaacgtttccgtgagtgatttcacgatggttttcgaccgatcttcgacgttcttcattcgttcttcatcgttcttcggtcttcaacgggtaagtacctcgaaccaagcttttcgattcattctatgtacccgcggtgagccacaatgtgtttc

SEQ ID NO: 226844 - DNA, 199 bp, Glycine max
agcttaaggcaatgaaatatacaatttactttattttcttttcttctaaagcttcttctcccttcttctcgcgagggcctggacctcgaaatccagaagctatcaatttattaccaatgaaagcaacaccactcatgactctcagtataacctagcttagaagacactctcctttcctactcatatcccgagaaacccc

SEQ ID NO: 226845 - DNA, 438 bp, Glycine max
  unsure (1)..(438): unsure at all n locations
ttggattcctaatattcaacttacctatttggaagtgacatcatggcagttaggtcccagctttccattgtggattcagtcacaaaaccaacttcattatgttggactatctaacacggggattctcgattctattcccacacagatgtgggaagcactttctcaggttttgtatttaaacctctctcgtaatcatatccatggtgagattgngactacattaaagaatccaatatctatcccaactattgatctaagctcaaatcacttgtgtggtaaagtaccctatctttcagtgatgtgcttagatagatttctaagcaattcactctctgaatccatgaatgactcttcatgtaacgatcaggacaagccaatgcaattacaanttctgaatcttgcatcanatactctgcaggagagatacctgatcgctga

SEQ ID NO: 226846 - DNA, 122 bp, Glycine max
  unsure (1)..(122): unsure at all n locations
aagcttttcgattcattctatgtacccgntgttccttattgtgtttcgngtatttttattctcgtttacactctctatacccccttttgacgtgcttaagccattttatttaagtcattttt

SEQ ID NO: 226847 - DNA, 483 bp, Glycine max
  unsure (1)..(483): unsure at all n locations
ttgtanatacaaagaataactctctaagcttagtggttgtttttgtttaatgatgttcttgggcttttcctttttgaatgcacgactntatctcttttctctactagttcgtcaattttcttcgattctttgatgccctgtttatagtaagaggtttataaatatggagagaatctttagtattgaaaatataaccattggtgatcttgattctttcttccctctattgacagttgttgtgtatttttgattgattctagataaatacattctaaaatagtccttcataactcaacatagccgttagacatatataaggaattctaaaatagacttgtagatacattccatttaatggtatcatttaatattgcataaactgatttattctagaaagtgcactattaaatatgcatttggatggatttggcaagtacttctcatcaatcatgtntaacatatatttaatcaaatagttaacac

SEQ ID NO: 226848 - DNA, 118 bp, Glycine max
  unsure (1)..(118): unsure at all n locations
agctntggaaaagactgtnttcaccttcttttatctcatctgctggcttagcgagcatccgttaagccacatcctgcgctaagcgcgaggaagaatctanaagaagatgagctgtata

SEQ ID NO: 226849 - DNA, 453 bp, Glycine max
ctctcctatgggagtgaggactaatatgtttcctatgcctttcttcataatagtcacgaagttcttcacttaggctcttgcaagagttatgactactacaggaggcatgtttttctcttttcatttctttcattattttacttctttcttcctctcttattttcactctttcatcttgacttatttcttccactctttcttttcatttttcttttctctctttgttttctttccataacttaagggatctcatctcatctaatatcttatacaaggggtccttatgagtataaccctcaccattaacactagctgaagaacgaagactcatgttggttcctaagttatggatctttcttggtggaggtttgaaaacataaggttaaagaaactatggttgaaactagccaatataaacactaatagaggtgtgaaagataaggtaacaactaa

SEQ ID NO: 226850 - DNA, 68 bp, Glycine max
gcgatggtgcacaccccctccacatccacaaatcacgtattaacccaccatcccctattgaccacctc

SEQ ID NO: 226851 - DNA, 203 bp, Glycine max
aaaccgctaggtaaaagcacaaaacttgttccaaaaccccagccatggagacaaaggacgaaaaaaaatgaagcaagaacgaagtggacacccaagtggggcaaaccggaacaggggggctactccaaaggcgaaggagcgaagacgcagaaccaggccagcagatgagccggacaaagaagaaacaagacaagatacaagaa

SEQ ID NO: 226852 - DNA, 189 bp, Glycine max
  unsure (1)..(189): unsure at all n locations
nagctntancatataactctcattgtgttgttactttatgaatacgaaacaaagttattttatattgcgtcgatgcagcataatagtatataaatttcttcgtattttatgttatatttatcgatctgtcctacattactgcgtagatacttttttgtgaaacataatgaatatagatgattactgaga

SEQ ID NO: 226853 - DNA, 475 bp, Glycine max
  unsure (1)..(475): unsure at all n locations
cgtgtccttgtgcgcgtgcatttcattcttttattntgaaaaatattcatttacttttattaattttctaacatctttcttaaatattatgtacgtgttttaattagaacttcacagttaagtccatggaaatgtaaatcatgagtgcataaattaattgatgtgagattatttcatctgatcaattatttagtcttcaaattctatatataaatgtgttaaatatttgaaaagattttttcttaccaataataattttatgatttaaacatgattacctcgtgcccattctaaaagaagttcatagaaatgtaagaggtgatcttagattactaatggtcgaatttgctaattgtcagatgttatttaaataatttatcgactaattaagataagtgcatgtggtcggaaatttcaagatgggaaggatcatcatcaaatgggtaatattgttatagaattcaaatggcacatg

SEQ ID NO: 226854 - DNA, 189 bp, Glycine max
agcttcaaacacgagaaaattcatttgcctttttctttctaggtatttttgttcattcaactcttcgaaaaatacaatattcaaaatgggaggtgcagtcttcattaggtatggtcttcattaacaaagatacccattataacccatacacagcagttaaacgtggttccaagctcaacaatttaaaac

SEQ ID NO: 226855 - DNA, 405 bp, Glycine max
  unsure (1)..(405): unsure at all n locations
atgacaagcaattacaataccattggagagttcgatgttaaagaggaagaggttaaggaaggaagggaaagtggtattgcagtttacagagttgtggagtcatacctgctagagaacccacaagagtatgcttaatcatctatttatttattgtgtcatgtatcataagatatacaaacatattcaaattcttaataacagtgtgcaaccaaatatagggttgtttagaatggttgcaaagacttgaattccttaataagtccttattgtatgaacagcacaaaaatggcgagtggattggcaaaaatatttgtattttggtagttacaaagagtccaagagtagttgttnttacctttacttcatgaaatccaatgtacttaaacaaagaagcaacaattcatt

SEQ ID NO: 226856 - DNA, 137 bp, Glycine max
agcttatggcgttcatgctaattattgattatgtttaaggagaattaactaacatcatgtaacaccctcttattatgcatttaatttcagtccatttatttacatcatttattcaggtcgggaaatttcaagcacat

SEQ ID NO: 226857 - DNA, 453 bp, Glycine max
  unsure (1)..(453): unsure at all n locations
tgcacattgctgcttgataaaagaggagcacganggtatatcttgatacttctatatcaagcgaaatgtcgaagagaatgttgtgatggctggcatctggcttcttcctgagtggatatatccggtacaaaaggaaccatgacatggttttgctccgaagtgcggaagccacggaggttgagcagatgctaatggaagggcatgagggatcctctgggacacatgccaatagacataccatggctccgaagatctgagagcagggtattactggctcactatggaaaacatctgtcgcatccatgtgataaagtgccacaagtgccacgcctccgccgataatgtcaatgctccgcccgcacctttaaaaatcctggcagcgccttgccatcctctatgtggagaatagacgtgatcggagctattgagcacaaagcttcgaatgaacatcgg

SEQ ID NO: 226858 - DNA, 124 bp, Glycine max
  unsure (1)..(124): unsure at all n locations
aagctgaatctctataacttctttcttcttttttgtaccacaagtattctgaagctttctgcccctcctccagaaaacttgngctatntatcttttaattctcttntccctttgccaaatcagt

SEQ ID NO: 226859 - DNA, 411 bp, Glycine max
  unsure (1)..(411): unsure at all n locations
atacttctaactttgataagttagcgaaaagttggtgattatcaagaattggacatagtcttangtttgagacgaatcagtataattccctccgtgcttctctcttttgctttaactgacaatgggtttgaatctatctttagattttatatctcatttttttataaagaaaattatttttatcatcatatgacttagtctgatcgctaagtcttttaggccttttattttagacgataaaagtgctatttgttttagaaaagtttgtaaatttctaaaaacataattcaccccccccccctcttgtaaaaccccagttttggataaataaaaatagactgatatttataagtatgtatcttgagtgtctataattatatgaattaagtaaatattttagggtgagatatt

SEQ ID NO: 226860 - DNA, 134 bp, Glycine max
  unsure (1)..(134): unsure at all n locations
agcttcgncattataattttagaatgtgttttatgaatttaactcaattttataaaatctctgtccggcgcagattatctccatttacatatactattcgatcttatcattagttggacacctccaactcgatt

SEQ ID NO: 226861 - DNA, 286 bp, Glycine max
aagacttctttgaatcactttgcgatccttcatacatacgggcatgtgcttgctgaaaagactcttgtccaagggcacgaaacatatcctccaagcgaactcccatttctacctcaaatggttccgattgagacccactctgcatgtctgtcaattcaccatgccatatccacatcgtgtaattcttcttaatcccatcacacaatagatgctcccgtatgtcatccaatatttggcgccttcccgtctaacaattgatacaacgacaataataattttcatcttc

SEQ ID NO: 226862 - DNA, 174 bp, Glycine max
  unsure (1)..(174): unsure at all n locations
agctngagttgtaagagctaagtgtcagttatcttaactcgtaactttgagaaattagccacttactggtctacaaggaactagaaaaagtcttagtggttgagacaacaatatacttgtctctctgacccgcattcgtttcactcgattctgatactgaactgtactcacgct

SEQ ID NO: 226863 - DNA, 490 bp, Glycine max
  unsure (1)..(490): unsure at all n locations
aaactcagctgcctaataacctggaattagagantatgattactaaactctcatnaatgaaatactaagtatttattacctatacttaatagaanatacttataacactacaaaataaccataaattgggagagtttgatacaatttatacaagtgttatacacaaaagttagtcgttttcaccgactaacaaatacccatttggagccaacaatgttagtgttaggtggtcgaagaacaagttcccaagtcttgttggagtgtaaggacgtgagttcttcattcattgcagcaagccagccaggatgcttggtagcagattntaaaacctttggctcagaagtggtgagtaatgcatgtaaaagagaagatggccgataagtagttatatctgcaaagtgacgaggtttgtagataccagctttagcacgagtcaccatanggtgacttgctggaccatacatactacatcagatggaagctcatatgg

SEQ ID NO: 226864 - DNA, 173 bp, Glycine max
  unsure (1)..(173): unsure at all n locations
agctttctagaggatcaaattctagaatatatttttttatatgctgngacttctaaatatgtgaacaaccaacgcgcaagcaggccaacctgatctgtaacatcatacatgcagatgtatctcgtccaatcacaccggaatctagtgcccgtgcgaacccgttctactgctca

SEQ ID NO: 226865 - DNA, 415 bp, Glycine max
  unsure (1)..(415): unsure at all n locations
acctataatactcagctgctagcccaattttgaaattatatacagagacataattgcacttagtgtgacatgcacgcttagtgcccaacanaaacacaaaaattctaactcaatagagaatatgaacgcgcttagcgtgacagctaaacttagcgcattcatctggaaatcacaaatcttcaacaggagcgatgaactctcttaacgcaacaaggcgcttagcgcgttcatcgtgaattccagaaaaaccaggggttctcaccccttcacacaggcccctattaggccatcaaaccctaatcaaaacaagcacattgtgaccacagtacaaccctaaagctattctaactaacaactaacctaacactaagcataaacagaaattctacctaacattcactatgttatctatcct

SEQ ID NO: 226866 - DNA, 137 bp, Glycine max
gtcacctgcggcatcaagcttaaacaaaatttgatgtattgcatgtctctcttacaaatctggcaaggttggtcacatgactccaatgcttggatttaactaagaagggaaagtccaatgcatttagatttaacaag

SEQ ID NO: 226867 - DNA, 418 bp, Glycine max
  unsure (1)..(418): unsure at all n locations
actaagctactctaattacatgatgggggaagctgatgccattttttttttgagtagtgtcccactggaaaactaactatcaaatgttgccttccacgaaatggcccgagaagcttgctcatagagccaggaaggacaaggagccgaacgaactgttccgctccgagtatacagtcaccgctcatgagcgctgacaccagcagcgcttcaggccatcaaggatggtcgntctccggagcacgcgtcactcaggacgacagtatactgatttcagaggaaataggcgccgcggggcccctggtactccatggcaagttgatccaaatagccttgatttatccatgctgccaacaagagggtcgtgactgaatctggaagggtcaggatccgttgagcacctatcgcactctagatatct

SEQ ID NO: 226868 - DNA, 213 bp, Glycine max
  unsure (1)..(213): unsure at all n locations
agcttctccctctnttccctataaataggtgtatgatgtattatcaaanacgttcaaccctcctggtatacccccactcgacattactgaaaaaaatcatttccatgaagaaaatccaagccgagggcgtccactccacaatgcgtctttttgtacgatcacatacctagcgcgatgcgcttcattcctccctcgtattactcccaaaatcct

SEQ ID NO: 226869 - DNA, 220 bp, Glycine max
ctaaaaccacgaggagaggacgcccaaaaaaaattagctctttattcgaccccgaaggggcaccggatggcgaatgagactaggaaggaaacgatgccctcgccacccaccatgcactgaggtccccaatcatagctgaccgaaacgggaagcagctcacgttgtcgcgcaccatgacccggaatgaggggcagaactgcacccggggggtagccaaaca

SEQ ID NO: 226870 - DNA, 142 bp, Glycine max
  unsure (1)..(142): unsure at all n locations
ctcagagtcacctgcggcatgcagcttgcctcanagaggtccaggaaggattgtttctttgaactagntccgctccggagtatgataaccgctttacgagtgctgtacaccagcagcgcttcgaggccatcaagggatggtc

SEQ ID NO: 226871 - DNA, 456 bp, Glycine max
  unsure (1)..(456): unsure at all n locations
ntatgatcaaactctcttctctctttatctctcaactatacttcattcttcttcttttcactttagatcttcctttctcttgcacaaatattgcggcttttccactattgatgaacatggaaggctaaacactcaatcaattgaatgatccactccaagcaagactaaatttgagttatggtctatcatttctaataagcgtgaatgatcaactttttcttacaacctattttcaattatcatgattatgaatgggctcacgattgaaaatgaattacgttatggattaattgcctaacttcaactttaatcacatattatttaaacgacatcccaacctaattctttatctaaatgaactttgggattaactngatctgaataactctaataacattgatagaaccttcacaacttgatcatactctacaaaactgttataattcaatatgcaat

SEQ ID NO: 226872 - DNA, 481 bp, Glycine max
  unsure (1)..(481): unsure at all n locations
tgaaccataatcggagagagtgtgatcctaaaccgtgagtgttcttactanctttttttatatnagtctttgcatcaatctctagaatttagaatgaaatgtatgaatgaggacatgatgaaggccatgattgtatatacaagccaattgaccaataaacttaccttgaatgataattgtatcccttgcaccctttgtgagctaaattacattttcaaaattgaaccctgaacttgaatgaatatctccatataccttgtttagattctaggagagcagataattcaatgcaaatgaccccaaatctggtgaaattgattgggatgtaaagtaaaatgtacagcatcagcacacacaataaataagttgtgtgttaaaataaaagagcatcaaagaaaatgtgtgttgtgaataaagcacatgctaataaagtgaaggctgtgagtagctattgattgaaaaaatattggataactagatt

SEQ ID NO: 226873 - DNA, 119 bp, Glycine max
agcttctatagaaggttcgatcattttcttttattattgcatcacctctcaatgagctggtgacacaacgcgcatttacctggggtgaaaaacaagagcaagcctctgctttgctcaaa

SEQ ID NO: 226874 - DNA, 212 bp, Glycine max
agcttataagaacaaaattgccaatcatttccatatatgcatgtgaattaggacgcatcaacaatcaagccaaggctattgtgcaagcaatcaatggggcaaaacacaccaaatgattaagggcatccgattagctattatgactgaatgtacatgaactataatcttatattacagaatacctccatcaatagccatctcatccatcccca

SEQ ID NO: 226875 - DNA, 448 bp, Glycine max
  unsure (1)..(448): unsure at all n locations
tcttttggaccttgaacaggcaactaactcctcttttanaatcatgctatgtgcncgcaactggtccatctatttccttcgcagcttgagttcattgatgctaccccacagagctccaccaaatttgttgctgccatactcttccttgcaagccctattggtctcttgtntcaaggctcgtagcggtacttgcaatatcttcccgtaatccggtacactcctatccgatgtgtgtagcggcctacttgaacttctccttggcaagattcgccttttctaactcgcttatgagagcttggaccctattctcctgctgcggggcttcaaaactctcttcgctgacgacttttaacttgtcgagccaatctaatcctcgctatgaactttcatccatccatggtacccaccaatgatgccttacgaatgccctaaatcttgatctttccta

SEQ ID NO: 226876 - DNA, 133 bp, Glycine max
  unsure (1)..(133): unsure at all n locations
ttaagtcacctgcagctgcagctnaantatcttcctgtgctttgtttttttaagacaaaaanatccactgcattatatcctcccgaacttaaaaattcaaaatatacatttaattgttttttatgttaatttt

SEQ ID NO: 226877 - DNA, 151 bp, Glycine max
  unsure (1)..(151): unsure at all n locations
agcttgaaggaaaacttgatgctgttctttctgattactcagctngccatgaataaaaaattccctgccgcaagagtctgtgatctatgttcttctgcagatcaccattcagatctctgtctgattaccactcacttaacccatgaacccc

SEQ ID NO: 226878 - DNA, 444 bp, Glycine max
  unsure (1)..(444): unsure at all n locations
aactatacaatacacaagctttgacatgattctattatcccaccatgagcgtntaatgttgtgttttaatgatcaatgggcactgctcccatagtctctaatatataatataggtggcttggatataggatttacaaacaaagagaataattacatatcagagaggatatatgaagagagattagagaatcagagatcactaccaagcaaactatacccccaatttcattttcatatcttgtcttgaaagcctgataaaacatttcagcaatggcataaacaccaacatcattacttacactctaaatgtaagggatgctagtaactgctaagataatgtatattatgtaaccctatccaactgtaatagataatccaatagcactgattattcgngttggcccatttctatcaacacacggttgtattctttgtctgagaaat

SEQ ID NO: 226879 - DNA, 151 bp, Glycine max
  unsure (1)..(151): unsure at all n locations
agcttaagctccttcaactgccattctcttattatttgaagagtatccttgtggaaccttccgacgaataccgtgacaaaaacttatcttctccttnttggacaaagtatggcaagctagcaattctactctactcatcaatctacgtacc

SEQ ID NO: 226880 - DNA, 416 bp, Glycine max
  unsure (1)..(416): unsure at all n locations
gaggcataaggcgatacattgtacacactgccatagcntacagacacttatgaccatcgacgatacatcctaccaaatatgtaacgtatcaatgtgtgtctaaattcttacgcccacgcttatatacatatatgtgtggacagagcgtactatatttactatttactctacaatgactttactcgtctgtacgaaacatgatgctgtaagcataagtctattttctacatgcgacagtatccctttaacagctccactcacagacatacacatacatgcgtatgtatggtctttcgtacgctcatgagaacacttattctattgtagccgacattgatcgtctattgatcgagtcagatacaggctttaaatatttattgctagcgcacattggtacgtacataatgactgaatgt

SEQ ID NO: 226881 - DNA, 145 bp, Glycine max
agcttctagacatcagtcttgaatctggtttcatttttcttgcatttctttgacttacttataagacatatcatcatctatgtgttttgccttgatctctaacaattgaattgtcgaatctggtctgcaaaatgcgttctacgca

SEQ ID NO: 226882 - DNA, 194 bp, Glycine max
  unsure (1)..(194): unsure at all n locations
agcttttcttcgtgggtatgagttctgtttcttagaanggcatgatcactggctgacctctcgatcagctcagttgcttcttccggggtcttcagttttatctttccccctgccactacgttacccaccatgtgcagaaactggattcactactccagttaattgacaaaatgagctctgtgctgaattactcc

SEQ ID NO: 226883 - DNA, 131 bp, Glycine max
agcttgcacaacaagtttctaaatctgggtgtacttaatgtagtaactaactaaatatctaactaaatctccgatacatatagtgactactcataagaaaaggatgggcattgattaggccctactactaa

SEQ ID NO: 226884 - DNA, 486 bp, Glycine max
  unsure (1)..(486): unsure at all n locations
agcaaaagatacaagtatcattcaaggtattctatttggtcaaaagagcttgtgtctatacaattcatggccttcatcatgttctgagttatacaaatcattctagaattcagagatttaagcaaagatcattattcatagttagtcgttcactcacagagtaaggtcacactctcactggtttttggttcaagcttttctttcacaatcagtttgtctagtgactaaccattctattataagttcacactcttgttctttctctgttcaacatgcacatttgctcaaattcatgaaaggaaacacacatttcatcataagcatgcattcaatntagaacaaggcataaccattttcacaaaataaataaactacttcactgtcgtaccatcaaaagttaagctaaactgttcatgatgctgtcagatgagcaactatactactcatgcacaagactaataaaaagtaactaatgtactaacatca

SEQ ID NO: 226885 - DNA, 188 bp, Glycine max
ctcagagtcacctgcggcatgaagctttgagcacacttcagatatcttcttatatttctttggtcagatcatggacaagggtcttgtaaaccacgaccacatttcgagaagatccaacggttaacgaaggctgggcagcatttttacggttgtatactacgcagttcgttctgactttagtgatatct

SEQ ID NO: 226886 - DNA, 436 bp, Glycine max
tgaaggtgcgtagcccaccattttccatagtagaatactgttaatgtgtctactatcattgacatcagtttttcgtcattgaggtgccactttgagctgccaggttctccacctttgggcgtattcttttgaagatttgtgccacctttttgcacatgatctgtagttgcatcctatccgaagacattatactgacactgcctaacgaaggcaaccactacgttcttccaagaatggactcgggaatgttccaagttagtgtaccaggtaacagctacccagtaagactttcttggaaggaatgtatcagtaattccttatcttttgcgcatgcccccatcttccgataatacatctttagatggttctttgggcaagtagaccccttgtactcgtcaaagtctagcaccttgaacttgggaggggtgatgatatt

SEQ ID NO: 226887 - DNA, 188 bp, Glycine max
  unsure (1)..(188): unsure at all n locations
agctnntcaatttttcaagcattggacatcttattgttattcatacaggaaagacaataaagtatgctcactcacaatggttcggtatttttttctactaattcaatgaattctatagagatgacgaagcgtttctaaactaagcggactatagcacctcttggatattgagagcagtttacgtctca

SEQ ID NO: 226888 - DNA, 474 bp, Glycine max
  unsure (1)..(474): unsure at all n locations
tctcagcctttatggacaaagcgcaaactcctatctgtcggtatgattattgataagcactacttcttggacctgaaatgctacatcagattaatgaacaagtgaggttgattcgagagaagataaaagcatctcatgataagcagacgagctactatgatagaaggaggaagccactagattntcacgaaggagaacatcgtgttttgaaggtttctcccttaaccggagtcggaagggctcttatagctatgaagttgacacccaagtatctaggtccatatcagattttgaagaaaatgggcctgtagctatcatatcgccttacctcgcgagttatcgaatttgcatcctgtgttacatgtctctcaactgagacggtacaacccaaatccatcacatatacttgcagtggacgatgtacatgtgaaggataacctcacctatagagcacaaccttcacgatatcactga

SEQ ID NO: 226889 - DNA, 155 bp, Glycine max
agcttcggtattcagtttcgagcgtctatatatttttgttctcaatcagacatccgactaaaaagttcgtcgcccgcatcacctcggaggttcagaattcaatttcgaacgtctcaatagattacgtcacccaccgtaacactatctttctcgca

SEQ ID NO: 226890 - DNA, 487 bp, Glycine max
  unsure (1)..(487): unsure at all n locations
cttgatttcctttgttccagaaacctttcttttctcatgtgctctcctacccaatctccgggttcgaagacaaccttctttctccctttgntggcttgtttagcatagcttttatttttcctctcaatttgatctttgactctctcatgaagcttcttcacatagtccgcctttgcttgaccttctttatgcttaaaaacagaaacattatgcataggcaaaagatcaagaggagttagtgggttaaaaccataaacaacttcaaaaggagaacaattagtggtgctatgaacagctctattgtaagcaaattcaacatggggtaaacaagcttcccaagtttttaagttcttcctcataactgtcctaagcaaagttcccaaagtcctattaacaacttccgtttgcccatcggttcgtgggtgacaagtggttgaanataacaatatagtgcccaacttgctccacanagttgttcaaaattgac

SEQ ID NO: 226891 - DNA, 128 bp, Glycine max
agcttaaaaaatctatatatggtataacttgtgccctgtcaatggtaccttaagtttcatggcatcccttcatttggtcttgataaaaccccatggatcaatgcatataccacaaggttacaaagttg

SEQ ID NO: 226892 - DNA, 457 bp, Glycine max
ctagcttctataggaatcttcttaaggaagcttctctttgttgtgagactagttatgagaggggtgcgtgtaactaagctctagcttctcaaggaagtactctcaaagaagcttctcaaggaagttatctcaaggaagctacctagtctataaatagaagcatgtgtaacactcgctgtaactctgatgaatgaaagtcttatgagacacacttcaaagttctacttctccccctctcttattccttcaatttcgagctcccccctctctctttctctccctctatcttttcctccattgaagcatgcttccaagcttcttatccaaggctcatcttggtgtggaagctgcttcttccatggcttattccctagtggatggcgcctcccttctcctcttctcctttgccttacgctgcatctgcatggtgaaaaatcaccattgactgacctcattg

SEQ ID NO: 226893 - DNA, 383 bp, Glycine max
gaccacagagtggtacctggagatatgtcgcggcggtcatgagaccttgcggacattaggtggggtgctattgcccaaaaccaagcttgaccaatcccgatccatacccggcataatcggtcagtgagaacctgtgatgtacctaagcaggcgagctcctgtcagtctacagatcaaaggaacaaagaccacacagcaaggaggcttgcggaggctggccagctgtgaatctcgtgtgatatatgggttatggcctctggtaatcaattaccaagggtgggtaatcgattacaacgcttaaaaatgaagacaagaggctaagatgggctctgagaatcgattaccaaagggtgtaatccatcaccaggcttgaaaacgaggtc

SEQ ID NO: 226894 - DNA, 122 bp, Glycine max
  unsure (1)..(122): unsure at all n locations
agctttaacctcatcgcctctcagtctttatatttgggagccaatccagtccttgtgttcggctcacccacttatgatagccgncgatgatcccattactgcttcccctaagctctctgctc

SEQ ID NO: 226895 - DNA, 185 bp, Glycine max
  unsure (1)..(185): unsure at all n locations
agcttgcanattatttgagaatttattttttatatctcgattctcaattgagtagtgctcacacacactctaacatttaacacacattctagtatttgttaaaatttattgaaactactaaattaacatgccacgtaatcagtataaagtaggcgctcttcataggcgacacgatatcttagcac

SEQ ID NO: 226896 - DNA, 489 bp, Glycine max
  unsure (1)..(489): unsure at all n locations
ttaccttggttatatttaatacttcataaatgtcattatgatccatcaatcggcttcgagttcctgcgtcttcaattgattcttgacgaacaatctcccaagccatttcttgtatgatgtcgtgcatagatataatattatcttcagaaatggttataagagccttatctttcaatctttctaacccaacaaccactgaatcatctttttcgctatctttcaatagaacttttatgtggtctactttcaaattcaatcccatgaaaaaacatgcaagatctaaaagaatcttttgttctttacgatctagatcatcataactcaatctcattgcattggaaatatctgtatttggcatgtttgtaagtttgtctagctgactcttcccatacttcttatctttcccacagagaagatgacccaacactttaagaactaatggaatgccttgcgaataatcgaccactctcnttgatagcttataatact

SEQ ID NO: 226897 - DNA, 99 bp, Glycine max
tgagagatacacttttgttagcagaacatggatctctattgatccccctaaggaattttcacctccataggagcggggcaaaaacaccaaagatatgaa

SEQ ID NO: 226898 - DNA, 165 bp, Glycine max
  unsure (1)..(165): unsure at all n locations
agcttgaaaaattgatatactgctttctcatatgnggctgatgatgntacaacaatgatcctttgctaccctgcaatgagacacacatagatacacaaacacacacacatacgccctacaccctacaccctaatcaacccctccaaccctgcacctcactactaa

SEQ ID NO: 226899 - DNA, 355 bp, Glycine max
  unsure (1)..(355): unsure at all n locations
tctatgtatacatgtccaaccgaagcttggactactttatatttggtcggacacggtanaattaattatatatatcaagcacactcttcttattgcttagatgtaggttatagaattattgagagcaaaactgctatcctaaaatgtgtgtgtatttaactagatgaagccaacaggaagttgttagattggcgcaagcttttcaatattatatgtggcagtgccaggggacttctttatcttcatcaagactcaatgctaaggattattcccagagatctaaaactagtaacattttactagacactaatttggatccaaaatatcaactttgggcttgctcgatcttttttgg

SEQ ID NO: 226900 - DNA, 122 bp, Glycine max
  unsure (1)..(122): unsure at all n locations
agctntaacggaagaattgaacttgagattgtttttctattatgttgncgattgataacagcaattgcacccaagcatcctgtggcacatggcaggagtaaacatattgaaaccaagtttca

SEQ ID NO: 226901 - DNA, 471 bp, Glycine max
  unsure (1)..(471): unsure at all n locations
gcttgtaaaaatggcggattatattcacaactgaaaaaattattttattctntatataaaacattagtcgaggaagttaaaaaatatttatcttaaaataatctgagaacataaaaaattattaataatacaatgttacacattttaataaataatttttttctaattccttaactaatatcttaaggacatnttgtcatatactttctccgctcttaaatataaataacaaaaatgtcttatgttttatttcaaatataaataaatatcaattatgtatgacttatttaatgagactatctccaatatatcattcatttatatttgatatcaaattctaataaatgatagggtacgaaaaagttattttttgattgaaaatgatataacttaataaaattaactaattgtcttaataattctgacgtatgtcttatcttgcgcttataaatgagatcgagtggattatat

SEQ ID NO: 226902 - DNA, 290 bp, Glycine max
tgggaaatgtagcgacaattcttcaaaaccttactgatacattctgagaggttggttgtcatgggaccatatcgacgatcttctctatccaaagccattcgtcattgttcctctgagatgcgaccaatccatgccgctatggcaggactcaactgacaaaatattcctaaatattgataaaaaaatgtgtaggcaggagcgacgctgcaaaaaatagtagaaaacaattaagcaatatgaaacgaaacaacgtgacataaatagaagtctacccaattctaacattcttt

SEQ ID NO: 226903 - DNA, 115 bp, Glycine max
ctgcagactaatgctcaccaacctttttatttttttatgttgttcatgtaaacctcttttccatcaccacccacgaacgccgttatcacatccattggatgcagctcaagatcaa

SEQ ID NO: 226904 - DNA, 275 bp, Glycine max
tcttatctctcagagaggctctcctaactttctagctctactactctaacaagtggattcattcttgccctggatcgacacactctacggaggctcactcaagcctgaggatagagacttcccaaactatctacctcaaaaatgctcccaactacatcacaaattacctttgaactatcaacccactctaataatattctttctaaactatggataacactacccaatcggaactagttctggccccatccttaatggtgaaaacaatgatatcc

SEQ ID NO: 226905 - DNA, 432 bp, Glycine max
  unsure (1)..(432): unsure at all n locations
tcttatccaatgctcattntgatggcgaaactccttccttttgtcttatttcctagtggatggcgcctcctctcacctcttatgctttgtactccgctgcatctccatggtgtaaaatcaccattgaaggacctcatggaagctcatagatccaccctccctagaagctccacaagcaagcttccatcatgtggtaatcaaagcacaaaagcttcaagtaggagctccttacacctccattggattgttgctataccatctcatccattgttgattcttcattcttctccatgtatcttctcacatgtcttgtgctaaatgttgttaacatgattctttagagtttacaccgattaaacttgctatgaaagatagatttgattctctatggttcaaacttctcgttattgttcttgaaccatgaatcgtgtt

SEQ ID NO: 226906 - DNA, 197 bp, Glycine max
  unsure (1)..(197): unsure at all n locations
agcttgcaactgattattggcgagatgatttgagtttttctctctaataaaatttcttgaactgaaaaccccacgtcctcgattatcataaatgtacataataaaattcgaatntaagaattccacccctgtccaacgcctcatcattgatcagtagtcccctccccctctcctcccaacccttctcctccccccct

SEQ ID NO: 226907 - DNA, 170 bp, Glycine max
caaattgatgttggcactaccccagatagtgatcaatataaagaggctcaaaggtcgtggtcatgttgttatatgcaagtcgacatgatatcttgaagtgaaagactatgcctgtgcgagcaagtacttatatatgttttgattaaattcttattccatacctgtttttc

SEQ ID NO: 226908 - DNA, 211 bp, Glycine max
gcttgtcattcgtagagttgagataatgtgttttcatccccattagacacaatagtgtactacatgcgttgtgcttcctccggaatgtactcaaatctgttgtttctcagtttcccactcaattgtaacctgctgcaaataaggccgacaaaaagagaccaggtttctagcttgagtccttcaagcgtaatagtgttatatttaacacata

SEQ ID NO: 226909 - DNA, 439 bp, Glycine max
ctgacctctccgcgacataagtctccaggtaccccactctcgtggtcatacaatataaagcagagagagtttcacaccttcaacaccttccgtcatctcaagccttgtagagattatcggggtactccatcacatcgtggtactaaggaggcggtcgaggcgatggtgcacaacaagtttttcatatccacaatgcgcgcataaacccaccatcccctattgcccacctccatctgagctcacgtactcccacgtagcccatatcctcttttctctcaacaccgggtccccatcaatcctcccaagctgtcccaacatcaaagcagaacaacattcagacagcacaagctatcacattcaagcagaacagagcaaaggcagaagactctgccgagacaccaaccaaatcacagctgttctcacttatagaccccagtaa

SEQ ID NO: 226910 - DNA, 381 bp, Glycine max
  unsure (1)..(381): unsure at all n locations
gctgaacaatctacaactgtagagatggcaattctattttcggccatatatcgccaagattacatgcatgtgaaggattaaatatgtataaaacaaaataaaggagataaatatgttaattcctccttcctttgtctttttcttttcaaaacagatgaatgaacattcaaaaagtcacacgtgtatgttggggtccaatagcaattaaagtgcaacgacaaattctattttgacttagtgtgcaacagctagcaattacagcttcaacggtcaagggtttnccgaccatatttgaggtagtttcatatgaaacttgtaggtcttggatcttcttcatcaatgaagacctctgcttttgaattttataacagcggatggaaa

SEQ ID NO: 226911 - DNA, 94 bp, Glycine max
  unsure (1)..(94): unsure at all n locations
tttaacaaaacaaacctacttctttggaatcaaagtaatgaatgttntattaactttttccaccttagctggatcacacaataacacccctgct

SEQ ID NO: 226912 - DNA, 186 bp, Glycine max
agcttgggcaagatgacatgcaccatggtcttgtggcctaagccagaggatatgtgcccaccaaagtgtgcctctctggcctgtaagagtaaagttgtagacataggcctggctcgatacgtgtgctcattattccatgctgatttataggaataatataaactacttactaaatgtgagagaacg

SEQ ID NO: 226913 - DNA, 446 bp, Glycine max
ctatatatcatttcatttcactatatatgatactattagagtagagttagagaattttctgtacatacttatgatgcagaggtaaatttttcaaccaataccccaagcccaatcaaacagggaaaagtgcctattctttctgaagaattttttaagcgacttaaaaacctagggaaagcttatcttcacttaaatgtaatcagcaaacaccactgaaacctatgcctaatatgaagctataactatggtgtctgccatgtgcagtcatgagctccttaagaactcccaaggtcctgatcccgttccaattctgcatcaacattagttcattaactaaaagagaatgcattgaatcaattcaattaggtggaaaacattagcaataataatccttaagaatcagtattacctccagaagccagctaatgccctaaaacccatataga

SEQ ID NO: 226914 - DNA, 125 bp, Glycine max
  unsure (1)..(125): unsure at all n locations
agctngagatgaggaagtgtagaagggtttctttttgtttttattgttgaccacagagtggtatctgcattctcgcgccggtcacgagaccttgtggacgtcaggtggggtgctattgcccaaac

SEQ ID NO: 226915 - DNA, 489 bp, Glycine max
  unsure (1)..(489): unsure at all n locations
tctcagcttttattatagtaatgaaataatccgtggcaccttatttctcctctaaaaacaatagcatcattacttgaactgaattgctgggagttacaagccatcttctcaatcaaatacctagcttcagtaagggtcatatcaccaagagctccaccactggtagcatcaatcatactcctctccatgttgctaagtccctcatagaaatatcgaagaaggagttgctcagaaatctggtggagaaggcagcttgcacacaatttcttgaatctttcctagtactcatacaagctctctccactaagttgcctgatgcctgaaatgtctttattgatggcagcggaccaagatgaatggaagaattcctccaagaacaccctcttaaggtcatcccagcttgaaatggacctgagagcaaggtagtatagccaatcttntgccactttcctcagagaatgaggacaagctcttagaaagatatgatct

SEQ ID NO: 226916 - DNA, 147 bp, Glycine max
  unsure (1)..(147): unsure at all n locations
tgcggcatcaagcttaatacaataggggacttacattgtgttgtttaatcctgggangnctgcaacttgaagtggtcctcgcccaaatatctaatttgtcattgtgaaattagaatgaaaatgcatggtctcacgacacgcgtgcaa

SEQ ID NO: 226917 - DNA, 491 bp, Glycine max
  unsure (1)..(491): unsure at all n locations
tcttcgataaataactgacctttacttcaatccaattaggggtatgttgtttatatctaccatcccaactagtcttcaatgtctttattgcattcgttataaaaaaacatcaatgagggatggaggatttaaatatttacatacccaagttcataataaagtaaatgagttataatttaaaactaacttgttaattgcggctttgatgagaatatcaagcttcttttgcaacgaatataaccagacaacaatgttgtcctatgacacataacaacaagctgccaatggaccctaaattcaagaataattagctatgtataatgcaaacattattttaatgcatttgctaaattttacttattgattcaagtaagctcatangtaggcctctctatgtgattccttcaccgcatgttcaatgtattgttgacatttaacacatctatcctttgcattgtgtatggactgacgctcaaggaattcatacaccg

SEQ ID NO: 226918 - DNA, 135 bp, Glycine max
  unsure (1)..(135): unsure at all n locations
agtcacctgcggcatgcaagcntttcattattctatgtacccgttgtctcttttgtgttncgngcattttaattctcgttcccactttctataccccctgttgacgtgcttaaaccattttacttaagtcatttc

SEQ ID NO: 226919 - DNA, 492 bp, Glycine max
  unsure (1)..(492): unsure at all n locations
gacctataaaactcagctgaggatatggngacccatcacatgtggactaggtggtggtttgtcgatggtgcacaacaagttntacacattcacaatgcgcgcataaacccaccatcccctgttgcccacctccatctgagctcacgtactcccacgtaacccatatcctcgtttctctcaacaccgagtccccatcaatcctcccaagcttccacaacatccaagcaaaacaacattcaaacaacacaagctatcacagccaagcaaaatagggcaaaggcagaaaactctgccaaaacaccaaccatatcacagcttatctcacttagagaccccagtaacaattccttcgatccaattcgttaaccgttggatcgactccanaatattactggaagtctatagtacataaacctacattgtgacctgtgggatctactagcagacatccagaactcattctgtactggctctttcacagccaaccacaca

SEQ ID NO: 226920 - DNA, 186 bp, Glycine max
  unsure (1)..(186): unsure at all n locations
ggacctcaagtcacctgcggcatgaagctgcataggaaataggtnngtatttttttgatttaatgctcatgctggggctatcaactaaaatgnnannnnnngnactatgtatagaagatagaagagcaccttccttctctcacagggaattaggaataaacactgggtcgtccaatatgaggattc

SEQ ID NO: 226921 - DNA, 493 bp, Glycine max
  unsure (1)..(493): unsure at all n locations
tagccattggctcctctagcacactatacctgacaaccatttgtttatgaattnggttntggcgctaaatccatgccatccatgttggctctgcataccaagttgttatgaactttcacataggatcagatcacaagtctagatattaaaggcttggtttgacttatagtgaaaacaagaagtagactcgtccttgacaaaaactcttcctaaacaaatacacgtgttagtaatagtgagaaagtagactcgtccttgacagagttcctcctaagctgacacaaatgtttctacacaagtgtttctgaatatttctgcttcattaaatttcaatcaagttgtgcctttaaataaactacaaatctattgctaatagttatcttaattgataaaataaatataaagagaattctaactgataggattaattatactaattggtgaagatatatatcaattactattaactnttagatgactgtcgactgatata

SEQ ID NO: 226922 - DNA, 121 bp, Glycine max
agcttctcacctacaaaggaggtttttttttgtcaaagcctaggccaatactgccattttcaaccttctggagaaagaagaaaacatatttttcctcttcttccaagttttaccaacgcgc

SEQ ID NO: 226923 - DNA, 471 bp, Glycine max
  unsure (1)..(471): unsure at all n locations
tgctaacacatggaagctcctaatatctcccacactttttgtngtgggccattcttggaaggccttgatgttctaagggtccaactggaccccatctctaccaactacaaaacctaagaagactatattatctacacaaaaggtacacttatctatatttgcatagagggtgttcttcctaatgactgaaagaacttgcctaagatgtcctaagtgatcatcttggctcctactgtacactaaaatatcatcaaaataaacaactacaaatctacctatgaaatcccttatgacatgatgcataagcctcataaagtgcttggtgcattagtgagccaaaaggcatcactagccattcatacaaaccaaacttggtcttgaaagctgttttcactcacaccctttttcatctgattggcgaaaccactttaagatcaattttgaaaaaattggaccatcaactcataagca

SEQ ID NO: 226924 - DNA, 374 bp, Glycine max
  unsure (1)..(374): unsure at all n locations
tgtgctaagcacacatgtccaacaggaccaagtgaacacgcttttatcancaagacgaacacttagtgagctcgcatgttttccaacaactcaatgcctgatcaaaaagggtgttgaatgaccaccacgttgttgttaatattctcaccactatgaaaacgaatgacatatatctgctgaatgtcgcaaggcgaaacaatattggcagacatatggtctttgcgccataatagaaaggaagcgcgatgatgcaaaaggaattaatgacctgcgtgaagatgtacaaagaattaatgacctcctttntagcttgatccaacaatccgcaccatatatcgctgctaaattgacggccactatgcggactatatgga

SEQ ID NO: 226925 - DNA, 173 bp, Glycine max
  unsure (1)..(173): unsure at all n locations
acctatacaaccactnttttacccaccgccttcgtattatcactcaatgcatcggcgattcgactgatatctgcagcaatactcaacggctggcttgattgccaagcctgcaactccttctgtcttctccaccaccatgcgctctctctggaccctactactctcttcataca

SEQ ID NO: 226926 - DNA, 379 bp, Glycine max
tctcacaatagcctctcaaggaagctatctattctataaatagaagcatgtgaacactcgttgtaactatgatgaatgagagtcttgagagacacaactgaaagttcaacttctctccctttgtcttacttcaattatgagctcccccctctctctttctctccctctatcttatgctccattgaagcatcctctccaagcttcttatccaagactcatcttagcggagaagctccttcttccacggcttattccctagcggaaggcgcctcccctcacctttactcttatgtctaccgctgcatctgcatgggggaagaacaccatgtaaggacctcattgaagctcatagatccaccctccatagaagtcccacaag

SEQ ID NO: 226927 - DNA, 191 bp, Glycine max
  unsure (1)..(191): unsure at all n locations
ngcttatcacatatgggataggtttcctttttattatatcgcatngtatcaattaaaactaaacctcatactctagttgttaaaataattatataacacattaatattttcactaaaacatgccaacgccacgattcatactaccctacaaacttagggtgattgaacagctcagaacatatctagcacta

SEQ ID NO: 226928 - DNA, 433 bp, Glycine max
cttggcatatgttggctgtataaaatgtatacgtactgagatttttcatgacatgcagatattctcatatggaagagttgatctctgttaggtcatgtacgtgatgcaggtgttggttgtatgttttgcagtactcactatatatgaaggtcaatgaatccctcttggatgaattttatgcttccttttaatattgttgttttgattacattacgattctggcactgtagcttcataacacagtctagtcagcgactcctggcatatggctttagcatttgtgaaacttatattagcatcatacacaagtaacatatacaatgaatgcaagtttaatttgagaccttaaactaattatgatccatgacctaacataaggtaactaattgttcatttatatttgacatgtgcttttaagattatcatacaactt

SEQ ID NO: 226929 - DNA, 161 bp, Glycine max
acctctaagtcgactgcagctgcagcttgaggtgaaagaggtgaactcttttgggctggaactctgaaacaagccctgcctagatattcctgcttttttgggccccattggcacaattgagatctccaccttctcgtacagctgctacctagttactcttc

SEQ ID NO: 226930 - DNA, 112 bp, Glycine max
  unsure (1)..(112): unsure at all n locations
agcttagcanatggacctgtgttgtccattttcatcatatcttccgtaatactcatcctctatcatatttaataattttcacatttatgtctaattgcccttttatttcatt

SEQ ID NO: 226931 - DNA, 485 bp, Glycine max
aaaactcagcttacagactcagacccgaagaagatactcttcctgcttacctaagggatttcattaactaacaatagctaagctggtgcatcttgtagggccctctattatcgcaccactatagccttgtttgccatttgcttgtgcattttcatttctgttaggatatgttagaacaaaatcacaaattctattatcccaattctcagtataaatatagcatcagtgtaataaggcagaaccatgaatgaaatattaccttgagtcctctctctttttctttggaggtactggccctcaaagctagcttatttaataatgtaacattctagtgctctcgtagagctttaatggaggagtccacccgttctaaggtatcctctgatcatttagaagaaaccattgtagagattacttcccaccaactatccttgagtgaaaaccctgacaatatgacccttaagcttgatgagctgattcacaaa

SEQ ID NO: 226932 - DNA, 130 bp, Glycine max
cctgaggcatgcaagcttgcctaaatattaaactccacgtgaatatattatacaagaaccgcgtattggttttctcccatggagaatagcgaaacagtcaaagaaaaggtggttttaaatggtattaaac

SEQ ID NO: 226933 - DNA, 475 bp, Glycine max
agaatacctcagcctaagctagctatatcaagtacagctttattttctgaaattgtatttgtttcctacggtgactaaaatgagacattgattagttttatgagtagttagaaaaggttcaaagctagtttcagtcaatatcatgagattaactttggtttatgaacttttaattaaatgagtaaagctaatttatgatgatattatgtgactcacttttgaaacaagggttattccctttgttcgagaatgttctatgaagaatgtgactctagatgaattgtgaattctatacgtgactatacaagtgtagcacatttatttatgaggcgatgatgcatgtatactaatgcacatctactttgcctgtggaagaagactcagttctgaccgatgatgacgtgcgtgaatgcatatgaattgtggtgctgaaaccgtccctatatatccttaagcatgtatgtcctttcgataa

SEQ ID NO: 226934 - DNA, 73 bp, Glycine max
aaaacactcagcgctgtacctcttcctttcacaaccccttttatgagtgtgtatctcttctaagaaatctgaa

SEQ ID NO: 226935 - DNA, 488 bp, Glycine max
tcttccaaagctggaaactagtaatcagatatctttttcaattcattattaaactcgttaacttaattggactcaccaaacaacaacaaaaaatgaaaaaaaaacactattctggaaaattcaatgcaatttttcttaaaactggcaagtaagtcaagactgttaaaaagctaagaggtttccaattattttggtttagtttatctaacattggcaaccttctctgtcatgcacaaaagcacggaaaagaacaacctatcttcgaggactatgaacctccataagaaagaaggataaggaagaaaacttgtattatgtttctattgccctctattacatactaagcatcccttatatagaggcactagccaagggtactcgtacgaaaatagaaagtgctataatgctaaataaatataacatataagtggaatatgacaacaatgcagtactacacgatgggaacaacatgcctcaacataattcta

SEQ ID NO: 226936 - DNA, 385 bp, Glycine max
ataagatctctagaaagattcatatctcctaccgtcatccagcctcttttcttaagctaacatacgtggtcatccatattcataatagggacaattatgttatgtggggtccactacaacatggacaacattaagaaggttaaatgcgtcctctaaacgataaataataatgtaaattgaacatactcttgttatttttaaaatgtccaaatacgtccctctaaaaattgtaattggtcatcaatagtacataatttctaatacagtccctattgacggtccgaaacgtataactctctaataatcgcacacatatatgtatatatgttgatatgtggctataaacttacatacttgtatagcacataacagtgtctaactgtat

SEQ ID NO: 226937 - DNA, 92 bp, Glycine max
agtaagcctattagagataattagcactcacgccttatgtgttcaactcaatttaagtttggctcactcatttccaccccaagcagctcccc

SEQ ID NO: 226938 - DNA, 425 bp, Glycine max
  unsure (1)..(425): unsure at all n locations
tataccattaaagaagatatagattacacgtggaaacaagatatatatgtgatccaacaaccaacgccatttggcaaattaaagacggtgagataatccaatcagaattacctcccacaacacaattccaattaccaaaagtcaaagacagcaatgatagacctgttatggccagtccatttaagacaaaaggacataaatccaatatattccaaacactggaaaacacccttcaaactatattatcaacgtgcaactacccctgaccttctactagaagatagaggtgagaataattntaanagctctagtgcaaataacatttacgaatggaacatagatgcccaaacggagtacaatatcatgaatacactccaacacatgaccatggtagtcacagcctaccaaacatctcatgagtgttc

SEQ ID NO: 226939 - DNA, 208 bp, Glycine max
  unsure (1)..(208): unsure at all n locations
ctttatacatgaatgaagtttttttttctttgttagacaagnggcctcagatatcttaccgcggcggcctgaattaagatattccaaactacttccccaattaaaaatctattcatatccacttactatgctcattgatcatacaacagatgacaaggcattgtcccctctcctcccaactgaccttgattataacagtctcttactc

SEQ ID NO: 226940 - DNA, 402 bp, Glycine max
tctatggaggtaaagaatgagaaagacagagggcggagctctatattgtatgaggaaaagatggaaagaagtggaacttcgaagtgtgtctcacaagactctcattcatcagagttataacaagtgatacacacgctgttatttatagcctaggagacatccttgagaatctaaagcttagctacacatacacctctaataaataagctcaacctcttgagaaactcccttgataagattcctacagaagctatagcttagctacacacacgccttataatatctaagcctaccccacgccaagatacatgaaaatacaaaaaagtctatactacaaagactactcacaatggcctgagatacacggcgaaaactctatactactataatggccaaaataca

SEQ ID NO: 226941 - DNA, 220 bp, Glycine max
  unsure (1)..(220): unsure at all n locations
cctgcggcatgcaagctttgtgtaatcgattacacattttggtantctattnccagngatcgnncccgacaaaanccgatgtcactcttcagaagggttttgactttttcaaattggttttaattttttctaaaatctatgttacaaactacagtctgcttcattcactatcttttaactattattctttgcagttatactcgtactactgtttctttct

SEQ ID NO: 226942 - DNA, 434 bp, Glycine max
ctgtacagtaaacgggacaaagacacacaagacaagttaattattaataaagctccgctatatgggagtgagattcattgatgaggaagtacattcatctgcaaggagggcagaaatgtaccataagaagcgcccgaaggccatgaaattactggaagagttctaccgagcataccatgctttagcttaaagatacgatcatgcaatgggaaagctatgccatgcccacaaacaattgtaaaagcatatcccaaccaaaaaaaattacatgctgaccgatgattcatcaccgtgtgttgaatcacacacactacgagtgccttgatcgaattaatgcgagtctaagcatgcagagaaagcagatagtgaagcccacaccttgaggaaaggcctagccaagatacagactgacaaggatgctatatgtcttcagt

SEQ ID NO: 226943 - DNA, 340 bp, Glycine max
gaggttttgctaatatcaagcacttttgtgtttgccatctgaaaaaaatacactttaaagcaaccaaatttattggatggttggtatgagaattgggttaaatgagataatttcttgcctgattttgaaccttttgcagtgaagggggagaggctaatggcaaatttaacgctgaatttaacgtgtaaaaagcaatatcatagagggatttccataccagagttgggtatttcacgagcttattttgaaaagagtcttaagctcccctccactcactttgccacccttttcttcaaatttaactgaacatttgtcaaaggagccataacaagttggacat

SEQ ID NO: 226944 - DNA, 115 bp, Glycine max
  unsure (1)..(115): unsure at all n locations
agcttntatgatcagtgagaactttactttttttcanataaancgcctccattantttatcgccatgatcgcggcgagttcccgcacatacctggatgctcagagaagtttcgag

SEQ ID NO: 226945 - DNA, 435 bp, Glycine max
  unsure (1)..(435): unsure at all n locations
ctggaagataagtgcattagagattatgcgtcgcggtttattttctgagattcttgataaaatcaattgaaacatcaagatcccatgaatctacgaaactctcgagcttgataaccataatatgaaggatcttatcttgtgaaaaactagaactacattttcaaaagactggaattcacttaaatgtcttaattcgcatttctcttaatatatattatntcatacagatataaaaatgaaccacatacctatattccattcctagtttcgtacacctttgcaacctatatagcaagcatatgtgctagaagacaagagcaagctttataattagagggaacatctgagaaatttattataaaaaaataatataaaatgcgcgatagaactagaaaattgagaatatttaaagaaacgtgtacaagcagtcgcgga

SEQ ID NO: 226946 - DNA, 388 bp, Glycine max
cgagtgcctgtatattgatgcgcctgaatcggacattcgagtgaaaagatatgaccatttgaatttctcgagagcttcctatgtttaattttgagcgtctcgatatattatacgcctgaatcgaacctcagtgtgaaaagttatgaccatttgaatttctgtagagcatccgttgttcattttcgagcgtctctatatgtgatgaaccttaatcggacctccgtgtgaaaagttatgaccatttgaatttctcgagagcttccgttgttcaatttcgagcgtctcgacatattatgcgcccgaatcggacatccatgggaaaagctatgactatctgaatttctcgagagcttctcgtgttcaatttcgagcgtctcgacatattatg

SEQ ID NO: 226947 - DNA, 143 bp, Glycine max
  unsure (1)..(143): unsure at all n locations
agcttataagaacaaaattctcaatcatttctctaaatgcatggngaattagggacgcataccacacatcaagccaaggctattgtgcaagcaatcaatggggcaaaacacaccaaatgtaagacatcagccctacgtcacta

SEQ ID NO: 226948 - DNA, 444 bp, Glycine max
  unsure (1)..(444): unsure at all n locations
ggctgaggtgtgggctatataaccttcttgatttagattgttttctcataggattttgaaagttttctggttgaatctgactcacagtttgcaatcaaccttatccaggctggttgttctccctctcatgagtgtggacagcttgttttcctcttggaatcacgtttaccaggaagccaaccaagtaacggatcactttgctagtcatgatttatgtctagatgatttacttgttttgattgggttccttcttttgcttctttgaaggttctcgctgatgtatctcgtgtttctttcccgcatggattttaactatatcagtttctatgggctccagccccgttttctaagcaacaaatatatatcaaatactgtgctagctgctaccatntgaagttcattccaggcacttttactaacacgcatatctgaaacgatcatatg

SEQ ID NO: 226949 - DNA, 128 bp, Glycine max
  unsure (1)..(128): unsure at all n locations
agctntgncttctttggactgacttgtgtttttaaccattaatgatgagaaggatttataatctaacaagacctggcatttattaaacttgtctcctggttgcaaaccaattgctagtaaaacggtga

SEQ ID NO: 226950 - DNA, 377 bp, Glycine max
ctgagagaccatacaagtgtcctaacgatgtctaattatgtgggccattaagtctatcatatgccgacaatagccgagaagcccatgaatctcttcgggggtggagtaggtgtctgccctctgcctggccttggctaacaagcggagaaggtcttgactcccgttcaagggaagagcaaaaccggccatccacatggttgcctcttggagtaagagtcgacacccttcctctagccttattccgcataacttgacatactatgcgcatctatgctcggggcgcgctaacctactctcttgcacttgtgagatgcagcatgtggctcgttcgcaaacgctgaaacctctttggacctgacggcactactcttttaaac

SEQ ID NO: 226951 - DNA, 138 bp, Glycine max
agcttgtaggattatgggatccattatatgtggtactaggtggcggtcgggcgatggacaacaagctttccacatccacaaatcgcgcataaacccaccatcccctgttgcccacagccgtagcattctacgcacatc

SEQ ID NO: 226952 - DNA, 424 bp, Glycine max
  unsure (1)..(424): unsure at all n locations
ntgccctcagatccctcttgttggactanactgtgaccattcagtattactggaacaacatacttaaaaccaaaacttaatctgcagattcctctcgttagaccgagtctcaattctgcttcattcaccattaagatttggatcaagtgtcctctgaataattaagaacggggggctgaattaattattgatgaacctttactaattaaaaaactcatacttcttaattactagattcaattatgcttttactataatgttaagaaagttaagaacagaaatataaacttaaccaaaagtgaaagcgataattaaagtgcacagcggaaattacaagtgtcgggaagaagaagacaaacacaagattnttatactggttcggaacaacctgtgcctacatccagtccncaagcgacctgcgatc

SEQ ID NO: 226953 - DNA, 136 bp, Glycine max
  unsure (1)..(136): unsure at all n locations
cctgaggcatgaagcttatatatatcgatacgctcganatatcatttgatttctctgagaaattcaaatgatcatgactcacacggatgtccgattcgggtgcataatatgtcgagaggctcgaaattgaacaacg

SEQ ID NO: 226954 - DNA, 485 bp, Glycine max
  unsure (1)..(485): unsure at all n locations
ggagtagaaacatgggaccaactcattntatttcataatggatgtcgtatctagtcaaggtcttagagaccatacaagtttcctaacgatttctaattatgtgggccattaagtctatcatatgctgacaatagccgagaagcccatgaatctcttcgggggcggagtaggtgtctgccatcgccttggccttggctaacaatcggggaagttcttgactcccgttcaaggtaagagcaaaccgatccatccatatggttgcctcttggtgtaaagagtcgatcacccttcctctagcctctttttccgcgtatacttgggcatattcgtccgcaatcctatgctcgtgggccgcggctagacctaactcttcttggtacttggcgatgatagctagcatgttggtctccgtctcgcataaacgctgagacaagcttcttttgaccttgaacatgcaactaacttctctttctaaccatgctatg

SEQ ID NO: 226955 - DNA, 123 bp, Glycine max
  unsure (1)..(123): unsure at all n locations
agcttatgatacttggtaatgttttctttatttgttgttatttgnattttgtattaatttcttttatcacactcacccctcgcaatttttgtaccgtgtgttggtacctgtgatgatcacgaa

SEQ ID NO: 226956 - DNA, 482 bp, Glycine max
  unsure (1)..(482): unsure at all n locations
gggatttccttttagtagggaatctatccttcctaagatggagccttacccagtcactgtcgttaagaactagctcttttcttcctctattgcctttagttgaatacacctttgtgtggttctctatttggttcttaaccctctcatgcaacttctttacaaactctgacctagattccctttcttgatgtataaacaaagtgtccagtgggaggggaataaggtctaacgatgttagggaattgaacccatagacaacctcaaaaggggattgcttggtggttctatgagctcccctgttgtcggcaaattctacatgaggaagatactcatcccaagacttatggttgccttttagaagagcccttgaaagggtagataaagacctattcactacctctatttgcccatcagtttgtggatgacaagtagtagagaaaagaggttagttcctagcttagcccataangggtttcagaagt

SEQ ID NO: 226957 - DNA, 124 bp, Glycine max
agcttatatgataacaaatgaatccatatgtatctatgttttatgatgccttgtcctatccacgatttcgatagccggtcacattatttgatgaaaattatgatagtagatatttctgatcaat

SEQ ID NO: 226958 - DNA, 130 bp, Glycine max
agcttatccttttttttccccaaggtaattcttcttgttcaaaggcatatctatattggaagcaattctcgggaatcgcatagatggagatgatggggagctaattaatgttgacaaagaggcctaacct

SEQ ID NO: 226959 - DNA, 394 bp, Glycine max
  unsure (1)..(394): unsure at all n locations
ctagcttttggtccattatggttagcttcaaattgctgttcatatgctcccataccacctgattngaggatctgaccccaatggggatgcccaagtagtggaagggaatccccatctgcctacaattcagaaagggagcagcttcttgagaccagttaacataatctccaaaaattccgaattgactcttagcatagttgattttcagaccagaggccatctcaaagcctctaagcattgccttcaaaacaataacattttccaaggaagcttgaccaatgaaaacagtatcatcagcgtattggagaatattaataggctctctttgttttcaaccaagtagctatggtacaaattttttacaatggcctgtctcatcattccaatgagacct

SEQ ID NO: 226960 - DNA, 479 bp, Glycine max
  unsure (1)..(479): unsure at all n locations
tgcccagagaaggagtccacggaggatatgcttaccacctcttaagactggaaagcgggttctaatgactcctctacggcttccacataaagcatagaggatgggcagctcaccaagatgtcttcctcgcctgatacgatgaccagatgcccttccactacgaatttcaacttttggtcgagtgttgagggaacaactcctactgagtggatccacgggcgccccaacagacagctgtagggggggttaatatccattatttggaaggtaacttgacaggtgtgagggcctatctgtactgtgagatcgatctcttccctaaactcttggcgggtgtcgtcgaaggcacgaaccaccattgaactcggctttaagtgggaagcattgaatggtaatttctccaaagtgctcttatgcatcacgtntaaactggaaccattatcgatgagcactcttgctacgatatggtccatacactt

SEQ ID NO: 226961 - DNA, 216 bp, Glycine max
acagacattacccataacctatcttgggggaatgggggtgagagcttctaagcgttcttactatcgtattaaagaaaaagaagcttaccataagacagaaccatgaccgtgtcactgtctattacaagtgaaactctgtgagccacatttataactgagcattcagagaattcatgcttaatgacactttgtaaaatggcatctggtgcagaatca

SEQ ID NO: 226962 - DNA, 223 bp, Glycine max
ttaagtcacctgcagcagcaagcttgtgtatcgatacacatttggttatttttaccagcgattgcttctgaataaatgcccacgtccactcttcaaaagggttttgactttttcaaattggttttatattttttctacaaatcacgtaaaacaacgtctgcttcactcactatcaattcactactatttttgcagttatactgtactactctttttctctcaa

SEQ ID NO: 226963 - DNA, 492 bp, Glycine max
  unsure (1)..(492): unsure at all n locations
tggtacagtagaagggaaaaagacacacaagacaagttaaatataaataaagcttcgntatatgggagtgagattcattgatgaggaagtagattcatttgcaaggagggcagaaatgtactataagaagcgcccgaaggtcatgaaattagtggaggagttctaccgagcataccatgctttagcttaaagatacgatcatgcaatgggaaagctatgccatgcccacaaaacaattgtagaagcatttcccaaccaaaaaaaattacatgctgaccgatgattcgtcaccgtgtgttgaatcacacacactaggagtgccttgtccgaattattgcgagtctaagcatgcagagaaagcagatagtgaagttcaaaccttgaggaaaggcctaccaaaatacagtctgacaaggatgctatatntcttcagtatcagaagagtatggacaagttatcagaaatggatagagatctcaataatgcacaaaa

SEQ ID NO: 226964 - DNA, 117 bp, Glycine max
  unsure (1)..(117): unsure at all n locations
agcttntatgtgattagattacttctgcttatgactactcaaaaatgacgctagcatcataaccctacacacgaatatatgtttgttgcattaaaaggggtaccttatgcttttttc

SEQ ID NO: 226965 - DNA, 466 bp, Glycine max
  unsure (1)..(466): unsure at all n locations
agatactcagcttggtgtanacttccttgaaatgttatttgaaatttgttttgtttccttgctttgaatctgagtgctgaactatttatcttgagtttttgtatgccaaaaaatgagttctttgagtgttacaatataggattagccttaactttttctaaaatcaaaattttctagccaatattatgaatagaactagttttagaacatcttaccgtataaaatctgtcagagaaataatctaacaatgagagttgtatggactggttttattaaagttttgaccttaaaaatgagtttattaggtgttaaaatgtatggtagcatataagatantggaaaaatcaattcccgaagcactgagagcactaagagtaagttagaagcgaaactttaaaaaactgagtgcacagtgatttagatatataatagacatattaacattggaaaccatgcatctggataa

SEQ ID NO: 226966 - DNA, 149 bp, Glycine max
agctttaattattgtgtggagctttttatatataaaaacgtacttttctctattttctagccgcactcatgaaattattatttatgtatattggactgggcagatctgatgttgcagttgagtaactgatagattcggccaactgcact

SEQ ID NO: 226967 - DNA, 449 bp, Glycine max
  unsure (1)..(449): unsure at all n locations
tcacacaaacatgttctttataaaaacaccacaatgtaatcatgatatcattgnggatattnttttaccccaatagaatcatgattctgttgtgaataattnttttatcacaatgcaatatatcataattccactttggtaaaaaaattattcacaacaagatcgtgattttgtgttgttaggagggtgttgcaaaatataacaacaaaattatgattttgttgttatgtttgaggtgaaaaaaaatacaagggaaattgtgatttcattgcgtataaggggagaggctgaagttgatttgtaacaaaatcacaattttgttgtttgttttgtataaggaaatattgatttcataggaaggatgtgtttggaataaaagaaagtctcaatcacttgataggaaccaagagtaattatcatgggaccaataataactccctagttataat

SEQ ID NO: 226968 - DNA, 419 bp, Glycine max
tctacttatgtggcaaggcgcgctatcttaactcttctgttttttacgcgaacattgaccattgttttccttccgcatgcttctttagtctgctgaggggcttatagcaaaccaacttccacgatttcctgagtattatcaagctagttatgccgccgttgttctttcctaacaccattccggggtcaataactgttacccaacataactcatgccattattaccgctgcatcagacagacaaggatgtccaaagagggagtccacgggggaaatgctgaccacctcataagactggaaagcagtttgtaacgagtcttctgcagctttcacataaagcatggaggatgggcagcttatcaagatatcatcctcgcgtgacacgaagaccaactgccgcttcactacgaatttcaacat

SEQ ID NO: 226969 - DNA, 114 bp, Glycine max
  unsure (1)..(114): unsure at all n locations
agcttngggtagagattgttgtgcagttttatagtggcgcgacaaaatactcataactcccaaagctattgaaacttggttgctagataattaaaaactgaatgtaatctcagt

SEQ ID NO: 226970 - DNA, 440 bp, Glycine max
  unsure (1)..(440): unsure at all n locations
ntcttaagaaaacttccttgagaagcttctctgataanacttccttgagaagctagagtttagctacacacacccatctaaaaactaagctcacctccttgagaagcttccttgagaagctagagcttagctacacacccctataatagctaagctcacccccatgacaaaaaaacatgaaaatacaaaaaaaaatcctactacaaagtctactcaaaatgccctgaaatacaaggctaaaaccctatactactagaatggccaaaatacaaggcccaaaagaagaaaacaacctattctactatttacaaagaagagtggacccaaccttggcccatgggctcaaaaatctaccctaagggtcatgagaaccctaaggccttctttatcaactctagcccaatcctcttggagcctctngctcatggctctggtaactg

SEQ ID NO: 226971 - DNA, 188 bp, Glycine max
agcttgtattgaggatacttatatattaaaattctctttatgacaactgtttttattttctttatttttttggctaaataataagtttagaacctaaatgtagcctttctgtagagtatctcctgctaggagtaccatcagaataatcgtcgataattaaccagatcaaccttgagactctaccctga

SEQ ID NO: 226972 - DNA, 470 bp, Glycine max
  unsure (1)..(470): unsure at all n locations
aataagaaatgaattgaaagtctcggattcaaaaacttacccgttgaagaacgaagaacggatgaagaacaatgaagaacgacggaaaaccttcacggattcgctcatggaaacgtctcggaagcgttacggaagcaactcggcttggattttcttcacggaaacaatttttttcacccaaaatagctgaaatgcatagccagggggatgagggatcattggaacagtcccatttcgcctatttataggaaaaagggggaggaggttgccgcccagctcgcccaggcgagctcagctcgccccagagagctgggttacttctttcagaagcaaccctgcttcaaaaatactctagaaggcgcaaattcaaaatttcaaaatatgctatgtgcacccnncccccaattttgataagatcacccccttcttttgtaatttatggaaaagntacggaagcatataggacttga

SEQ ID NO: 226973 - DNA, 476 bp, Glycine max
  unsure (1)..(476): unsure at all n locations
agcttccatcaattggtactagtgagtcataacctttggtcactcttatcataactcanacctttctttattttcatttaattgctttatcataaaaaccaaaattacaaaaatatttaaactctctttttaatcaattctattgttagtttaaataattaggaatacagctagtcctttgggtttgaaatctaaactttcaagtccattggtactatggcataggatctagtctacaatagagcatggagttgcactcatatctctatatgctattgaaaaataagcaaagctgtagatcgacattgatactaaagatatggagcctaaagagattacaagatatgaagaggctatgctatagtttatcactaaagcatctctcanagatcacaaggatgacatagttgtgacaaatcctagtgcaaatcgtgtgtatccaaaactagtggttggtgatgatgatcaactaattg

SEQ ID NO: 226974 - DNA, 476 bp, Glycine max
  unsure (1)..(476): unsure at all n locations
tatcgatgaacaccttaatgagaganaggaattccaaaacatgacgattatcaagagtagtgtgatgaagcaccgatcgaagttggcgtgccttcgtccgagtctgatgatgaaaataagcatgaatcttgtcctatacttgatacaaatgagttgatctcggaacacgagcaaggatcaaactcgaaagtggggattgaagccaaacaagcataaatttatcttgcttctaccacatcaaaaacagaggattgacatgatcaagatcatgatttgcatcagaaagatatcgtggagggatatgaggattagctacaaagcaattgagtccaagcacagtgattgttggcttgatttgttgtcgccatagcagaaaattcttatcattcaactntnttgtgctttgatgcaagaaannattgatgtggacatgatgaagctggaacatcttgattcattggaatcaaattgattgg

SEQ ID NO: 226975 - DNA, 406 bp, Glycine max
  unsure (1)..(406): unsure at all n locations
catgcaagcttcttaatgttatagaattcaatagctcaaggaagcgaatgtcagtgatagtgaaagatgaagaagggaaaanttttctactctgtaaaggtgctgacaggtctgtgataaaataatttatagccttcaacttctagcctgcgcatttaacctatggacttgcctaacttattttttcatgcagtgtcatgttggaaaggcttgcaaacaattggaggaagtttgaaaggaaaactgtggaacatgtgcgtgaatatgctgacacaggtctaaggaccctagtacttgcctattgcgaacttgatgaacaagaatacaaggagttcgatgataaattctctgaagtaaaaaattctgtccgcgcagatcaggaaactctgattgaagaagtatcgga

SEQ ID NO: 226976 - DNA, 424 bp, Glycine max
tactaagctgcttgcgtatccgctcttggtgctcagaatatcccacaaacaaatgcctcttattactagctattatgaattctttagttcctgaatgtacaaccttcaaattgttgctcgttcccctctgtcttttctgcaaaaaagaaaatcaaatgctatgaaaacatggatgaagtcctaagaaaatcaatatcaaagaaaacatggatgaaatcacaattaaaaagcacaactacctatcttgcagagtcctttggttaatatgtcttgtctccttatgtggtggggttctggttaataatgttatactgttgccttccaaaaaacacttatcactaatcctcttttcattaatccacatttgtatgttattggataaaagatcatgggttctccacctggcctcactactcctgcttct

SEQ ID NO: 226977 - DNA, 107 bp, Glycine max
agcttaatatatcattcaatctatataactattagtaggattctctcctaaggaacattactttcttagctaattaaggaatattacttccggcgcaccctactatc

SEQ ID NO: 226978 - DNA, 377 bp, Glycine max
ctaagcttcttacaatcttaacacaccatgaatcctgtcgtcaatgattttattacgcccttgtcgctgattattatactttgagtatcattcttaaagtatttatgataaacaataacaaattcatcttatataagcaaatagctgcattctaactgaatttataaaaaaatatcttatgtatggttcttaaggtattcatttataaaaattaacaaaaactttatacacaagtaaacaaaatgaattaataaatcatgcactacatattatattataataataagttaattttataattgtcctgttcggataaaaaagatccctactcacttccacgacattcaattaatactccacattaccctgacctcttc

SEQ ID NO: 226979 - DNA, 452 bp, Glycine max
  unsure (1)..(452): unsure at all n locations
agctngttactatgataagagcatacctgttgtttcctgaagtccaagtacaagactttntgtcaataatatcaccaaaaactatcacattaacaaaatcacagcctctaagatttcgacaaattattaggtagccttgaagcattatgtttttatgattctaatctaccattctctttatatataatacataactatattttttaatttgtaattaattataatanntcaatatgttatgtaaaaaaatagttaaaataattaacattataatgattntagactatctaataatttctagtaagaatttaatgtataacaaacctggaagcacagaaggctaccacataatccgtcccagaacaagtgaaaatactatgtggatcatcataagcatagctgtaagaaagtggacatgcctncttaaacttcttcgaataaaacgtgggatt

SEQ ID NO: 226980 - DNA, 489 bp, Glycine max
  unsure (1)..(489): unsure at all n locations
actcagaatactaagctcgcctnggatccaccgctattgttatggtttcatcatctcataataatggaatttttaaaaataatggtacacgtactagttatttttttttaaaatttaaaatatttttttataaaaaaaaccgtattttaacaaatattgtttttggtgttattttaacaaatatagttggacatacatgattataaaaaatggttatataaaaatttctatttataatttcattgtaagggtgggtaagtgggctgacccaccccgcttaaggttcgcccgcattggcagcggactgggtctgtccgtcccgcattcttacactgatcaaataaattgatctgtccctgcctcgtgaaccccgcgggtcaaatgaagcatgttgcaggcatatattttaaagaatntcaatttcaataaaaatacaacataatcaaattaagttcaatacaaatgtaaataaaatcttaacaattagtc

SEQ ID NO: 226981 - DNA, 424 bp, Glycine max
aggaagaagaagaggaagttcttagagactcagaaatcaatgtggaaaaactgcttgtgtaaagaatgaattggacaagatagatgtgtagaatgattgattgaaatgaatgattgaatgcataacacaaccttgcttttatagactcttcatgtctggtcaagaaaaccattagaagagttatgactttagaaaaccttacaacctatatgaaaaagtcaaaaactatttggtaaacaggttttgagacaaatccatgtgctactcagttactgaataaactttttcaaaaattatcattggtaatcgattaccaaatcagggtaatctattacacatagctttcttgagaaagaatgtgactcttcacatttgaatctgaatttcaacgttcaagcacactggtaatcgattaccacaacat

SEQ ID NO: 226982 - DNA, 402 bp, Glycine max
  unsure (1)..(402): unsure at all n locations
gagaagaacaagatgaaagatngcaaaaatacaagtggtgaggatgtctccttcacctctaggatctcacaatcactcacaaactcatctcatgctctcaaaccggttcctgtttcaagctctggtctctacagatcttcacacaacaaaatctctcaaaactctctggaacttggacctttctctctctagaaatcctagacatgcaaagctctgaatcccaatccacaatcccctcacaaaatctgatttcaggcttaaataggtggcctttttcgtgctcgtgcgcttagcgcatgtatggaccgcttagtgcacattagtgattattgtcttagcgcgcctntctcgcttagcgaatgaactgaagtggtgcgcttagcgaacctgtacaactcatct

SEQ ID NO: 226983 - DNA, 124 bp, Glycine max
  unsure (1)..(124): unsure at all n locations
gcgcgcatgcangctatancattcaatatccagcgtgttgacattgtacgggactgagacagacgtccgagggaaaagttatcgacgcttgaaaggcgatcgcacgccagcgataaactccgcg

SEQ ID NO: 226984 - DNA, 197 bp, Glycine max
  unsure (1)..(197): unsure at all n locations
acgacaatatcttattactctgttgactgtatgagtcctgtcacanatcgcgacgctcaaaattgaatgtcgacgctcagagccaattcaaacgacaatatcgttctactcggatgtctgattcagtcccgtcacatattcggaagcttgaacacgaatgtcgtaactctgagcatattcaaacaaaaatcaccttt

SEQ ID NO: 226985 - DNA, 212 bp, Glycine max
  unsure (1)..(212): unsure at all n locations
agcttgagtataattgattctttgtgttatgagcctacatcaaacagttggattattgatgtttctgtcacaatcaagcgattgttgatgtctccatatgtgtgtacactgtgatcatgttttcgtttctagaattcatttgaaatgtctgttgntaattctgaatgagtgatccttcttgatttaaaaaatatcgtctcctaatcaattga

SEQ ID NO: 226986 - DNA, 461 bp, Glycine max
  unsure (1)..(461): unsure at all n locations
taggggcattgatgtaatcatactataggtcgtcagggttgttatgcaactaactgcatgtataaaagccaagaacgaacctatgaaagaataaagaataatgaataataatactcctccttcctcacctagactctctctctctctctctctctctctctctccccccctcacttcttcttctcgagtagttggtcctctttcgtgaaagctaaccctaacattaagctaataaacaaaaataagattctaaatagaatattaaaaataagataacagttagaatataatttgagtttaatgtctaaataattatagtgtaaaattattttatgctgtcgtttgaacttatcatatatgctgagttgtgattggacaatnttataaaaaaatttacacagtatataactctntttcatatagaatctatatntattcaaaaaactcgaaaaaaagaaaaa

SEQ ID NO: 226987 - DNA, 190 bp, Glycine max
tctcagagtcatctagaggcacgtgcacgcagtgcatgcttctgaatgagctaagatcactgtgctgatattagttaaagagagaagaggagaatagtgcttacaatagttactcacaccttcaaatctttggactgtgaagatctttcgtgataagtgaggcgtgtcactttcttgagttcagaaaaac

SEQ ID NO: 226988 - DNA, 273 bp, Glycine max
tcatgctctcgcttatttcacctctggcttacttccactgtacacgcatacacgcataaacggaaccttcataagttttcatttccctcctcgtcttctgtattttcgttacatctaaagatgcgatttttaacaccacatttcttcatttgcccacccgtcttctatgttttttctttttgttcttttccatttcgcttcctgtgttctttgtttggcagagaacgtggacaaacacactaaagctatgattttgatgagtatggcggtgcc

SEQ ID NO: 226989 - DNA, 184 bp, Glycine max
  unsure (1)..(184): unsure at all n locations
agctagagaagcctatcgattttatttcctgcattaattaatatactatagnnngccttatatatccgctagaaatgtatgagcaactttgaacagctctgactacaactttgttcaagtaagaaaacaaaggcaaccgatgattaccaactattaagatgggaaaaaatggctatgttggatg

SEQ ID NO: 226990 - DNA, 355 bp, Glycine max
tgacactgttcgttaacagctttaataaacaacttgagatcctctctttcttctccactcatggctaaaattgttggaagaattgtgttagaagtgatcgtaaatggaaaaataaagatcctcacataaacactctctcacatgtttacactcaataattcttttgactcgcgttatactctttaaggttttttccctctaaaagtctcaccactctttccttttaccactcaacttctgcttatgaactcttaagtaagaacctttggggttggttatacatgacaagacacaacaagagatcaatgagaacttagcgactaagaacaaacagagtaaaagtaacaagagattt

SEQ ID NO: 226991 - DNA, 470 bp, Glycine max
  unsure (1)..(470): unsure at all n locations
agcttaggctaaattagtctaaactttcgtaagctatttaagctgagtctagtccaacaagagggatctgaggatgaagcttagtttaagttagtctaaacctaggaaggctgtctaaattaagcctagtccaacaagagggatctgaggatgaagcttggattaattcagtctaactagggatcgaggtttagtaatttaggctacaacatagaacacanaagcatgnatgattagagaaacatcattatatacatcaactggtttgttagaaagacccaatacctttacctactgctgtcaatcttgcattnttattgtttttagcctagacttagtttatttctgttctaaatcatcaatgtttctttcaacaatgccttatttatgaatttaatcctgtctaagactagttccctgagttcgatactcggattcatccgttttaattntaaatacttgatgatctg

SEQ ID NO: 226992 - DNA, 471 bp, Glycine max
  unsure (1)..(471): unsure at all n locations
aacacgattccaaataaagaacaagtggtttgcgttgaagatgcaaatctgctctcgaacaatggattcccaagctactccaaaagcacttggtgtaggtaaagtgacaataaagctaacttgaaaatgataaaggcaatttgaataaactataaaaagaataacactataaattgtgagaaataactaaaagataacataaattgatttgaatttcaattcaaggtccttttcaattgttacaattcaaatatttataaataacatggccatctgtagtgaaaggaaaccactaccgaaacggttaagatccgctatgtaggctcactcttaattctcaggatttcctttgaaccacctcgtttgatacacgaccaagttattcaaaaactaataattatgatcaaggccctttaagttatntgagccttgaccacctacggcccattggcttatcttcactcaacatct

SEQ ID NO: 226993 - DNA, 299 bp, Glycine max
agcttctcggctcatgctgagaacgcctctagttcaacacccgtgcagcctaaggcacccacccagagggaagctgcccaagttccaactccgaacacgactcgaccggacggtaattccaacacgacaaggaacttccctccgaggccattgccggaattcaccccgctcccaatgacgtacgaagatctcctaccatccctcatcgccaaacattttggccgtggtaacttccagaagggtccttgaaccccctttcccgaagtggtatgaccctaacgcaacttgcaagtaccatg

SEQ ID NO: 226994 - DNA, 419 bp, Glycine max
  unsure (1)..(419): unsure at all n locations
ntataagcgcgggtctgtgagacgaaggtcaagtggtctcgatatacgaggatgatgttccgagtacattggatttggtacgaccatgccctcctgatttccagctgggaaattgggagtggaggaacgccccgacatttacgcagcgagcataatgtaaacctttacggttttaaaagctctatagttgggcctaggctttagagttnttcttttggttaaggctntgtgtattttgttttttaaatttataatacaaggatctttcttcatctgttcctacgtctctacccattctcatccatttgcatgtttacttcttttctgaaacggcaggtccgatgacgagtcccccgaaggtactaatacctgggaccctgctatcaacttcgagcaagaaacgaatcaaacggaagatg

SEQ ID NO: 226995 - DNA, 221 bp, Glycine max
  unsure (1)..(221): unsure at all n locations
agcttgtcaatcactttgaatgtgtacgtacgtttagatctcgcaaagaaaatttaacaaggtggagtgaagatccgagccacctacactaccctttaggaggtctaggtgcctaaacaaggaactttaatttcaatggaaattttgaaacaccctntacccaaatactcttccagtcttactaaaatattgggatctactgtttcttagcttcttacgat

SEQ ID NO: 226996 - DNA, 314 bp, Glycine max
  unsure (1)..(314): unsure at all n locations
tgtgcatgtctagagagttctagagagagataggcccatgttctctagagttngagagatnttgctgtgtgaagatccacagagaccgaagcttgaagaggaagctgtcctaagagcttgagataagtttgtgagtgattgtgaggtcttagaggtggatgagacatccccactacttgtatttcttcaatccttcatctgtctcttctctttgttgtcaaggaagctttccacttatggagagctaaatcctttgatggttcttccttgtaggtacttgatgtaaatacctgtatatctattngatggtgctt

SEQ ID NO: 226997 - DNA, 454 bp, Glycine max
  unsure (1)..(454): unsure at all n locations
agcttatatatcctctcaggtgaagataatagaccttgtgctctgctgttaaaatgtatgtttatgcattagttcttaacaaattttctcattgtttccttgtttccttgttttctcattgtcacaatttgacattggcttctcatggacgagaaaatatcaagttgaggagttccatcattgaagtaccttgtttccttgttagctatatatataccagaacaaggttattattattattattattattattattattattattattattattattatatatactgcaaatgtatgattatataattntttgatattttaaaccatttatatttttctttaaatttaatttatatctcagaattctcttaacattctaatttgtggtctaattctttaattctcaattataacaatatattcatcaaatacatcttaatggtaattgatgtta

SEQ ID NO: 226998 - DNA, 247 bp, Glycine max
gccacaatctgttaaatctaagcccatacataataaattctatctagataagtataagaaagatctagattaataatatctagatgagataaaatctaaataatatctacatcaagtaagatcagataagatctaattttgtggaataaaatagtccgccctcttcaagtccaagcccaattctggattcaagccccatgcttcatttatacctgaaattagatgaataagatctaatttgctggat

SEQ ID NO: 226999 - DNA, 311 bp, Glycine max
  unsure (1)..(311): unsure at all n locations
agctntgactgagcaatgtcacagtatggatagcttattcttatactctataaccttaactcttaggcattcattagataaacttttccaccataaaggagagtaacagtgctacagtatgtcattgatattgaaaaattaataaaatgcaggtataaagagctcgtcatatgctcataacaagagaagctactggaaaggagctggcaatacacttgacatattggattggaacctaacagaactactgccagctaatacatggacgattcagttacaagctacaactacataactaactctatattatc

SEQ ID NO: 227000 - DNA, 194 bp, Glycine max
tcccctaaattcaattctcattggattcatctatatcaattagacattgtacactcgaccctctataattttgttgccctctcaactctatggtgctatattgtccaactttcatcgctatgtgtatctatatgattaatatatgtacgggcctgagatcatgtgttgcaaagatgcaatatcatatatgaacc

SEQ ID NO: 227001 - DNA, 202 bp, Glycine max
acttagagcacctgaggcatgctgctatacattcaattccgagcgtttcgttatattactagactcaatcattacatccgagtaatatgctatcgtcgcatgaattgccttacagcttaaacatttaactttgagcgtctcgttatattacaggactcaatcagacatccgagtaaaaagtcattgctcgttgaattggctc

SEQ ID NO: 227002 - DNA, 259 bp, Glycine max
ctaagcttaagcaattatacgacaatacttttactcggagtctgtttgagtcctctattatatcgagacactcgaaatcgaatgttgaacctctgagccaattcaaacgacaagtaactttctactcgaatgtctgattgagtctagtaatatatcgagacgctcgagatcgaatgttaaatctcatagctaattcaaacgacaataactttctactcgtatgtctgattgagagccgcattatatttagacgcttgaa

SEQ ID NO: 227003 - DNA, 471 bp, Glycine max
tctacttatgtggcagggcgggcttccttcactttcttgtctccaacgcgagctctgaccactgttcttccttcccgcgatgcttcttttcatgtccgcctgagtgggcttatagcctaaaccatacttcccacgatttccttgggtttttatcaggctagttatgccgccattgtctttgcctaaacccatcccgggttcataaccgttccccaacataactcgggccatcattaccgccgcatcggacagacaaggttgcccaaagagggagtccacggaggaaatgctgaccacctcaaaagactggaaagcggtttctaatgattcttctgcggcttccacataaggcatggaggatgggcagcttaccaagatatcttcctcgcctgacacgatgaccaagtgcccctccactacgaatttcagcttttggtggagtgtagaacgcacaactcccactgagtggat

SEQ ID NO: 227004 - DNA, 476 bp, Glycine max
  unsure (1)..(476): unsure at all n locations
agcttctccctattgtgctataaatagggggagaagtgaagaagataagggttcaaccccttaggcacttctctctctttcgaatttgctgaggaaaattatttccgtgaagaaaatccaagccgagacccttccgtaacatttccgtgagtaattacgcgaagattctcgaccgttattcaagatccatcgttcgttcttcgttntcttcagtcttcaacgggtaagtacctcaaaccaagcttttcaattcattatatgtacccgtgttggtccacattgtgtttcatgtattttcattctcgttttcatttactttttatacccccttttgacgtgcttaagccatttatntaagtcatttctcacctaatctaanaataaaataaatttccaccgatcggttgaattgtataatccgttaattgtggttaaaatgaattccgactgttcgggcgtgccgcaaccacgttgga

SEQ ID NO: 227005 - DNA, 437 bp, Glycine max
  unsure (1)..(437): unsure at all n locations
aaccatagacttganaatggatatttgaaagtaaagcccagtaagcaaaaaatagaaccaaaacacacctttaaaccgatcatcaggatatacaggaacatcaaaatagatcaatccccggctataaagaccctttacaacatcacgatcaaacaggataaatgaatttgcttcctccttacatactgtatctatcatggccagttcctcttctgaaagtttctataaaggcagaagacaacacaaaaaaaaaagtgaatacctaaatttcttcttatttccaaattaacacaatgaacaacattactgtaaatgaaccttccttcattaataagggtgaaatgcagacctcaccttaaattcttccaaagtaaagttcaccagacaaactccccaccaaggttcaataggaaaattcacaggttgtgttggaaaag

SEQ ID NO: 227006 - DNA, 133 bp, Glycine max
  unsure (1)..(133): unsure at all n locations
agctcgtgaggattgatggngaccctgtgttgatagaaacgaggatatgggctacgtgggagtacgtgagctcagttggaggtgggcaacaggggatggtgggtttatgcgcgctctgtggttgtctaaaaat

SEQ ID NO: 227007 - DNA, 396 bp, Glycine max
tgtacgggtgctgagttggaaaagtcccaggcgcgagctgatattctcgggttatgttgcacgtactaatgggtaccgtgagagatctacggcggcttgatccatgcgggcactaaagtgacggcatgggtatctccttccttcctctgtgccccagttgctccgatcctcctagcgttggtacttgtggaggagacataatcgaacttccctctcttcaagcccactttgattctttccccggcaaataccaagtccgcgaagctggagggaatgtagcccactaatttctcatagtaaaacaccggcaaggtgtctaccatcatgataatcattttcctttcgaccatgggaggggccacttgcgctgccaggtccctccaacgttgagcgtac

SEQ ID NO: 227008 - DNA, 164 bp, Glycine max
  unsure (1)..(164): unsure at all n locations
agcttatacatggagcaaggtaaattctcattatatcatattgcttaagcacaagaaacatcatattgcgaggtaaatgttaaggcagataaacaatcaaaactcctatctaatatctaccactctatgtctcttctatntgcagggnaaagcaatccttgcta

SEQ ID NO: 227009 - DNA, 449 bp, Glycine max
  unsure (1)..(449): unsure at all n locations
acacatgaaactaagcttatataagtctgganaagggaaaatttatccttgcaatgcatatctctatgactagttaatattgaaaaaggtcccatctcatacatgttaccaggatagtaaatagatttaacggtgtcttgacagtagtcttggtcccatctcatacaagcctagaagcttgaaatgtgctactaataactaataagtattggcagaagatgagagtgctgggtttgactgcagatgactggggaaaaaatggactgcaattgtcatgtgaagacaggagagggaggaatgcttgaacagagcccacattcgcagtctgttttagcctagagcttgttagttgttacccctcctgtctttgacactgacaatgacctntaattttttagcttcagctcgccttagtagaatccagtgtgccttttgattgcttacacatt

SEQ ID NO: 227010 - DNA, 528 bp, Glycine max
  unsure (1)..(528): unsure at all n locations
attgaacccttgagncctngatctctagagtcatctagaggcatctgaggcatgcaagcttcgactaatgttcggctcgatctgtagcgatagagcgttgccgcaggcaacgacccgaagggcgaagcgcgcagcgctgagtaatccttcctccaccaccatcactttcaaaagcctcggaattctcaaacgaatccgcaatcaaatattctgcccaagcggngaaggatgagaagcttgtagaacttccccaggcaaatatgctattggagcanagtgggtgttcagacacaagctcgatgaaatatgtaaggttgtgagtggaacaaagctaggcttgtggccaagggttattcacaacaagaaggtatagattacactgaaactattgctcatgttgctcgtctagaagcaatgcacattttaatatcctttgctgcccatcatggtatgatgttgtatcacatggatgtaaaatgtgtgcttcttcatggacttaatatcgacgcgtctatgttgaacaacccg

SEQ ID NO: 227011 - DNA, 442 bp, Glycine max
  unsure (1)..(442): unsure at all n locations
ttaagatgtgaattaaaacattcagaaactgctggttatcgattaccatatatgtgtaatcgattacacagtgcacactttgaattcaaattttaatagctattgtaaatcagttttggccactggtaatcgattaccaaagagtaaatttgttgaaaaagactttttaacttaaaattcttggccaaaccttctgctacttcaattggaattacctttctatttaatatacccnttctaagactctaaagattgtcttgatcatccatcttgaatatgattaatttctttgtcttgaataaagctntgagacgcatgtgatcctttggcatcatcaaaacatcagcttaatcctttgtctacaatctccctctttttgatgatgacaatccctgaaattaagacaagctatatacaagatgatagcacgttcacacaaccc

SEQ ID NO: 227012 - DNA, 220 bp, Glycine max
  unsure (1)..(220): unsure at all n locations
agtcttgttgacaagtgctgcatatgttcatttataaagtcttcacttttccaagcacaccaggaacctcccaccagcaagcagggctattttgctatctggtccagcaggtatacttagcaagaatttaacctgtcctgcagaaaccttttttaattntaagttggctcgactaatactatctacttatatatctcgaagaaccttaccagctcatgct

SEQ ID NO: 227013 - DNA, 458 bp, Glycine max
  unsure (1)..(458): unsure at all n locations
nttaccttctcttctttggcctgaaacggagttggattcaacattatgtcacaaaatnggagtttctactctataaaatcacataataaataaaaatatgtacaatctctataaaaagaaccataaattggaggcacattgctatttccttgcaaattttcaataccaaactaactcatgaataataattaacacaaggacatgggtttgcgattaagaatgttagcaaagtgctcaacacatctctcttcaaccccaatagcaccaaaattacttttgtgaaagttcaccttcaaacctggtacaagttcaaaaaatctcataattgttttaatggtgaagacatctctttgatctacatctccaaaaaatattgtatcatccgcatattgaagcaatgacactgcataacttccatttcctaccttggaatcttcgtagtacacctttgcagatgc

SEQ ID NO: 227014 - DNA, 169 bp, Glycine max
  unsure (1)..(169): unsure at all n locations
agcttgcactttttggaaccatacatgaattnttgacataaataatacaaaagaaattattatttatctaaatgatataagtcaattattatttatatttatgatacaaactattgatcataggtgagaaattgattctccccaaaccaacttctcacatctcttttat

SEQ ID NO: 227015 - DNA, 466 bp, Glycine max
  unsure (1)..(466): unsure at all n locations
tgttccgtctaaaactcagattaaacgagganttttctgcaaaatacctctntgatcaacattctgaatacaaaccattttgtaattcttttgcgaagttaatggtttgcatagcaaaacttgacggagtctttatagtaactaataatcattcactcagtcctcactttcctctggtttcacaaagaattcaatatgagctattctacttggttgctgatagccaaccgaatcagcatatgggtgtgacacagatggtttggcaattgaaaccagatgctggacttttaacattccacctctcccaatgcttaacttacttcctctattttctttaataacactgctaggcatattagaacgtgttgctctgaggaacttatatttgtacctgttaacaacaagcatagtaatgacaaataaatcgctggcaaggaaatgacaactaacacataaataatagttt

SEQ ID NO: 227016 - DNA, 239 bp, Glycine max
agcttgtgcaaatcaaatcactcctacatctcatctctagcatgcattatctttctttacccactcctcacgtttggctgtttagggaaaacactataactaaacgcgccgcaagggatccctatcgcaccagatccaaatctagaacgatgggtgatcaagaggagacacaggaacagatgatagccgacatgtcggctctgaaagaacaaatggcctccatgatggaggccatgtta

SEQ ID NO: 227017 - DNA, 397 bp, Glycine max
  unsure (1)..(397): unsure at all n locations
acacatgaatactaagctcgcctanagaggtccaggaaggacaaggcagccgaatgaactatttccgctccggagtatgacagtcaccgctttaggagcgctgtacaccagcagcgcttcgaggccatcaagggatggtcgtttctccgggagcgacgcgtccagctcagggacgacgagtatactgatttccaggaggaaatatggcgccggcggtgggcaccactggttactcccatggccaagtttgatccagaaatagtccttgagttttatgccaatgcttggccaacagaggagggcgtgcgtgacatgagatcctgcgtaaggggtcagtggatcccgtttgatgccgacgctatcggccaactcctatgatattcgttggtgttggaag

SEQ ID NO: 227018 - DNA, 458 bp, Glycine max
  unsure (1)..(458): unsure at all n locations
agcttagcgcgcggccttgatgctgacgctctgtcagattctccttggcgctaagcacactgaagctgcgcttagcggtggatgcacgcttagaccaactgctactcnttgcacttcaaaacttagcctctttttcatctgaaattgcatatatctcatcattaaatttaatggacatattctagagactgctgtaaccataaaacaagatttttttacaagaattactcaaaataaccataaattggggaactatacaagctttggaaaatgatttctataaaaaagttattcgtataaggcgactaacaactctcccaaatttacaattttgcttgtcctcaagcaaagaaagaacagctcactagtccttaagcgacaaagatagtggtcagtcaaaagaaaatggtgtctgattataaaggaatcaaccattgaactgaatatatgaaatctta

SEQ ID NO: 227019 - DNA, 341 bp, Glycine max
  unsure (1)..(341): unsure at all n locations
tgaaatgaggaagtgtagaacggtgagactttctgcttttatttgttgaccacaaagtggtacctgtagatatgtctcggcggtcaggagaccttggggacgtcaggtggggtactattgcccaaaaccaagcttgaccgatcccgacccaacccgggcatagtcagtcagtgagaacctgtgatgtacctaagcatgcgagctcctgctagtaacagataaaaggaacaaagaccacaaagcaaggaggcttgtgtggtggctgtccagtngtgaatttcgactgacatatgggatatagcctttggttatcgattaccaagggtgggtaatcgattaca

SEQ ID NO: 227020 - DNA, 123 bp, Glycine max
aaacttaagcgttttgtgtaaataaaatggaggctgctattgtaaatttctgaggttctaacttctaatataataacttcatcttatctcttcccatccatccactcgcaacaaccccccata

SEQ ID NO: 227021 - DNA, 439 bp, Glycine max
  unsure (1)..(439): unsure at all n locations
ggctggtgctgccagatgaaggaatggngagaaaatatgtttctgacatgtattttgtatttgcttgcacttaacatagcacattgtttctatatgacaagaaagtccagattgatatattttgtataacctctttctgatgtgttagaacttataaagaaggaaattagtatctcttagaacttgggagggaaaaatccagttgttgggtaaattgcatgcatccgacctccccagattgagtcttgtgcattaggatgcctctcttacttcgtttgaatgggattattggttgataatcttgtgcctttgagtacagtatctttatctttagcatacaagctaggaacttcttgtgaaaatgaaaattgaaatggtttcctctgtcctgacaagacattaccttatgttaattgaataagtcttgtctgggtcattt

SEQ ID NO: 227022 - DNA, 352 bp, Glycine max
gatctctaagtcacctgagctgcaagcttaaagcgcgggtctgggagacgaaggtcatagtggtctcgatatacgaagatgatgttccgagtacattggatttggtacgaccatgccctcctgatttccagctgggaaattggcgagtggaggaacgccccggcatttacgcaacgagcataatgtaaacctttacggttttaaaagctctatagttgggcctaggctttagagtctttcctattgttaaggctttgtgtctttcgtttttgaattcataatacaaggatctttcttcatctgttcctacgtctctacccattctcattcatttgcatgtttacttcttttt

SEQ ID NO: 227023 - DNA, 435 bp, Glycine max
  unsure (1)..(435): unsure at all n locations
tcttatccaaggctcatctnggtggtgaagctccttcttccaatgcttatttcctagtggatggcgcctcctctcacctattctcctttgtcttccgctgcatctccatgggggaaaatcaccattaatggacctcatagaagctcaaagatccagcctccatagaagccccacaagcaagcttccatcacaaagtcctgtgatcaatgtgggaaatcccacggccccgttggacttatccgggtccaaagggtgcctggtcggtgccatacctgcaaatagataaatggcatcagcaatcaactgagccacgtgaatgctcatccgtgtcaggacggcgtacaccagctgacacttcgacaggtggaggtcggaattatgatcgctggtgctggatgtgctgagcagcaacgtcatacatatctgggttagggt

SEQ ID NO: 227024 - DNA, 465 bp, Glycine max
tcagagtcacctgcggcatgcaagcttctcttggaccttgaacaagcaactcactctctctttcataaccctgctatgtgctcgcgactgggccctttcttcccttcgcaacttgagttcattattgctaccccatagagctccgcgaaatttgttccggccatactcttccttgcgagccctcttggtctcttgttcaagggctcttgcgcgaattgcattctcttccctgaacccggcacactccttccgaacgtgtgtaccacccaacttgaacttctccttggcgagttttgcctttcctaactctgctttgagagcatggacttcttcgtactctctcggtgcttcaaaactctcttcgctgacgactcttaacttggcgagccaatctaaaccttgtatgcgaactttcagccattcgtggtacccaccagtgatgccattacgaatgcctctaagctc

SEQ ID NO: 227025 - DNA, 440 bp, Glycine max
  unsure (1)..(440): unsure at all n locations
actaagcttaagtatgcccgagtcattcatccgtatgagacgatgnagaattattggtgatcagaattgacattccttggataatagggttgaaccaaacttatgcttttacaaaaaggttcatcaagtcaaggtgaaatatggaagtaaccgtactgcataattggggcaaaagatgaattgagtcacatcactgcttcgtgtactgccaaacatatttaggattgttgatgtcctcgttacttccagtttaaccttgacaaagatgtcatggatcatgttgaaaatctaaattgattcaaccccatatcctgcgtaacaattcgtaatacttcaactatacatcattcgcatacatccatgcttatcattgtgtgcattgctcattgcattctgtccttgataattaaaataaactacaatgaacttaatcattgtta

SEQ ID NO: 227026 - DNA, 192 bp, Glycine max
  unsure (1)..(192): unsure at all n locations
agcttaacatcagaccacttccagggtgctggatactacttcacatggacttgatggngcctatgcaagttgaaagccttggaggaaagaggtatgcctatgttgctgtggatgatttctccagatttacctgngtcaactttatcagagagaaatcagaaacctttgaagtatttaaagagttgagtctaa

SEQ ID NO: 227027 - DNA, 415 bp, Glycine max
  unsure (1)..(415): unsure at all n locations
ctttgaatcggtggtctgattgtgttccaaaggatatcgagatgctcgtaattgaaaacggaagttctgagaaaaatcaaacgacaataacttttaactcggatgtcctattgagccctgtaatatgtcgagacgctcaaaattgaaaacggaagctctaagaaaagtgaaacgacaataacttttgactcggatgtncgatatagtctcgtaatatatcgagacgctcggaattgaaaacagaagctcttagcaaattcaaacgacaataacttttgacacggatgtctgattgagtctcgtaggatatctagacgctcataattgaaaacggaagctctacgaacaatcaaacgacaataacctctaactcggatgtctgatcgagccctgtaatatatcgagacgctcgaaa

SEQ ID NO: 227028 - DNA, 475 bp, Glycine max
  unsure (1)..(475): unsure at all n locations
catgcgagcttctaagacgatgattaattgacctaatattatagcttatctttcatggctaagnttgtaatcttgtgcagatcgtgtttgtatacaatcaatttaaaatataatataatgattataatgagtaattaattttaatatcaatataagctcaatacatttatgcgcataatggcaatgaagaataaattaaactatctgcacaatttattcttgtataataagtgacactaattgaaatgtagcataacgacaactaacaacaatgttttattaaatgcaatgtacatggcaagggaattaatttagtttaatctaaaacgagtgcattttcttagccaatatttaaataatgctaatataagcttgcgttcaccctacatattacttatntctttacgtacatgcttatcatctaaattcctaatatataatgtacaattctataatgagaaacgctatataacaa

SEQ ID NO: 227029 - DNA, 469 bp, Glycine max
  unsure (1)..(469): unsure at all n locations
ggaggatatctatgtttattgtaacattcatcaatattgtgatttgtgaatccataatgtgtacaaaccttgcttgctttcctatcaaaactccctttatcaaagcttcattggctacttcctcctcctctagaagtataacttggaggaaaaccatttttcctataacatctgtccactatgtgattatccttaccacagtatgtacatgatttcgatgaaagtgagcctgttgcattgatgagactagtgtntcccatcagatcactattattgatctgcctttcttgctgaacaacatatgagaagacctttgctatgctaggtaatggatccatcatcactacattggatcagacaatgccaaaatgataatttaaacctctaagaaactgcataacttgatcttgtttcttcctttctataacactaccaagagcatcacatatacactttnggtcacatatac

SEQ ID NO: 227030 - DNA, 229 bp, Glycine max
  unsure (1)..(229): unsure at all n locations
atctctaagtcatctgaggcatctgccgcatgcaagcttgaatacaatgaaactcgccttttaacattggtatgactaacatgaatgntctcaggacaccgtagttcagtggactgacaacgccacaatactagttgggatagtgtcaaaagagacgatcgcccttgcggccaccttaatacgagcatgttcacgctttatatagactttacagctttcatgtgctgag

SEQ ID NO: 227031 - DNA, 466 bp, Glycine max
actaagcttggacagtggagaaatactaagcatctaatattcataatcctatggcaaggaatcgtatccctgtctgaggatttcatgcttacaggttacaactcattcaaatgaaaccatactctatgctagtacatgtaaggattagtgttgaatcagtacagaatgcaaaaaagaccaaatcaatcaatttttatatttacaatccaaaacaaagaaaatagtttcatatgcactacaatagtagtataaccttctagtcaaaaacttgattggattggcatacactgattcttgacataatatagagataatgcaaagcaacttcaacaagggggataagcaagacaaatgggcttaaacccttgatattttgaataataaaatatgcttaaaaacctattctataatgtcataccatacatctatgtagtgatatggaaaccaaatctagtagctgtggaga

SEQ ID NO: 227032 - DNA, 375 bp, Glycine max
  unsure (1)..(375): unsure at all n locations
agctntcatcttctactcaatcatcaactggattacaattactcacttttgtttgtgtcaatgctcacttttatagtggtcttgcatcaaatttcataattgaacattccattgatcctctgccccttcacttaaatctgtgcaataaacattaggttccatttactaacaatagccaaagattgtatgtgaaaagtttctattctataagataataccaaactgatgaaatcaactaaaaagttcccatgtgaaaaataaataatgttaaaagtgtcataaatttaaaattaaaataagacataacaaaacatacccaataatgtcattttgacattcgatcaaacacataacttgcaaccaataaatcagtct

SEQ ID NO: 227033 - DNA, 433 bp, Glycine max
  unsure (1)..(433): unsure at all n locations
cttcttggggccatttcctgcgaaggcaaacatttggaaagttagttntaccagtgggacactactcttaaaacaaaaatggcatacaacctcttcccataaacatcaatgtaaatttagagcaagcttatgcgcatatttccttacgaacgttcgcttgcacaagacattcttttaactaagaaaaatgcacccatatacaatcaaggcagcttcgttacctagattatttacatgtacttccaaggtgtatgtgttacttacatcacacacatcttcttggctaagattacatacatgcatactcaaagcattttggggtaccaaaaattgcacatgtgcacatcttggtatatctaatacctatacatacacaaacttcatgatgaatattgactatctacacaataaagtgctacatttcatgctcttc

SEQ ID NO: 227034 - DNA, 428 bp, Glycine max
  unsure (1)..(428): unsure at all n locations
agctttcaacactggcaactgcaagatanttgtaagttctggcatatatgggattaggccaaatggaaaaattacaaatgtcaaaagactaaccggtagggccatgactaacacaaggccaataaagcaacggccttaagcctcttttcaattattgaaattntatatatttttaaaatacttctaaattaatagataataaattttattatattatttgtatttaacttgtttctaaaataattagtaaaatttattctctctaaatataaaatagaataactatattgaatgagaatatttttaagaattattgtgtttgataagaacaagtaaaaaaattctctanaaaaaatatctttggattctttttgctaatattttctcttactatatttttcataatgcacaatgaacaagatagattc

SEQ ID NO: 227035 - DNA, 480 bp, Glycine max
  unsure (1)..(480): unsure at all n locations
actataaaactaagctaccacgacatctgaattcatgtacgacaaatctctatgcggtcttagttggaacatggacgctagagtggcaagggcgtcggccatctgatnttcctctctaggaatgtgatgaaaggatatgtcatcaaagaattctatcaacttccttatgtaagcctcgtaaggcaccaatttatggtccctggtctcccattcacctttcaattggtgaattaccaatgccaagtccccataaactttgagcaacttgaccttgatgtcaatcgccacttggatcccaaaggcacacgccttatactcacctatgttgtttgtgcagtcgaaacccaacctagccatgaaaggtatatactattcatccagngaaaccaatactgcgccaactccatggcctagtgcattagatgcgccatcaaaccacacgaatccattgtccctgtcttcatcctctactttctcctc

SEQ ID NO: 227036 - DNA, 523 bp, Glycine max
  unsure (1)..(523): unsure at all n locations
tggccggcgcgcgnnnnntttggcctgagcatcattacggacactatagaatctaagcttgacagttggtcttttctgagaaggacaacacgggtctctatgtatcacgtgggagacgatgtgtntgatgaacgagacgacggcgacatatgatgaggatgatcctgaggagggcacttagtgttgtgactggcattcctacatgagtcaaagtttctatctaccagcaatgtcatcgggtaacctatagatgtcttactataacccgatacccaatcattcttacaagaatccgcatattatctacaggcatgtctgttatcacaggcccattagccaaacactctttatagccctaatccaaaagagcatttgtatcttaaagcgtgaaagatacatgtcacatgactgtggcatatgctaacttggtttcatttttactcgataatgcaacggttctcttaacgcctgtcagggttactctcccctcattcactcgaggatacgaatcgcacgcttcacc

SEQ ID NO: 227037 - DNA, 79 bp, Glycine max
agctttcattttaattaatttttattataattgatattgagacaaaatatgtgtctaaatagttattcttgccgtcgac

SEQ ID NO: 227038 - DNA, 407 bp, Glycine max
ctaccaatcccaggtttcgaaaaacaagcaaaaaggatataaatctatactatttacaagcagcggagttctaaatcatattcgcattttccaaatagagataactaatgccctctgagggtgccttcacaagaattagccagacatagtgagattcgtacttacagtttatcggggaaaacttttggggtagagggggaaagatgcagaaaagaacttgatattattgcacagacaactattacaagcttctctgtctaagtttctctctctcactattgggtatgatagccctgaatttctttattgcaggaaaagtttcgtgtcacgagtttcttttatcaagtcaaactcacgtatgtcctcttctgggaagaatcatcgatagccctgaatttctgtcctca

SEQ ID NO: 227039 - DNA, 459 bp, Glycine max
  unsure (1)..(459): unsure at all n locations
agctntntggagtagatacatgggaccaactcattntatttcaaaaaaggaagtcgtatctagtcaaggtctgagagaccatacaagtttcctaatgatttctaattatgtgggccattaagtctatcatatgctgacaatagccgagaagcccatgaatctcttcgggggcggagtaggtgtctgccatcgccttggccttggctaacaatcggngaagttcttgactcccgttcaaggtaagagcaaaccgatccatccacatggttgcctcttggtgtaaagagtcgatcacccttcctctagcctctttttccgcatatacttgggcatactcatccgcgattctatactcgtgggccgtggctagacccaactcttcttggtacttggcgatgatagctaacatgttggtttctgtctcgcatagacgctgagacaagctctctttggaccttg

SEQ ID NO: 227040 - DNA, 419 bp, Glycine max
  unsure (1)..(419): unsure at all n locations
tgagatgaggaagtgttgaagggtgaaacttcctgcttttattgttgaccacagagtggtacctggagatatgtcgcgggggtcaggagaccttgnggacgtcaggtggggtgctattgcccaaaaccaagcttgaccaatcccgacccaacccgggcatagtcggtcagtgagaacctgtgatgtacctaaacaggcgagctcctggcagtcaacagataaaaggaaaacaagaccacaaagcaaggaggcttgtggtggctggccagctgtgaattttgtgtaatatgtggattgtggcctctggtaatcgattaccaagggtgggtaatcgattacaaggcttaaaatcgaggacaggaggctaagatggtctctggtaatcgattaccaaggcgtgtaatcgatcaccangcttg

SEQ ID NO: 227041 - DNA, 271 bp, Glycine max
gacagaccttattgtccgctattcatgcccaacccttcttaccaaattatgaactcccttccttacaacaaaccctcctaagactcaccaaccctatgcacactctctcgtactcactcatattcagctctgtacacgctcccccatcaggcgatctctagaccaattacacaccacttcctatcctcgttgttccctcacctcttaatatcacatccttgacaatccaattttcatactgcttcccctgtttctaatcctttactctttc

SEQ ID NO: 227042 - DNA, 77 bp, Glycine max
  unsure (1)..(77): unsure at all n locations
agncttgaaggtgcgtagcccaccatcttttcatatgtagagtattgataatgtgtccaccatcacgagcatcgtct

SEQ ID NO: 227043 - DNA, 455 bp, Glycine max
  unsure (1)..(455): unsure at all n locations
tatatggcaaagctnggtgtccctntcatttgtgacattggctttcactatgttaattactatataccctgcattcattgggtctgaaataccaaaaataccaactcaatgttcagcaatgccttctttatgtcatcaaataccaatggaagtaatggaagaggcttaaaactacatcacttttatatgattcaatgttttccaagcttatgacaattaactaacctacacttatgtataatgagaggttctattataatgtgtatctaatataagcttctggaacagtatatgaaaattggatatgtcaaaatctccgacttaagggcaacaaagaaaaaggaaatatattaactggtagtaaatacaagcctagtgcaaaatgagctactgtaattacttatacctactttctaagtgatcttcgaagttcaaacaaacactcttgagatggc

SEQ ID NO: 227044 - DNA, 468 bp, Glycine max
  unsure (1)..(468): unsure at all n locations
cgcttgtgtaatcgattacaggctttannaattgaatcataatgttcagtaactactggtaatcgattaccatccatgtgtaattgattacatagtgtaaagtttaaattcaaatttgtaatggctgttgtaaatcattttttaccactagtaatcgattacatcctctggtaatcgattaccagagagtaaatcgcttgaaaaagtctttttacttatatttctttggcaaacctgttgctatttcaatttggaattcccttcctaaaatactagagatcttcttgatgttgtatcttgtattcttggattgttgtcttgaattaaactagagaagcacattttcataagacatcaaatcatcatgatcatatggcatcatcaaaacatcaaatgcaaagtatttgcttctacaatctcaaagtctttgcttctacattaccaaatactgtaatcgantacaacgca

SEQ ID NO: 227045 - DNA, 448 bp, Glycine max
  unsure (1)..(448): unsure at all n locations
gtacaagaccgnggaattagccattagtgtgtggcctggatcttctgttggactagtttgacccctgtgcttgacaccatgtggcccaagtactccacctgggtttgggcgaaggaacatttcgagagcttaatgaagaactggccctgcgacaaaaccgtgaaagccaattgcaaatgaagtaaatggtcattgaaggagctactataaattagtatgtcgagatgtggacatcaaagcccaagcccatgacaaccaccagccccaggcccatgactagatggaagcccaagacccaatacaaggcataggaagacccatgacaagagcaagagctaaaaaggcacaagatgctttggaacatatggtgattattctgagggtagttcaaatgcaaggagaggcccaacacttggagtctcaaaagggaatgttgctagtcctatgt

SEQ ID NO: 227046 - DNA, 379 bp, Glycine max
agcttatataattgaacttaaatgttcaataactgctggtaatcgactactatatatgtgtaatcgattacacagtgcaaattttgaattcaaattttaatagctgttgtaaataatttttggccactggtaatcgattacatcctctggtaatcgattaccagagaataaatctcttgaaaaagactttctaatttaaatttcttggccaaaacctttgctacttcaataaggaattcccttactatttaatatacccttcctatgactctagagactatcttgatcatccatcttgaatatctttaatttctttgtcttgaataaagctttgacaagcatgtgatcctttggcatcatcaaaacattcagcttgatc

SEQ ID NO: 227047 - DNA, 454 bp, Glycine max
  unsure (1)..(454): unsure at all n locations
ctaagctcttggagagaacatgggaccactcatttatttanaaagtaagtcatatctagtcaaggtctaagagaccttacaagtttcctaacgatttctaattatgtgggccattaagtctatcatatgctgacaatagccgagaagcccgtgaatctgttcggaggcggagtaggtgtctgccatcgctttggccttggctaacaatcggggaagttcttgactcccgttcaaggtaagagcaaaccgatccatccacatggttgcctcttggtgtaaagagtcgatcatgctttctctagcctctttttccgcgtatacttgggcatattcgtccgcaatcctatgctcgtgggccgcggctagatctaactcttcttggtacttggcgatgatagctagcatgttggtctccgtctcgcataaacgctgagacnagacttctttggacctt

SEQ ID NO: 227048 - DNA, 380 bp, Glycine max
  unsure (1)..(380): unsure at all n locations
agcttcaaggttcanagttggatcaaaagcggcttgagggacttttccatttcccgagcatcagttgagtggcgcattcctgttcctgatgacaagacccagactatatatgtatggtttgatgctttactagggtaaggatatgtatcttatagcttgtgcgtgctcctctagcttcccttgactctattctataatcttataggtcctgtctatcatactcaccgactatcatcttgtttattgttcgaaatacatagctaaatgcatgaaagttcacattatgcatgatcatttgtacagaatcacgataaagaacagcttggacttctgctattttgctgaatattctctattacatgtgtcgctaatcaccttcc

SEQ ID NO: 227049 - DNA, 333 bp, Glycine max
ctaagctcaatttgaatttatgtaatcatttcctaaattatttgacgtttgttatattcaaactaaacgttttattaaaaaacttagctttaattgtttataaatgatcatttccagtgaaattttctctctatatataactgtaaatttttaacttcctaatcattgacttgaagcctcttaacttattttactctcttccctctatttagacccctcagatccccctgcttgcaggatacgactggaaatacatttatccttgtgtatcttattccaatatcatcatcaagtagaatctcctccttcagtttttgaatgattacatttttt

SEQ ID NO: 227050 - DNA, 456 bp, Glycine max
  unsure (1)..(456): unsure at all n locations
agctntanaacctgtnnttgatgctaaaatttactcaaatgacaaggtgaattataagtcataaccctgtcaaatccttctcaagcccttgttaattcctcaagcatcacaaatgaggcatgccactttttgtttcctttttttttcgattactcacatattgtttcaattatattatatattatatataggaaaccattagttgagttgtaagtgtaactgtaattaagacaactcaaattcaatcaatcttctcaaatttaacccagtgtgtggtggtccaagatacaatacaacacagattttattctcatggcagaagaaaaacattttatcacacaaaaaggaagacaactctagtactaactgagaaaataaaaaacgatcgcttgcttactcttagagtaatgatacatatatgcatacacttaatactcttattctactttatctctc

SEQ ID NO: 227051 - DNA, 467 bp, Glycine max
  unsure (1)..(467): unsure at all n locations
atcgattacatagttgtttttgagacaatgattgatttatttaggagtctctgttntaattgattaccatgtcatataatcgattacttttctttttataagtgtttcagaagtaaacaagaacactntaatcgatttctttgagtatctaatcgattacattggtcttgagttgtttctagttttttggaagaacactacaattgattgaaagataatataatcaattacttcattgaattaattaattacctcgtagatttaattgattacaggcggttataactggtttctctataaataaccacattgtgttctctctaataacataacattttgagcttctgaaagagctatgatcacgtgttgttattagttaaagaaagaagagaaganaagtgcttagtcataacttcaaatctttgattatgaagatatttttgtgataagtgagttgtgttactctc

SEQ ID NO: 227052 - DNA, 521 bp, Glycine max
  unsure (1)..(521): unsure at all n locations
attgaaacccgtttatctcctgacctccagnagtgctctagagacgaccacgaggcatgcaagcttaacttagtcactgacctatctgcctaattatcataacaaccgagacacgangaacatgcaagtgtgctacgaaacatactgatcaagctcaaatcccaattgcacacggctgcctgcaatcattctttaccatcagtcatcgactacaacctctggcaacccatcaccagataccatatccctagaacacgctcctctactctaaaatacatgcgcccacctttagctataccaattaggacattccttcctaaaacccaacagatctctcgatgtcctattctcgtattccgagacgccgtcttgaataaccactagacaaccacatctctctatatagatcctattaccccgatcatctggcttactgaacacatcacagcctgtatcgcttctcaatctcaacgttccgatcaacttcccctatcgcacgcattacttactccttacccccg

SEQ ID NO: 227053 - DNA, 426 bp, Glycine max
taagctcttcaatgcttcctctttcttgctgggagaagttcttatcattttgacatgcataccaaaagccttagcaaacttgacagccacatgacctatgcctccgaggcccaccacacccaagtgcaacccaggctgagcaagcctataatatttcattgggctgcatactgtgattccagcacatagcaacggggcgtgcaccatctaacggaagagattttgggattagcacgacaaagttctgatcaaccactatgatatctgagtctccaccttgagttattgccccatcataatagcgtgcactgtaggttacatgtatttttggacaatatacatagaagccgatgctgtcggtccaacatgagccacacgaacctacagagccacccacaccacgcatgcaccatcactgcactttgg

SEQ ID NO: 227054 - DNA, 421 bp, Glycine max
  unsure (1)..(421): unsure at all n locations
agctggcttcctttgattntcggcatgtctcgggacttcacatatcgngcaacaaagggtgccaagtatctcgaagcggccaatcaaaggttgtatatcatcaaataataatccccggacgaaattagggtatgacagggtcgaagcggcttcctataccaatgtcacgaggagtgtggtggtcagattcataaagagggagttgnattgtcagtacgaactccctaggaagatcattactgacaatggcacanatctgaataacaaaatgatgcaggatatgtgcatggatttcaaaatctagcatcacaattccacgccctaccgaccaaagatgaacggagccgtggaagcagccaataagaatattaagaatattattcagaagatgacagtgtcgcacaaagattggcatgagatg

SEQ ID NO: 227055 - DNA, 396 bp, Glycine max
  unsure (1)..(396): unsure at all n locations
tgagcccacttatctntgtacatattagattaaggtttcattattttctggccttgtatttagggctctataatgtaggtagggtaccctagaaatgtaggatttttcagcccttgtattttagggcacctagactagtttttgtattacgggtatgtttgtaatttcacatgcattaagtgaatatttgatgtgtgtgttggaaaataaatctaattgtattgggagaagctcaatccaatttaattctagagggggaggtgagcatttgcttgctacaccccattgtcacatcatatagtcgcactttgtgcatatccttcatgctctacatgcctcatgccacgttagcatatttagtggataattttgaacttgatcttggttagtgggctg

SEQ ID NO: 227056 - DNA, 273 bp, Glycine max
  unsure (1)..(273): unsure at all n locations
atgcttatgatgatgatcaagttgttcaagtttgtttgatgatgacacagacgatgacaaaaagcccanagaaatgatttcaagattgagtcaacaagttcaagatcaagaataacttccaggttcatgagaagaaatcaagaagattccagaatcctgagaaggtctgtttccagattcaagagaagatgaattcttgattctcgagatgaaatctagcatacctcccagggaagttttgacagattcttcaaaaacaaacatagcaccgct

SEQ ID NO: 227057 - DNA, 467 bp, Glycine max
ctgcagctagaagaaatatggtctttttacatgtccatactctatgtgacattatgtagaggtagaaagattgtttctaaagttagaaacttcttcaatgtttaaaactctctgttttaatcgattacaaggctgatcataatcgattacacaagtgtctgtagctcgtagagagattctagtttcggtttaatcaattaccagttaactgttatcaatcacgtaattcaattgagaccatgtctggttcctcatgagtctctgctttaatcgattattagataatcgtaatcgattacttcattcttaaaattgttcccagaagtgatcaagaacactttaatcaattacatcaataatctaatcgattacatagttcttgaaagttttccagatgttgggaataacactttaatcaattgatatgataatataatcgattacttctttcgaataatcgactacat

SEQ ID NO: 227058 - DNA, 131 bp, Glycine max
agctttgctgatgataatgcttctattacattattatcgctatcagatgagcctaacagaagtgtaataacttgtcatggatactacacaacatcggtgatttaaatcaccgacgttgttatcctatatta

SEQ ID NO: 227059 - DNA, 398 bp, Glycine max
  unsure (1)..(398): unsure at all n locations
ntgaaggtgtgtaacccaccatttctttcatagtatatcaccgttctcgtgtctactatcattgcgataatctctttctctgtttctgggggtgctacttgagttgccaagcctctccatctttgggcgcgttctttgaaagatctgtccccccttttgcacatgttctgtagttgtattactattcgaagacattatactgacactgcctaacgaaggccaccactacgtcctttcatgaatggactcgagaaggcaccaagttagtgtaccaggtaacagttactcagtgagactatcttggaatgaatgtatcagtaattccttatcttttgcgcatgcccncatcttccgataatacatctttagatggttcttggggcaagtagtcctcttgt

SEQ ID NO: 227060 - DNA, 196 bp, Glycine max
agcttgtaactcggctttcatcgctttaagccaacaaccatgttgagatgctttagcatatgtcttatgctcagtagatgtagaaatggaaagaacaaaatgtctgtgggatgatgatagacgcgaataagatagtacagaatcgagaggatgacacactatagctgaataatcgagaggatggctcactgaagct

SEQ ID NO: 227061 - DNA, 445 bp, Glycine max
  unsure (1)..(445): unsure at all n locations
cgtccaaagtagccttgggcacgacattgagggaagagtcgttgtcaataagcactttggccactatgtggtccaaacatttgacggatatgtgcaaggctctgttgtgcccctggccctcgatgggtatttcttcattggtgaatgtgaggtaaatgttggccgcgatgttgttgattatgcccccgaaaccctccacagatatgactngtgctacgtgggcttcattcaaaatcttgaccaatagcgcctgatgaggctcagagtccataagcagcccgaaaagagagatcctagctggggttttatttagttgttcaatcaccttaaacttgctttgttggatgattcgcaggaactcggttgcttcttcaacggatattccctttttgctgaagtcatcttcttccttggcaaaccttccggtcgggacctcgtcatccgg

SEQ ID NO: 227062 - DNA, 196 bp, Glycine max
ggcttgtaagaattctaagatcattctccttgtctactcttcgaaaaagatcgccatgattatgaagagacgactctctatagatgttcctgagaggacaatttagagagtgatcaaagactcatcggatcgatttccactgcatctatctattgacagatcccgatatcttaatgttgaaagtcttccacctcat

SEQ ID NO: 227063 - DNA, 453 bp, Glycine max
  unsure (1)..(453): unsure at all n locations
ngaaggagtttattgcatcagggaacaatttcactttaaaagtgtgtcctaattggattcctaattntcaacttacctatttggatgtgacatcatggcagataggtcccaactttccatcgtggattcaatcacaaaacaaacttcaatatattggactgtctaacacggtgattttagattctattcccacttggttctgggaaccacactctcaggttgtgcatttaaacctctctcataatcatatccatggtgagcttgtgactacattacaaaatccaatatctatccaaactgttgatctaagcacaaatcacttatgtggtaaattaccctatctttcanatgatgtgtatgagttagacctttcaaccaattcattctctgaatccatgcaagaatncttatgtaacaatcacgacaaggcaatgcaattagaatttctcaatc

SEQ ID NO: 227064 - DNA, 459 bp, Glycine max
  unsure (1)..(459): unsure at all n locations
agcttccgttcncaagatcatccnttatttaagtatttcagcctttgctttcttgtagcttaggaaaaatgccattcttcttctttctttcttccaaatccatttctaaagttccaagtactttctccatcacccacatccaccattagccaccacaaaccatcattgttctccattgaaaacccacaccgagaggaacccttcaaccgaagcagaatcttcaacttgctcgcgtgtttggtaaagaacgaaaaccctaatctgatctttcgttttctttcgaggtaaccatgcgtctatgctcgtttcttgctagcttcatcttgtctttgcatcttttctaactctgcaaccgccattgcatgtcttatgcttcctttgacaaaccttagagaaagagacttttgaaacattatcctttcatgaaatgcatggtatattcgtaacctacacttgacc

SEQ ID NO: 227065 - DNA, 340 bp, Glycine max
tccaatttcaatttcgaccatctcgatatattaccggtctcatccggacatccatgtataaagttattgtcaactcaatttactcacggcttctgatcttaatatctagcgcctcgatatattacaggactcattcagacatccgagtcaaaagttattgtcgtctgaatttgatacaatcttccgttttcaacttggagcatctatcgactacatatgacactctgtctgccatccgagaacaaagatattgccgctagaattatctaagagtttgcgtctttacataggagcgtatcgctatattactggactgtaacgaaccttcgtgcataaagta

SEQ ID NO: 227066 - DNA, 465 bp, Glycine max
  unsure (1)..(465): unsure at all n locations
agctntgtcagtagaaaggtcattngaaaccgtttaaaggtccaatgccttaaacggtcgcgaaagaactacgtatgtctgatttcctcatcacaattgaggatacgtaggagcaaaatccccacttttgtccaacccatgagatcattaaaggtccaacaccttaatgtttctcacccaaaagagattgttcaaggtctaacgccttaatggttctcaccttcccaaagagatcgttcaaggtccaacgccttaatgtttctctcctttcaaaagagatcgttcaaggtccaaacgccttaacatttctcacccaaaagagatcgttcaaaggtccaacgccttaacggttctcttccttcaaaaccgagaggtcgtttcaaggccaacgtcttaaacaaatctcaagggctgaaaaatngtatatttctaggataccctacctacattatggagccctaaata

SEQ ID NO: 227067 - DNA, 458 bp, Glycine max
gacccaacccgggcatagtcagtcagtgagaacctgtgatgtacctaaacaggcgagctcctggcagtcaaccgataaaagaacaaagtccacaaagcaaggaggcttgtgtggcggctggccagctatggatcttgagtggtatctggaaattcgcctctggtaatcgtttaccaagggtgtgtaatcgattacaaggcttaaaaatggagacgggaagttaagatggcctccggtaatcaattaccaaggttgtgtaatcgattacaaggcttaaaaatggggacaggatgttaaggtggcctctggtaatcgattaccaatactgtgtaatcgattacacagagtaacagggcactggtaatcgattaccagctatgtgtaatcgattacacagtataaatattaggtttccatgtgcaaaagctgtgtaactcgagtttgggcactggtaatcg

SEQ ID NO: 227068 - DNA, 400 bp, Glycine max
  unsure (1)..(400): unsure at all n locations
agctcggcttggatagatccaagtataanaaatattttgaatcatatgatgagtaagtgatgcttctgaaatttcctttagttcttgggttcagtttcatatcagcttaatctctaacaattacagttaactaaagcatgttaaaaaaccaaactcaatagaacgaatcttaaggagagagagaaagtgtttggcagatcactaaccttttcatactcaaagtagcaagtgtggtagcctgatctcatgtgaagtgaaatatatagttacatctatggtagctcgtccagctttgcggctggaaactctatcgaaggagctaaacctgcaaactaaactaatgagaatgctgattgacaaagagtcaacaattgacttggctaaatatcctattgcacat

SEQ ID NO: 227069 - DNA, 451 bp, Glycine max
  unsure (1)..(451): unsure at all n locations
actaagctggtcattattatgtacttttaagtcaacgcctgcctatctntatatcttattaatggcaactctgccgaggttatcgatactatattgattttcctcctttccctgttgcctaaactacaattggctgaataaatagttaaatgttgcgctgattttttagtcagtacccttgtctatcgttagccaacatggaacaatattcaaattgatgcctgcctgtaagtgtatgtaggtatgtcctaggaatggcaactttgccgaggttatcgatattatattgatctctatcctttccctgttgcccaaagtacaattggctgataaaatagttaaatattgtgctgattttatagtcagtacccttgtctatcgaagccaacacggcacaactctcaatttcaatcttagaaatggctaacttgacgaggttatcgatactata

SEQ ID NO: 227070 - DNA, 54 bp, Glycine max
aagctggcaccagctcgccaagcacactcagttcgctcaggctagcaaggatgc

SEQ ID NO: 227071 - DNA, 277 bp, Glycine max
  unsure (1)..(277): unsure at all n locations
tattacatgacatattaaatcgctatataagatactacaaagatcacattttataaaaaattcatatntaaatacccatttctggcgttttttttttcgtgggtgtggcagtgccgtgagacaatggagggcggtcatttctcatgtttggacgtcaaagaacccataaacattattcgccgtctccggttctgtcaaatatcagtttaaacaaagccagaaattcagataaatggaaagtgcctttttcatgttcagtacccatgtttggaatttt

SEQ ID NO: 227072 - DNA, 416 bp, Glycine max
agctttttttaaagcctattaaattaaatagaccaagcttatgcttattaaaaagccttataagcctgataggtcggcctatatatatgtatatatacttatattatttttttgggtaccaatatatacttatattattttttaggtacaattaatatttttttttgaaactagaagactttgattacacattactgctccacaactttcattcctataatcaagtaagactttaattacaatttaggtgtgattcatgtgcccctttatattcctcattatttttattggctttcctattcctgttaacgtttccttttcctattaggtttacttttccttttaacttttctattacgttcctattctagagcaaaggaatattaaagagatttaatgtgaagaaggcttttaaa

SEQ ID NO: 227073 - DNA, 468 bp, Glycine max
  unsure (1)..(468): unsure at all n locations
cgttgaaatngccatggttgggtgagttagacatacccattctgttntatggttntgtgatgatgtttgtgatgtttgtatgctaaagttgctgaaggaaaactgttagagatgaaatatagagttaacctanggttggaaagtgagaatgtggtgttatgagtggaaaaagagtgaggctttgagagtgggaaggcaaagtctgaattctgtggtaaatggaggttaaagtgagttaatactagcttgaaatgtcatttangacttgggagaaagcttggactgtgctagagagaaaaacaaatgatcaaagtgaataaagagccatttctagggcaaatttgggtgttgaagagtcanaatttgattcggtgagattttaggtgtaaatccagtttgaacaagtctaaatagatgttatggacttgtgtgaggtgagagnttgctccaaaatcacctcattctcaa

SEQ ID NO: 227074 - DNA, 495 bp, Glycine max
  unsure (1)..(495): unsure at all n locations
agtcatctgaggcatgcaagctagtaatgtggtccggctaacaaagaaatcattatntnttcttggattcaaagcttaggttctacgagagcattcattctccattttcttgacaaaccataactaattttttcacagccgcaaccttattgttttgctacacttaataacacacatactattctttgcacatggctgcttctagctctcattccacaaaataaacaagcactgntttttacaagaatgaacattcaacattaatactggactggagcaatttactgtatactacaactcacattagcttgcgttgctattaaggttccagcaacaaaagtttatcgataacactcccccatatttgagacaaatttgtcctgatccatgagtgctctcctacaacctaagatagggttgttactcagtatcaatactattcggctcggatttcaaattaagcttaatagggtgcaatggacattcactattaac

SEQ ID NO: 227075 - DNA, 449 bp, Glycine max
tcaaagagaagttcaagtccatagtcttctaagtatgtagagagtatgatgaactatgggacgtcaatatggtcaccgatgaagccttggaatgagaaaccaataaggcccgaatggaagaacactaccaaaacaagttttgatgggctttatatggcactaatagtgagctcaaactctgatcaggtgaaaggaatcatcatgggtcaaaagcatgatctgtaatgactagctaaaggcttgtcttatgtcgaaaagaaatttgttccaacagttaaagtgagactgaagggaatatgtgggcaatcatcgatgagtgccaatagaagcttaatctatcgttgactcacgagcaatggctagaagatgatgtcgccaagatatcagcagatatggatacaagggatagggttattgattcattgcaccaagaagcaactgtgtggatg

SEQ ID NO: 227076 - DNA, 92 bp, Glycine max
  unsure (1)..(92): unsure at all n locations
catgcagctagaaaccctctnatccacttgaccgtcttttctcactaagggcggcgaaccaccttcatgctgcgagattcttctaatctgaa

SEQ ID NO: 227077 - DNA, 528 bp, Glycine max
  unsure (1)..(528): unsure at all n locations
acgcnccacnnngnaggggnnaattgacgctacttctctcgaacaccngacacatagaaacgacagctcgatcaaccaatgagactgtttgatgccttatctatctgttgttctcgctagctttgacacctgaatgacacnttgaagcattagatgatctataatgcacaagancaagcgacgctttgtgttagaccgctgaggcaactgcttaaccttgagaggtttgtggaacaaccttgtttgattctactccagcggtgtgtaaacctgcacgatgcacattctacgcgcactggatgatgacatagcctcatgaaactcaattatccttgacagtcgtcaagacctgcatgattcatacacagggcaaggttgctaactgcggactatgttctacgatgacaatatcagaggaacaaagttcccgggcacacgctctggttatcggtccatgtagatgtaagatcgacactatattttgagtgtgataggaagctcggtcccgatttggcaccgcatcaccac

SEQ ID NO: 227078 - DNA, 347 bp, Glycine max
  unsure (1)..(347): unsure at all n locations
agctngcctcanagaggtccaggaaggacaaggcggccaaaggaactagttccgctcctgagtatgacagtcaccgctttaggagcgctgtacaccagcagcgcttcgaggccatcaagggatggtcatttctccgggagcgacgcgtccagctcagggacgacgagtatactgatttccaggaggaaatagggcgccggcggtggacatcactgggtactcccatggccaagtttgatccagaaatagtccttgagttttatgccaatgcttggccaacagaggagggcgtgcgtgacatgagatcctgcgtaaggggtcagtggatcccgtctgatgccgtccct

SEQ ID NO: 227079 - DNA, 340 bp, Glycine max
  unsure (1)..(340): unsure at all n locations
tctaattgattaacggaagctcttgaganactcaaatggtcatatcttatcacacggacgtncgattcaggtgcataatatatcgagacgctggaaattgaacaacgtatggccttgagatattcaaatggtcataactagtcacacggatgtccgattcatgcacataatatatcgagatgctcaaaatcgaacatcggaagctctcgagaaattccaaaggtcataactcttcacacggaagtccgattctggcgcatcacttcataagatgctctgaattgaacaccggatgctctcgagaaattcaaacggtcataacttgttacacggaagttcg

SEQ ID NO: 227080 - DNA, 384 bp, Glycine max
  unsure (1)..(384): unsure at all n locations
tggcttatgtaagattgtatgaatatggagaaaccatcacatagtgttactaggaggccgtcagacgattgagcacaacangtatatatatgtcaatatgctcgcattatctcatcaggcactgatgtacacctacaactagaacttacggacaattaatagcctatattgaaactagaagactttgatacacattactgctccacaagcttccattcctataatccaggacgactttaatcacattaggtgtgatcatgcccccttatattctcatattttattggctacctatcctgtaaccgttccttttcctattaggtctacttttccttctaacttttctattacgtccctattctagagcaaaggaatattacagag

SEQ ID NO: 227081 - DNA, 418 bp, Glycine max
acttgcttgagaagctctcatacagtacttgtttgataagctgacttaagagaacttccttgagaagattctctgagaagctaaagcttagctacacacccctataatggctaagctcacccccatgacaaagaagcatgatgatacaaaaacaatcctactacaaagactactcaaaacgccctgaaatacaaggctaaaaccctatactactagaatggacaaaatacaaggcccacaataagaaaacaacctattctactatttacaaagaagagtggacccaaccttggcccatgggctcaaaaatctaccctaagcgtcatgagaaccctaaggcctacttatcaactctagccaaatcctctgggagcctcttgctcatggctcttggtacaggcacttcctagggagcatt

SEQ ID NO: 227082 - DNA, 51 bp, Glycine max
ttagaggcacctgaggatgcaagctcgacgccagctagcccacgcgagcaa

SEQ ID NO: 227083 - DNA, 377 bp, Glycine max
gagcacgcgagtgatgtctgtctgccataagcagctggaggaaaccagtgctacatgatatatctacgtgacctatggttggaacatgctaatgcttgcgagccagcgggaactcatgtgacgctgtctagatgcgggaaatgcgcatgtctcgtattcgtgtggcagacggacgccttactgacgtgagactagctcgacatgtactttaggactgcggagaaagcttggactgagcttctgagaacaacacatgatcaaagtgaataaagagccatttctagggcaaatttgggtgttgaagagtcaaattttgattcggtgagattctaggtgtcaatcccgcttgaacaagtctaaatagatgttatggactt

SEQ ID NO: 227084 - DNA, 432 bp, Glycine max
  unsure (1)..(432): unsure at all n locations
agcttcaagaaaaagatggcctcagtatattccttatttccagaagggaattccatcaatagacctccaatctttaatggagagggttaccactactggaaaacccgaatgcaaatttttattgaggcaatagatctacatatttgggaagccatagaaatagggccttatatacccaccacaggagaaagagttacaatagatggtagttcatcaagtgaaagcataactatagagaaacctatagatagatggtctgaagaggatagaaaacgagtacaatacaacttaaaagccaaaaacataataacatctgccctgtgaatggatgagtatttcacggcttcaaattggaagagtgctaaggaaatgtgggacactnttcgattaacacatgaaggaactacagatgttaaaagatctatgataaat

SEQ ID NO: 227085 - DNA, 469 bp, Glycine max
  unsure (1)..(469): unsure at all n locations
tctanactntatacaagaatgaagctctgataccacttgttagacaagtggcctcagatatcttaagaagggggggttgaattaagatattccaaactacttccccaattaaaaatctatttcactttttttaagttatgaattcccttaatgacaatcttcttaaatattgattcagataaaacaatttgaatatgagaataaagcagtaataaataaaggagattaatggaagagagagtgcaaactcagatttatactggttcggccacacccttgtgcctacgtccagtccccaagcaacccgcttgagagttccactatcttgtaaattccttctacaagttctaaacacacaaggacaatccttcctttgtgcttagaattcctttacaacaagagactcacggtctcttaatcccttagagaatgaggagaagtagaagaataaatctctctagaaagagat

SEQ ID NO: 227086 - DNA, 509 bp, Glycine max
  unsure (1)..(509): unsure at all n locations
tttgaccnccgtgaanatcgancccccttcgagnnactgaggatgctctacagtcgacactgcatgcatgcaagctagaagctgggggatacactcgaagacattttgtcttttaactgcctatctccctcgagcgacatttgtataggatgctatctcgtgtgatgcgtctgtagacatataggatgtatgatgcatccgttcatcatgacatcgaatgtgtgagtacaaagcatttatgcttttaacggtggcttcaagaggcaccacttctgattcatctgttcctgcgttgcactaatttactcactcacatgtcttgtgctacagtcccctctctcccacattgttatccctcgctaactattatcttctctgtcctctcgtccttacttccgcaaatttctcttctcctccttgattctcctttctcgccctcattcttttctctccctactccactctcccactatccctctcttgttttccccctctcttcctcttctccc

SEQ ID NO: 227087 - DNA, 322 bp, Glycine max
tgtataacggctagacatgatacatgtcaaggtttgtatcgttttatagataaaacggatgcccgacattatttccatgacacaaatgcaaatatgatgactcggaaactttatgcaaaactggtcatgcatgcacctatgcggacactcaagtgctcaacatttatggtcatgtgacgctagggctcacgattcatttcctctattataatccacccattgtttccaaacaatggtctgttataattcgtgcatacatccgagtacatttcgggcgtgcggcgaaatgtcactagattcacccttcaggtgtagacacatt

SEQ ID NO: 227088 - DNA, 179 bp, Glycine max
agcttatgtaggaacaattcaagataagtatgatgtgagaattgaagttcttccttggacttcaaatcaagcaaacagacaaaggcatatacatacatcaaaccaagtacgtgaaggaacttctgaagaagtttaagacggacgatgtaaagcaaattaataccctaatgcatccaacc

SEQ ID NO: 227089 - DNA, 443 bp, Glycine max
  unsure (1)..(443): unsure at all n locations
actaagcttcaagaattgcaagcctcttcatcagatatttctttcctttcttcatctagactcctcacaacttctttaccatttgtttctttagatggttcagtccttgattcactatgactatagattcggcaactccgaatcatactaccaatcccagcaatatttgtaacattggtagcttctgagctgtcattcttggattggttttcatcagaaccatcaacacacactttgacttcatatctccaaggcactactttattatccttgtaaggaaaacctttcaaaacttgtacagtgatgggctttggtacactagaggccgagctagtagtgccatttgtatgatgtatcactaangggtttggatgttcgaactggagtcaactaccgatacatcactttcaaaataactcaattgcatcgatagcatatccata

SEQ ID NO: 227090 - DNA, 248 bp, Glycine max
  unsure (1)..(248): unsure at all n locations
agcnttcacccttcccttttaaaagttgtatcagacacgctcgccctgtcgagctaaccctgtccttttctttnttgcaaaaacttaaactatttctttccattttatcattttgttaactcctatggtgaaggacctagggctacaaggacatcgatgtgtggtaaaggaaatttgtcctttggactggctcggttanatcctgatagtctacgcacattcgctcttttccattcttcttatggact

SEQ ID NO: 227091 - DNA, 456 bp, Glycine max
  unsure (1)..(456): unsure at all n locations
atttatcactctggtaacttagaaaaatttgataaaactctnttgtaaaacaaaactgtgctatgtttggtttttgaaaaatccttttcaatacttcccttgtgaagtcttgacttgttgcttcttggtttcttcttgatgtcttttcttgaattcttgaaatcaacttctcttgaatcttgaatcttcttgatttcgtctaatgaatcttgaaattaatctggatcttgaacttgttgactcaatcttgaaatcattcttttgggctttttgtcatcatcaaattcacttgattcatacttgattcatcatcatgaagcttgcttctacattctctccctctccctccactcatcttctcttatcttcgagctcttatatctatntatctttctcaaacactcatctctctgacttttccaacatttcctttcaatagacttacaaaattatcat

SEQ ID NO: 227092 - DNA, 129 bp, Glycine max
agcttgttctggttattaaaggagttcttgcttgttgaaacacatagcggctatgatattgaaggaggaggagacaaaggtgatgttatctatgcaattctcttactccttctcgaaggagatttcata

SEQ ID NO: 227093 - DNA, 329 bp, Glycine max
gtctatcgtaaggtagtgcataaaattatatattttaaatataggagtaagctatctcataccttatatgcataaacatgtttcaagatccactcattggtactatatactctctggtggagaacatcaagcacttactagaactttgtgttagacatctcaatcccttcagcatatgtacagggaagggaagtttgttgcggacttgctggcatataaagggaccacactgcaattgtccttatataaaagaagagtaagagagaagtgagctatatctcatgtcttatatggaccagagctctatacttgatctgaaacctttattt

SEQ ID NO: 227094 - DNA, 476 bp, Glycine max
  unsure (1)..(476): unsure at all n locations
agcttgtagtgaggcttggctacaaaaaatcattgtttnttctataattctaaggcttagattctaagagagcacaaatactatatttatccaaatattctttccaatacaattagcttactcactagcctttcactttaatttgtctttgaccttattacaacaacacacattttctttgattgctctttctcttttaacacacaacttattttttgtgagtgctgatgctttaccttttactttacatcccaatcaactcccccaaattcggtgtaacttgccttgaactatctgctctcctagaatctaaacatggtatcttggagatattcattcaagtttacggttcaatctttgaaatgtaacttagctcacatagggtgcaaaggatacaattataattcacggtaagctctttggccaatagagttggctatacaataatgggcgtcatcatgtgctcattcatacat

SEQ ID NO: 227095 - DNA, 438 bp, Glycine max
  unsure (1)..(438): unsure at all n locations
tccttacaccctagcctccaagcaatagagacaatgagagcacttggcccctnttgtcctcaaaaacaacacacaccctaaggccatctatggttgtgtcgccttatgtattgggtcttaatcccacttggattaaggttcaattatgctaggtgccttaatgaaaaccttaatgcccctatttagtttcatgtcacttaatcctagccttaactcaactttaactataaattctaactctaactaagctttttttattaattaaactctctttataataagtttttgtaatatttaccaatatgccattattgagttgactcttgttggctttctctaatttctactaaaatgagttctttcctttgttctttctctcatctttccctattacaactctaatagtataattatttccttactaagttattattacta

SEQ ID NO: 227096 - DNA, 193 bp, Glycine max
  unsure (1)..(193): unsure at all n locations
agcttgtagggttcaccccanattccgtcgtcatatgctaaacttgatcccatatctacttgataattcaatggtagccataaccctagccaaggttcatcaacctccatttctccgagaatacgactcgaacacaacgtgtgcttgtcacgaagaagccccggtgcgttccattgagcattggagggctctg

SEQ ID NO: 227097 - DNA, 493 bp, Glycine max
  unsure (1)..(493): unsure at all n locations
acactcagatactaagctgttcgccatcgttcgcgtgtatgacatccactccacaaggtttgaagttgaggagaccttcaatcctattacacaacgtggccgacaaaagtgggcagttaacttgaatggtcattattgtcaatgcagaaggtattctgcgcttcactatccatgttcacatattattgcagcttgtggttacgtgagcctgaactactaccaatatatagatgttgtttatacaaatgagcacatcgtaaaagcttactccgcacaatggtggcctcttgggaatgaagcgactattcctccttctaatgacgcatggacacttatccctgacccaacagcaattcgtgcgaaaggtcggcctaaatcaacaaggataaggaatgagatggattgtgtcgaaccctctgagcaccgacaaaaatgcagtagatgtggagccgaagcgcataacangcgtcgatgtccaatgcaatctgagcgt

SEQ ID NO: 227098 - DNA, 140 bp, Glycine max
gagaacctgaggcatgcagctttgaatcttcatgaccatggcgttacattgttttcgcgattccattcaattcattactctaatacactcttagacgtgctataccgtatacttaaacattgctcgttgcgtaaaaataa

SEQ ID NO: 227099 - DNA, 171 bp, Glycine max
gaaattcacggtgtccatataacaattaatcactccaactgatagctaggactgtggagctgaacttataccctacgatttagaactgcgctataacatctattcgaatttgtttccctctaccctaatcctgtatctgctagacgtaatataatttctggataaataatg

SEQ ID NO: 227100 - DNA, 301 bp, Glycine max
agctcgtatttatttgacatgttttctttcaaatcattgacaaatacgaactctgtacagaccttaatagagcattatttagacacattgttaattctgattgaaaaactcgcgtgtttgtctctgcttttgtatatggcatgtaacatcctaaaattctataatatttattgctattagtcttatcataaaaattattagtataacagttcatcctaattaaactgattatgatgatctatctatatacatatatatatatatatatatatatatatatatatatatattatcactgatt

SEQ ID NO: 227101 - DNA, 439 bp, Glycine max
ctaatgattgcttcggttgaaaggtgggcacatgagtcacacactgtttctcttcctgttggtgaatgcacaattacctttgaagatgttgttattcaactgggttcacatgttgataaaagaccagttattggatatataggtgatattcctccaaagaatgcactagtgggatcaacacttaaactaaaatggctaaaagaaaatatgttgacttttctagcagaacccacaccacgacaattagcaacccacttgtacagaacacattttagggctaattggtggaatgttggtgccaaataagtcacgggacagagttcacttgatgtatctacttatgtcaccaaatcttgactgggccggctggtacacgctagggtcgacattgttagcacatctgtacatagaaccgtgtaaagcactttatcacatattc

SEQ ID NO: 227102 - DNA, 464 bp, Glycine max
  unsure (1)..(464): unsure at all n locations
agctnntggaaatgatntctatacaaaagttagtcgtataaagtgactaacacacttaggctataaatagaggtcatgtgtgtgcatttcttcaactttgatcattttagaattacgcttcaaagttcagacctcttttgaggcacaaattttcgtgctccttctcctaccttcaggctcttatccatggattcctatggtggtgagcttcttcttgactcatcttctccttgaagtggtgtctctaatcaactttcttccttattcatttcgctaccattaaacttcaagaagaaaagcactccattgttgaagaagatccaaggcctacaagttccacatggagctacattagtattgccctttctcctacgtatccttagatgcgatgaggaacttagacctacgtagttctttaagtctgaatggttgttgtgctacatngattttatcttaattttaaa

SEQ ID NO: 227103 - DNA, 466 bp, Glycine max
  unsure (1)..(466): unsure at all n locations
taaagtatgcccgagtcattcatccctatgagatgttgtcgaagtattggcgatcagaattgccattccttggattatagggttgaaccaagctcatgcttttacaaaaaggttcatcaagtcaagttgaaatatggaagtaaccgtcttgcaaaattggggcaaaagatgaattgagtcacatcactgcttcgtctactgccaaacatatntaggattattgatgtccttgttacttccagtttcaccttgacaaagatgtcatggaccatgttgaaaatctaaattgattcaaccccatatcttgcgtaaaaattcgcaatacttcaactgtgcatcattcgcatgcatncatgcttttcattggttgcattgctcgttgcattcttttcttgaaaaataaaataaaatgaacttaatcattgttataaanaagaaatggacacgctttacgacgcccttaccg

SEQ ID NO: 227104 - DNA, 117 bp, Glycine max
  unsure (1)..(117): unsure at all n locations
agcttgcgaggattgatggngactctgtgttgttagaaacgaggatatggcctacgtgggagtacctgagctcagcttgaggtgggcaatacgggatggttgtttcatacactacta

SEQ ID NO: 227105 - DNA, 483 bp, Glycine max
  unsure (1)..(483): unsure at all n locations
acacttagactctcaagctcctccgaagggcatggttatttccagtttcctgaatatatctattaaatctcgccaaatggcggtccttctccttcttggaaggtaccacacgatatggtacttncgcatcttcattcacaacttattctctcttcttctctctagctcgtgcacttctactactctcttcattcttatctttatcactctatttcattccctatttctttttctacttccttttctttttcttggacatttaatttcttcctcttgaccattatttgtttaacttactcctgattgctttcacctatcatatcatgctacttatcatcagtaccttgctgttaagcagctttcttttatgcatgacactatactcatactccacctccacaaacctattactccttgtcatcacagctttgcattcctccttggcatactcttatgtattctgcacataatcgatggatgact

SEQ ID NO: 227106 - DNA, 198 bp, Glycine max
tctagaggcatctgacgcatgcaagctatgtgaatatcacatctgatatataggggttatatcctctcgatagtaccctttgacaactaaggatcacattataaataaaggatctacatctgattaagtcactgtatacaagactaatctaatcagaagatcctctcatagtatagtagaaagtgatctagtgatgat

SEQ ID NO: 227107 - DNA, 215 bp, Glycine max
  unsure (1)..(215): unsure at all n locations
nngatttggtttagacatgattgatacatgatttgttacttgtatgatttgatttgggcaagattggatgaggggaagtgtgattttcgaaatctgcacttatgcagaattttgctgtcaaaatatgtgcagcaggactttggctttgtgcagaaaaatgcttgcgtgtgtttggctgtggaatgagtagtgcataatgagttttggatggttgc

SEQ ID NO: 227108 - DNA, 192 bp, Glycine max
  unsure (1)..(192): unsure at all n locations
gagcttgagcatattcanacgacaataactntntactcggatgtccgaattaatccagtaatatatcgagacactcgtaattgaaaatggaagctctgagcaaattctaacgataataactttnttctcggatgtcggaatgagtcctcgtatatatcaagacgctcaaaattgaaaacaaaagctctgagc

SEQ ID NO: 227109 - DNA, 417 bp, Glycine max
  unsure (1)..(417): unsure at all n locations
ctctacagcagatttagtaatgacccactaacctagaattaaaataacttaatgccattaacctagggaattaaaacaaacttaatggctgagtgtaactgaaattgttggcaaccaaaagtcacccccaacagccaacaagtcagccaccatttggtctcccaaaaggctgatgcctaagttgccaattgggcccttattacaacttgaactaaagccctnttagttgattaacccaaaacatatttttggtcagccaactttacaaggattgngccattatttagacaaactaaacactctaaaattgaaataaagtggtgtcatttagtcctccatttgggccatgatacaactcacaaccttggactnttctccttgaaacttgngctcgtattcaaatagtatggacagcac

SEQ ID NO: 227110 - DNA, 208 bp, Glycine max
  unsure (1)..(208): unsure at all n locations
agcattgtgacattgtttattgactatggccattatggncgaccactgtcatggngaaattaccacaccattcgataggttgttaacgctgttctatagggtagctatcactctattgcggatgggctatttaccacgatcgtgatctaatgtatagtcttcacatcttgataatatcgagcactttccaacactttcacttaattga

SEQ ID NO: 227111 - DNA, 415 bp, Glycine max
atgagccaaaattccaacttatcataaacgctgaaccaatgtgtgaattcaaatctccgccctggagatatccgttagcacgattttccttcaaaagggtatacacaatgaagaattacatcaagaggaatcgcaaaataaaaagaaaatccgaccaacatctgcgaaacatttagattaccgaatgcgctgtggactccactatatctgaacaatacataattgtgaccatgataatattgccaaccaaatacctgcgcgttatggcttgttagcctcactctttcaaatgcggataataaaatgcctcatcactttagccgaatttccctcagaaatatcctttctcagataagtctactgatcttgatcacgcttgtatctttatgtgataggtttgatttgccttacaact

SEQ ID NO: 227112 - DNA, 458 bp, Glycine max
  unsure (1)..(458): unsure at all n locations
agctngagctcgttactactgcccatagagcctctcggaacttgttcctactccattcttcctttctaggactntatgtttcctactctaacacttcaaccgtggtcaggttgacatctttcacctcatcatactctttcctgaccctagtgattgtcgtctttagcttcactttcaccactcttgtgttttttagctctactttcataacttgcacttcttcattttccttaagaatttcagcctttgttccacttagactttttaactgtgggagccaagctatcccttgcattctagacttcaaccacttgtgatagccgccgatgtcaccattgctacttcctttaagctccttatcttttcttcccactctattccacgctttacgaactttccgaagtatcttcagactatcttcattgaagcctcgcatgatgaaaggcatgatgacttcc

SEQ ID NO: 227113 - DNA, 390 bp, Glycine max
tatgaatctaagcttcttgaaagctacaacatgtgttcacatgcttctatttattgcctaggtagcttccttgagaagctatgtggagaaacttccttgagaagcttcattgagaagcttccttgggaagctaaagcttaactacacacacccctttaagaactaagctcacctccttgagaagattcctagagaagctagagcttagctacacacacctttctaataactaggctcatctgcttgagatgagaagctagagcttagctacacatcccctatgatagctaagctcacccccatgctaaaatacatgataatacagaaaaagtccctactgcaatgactactcataatgcctcgtaatacaaggctaaaatcctatattat

SEQ ID NO: 227114 - DNA, 422 bp, Glycine max
  unsure (1)..(422): unsure at all n locations
atctctagagtcacctcaggcngcaagcttcataacctctcttatcaatgtccagttatatatactctacggtgcaggccataaaccaacatagcaagaagcaaaaaaataaacaaaaattatatcataaacaaaatatggctactcgaccaaaattcaaaacgaagctccactcataattttaaagctgcaagttctttagtcaaagccatattactttcttttaatctaaaacactccacagtcgacttctcatgcttctaattcaatataaatctttacaacgttaatctaggctgtcaatagttaacttgtcccaaataacacagaacgctacagagtatttcacctctgatttcatttgaagctgcgaatgatgcttttctattcaaaacctcattctttaaagctgtctctatctt

SEQ ID NO: 227115 - DNA, 463 bp, Glycine max
  unsure (1)..(463): unsure at all n locations
gacgttggaatgaaatgctatttgtcaaagttntgttaaagagctacatattaaagtgtggcttaaattataatatattattgttttataacagagttgaaagatttgaccgtgcactttatatatccatctttatgagtgaaatgtcttcaaatcttaaataaatgaaaaaaaaaagagccaatataagctataaattaattaagaaaggaagaaacctctcttcttggaatnggatgactactgagtcgtgatttgtctttaattacttgcgactatcccatgccaataaactgaaagtgagaaaagagcagattaaggaagaagcacgctaaacatgattgaaggatatggatatggatatggatggcgtactaccattccgtacaaaaccaacatggagtaacgaagcatgataatactgagagcatgacctaacacatgacaaaatataaacaatact

SEQ ID NO: 227116 - DNA, 330 bp, Glycine max
  unsure (1)..(330): unsure at all n locations
agctnngatccatcatacaattttaactgtatcatctatttaaagcctacacaaatgttgagttgcaatgaagttgtaattgcaagttgagagatagactaagcaacaacgagttagtgatatacaaatgctaatatatcaattatggtcaattattcatctttagtcctttaaaagtgaaaatactataatatagcagatgtatcttgctgtctcttaatctatacaaatcaaaatgatcctaactggctaattctcgctggtttctaaactttatttacgtttgcgtgtgcattcagagaggaattctgtaagttgtacttactgact

SEQ ID NO: 227117 - DNA, 445 bp, Glycine max
  unsure (1)..(445): unsure at all n locations
cttctcaaaagctngatttatgagttgattttagccttaatttcactttggttattagttaattcattcaaggaaactttcaaagaaaaatgtccgattgatttttttgattattttattatttttttccaagatattttgattatttattattatttttctttctttggtttaactgaggttatagtgtgaacgaccgattagattttgttttaacagtgattaaatgagattacaacgcaaatgatcagttgaaattcatcttatcatttattatgcgagataacggcttaaactctcggttaaagctcattaaaaacgaaagacaagataatcgaaagtgaacgaaaagaaaaccggcttggattttcttcacacaaacacgttttctcacccacaacagctgtaatgcatagcatatgggtcagggacctcttggaacaac

SEQ ID NO: 227118 - DNA, 471 bp, Glycine max
  unsure (1)..(471): unsure at all n locations
gctntgaggctatatatggaccatcgaccactaataatattgcagatgtacaagcgggtctaaagtaaaggaaagtgctacaagctactgtagaacctatcagattgtcaactctcttttggaaattttgatcgacatctgacaaggaaggatcaataacaagctactgagtggctacttccttcaaggtcactacctccatgtanttcctcaaagaatattcctgttgaaccaaatgtgaatgtcatattctaccttaactntagaggacatcaaatcttggaatggaaaacctgtaacaaagtctggagaaacaaagttgatattgggacttgggtacttgatcatgagatgcaaaagttagagcaggaaaagctaaatctccttaagctctaaaaggatagcactnggtgggaaaacatcatagttagtttgaagaaagtagaatctaaggtggagctcttatgtcta

SEQ ID NO: 227119 - DNA, 479 bp, Glycine max
tctattgacaccactcatgacacatgtgctcaggcttccctcctttgtgagttattgttgcaatggcatgtcggcatggcatccctacatcaaagttgtaaaatcagcacacatgtaggttaggaatgaaaaaaaaaactataaagaacacaacctgttagttgtcatactccacaagtgcatgttcattcagctaaattgacctcaaccttattcccccacatgtggacctcatatctcacgcccatgttatcaccacaccaaatgggagtccattgattagcaaaatgaagttctttttctagtcttttatactgcactggacataatggtccaggctttccagaaagtttaatcttgcgggcagccatggctctcatgatataacttctaatttcttcaagcattgtgataataggcttgcatctatactggaaacatctggaatagatacctcacaagtgttgtgcatatattgg

SEQ ID NO: 227120 - DNA, 212 bp, Glycine max
tcactgaatttgtgatagcaaacaagtgttcctagatacatcactgtcaccatcttctaaccatagttgcaaaatgtctacttacccataaaactactgcacctatatattgctcctggcggaggccaatggagcataatgctatgaaaaccacctgttatgttaggttactacttactctctagaggtagccctattcgtcaggagcacct

SEQ ID NO: 227121 - DNA, 395 bp, Glycine max
ataccttcatctgacttattatcattatttcctaagctatcttttccattattcaatacaaaacatttacgaccaaagatatgaagatgtgagatgtttggttttctgccattgaacaattcatatggagtattctttaaaatgggtgttattaaagccctatttaaaatgtagcatgctgcgttaacggctttagcccctatagttgttggaagaggagtatcatttaggtcagtcctatctatctcgttcaaagatctatttatactttctacaacaccataatgtcgaggggatcttggtgttgaaaagctatgctcaattccatgcttatcacacaataattgacattcttcacttgcacactgacgcgcatgatcactcctaatagatat

SEQ ID NO: 227122 - DNA, 62 bp, Glycine max
tatcataatcgaacacatagatggtatagtacaataattgatttagctacgaatcctctgtc

SEQ ID NO: 227123 - DNA, 411 bp, Glycine max
  unsure (1)..(411): unsure at all n locations
atatatatatatatatatatatatatatatatatatatatatatatatatatatatatatatatgataggcttgaaaagaagaattataaacatacatgcacaaataacaaaacacagagttttctttgttctcctaagttgtaatattggtcagggtgttacactttttatcggccaacacttgctgcctgttgattaataaaaagtaatttcgatcgctccctttatatgaaaaatataattatgtcatttcttatcaatagccgatgtagcgcgggcagaacaaaaatattttgtgggaattaacttactcatttgtggtactgcatgtaatctacttaatgttaaaatttattacaattaatttgattttctagaactacccataaaattgggtgtacaagaaattn

SEQ ID NO: 227124 - DNA, 465 bp, Glycine max
  unsure (1)..(465): unsure at all n locations
ggcttctacaaggtacatgctcgttaagaacaatttaagaaaaatagatgaaagagaatgagaaaaagtaaattcacctttttgcactccaagaatgatataattgcttaaatgccatatttatccatagattcatgaattgattctagctatttagcaagattgtaacatgacaaagctatatatgaaaccagttctgatttgggcatctataattggtcacaagattctaaaataaataaatataagacccttacttgatgagnctggttgatatggtaacaccattttctactaatgttcagttaacctaacagagaagccaaataactaatagagaagcaaaaatcaaactctctaaacttgaaaaatcaaatgcaggagaaaacatgaaaaggaacacctttggcaaaagctctttaaaattaagagttgattaactagatgcctaccaaataacattat

SEQ ID NO: 227125 - DNA, 121 bp, Glycine max
agcttgaaccgccagtgccaatggtctgaaggtgtgtaccgctagtcacagttgcgggacatgtgctgaccacgagagaggggtgaggctgtgccactgtcgcctgctgtcgggagaggat

SEQ ID NO: 227126 - DNA, 436 bp, Glycine max
ggttaaagaacttagaaaatatcaagaacaagcttgttcgcatattgttcgcgtgtatgatatccactccataaggtttgaagttgaggagaccttcaatcctattacgcaacgtggcggacaaaagtgggctgttaactagaatggtcattattgtcaatgccgaaggtattctgcgcttcactatccatgttgacacattattgcagcttgtggttacgtgagcatgaactactaccaatatatacatgctgtttacacaaatgaacacatcttaaaagcttactccgcacaatggtggccctttgggaatgaagcggccattcctccttctaatgacgcatggacacttatccttgacccaactacaattcgtgcgaaaggtctgccaaaatcaacatggataatgaatgagatggattgggtcgaaccatct

SEQ ID NO: 227127 - DNA, 300 bp, Glycine max
  unsure (1)..(300): unsure at all n locations
cgcttgntgagtgaatgaaatggctatgaagtgtaacggtctagacactaacaaaaggaaccactaaattcatctcgtggatgcattatatagaaagccaaatgtaatgaagtgttccctataacatttgtggaaagagtcacatcaatatttatgaattgccaaatgacatccaaccatgatatagaattaaagttgtacactaataaccaattcattaaattcattgtctcatgctcatctatacctgtctatggcggtttgaagcancaccttacagagacttcttggcactgaata

SEQ ID NO: 227128 - DNA, 209 bp, Glycine max
tctagacactggtttagtgaactctcaacaacattcattgctattggtttctctcaatcaaagaatgactatgcatcttttaccattgacaaaggtgcttccctcgatgttctgttggtctatgtagatgacattttgctagctggcccaggtgctacatgtgttcattctattcatgccatgcttcaagctttgctcatactaaagat

SEQ ID NO: 227129 - DNA, 445 bp, Glycine max
  unsure (1)..(445): unsure at all n locations
agctntatgactctcctacgagagtgcaaaaacaacagagaaatttatttaagttgagtttacatagttattttgagaacaaagcttcttattctacacttagtacaaaagttcaaaatttgattttttgtaccctgaaactgaaatcactttgatttcagagtgagaaaagaaaaagtctcataacaagtcctagcttccttagttaatcagttcccgcatctaagttaatgaatttctttataattcccatcatttctcccccagggaaacgccccagacatccctttgcagctgccacttcattcagctcataaaccgaatcaccactataagcttcacagcatttgtctctctcttctgtttccagatcatcaagcaagtcttcacccgacttaacacttggaataggaaatgggtcaagagaagatttggaaatagtgga

SEQ ID NO: 227130 - DNA, 471 bp, Glycine max
  unsure (1)..(471): unsure at all n locations
ntngttgggaaattctactaagtcttgatgtaaatattctntactatctatttaagttgttttgatgtgttcattgcttctatttgcatttaattcttgcatgtttttagtctgatcacccatttgtgtgtaaagttaggatttttagcattggaaaatgttttgaatccttagaattggatagagcagggctagataactgcattattggacacaaagtgcatggttntagtttttaatatgttgnttggttaggctaagttcgacgagggatctgagaacaaagtttaattagaattagctcattcgcactagacatcggtgtttgggataattgtcctcaacatagaacacanaaacaacattagatagagaaaaacttttaaatgcatcaagttactcagtagaagggacccaacgtttaatcatctantttctcccacgattagataaagtaatttgtagttaatt

SEQ ID NO: 227131 - DNA, 213 bp, Glycine max
agctctacatcagattttagtaatgacccactattctagaattaaaataacttaatgccattaacctatgtaattaaaagaacttaatgtctgagtgtaactgaaattgtggctacaaaaagtcaccctcaatagccaacatgtcagccaccatttgatctcccataacgctgatgcctaggatgacaattgggtccttattacatacttgac

SEQ ID NO: 227132 - DNA, 409 bp, Glycine max
  unsure (1)..(409): unsure at all n locations
ggaagganaacttgatgccttggtcaacctagtaactcagctttccatgaataagaaatctacacttgttgcaggagtctgtggtctatgttcttctgcagatcaccatacagaaatctgtccttttttgcagcaatctggagtcaatgagcaacctgaagcttatgctgcaaacatttataatagacctcatcatcagcaaaacccacaacaccagaataattattgacctttaagcaatagatacaatccatgctggaggaatcatccatatctgagatggacaagcccttcacaacaacaacaacctgtccctccctttcagaatgatgttggtccaagcaagccatatgttcctcctttcatacaacagcagtcacaacaaagacaacaagcatctgaggctcct

SEQ ID NO: 227133 - DNA, 475 bp, Glycine max
  unsure (1)..(475): unsure at all n locations
tctgagtcacctgaggcatgcaagctggttgactcttacctgagtcagnggtccctaccactttatttcattaaacagcaccctcaaatcctgtcaaaattctggccttattttgttatctgtgtaacattactcatgttgaaattactgttaagtaaattatttgatagtgtacaattttagggtaaccagctcaattctaagtctctatcaggaatagaaataaaagcaagtcattgatgaataatccttatccttactactctaaacatgacagcaacacaagacaagattcattgaccactacttttactagaaatcaaagccttgtattctggaggtacaaaagccgaaaaatcaatgcttcatattaagttttttgctgtcaccaccaagggtagaataacatctactcatgaatataattaaaataatgaataagtaacagccaaaattagtggagcacttacatgta

SEQ ID NO: 227134 - DNA, 466 bp, Glycine max
  unsure (1)..(466): unsure at all n locations
tattttgttcaagtctacgttccatttacctttcagtgagaagtaaagaaacttattntctgaattctgaagttggaaaacttaataaatagaactacaaggtaattttaaagattggaggtttgtatgttttttactacttgatttcattagtttgtattangagatttttctatcaatttaaaagtgaaataacaggttgacagcatgaacatagcctctcctttaagttgtgttatcagacatgctacctctcaaataacttttccaacatgatgccgagggaatgggtgatttaacgcatttctaacgagcattacgaactagatcaactagaaactgttacaacaatgattagaatcagaatntaaattaatggtggccacttaagttgaagcaactacttgtttagcagatagaaatatttgaactgtaataatgaacatgcggngtgctacttttatcg

SEQ ID NO: 227135 - DNA, 195 bp, Glycine max
  unsure (1)..(195): unsure at all n locations
agcttgtagcanatgcaaacggcaataacgttttattcggatgttcgattgagtcacgttatacatcgaaacgctcgaaattgaaaacagaagctctgtgcaaatttaaacgacaatacattttaactcggatgtccgattgagtcccgctatatatcatgacactcgaaactgagaataaaagctgtgaacatc

SEQ ID NO: 227136 - DNA, 68 bp, Glycine max
  unsure (1)..(68): unsure at all n locations
ctcggatgtccgattcatgcgcataatatatacanacacttgatatgtaataaccgaagctatggaga

SEQ ID NO: 227137 - DNA, 304 bp, Glycine max
atgcttttagatgctcactaaagtatgaaactttcagtactttagttgatgacctactcataggatacggacataatctctctctgacatataatgtggcatatagatctccagtgtgagccatgttcattaacacgatgagactgctcatagcatgacgtgtatgcacctgttactgatagctaactacgatgtatataaatcaagtcactgtccttaattgataattacatacatatgccttccgcataacacagatcagtactatccacacaaacctctgatctagtcatggactgatcca

SEQ ID NO: 227138 - DNA, 337 bp, Glycine max
gaggcggcggtcatgatggcccgagatatgttgatgaacggttacgaaccctgaatgggttcatgctaagacaactgcggacgtactatcctgatgaatgcctacggaaatcgtggagaacctggtttaagctatatgctcgatcgggcggatatgacgacagacattgcgggtacgaagagcggtgcgcgaagctcgcgtaggagacctgaaagtgattgacgcccgacctgccacatactgatatagctttattatcgccgatctgggagacagaagtcaagaggacgctactgagaagatgatgttatgagtacatgggatgactacgaccatg

SEQ ID NO: 227139 - DNA, 475 bp, Glycine max
agcttgtaggcctaggatcttcttcatcaatggattcctttgcttcttggaaaatgaatggcagcggaatggagaaggaagagagagagagagaggagacgccacttcaaggagaagatgagtctagaagaagctcaccaccataagaggccatggataagagcttgggggaagaaggagatgaatgaagggagagggagagaagagcactgaaatttgtgctccaaatgagctttgaaatctgaattttaatattcaaatgatcaaagttgaaaaaaatgcacacacatgacctctatttatagcctaagtgtcacacaaaattggagggaaattcaaatttcacttgaattggtggagccaaactttggagccaaaatttcactaattatgattagtgaattctagttatggttcagcccactaatccaagatcaattccaagattctccactaagtgtgcttaggtgtcatg

SEQ ID NO: 227140 - DNA, 484 bp, Glycine max
  unsure (1)..(484): unsure at all n locations
tctntgagaaaacttccttgagaagctagagcttagctacacatacctctctaatagctaagcttacctccttgagatgagaagctagagcttagctatacacaccctataatagctaagctcacccccatgacaaaaaacatgaaaatacaaaaaaaagtccttactacaaagactactcaaaatgccccgaaatacaaggctaaaaccctatactactagaatggccaaaatacaaggcccagacgaaggaaaaatctattctaatatttacaaagataaatgggctcatacttagcccatgggctcgaaatctaccctaaggctcatgagaaccctagggccttcccttggatctctagcccaatctacatggagtcttctacccaatgcccttgcagagtaggattgcatcattgagttatgtggagttntattgacctaagttgaaattatgagatttcaaatcttacctaaacctact

SEQ ID NO: 227141 - DNA, 180 bp, Glycine max
agcttctattctgaatttcgagcgtctcgatatatttcgggagacaatcggacattctagttacaagttatcggcgtcagctatagctcagtgcttatattgttaatattgaacgtcttgatatacctcgagagaccattcgtcagccgatgaaaaatgtcctgtcgaatgcctatgctc

SEQ ID NO: 227142 - DNA, 325 bp, Glycine max
cccgttgttcaatttcttacgtctatatatgtgatgcgcctgttatcgaccttcaagagaaaagtaatgaccatctgaaattctcgagagcttccgctgctcaatttcaagcgtctcgatctgttatacgcctgaatcggacctccgagtgacatcttatgaccatatgaatatttcgagagcttccgccgatcaacgtctagcctcatgacatattatgcgcctgactcggacctactagtgagaagctcagaccattagagttggtcacgagcttccaacgatcaatacccagcgtctcggcatgtgatgcgcctgaattgga

SEQ ID NO: 227143 - DNA, 344 bp, Glycine max
  unsure (1)..(344): unsure at all n locations
agctctaacatcagaccacttccattgtgctggatctacttcacatggactcgaaggggcctatgccagttgaaagccatggaggaaagaggcatgcctatgctgatgtggatgattcctcgagatatacctgggtcaactgtatcagataaaaatcacacatcctngaagtattcaatgagctgagtctaagacttcacctagacatagactgtgtcatcaagagactcatgagtgaccatggcaaagagtacgaaaacagattgtttactgaattctgctcatttgaacgcatcactcatgagttgtatgagccattacaccacatcagagcgacatatatg

SEQ ID NO: 227144 - DNA, 422 bp, Glycine max
tcggaagaaagtgatgaggtacaagccctaaaggcttatcttgaatgagcccgggtagtcgaagaggggtagtcgaagagaagttcaagtccatagccatcaaactctgaaaagagtatgaggaactaacggacgtcaatatggccaccgatgaagccttggaatgagaaaccaacaacgcccgaaaggaagaacacgaccaaaacaagttttgagggcctttatagggcagcaatagtgagctcaagctccgaagaggtgaaaggaatcatcacgggtcaaaggcatgatctggaaggacgagctaaaggcttgccttacgtcgaatagaaatttgtcctaacagctaaagtgagattgaagggaatatgtgggccattatccacgagtgcatagagatacttaatctagcggcgactcac

SEQ ID NO: 227145 - DNA, 446 bp, Glycine max
  unsure (1)..(446): unsure at all n locations
agctntaatggtcttgatacaattaaagaagaatagaacaatccaatcatggagagagagagagagtagagagagaaacagtgggtgggagagagttaggactaggaaagagaggagagctagagtcagatttcgagagtcagagggttcccatctgaccatcgaagggttagccacaggacagcgtcaatcctacacgcgagcgaactggagagaccataaggacgttatatccctttactttacgaggttcccggaagacgcaacagcaaaggatttgtggttccattttaaacagcaaggagacgtgagagaggttttcatacccagganaagaaacaaccaaggaaggagatatggttttgtgaggtataagggggtgagagatgtgcatcaacttcagcagcatttggacaatatgctcttcggaggaatgaagatgaatg

SEQ ID NO: 227146 - DNA, 425 bp, Glycine max
ttatgctattacctaaacttatgagctctagctaggttgtagcttcctataataggtataagaataggatcaaagcttctactttgacaatcacagtgtcaaggacttaactgatgacattattgcaaattcaatgttttgacattccttaattttgtaggtactaccaatgggaaacgggcaaccccaaatccagaaatgggttctacatctcaaggggaacggaagaggaagcggttagcaaccgacggagaggaggaaactttgcaaagccaattaattgatgtcttagaaaagaatggcaaaatgctacatgatcaacttgaagctcagaacctgaatttccagttggatcgccaacagcagaaagacactgcaagtaacatagttgctgtacttgataagcttgcagatgctctacggag

SEQ ID NO: 227147 - DNA, 361 bp, Glycine max
  unsure (1)..(361): unsure at all n locations
agctntatgcanantcaaacgacaataactttttattcggatgtctgactgagccccgcaatatatcaagacgctcgacattgaatgttgaacctatgagccaatgtacacgacaataactatttaatcggatgtttgattgagtcccgtattatattgagacgcttgaaattgaatgtagaagcttgaggcacattcaaacgacattacctctctactcggatgtctaattgagtcccgtaatatatcgatactctcgaaattgaatgttgaacctatgagccaatttaaacgacaataacttntctactcgtgatgtctgattgagtcccataatatatcatgacgctcgatattgaat

SEQ ID NO: 227148 - DNA, 420 bp, Glycine max
  unsure (1)..(420): unsure at all n locations
gcttaacattcaacttcgagcgtctcgttatattacatgactctattatacatccgagtaaaaagctattgatgtgtgaatctgctctaaccttccacattctattncgagcgtctccatatattacgggactcaattagacatccgagtaaaaagtcattgttctttgaatttgctcaaagcttcaacattcaaagtcgagcgcctctgtttattatatgacccagatacacatcccagtcaaaagatattgacgtttgaatttgctcagagcttcatgcattcaatttcgagcgtgtcgctatattactggactatatcagacatgcgagttaaaagctatcgtcgtttgaatttgctcagagcttcaacattcaatacccagcgtctcatatattacgggactcaatcagacatcct

SEQ ID NO: 227149 - DNA, 327 bp, Glycine max
  unsure (1)..(327): unsure at all n locations
cgctntcaacaagagtcttcacatataaccatcatgaagcagataactaacagaactacccatcatatctgccataatctcatacccacgaaatttaatagagaaagaagtccacccaaacctgaaatttcgaagtcccactcgtatacacgcacattacgactccgaaaatgctctccttttacgatttggggcagaaatgatggctcaagggttgaagcttgtctggagcttcaatggagaatgaaggagaagagaatggctacgtgagggagagagagagctgtctgaatagtgtgggggctgactgaagagagagaaaagctt

SEQ ID NO: 227150 - DNA, 196 bp, Glycine max
  unsure (1)..(196): unsure at all n locations
taacanaaggcatgcgaatagggtggaattcctattgcaatntttcttatgttatcaaacataacatgggaggaggagatattgtagcccatgttctttcttggagtcatgcattactctctatgcttgaaacaaaattgatcggtcttgaatgttcgataagcatgtatgacaatgatgaaacttttggagaaag

SEQ ID NO: 227151 - DNA, 424 bp, Glycine max
  unsure (1)..(424): unsure at all n locations
agcttggagaggatgcttcaatggaggaaaagaaagagagagatagagaanaagagaggggagcacgaaattgaaggaggaaaaggggaagagaagttgaactttgagttgtgtctcacaagactctcattcatcaaagttacaaaaagtgttacacatgcttctatttatagcctaggtagcttccttgagaaacttccttgagaagctttcttgagaaacttccttgagaagcttctttgagaagcttccttgagaagctagagcttagctacacacacccctctaataactaagctcacctccttgagaagtttccttgagaagattcctagagaagttagagcttaactacacacccctctctaatagctaagctcacctccttgagatgagaagctagagcttagctacacacccccta

SEQ ID NO: 227152 - DNA, 473 bp, Glycine max
  unsure (1)..(473): unsure at all n locations
gtgagagaagaaaatntagctaaagttgtggaaacatcagccacggctgcatcttgtggaagaggaggaggtcgcaacaatagaggaggccgtggtggaaggagtggacgccctcaatgcacatattgcaagaggatgggtcacacacaagaaaactgttattccttacacggttttcctgacaaggtagctcatgtttctaaaatagaaaaatcagagtctaaatcttctgatgagaaataccaggagtatctacggctcaagtctacaaaagccgacaatcaagcacaatcttcctcagtaccatatgtttcatcagcatgtatttctcaatctgtgaaagactctagtccttggatacttgattcaagtgcttctgatcatatctctggtaacaaatcatccttttcatccatgtcttttccaaaaattcctcactttgttactgtagctaatgagtccaaaagtacatc

SEQ ID NO: 227153 - DNA, 404 bp, Glycine max
agcttttcgattcattctatgtacccgtagtggttcacattgtgtttcgcgcatttatattctcgttttgtttactatttataccctcctgttgacatgcttaagccattttgcttaagtcatttctcgcttaacttaaaaataaaataaatttccatcgaacgtttgaattatattatccgttaacttcggttaaaatcaattccgaccgttcggtcatgccgttaccacgtttgaaatcaagaagaggtaaaaaataatataatattcaaaaaattatctctttagtgaaataaagcggaaaatcaatcggacgtttcctctttgggattcctcactcttaatcgaattgactaatgactaaagtgaaactaatgttataacttactctcctagtatagctc

SEQ ID NO: 227154 - DNA, 402 bp, Glycine max
  unsure (1)..(402): unsure at all n locations
ntctataagtcctagatgacatttcaaactacgattatcttattttaacctccatttaccactgaatccagatttggccttncaaaccctcaaagcatgacactttttcactcacaggactacattctcactttctaaccctaggttaactctacccttcatccctagcaagttttcatcagcaatttcagcacataaacatcacaagcatcatcataaaaaccctcaaacagaatgggtaagcttgactcacaccaaacatggcaagttcaacatgctntcaacaaattccttgacaaataactaccacaatgcataaacctagtaaaactacccatcatatctcctcgaaccccatacccacacaactttaggtgagaagaagtctacccaaacctgaaa

SEQ ID NO: 227155 - DNA, 411 bp, Glycine max
  unsure (1)..(411): unsure at all n locations
agcctttgagaaacaggcctcagatagcaaatctgtagtatgagggcaagctctccccttcctctatgaccactggtgtcttcaagaacgtgttgatggcgtcaacatcaaatctaattaggtgccctcgcaccctcacctgcttaggtgattnttcttcaaagtcatagaggttagcataaaattctttaacaatagcaacaacaatgcttccctctcgccaattaaagagctccttatgacaattccttctctcaatttctctcctgaattcatcacattctgtgatatattgcttcacattccttctcagaatgatcttccggctaacgacattgtctgcatagcggtcccaggcatcttgcgatactaaatttgagctatcatacctagcctacgacactgaacgtg

SEQ ID NO: 227156 - DNA, 456 bp, Glycine max
  unsure (1)..(456): unsure at all n locations
gagagtttggactgggattcaaagttttgcatgtctaggttttctagagagagaaaggtccaagttccagagagttttgagagattatgctgtgtgaagatttgcagagaccaaagcttgaagcaagagtcggtttgagagcttgagatgagtttgtgagtgattgtgagatcctagaggtgaaggagacatgctcaccacttgtatttttgcaatctttcatcttgttcttctctttgttgtaaagaaggcttcctggtatggaaagctaaatcctttgttggatcttctctgtaggtacctgatgtaaatatatttttatctatttaataattntttgtgtgttctctgtgctatctgcttttcactccagtatgcctttaccttgatcacgtagatgcatgctctgttagggtcattcaacagtggaaactggtctaactctaaagtccttga

SEQ ID NO: 227157 - DNA, 408 bp, Glycine max
  unsure (1)..(408): unsure at all n locations
agctgcatactgttntcattatgacaataaaatatttttgcaggctatacagctggatccagaatntgctaacaacattgggcagattgttcttcttggtggtgcttttgcagtaaatggcaatgtgaatcccgctgctgaagccaacgtgagtatttcaatcctgtattcaaattcttaatataacttccataaaaatattgtatcatccacaagtcaatctgtctaactcttcggttggatttgttccagacatttggtgatccagatgctgcagatgttgtatttacaagtggggcagatgtacttgcagtggggataaatgttacccaccaagttgtactgacaggtacccctttgacaaattctttggctcctttgtatacttgagtcatttttgtaaaattc

SEQ ID NO: 227158 - DNA, 469 bp, Glycine max
  unsure (1)..(469): unsure at all n locations
atattcttagtgtgtatatatgtctaataattggtttatatttacatttatatcttttctgagttttatttaatgtgccactcaacaaaataaaaataaaataaacagcgcaaaaaaaatttcattgactagaaaaatgctgaaactagccttagcctatactaatttaataaatttagtatcggcttagcctacattaaaagaaaaaacttctcagtccttacttgactaatataattattaatgcttattgcttgaccgttgagagacattcacaaaagaaattataatgaatagagatagagtacaggcctatgtaattaaaaacatgaacatatnggtattttntctggtaaggtacagctcatcctcgtcttatccccataatataaataagtattaagtactgatgaacagcatgtgtgattactactcaattaatgtacgcataagttcaactatagtgatc

SEQ ID NO: 227159 - DNA, 437 bp, Glycine max
  unsure (1)..(437): unsure at all n locations
agcttctggtttaattacgtgcgtctcgatatctctactgtgacacaatcagacatccgagtgaaaatntattgtgctttanatgtgctcagagcttcagttttcaattaggagcgtctcgatatattacgggtctgaatcggacatccgagttaaaaattattgtcgtttgaattttgccagagctttcgttatcaattacgagcgcctcgatatcctacggtgctcaatcggacatccgaggtaaaagttatagtcgatagatttttcccagagcttccgttttcaattaagagcgtctcgatatcctacgggacacaatcggacatccgagtcacaagttattgtcgtttgactcttcttagagcttcctgtttaaatttcgagcgtcttgatatattacagggcgcaatcggacatccgagttgaaagttatt

SEQ ID NO: 227160 - DNA, 481 bp, Glycine max
  unsure (1)..(481): unsure at all n locations
agcttcttttggaccttgaacaagcaatcaactcctctntcagaaccatgctatgtgctcgcgactggtccctttcttcccttcgcaacttgagttcattattgctaccccatagagctccgcgaaatttgttccggccatactcttccttgcgagccctcttggtttcttgttcaagggctcttgcggtaattgcattctcttcccgtaacccggcacactccttccgaacgtgtgtagcagccaacttgaacttctccttggcgagttttgcctttcctaactcgcttttgagagcttggacttcttcgtcctcttccggtgcttcaaaattctcttcgctgacgacttttaacttggcgagccaatctaaacctcgtatgcgaactctcagtcattcgtggtacccaccaatgatgccattacgaatgcctctaagctcttgatctttccttaacggggtntcccatgccttatggat

SEQ ID NO: 227161 - DNA, 475 bp, Glycine max
  unsure (1)..(475): unsure at all n locations
agctntctnnttgccacacacgctgtattcctccagccatattaatagcaaggctatgaaatcattcaatctccctatcaccccacaatgccccacacgcgtgaagctttatttctcttcttttggtttcttgaatacataacaactgaacttcttctttgaccaccacctgcttgataaacttccattttattctccctgtaaccccctcacatcatatgataatatattcattgatgagcttgcttacctacttggttntttccatctcgccttcagtttgtttccttcttatccctttcttccatggacacaaattttgaaacaatattctcttcctagccttcaaatgtcactccaaagctctccctagttcccatagtttctatgcttcaatagtttcattccttaacaaaagtattttgttgcagttgtgaatactttcatctgataaaatgttacttaatgagatact

SEQ ID NO: 227162 - DNA, 495 bp, Glycine max
  unsure (1)..(495): unsure at all n locations
agcttagctaactctataggagacatcctataatgagctatggatatgggtccagtaccaggtactaagtctatggaaaactctatctctctctcaggtggcagatcagatatatcctcaggaaacacttcaagaaactctctaacaacagggaggtcacacatagaaacctttgtctctacttctaggctagacaagatcatgtacacttgagcatcttcctttanagatgtcacaacttggttggcagagataaacatcatatccttactcactctagaatcatcaaacaccacactnttatcaaaacagttcaacaagacatggttggaagataaccagtccataccaagaataacatcaatctgactcataggcaaacaaatcacatcaattaagaatgttctaccagaaatctccacagaacaattcacacacacataagaaagtaacatagaaccactagtaggggtctctaccactagatctttatta

SEQ ID NO: 227163 - DNA, 343 bp, Glycine max
  unsure (1)..(343): unsure at all n locations
ctatgtacccgtagtggtccacattgngnttcgtgctttttattctcgngaagggtactatttataccccctgttgacgtgcttaaaccatcctacttaagtcattcctcgcttaacttaaaaataaaataaatttccaccgaacgtttgaattgtattatccgntaacttcggttaaaatgaatttcgaccgttcggtcgtgccgtaaccacgttggaaatcaaaaaagaggctaaaaataatataataatcaaaaaaacatcttttagtaaaataaagcggaaaatcaatctgacgttttctctttgggatttctcattcttaatccaattgagtaataac

SEQ ID NO: 227164 - DNA, 218 bp, Glycine max
  unsure (1)..(218): unsure at all n locations
aagttagtctatcctttaagattttcttatatcttaacttagtctatttaagactgtattcgggcaaattctatccaatattaatatatatagactntccattttataaacaagatatgtccctctctcttgccctcacgatgattcatgaaacgtattaaatctctggatataacttgctaagaatattgtatcatccacaagtcaatctgtctaac

SEQ ID NO: 227165 - DNA, 252 bp, Glycine max
aatctgatgtctctatgttacacactttgtattatatatactagtatttagcagcaattacttgggatcatcacatctccacctcccaatattaatcattcttattataatatcacatgagaagacgttataggctgattcactgcgtgacatacatgacatattgaacgtacgctcgtcatcgtattggggagacgtacaacaattgacgctctgttacaactaatcctgttcgtgacacgattgtacaaa

SEQ ID NO: 227166 - DNA, 429 bp, Glycine max
  unsure (1)..(429): unsure at all n locations
agctttgagccaatatcctgactcaccatatactcttgacccatggtgagaatgtcaatccttaccctcggaagcggaaagaatagaagggaaatttccaatcaaagaaaaggaaagaaggaagatttccaatctaagagaaagcaaaaaaagaaaagaaggaaaattccccaatcaaagagtgggagaaagcaaaaagaaaagaaagaaaattcccaatcaaagaatgggagaaagtaaaaaaggaagaagaagaaggaaagaaagctcctgatcagggatcgaaggataacagaagaaatgtgcagaaaggtctttggaccggacaatatctgaacaatacagaattgtcaccaaatgaacaaaaagaaggaaaggaaaccacgacctanaatggtcttctccctttgattaccaaccaaaatcccg

SEQ ID NO: 227167 - DNA, 446 bp, Glycine max
  unsure (1)..(446): unsure at all n locations
tactcaagccttctccctatnttgctataaatagggggagaagtgaataagataatggttcagccccttaggcacttctctctctctcgaaattgctgaggaaaattatttccgtgaagaaaatccaagccgaggcgctttcgtaacgtttccgtgagaaattgcacgaagattctcggccgttcttcaagattcatcgttcgttcttcgttttcttcagtcttcaacgggtaagtacctcaaaccaagcttttcaattcattctatgtacccgtggtggtccacattttggttcatgtatttgtattctcgttgtcatttactttctatacccccttttgacgtgcttaagccatttatttaagtcatttctcgcttaatctaaaaataagataaattactaccgatcgtttgaattgtatcatccgcgaatttcgggtaaaatg

SEQ ID NO: 227168 - DNA, 484 bp, Glycine max
  unsure (1)..(484): unsure at all n locations
agcttcatgatgatgaatcaagtatgattcaagttgttntgatgatgnaaaaaatcccaaaagaatgatgtcaagactgagtcaacaagttcaagatcaagattaaagaaaagacatcaagaagaatcaagattcaatagaagatgaattcaagattcaagagatgaaaccaaaaagcaacaagtcaagacttcacaagggaagtattgaaaaagaattttcanaaaccaaacatagcacagttttgttttacaagaaaaatttttccaaatttttctaagttaccagtgtatttactctctggtaatcgattaccaattacctgtaatcgattaccagtggtatagtttgatttcaaaagcttttaactaaatntgcaacgttccaaatggtttttaaatggtgtaattgattacaatatattggtaatcgattaccagtgtatctgaacgtngaaattcacattcaattgtgaagagtcaca

SEQ ID NO: 227169 - DNA, 479 bp, Glycine max
  unsure (1)..(479): unsure at all n locations
aatactcaagccttggatagaggtattaattaanattcttaaaaatctatccactttaaataaatagaagtgaagtaacatggatttgtggtggtgcggacaacgaattaaattgtaacccccaacattaaaatgtaatgtgtcaaaatgaaaatgtgtttctaattctattagtgtaatgtgtttcggtgtttgtaacccccaacatattaaattgttaatattntattaaaagcactaaaggaaataacgcagtaccacaccttccctgattgtcaaattatttttttagtttttaatatatatatatatatatatatatatatatatatatatatatgtgtgtgtgtgtgtgtgtgtgtgtgtgtgtgtgtgtgcccatcgatccctaacaaaatttataccttactcaccgcgtcccagctggacaatcggatcttaaacttaccttcgcactcacccattctctatatattcca

SEQ ID NO: 227170 - DNA, 294 bp, Glycine max
atcctctaagcacctgcggctgcaagctggaaaacctactgaagaattaaggagttataaatcaacatcaaagttataacgatgaagcccattgacgataaacaagagacagtgacgatcagagcggtgagccacgacgaggaacggagaaagagggtggaaaaaatagagctcaacactcacaacatccacactataaagtacgtcgagaagaagctcatcaacaagggtgtgcactgcaaggaccgccacccagccgacggcatcagaatcggccggtcaccgccaaagtcc

SEQ ID NO: 227171 - DNA, 456 bp, Glycine max
  unsure (1)..(456): unsure at all n locations
aaggaaatgatcaaaatgataacagtatatatgttctggcagcatacacaacgccacacagaaacatagaacactacctgctgaggatgcaatccactccctacttacagtagacactcagagagacattctttctgctgccagttctagtgctacaatccacatagaacaatatctgaaccatattcttatccatattcttatcacacagctccatcagtagtcataggggctaacatagaaaagtccacaacatggaagttcacttttaacaagagacaaataagagagcaaaaaaaatcacaaataacaaatggctcactactgtacctgcttaaacacatacaatcattccaaagttagatacataatacattatcttaaagcatcaagagaaacttacgatacacttgaanaagataaataagttcattcccagttgacaaaacaatgtct

SEQ ID NO: 227172 - DNA, 424 bp, Glycine max
  unsure (1)..(424): unsure at all n locations
agcttgtctgtgaagagagaagagaatatacttttgttgaagagacacagtgaanaagagagaatgcttccgaaagaggaaaaaaaatgctttttatttttttaaatgaagggcaaaattgacctttcattgaattactgggtgcaccaacaatattgctgggtgcacctagcatatcccaataaacacttacattattcgcactgttcgatgtgggactcggccatcctttctctaccaatgtgttctggttggtacttcttttattaacatttgttacttaccttttacttatttaattttattttaaaaataaaaaaatgtttcatgccaattatctcaagttcggngagaaattaagaatctattatgttctaaatatagagataccacatcacacaataataaagaataaaacaactac

SEQ ID NO: 227173 - DNA, 442 bp, Glycine max
  unsure (1)..(442): unsure at all n locations
atatattatttagacactnnanaacacaactaaatttttgatttctctncatctttctctttgtatatgttactaattttctatccaccacatatccatcatatttatattcctcccctactatttctttatcttactgggtgccaaaaatagcatataagatgtacacaaataatttttgtaagcttaaactacagatgaaaaatcctacctagtcacctacttgccatcaccatattttagtccctgcaccttgatagtttgattaaagataaaaaaatgcaacccatatatgatatttggaggccatgcatgttttgtcaaacatataaaccgtgaaatttgactcacatgttggctcgcctaaccttctaatttctaatccatgctcatgaatcatgatataatggattaagctagcctagttgtacatacaccgatg

SEQ ID NO: 227174 - DNA, 386 bp, Glycine max
  unsure (1)..(386): unsure at all n locations
agctntgggaataaggtatttgagccatattatatattgttgatctaaacgattcaagtccacagaanaggagactgatatgaatgcataatgcttctaagatatggttttgtattaagtgattccttgccagacttgatgtgaacattggttctgagtggaaagaaatgagaaaaacaaaagagaagaatagggtaatgtatgtagtatattgatattgaaaacactaacctttcaagacatatttttggcttcaatacatatctgttaggacaatttttaatacattagtaaacccgcaattacaaaacactagttagtctacccaaataagaaaagtactaaaagttntataaaacagaacagaagtgatgccatccaacccc

SEQ ID NO: 227175 - DNA, 453 bp, Glycine max
  unsure (1)..(453): unsure at all n locations
ttaggctgttcaattgcttcagattgctgcacaaaagggcaaatgtctgtgtggtggtcggtagaggagcataaaccacagaatttggtgacaggtgcaaatttttgattcatggccagttgggttaccgggttaactaaggcatctagtttaccttcaagcttcttagtctcagctgatgaagatgaattcatggctacttcatgcattcctctaatgacaatagcatcatttctagcactaaattgctaggagtttgaagccatcttctaaattaaatttcaggcttcagtanggttcatgtctccaaaggctccaccactggaaacatctatcatacttcgctccatgttactgagtccttcataanaatattggagaagaagctgctcagaaatctggtggtgagggcaactggcacatagtttcttacaatctctccagtattcatat

SEQ ID NO: 227176 - DNA, 375 bp, Glycine max
  unsure (1)..(375): unsure at all n locations
agcttctacattcaatttcgtgctnttcgatatattacgggactcaatcggacatccgagtaaaaagttattgtcgtttgaatttgctcacggcttcggtattccatttcgagcgtctcgatatattacgggactcaatcggacatcagagtaaacagttattgttgtttgaatctgctcagagcttcggtattccatttcgagcatctcgatatattacgggactcaatcagacatccgagtaaaaagttattgtagtttgaatttgctcagggcttcggtattccatttcgagcgtctcgatgtattacgggactcaatcagacatccgagtaaaaagctattgtcgtttgaatctgctcagagcttctacat

SEQ ID NO: 227177 - DNA, 203 bp, Glycine max
tatcgagacgctcgcaattgaataccgaagacgctaagcaaattccaacgacaagaacttcttactcggatgtctgattgagtcccctcatatatcgaaaagctccaatgtgaatgtcgaatctctgatcaaatttaaacaacaataactatttacttcgatgtctgattgaaggccctcatatattaaaatgctcgaaatgg

SEQ ID NO: 227178 - DNA, 463 bp, Glycine max
  unsure (1)..(463): unsure at all n locations
atccttgagtcacctgcggcatgcaagcttctctctcngaaaccctcgcccncaagttttcttccagccatatctcactcaattcttgtccaaatcactccccacaaagcccaaacttcatctttttttcaatctctttcatttgaaccgattgaaatcccaaaaaaactcctcaaatggcagaaccatcgaagaagcggaaaggcacttcgagtcagaatcaacgacatttcgggtcacaggaaaccccaattcctccctccattccctctggatcattgttctcatcagaggaacagcgtatatggtacacaaaactctnttcctctcgttccattatagacccaaaattcatagatatggatttcttctcaaatgagagtgttgaatgccttcaagcatttgaaaactccaatcttattccattcatgtctctgaaattacctgtttattctgaactagt

SEQ ID NO: 227179 - DNA, 471 bp, Glycine max
  unsure (1)..(471): unsure at all n locations
cttgtaaatatatgaattccatgaatntaaaatgacacanaaggatgccaaagtatgaacaatctataaaatatgaattccattaatttaaaatcacacaaaaatatgaattccatcaattccatgaatttaaaatccagaggtatagaagaaggaactgagtttcttcttgtcgactatgaatagaagaagccatccaaaccttgttttgtctaagctctagtctcagattttctatatcaattctacctttttccttgactcctaaatcttctattactaaatgaaaagcagtgatgagacaagattagcacagaggttgttttaatcatttatcagtactgagtgtggcaaaggtgttacctgtggcttgngttccaaaaagctttgcttgctagcagttgttttcatttctagcatcactttggttgtaggttntatgctangcacaagtgcttctggatagatatt

SEQ ID NO: 227180 - DNA, 414 bp, Glycine max
  unsure (1)..(414): unsure at all n locations
gtcattttctcacaggggaaggaaaaaggctctatgataccatattaatagaaacaaaccaaaagaaaatatctaaaagaagagagaaactcttaagataatcaactgtataaaactgagaaagataaaaactaaattacagagaaagatcttagtcctatttataacgtgcaacataacttagcaaaggctaagttagttacacagttctgacagaaaggagacctatgagctgtttaacaattgttacaaatcttaacagaacatatcaactaacaaagaataaaagagagtctnttattctcatactcctaatatattaatagaaagaaagtatctagaagaagagagaaactcttaggagaatcaattggataaaactgagaaagataaaactaattacagagagagatc

SEQ ID NO: 227181 - DNA, 456 bp, Glycine max
aagcttgagtcgaggaagtgtagaaaggtgaaacttcttgctgttattctttgtttccagagcggtacctggagatatgtcgcggcggtgaggagaccttgaggacgtcaggtggggtgctattgcccaaaaccaagcttgaccaatcccgacccaacccgggcatagtcggtcagtgagaacctgtgatgtacctaaacaggcgagctcctggcagtcaacagataaaaggaacaaagaccacaaagcaaggaggcttgtggtggctggccagctgtgaaacttgattgatatgtgagatatggtctctggtaatcgactaccaagggtgggtaatcgattacaaggcttaataatgaagacaggaggctaagatggtctctggtaatcgattaccaacgggtgtaatcgattaccaggcttgaaaacgaagtcaggaaactaagggagcctctg

SEQ ID NO: 227182 - DNA, 423 bp, Glycine max
  unsure (1)..(423): unsure at all n locations
gatccttaagcacctgcaggctgcagcttacctttgagttggtttttttgtgttatntgctctgtactggaaaaaaaattacttgagctttgtctcattttgattctcatttagtttggttgtatttggttgtatattgctttggactgaaaacaaatgttgtctcattttgattttcatttggttcggttgcatattgctttggactaaaaacaaatgtaacctttgtctgattgtcactctcattttctttactactgtttaacttcttctatatccagctctgaaactgtcatttggttcttctttttccaggtctgtctatggtttttgtgtttctgtctgctctcattgatgtgtaaaaatctnttatcacctctgtatntgatttttattatattccctctattnttgccatccttt

SEQ ID NO: 227183 - DNA, 432 bp, Glycine max
  unsure (1)..(432): unsure at all n locations
tcgtgaggaatgccttgtgcttagatagcatgaattatcccttcgatnatatgtatgcgtgtaaatatgtagcatgaaatgccttgcaaaatgttgaatgaaatgccttgcaaaatgttgaataaaatgccttgcaaaatatgaatatatatagcatgaagtgccttacaaagtgtctggataggtagcgtaaaagtatttttcaaaatatgtgtatttgtgagtaggtagcaaaagaagccttccaataaaaaaatgtgtgtatatatataggatgtagcatgaagaggtttgtcaaaaaaatatgtacatggatgtgtgtcataaaatgcctctcaccaaactattatgtgtgcaaatgcatgtgtcataaaagaacacggccccaatatgattattttataaagagcatgttgacactcgcgccatatg

SEQ ID NO: 227184 - DNA, 480 bp, Glycine max
  unsure (1)..(480): unsure at all n locations
agcttcttcttgtnntttcgccccattganaacaacatttttcttaattacctcattcaaaggtgctgccaaggtactaaaatccttcacaaatcgtctataaaaacttgctaggccatgaaaacttctcacctctgtcacacttttaggtgtaggccactcttgaatagccttgaccttttcttcatcaacttaaacccctttggaactcaatacaaaaccaagaaacacaacatggtctttgcaaaaaatacattnttcaaggttagcatacaattgttctttcctaagcacacacaacaccgattntaagtgtacaacatgcaaatcaagggttatgctataaacaaggatatcatcaaagtacaccaccacaaatntaccaatgaattctctcaaaacatggttcattaatctcatgaaagtgcttggtccattagtcaaaccgaaaggcataaccaaccattcatataatccata

SEQ ID NO: 227185 - DNA, 212 bp, Glycine max
  unsure (1)..(212): unsure at all n locations
atgagtcatgacaacagctttcagaattgccccatgtatggtgttgcttgtcaatgttaggattcaacaagcgattcttctcanatttcagccagcccatatcaattagacttcacactttatgcttcggggtcatacaatgctcaatggaatgccccngggctcctncatgataagcacacgttgcgtttgagtcgtatccttagaaaaat

SEQ ID NO: 227186 - DNA, 469 bp, Glycine max
  unsure (1)..(469): unsure at all n locations
agcttaacaggttcaggtgctggtgttgctactggtggaggcactttgaattggttgccagacctcanagtgatgacactcacattnttcagattctgcacagtttgtgaagacaatttgtcagaattntggggctgagcttggttcaactgagtagccatctaccctatctgatttgtcagactctgaatggaggctcttgtcttttgctgaaattgcatattctggatggtcatttgcctcactaactcttctatgaaaggttgaggaggagcctcagttgcttgttgtctttgttgtgactgctgctgctatatcggaggaggaacatatggcttgcttggaccagtagcattctggaaaggagggacagactgttgttgttgtggaggacttgtccatttcagatttggagattcctccaacctggattgtatctgttacttaaaagggcataattattctgatg

SEQ ID NO: 227187 - DNA, 420 bp, Glycine max
  unsure (1)..(420): unsure at all n locations
acattgatgtttgtatttatgggaggaggttgtacgccatttttgttttaagagtagtgtcccactggtaaaactaactttccaaatttttgccttcgcaggaaatggccccgaggaagcttgcctcaaagaggtccaggaaggacaaggcagccgaaggaactagttccgctccggagtatgacagtcaccgctttaggagcactgtacaccagcagcgcttcgaggccatcaagggatggtcgtttctccgggagcgacgcgtccagctcanggacgacgagtatactaatttccaggaggaaatagggcgccggcggtgggcatcactggttactcccatggccaagtttgatccagaaatagtccttgagttntatgccaatgcttggccaacagaggagggcgtgcgtgacatga

SEQ ID NO: 227188 - DNA, 391 bp, Glycine max
  unsure (1)..(391): unsure at all n locations
agctnttggaaggatcaaaaagtgccttatgaattctcccgtgcttatgccaccagtacctggaaggcctctcattntgtacatgaccatgttggacgagtcaatgcggtgtatgctggggcaacatgacgaatccgggaagaaagagcgcgttgtttactacctaagtaagaagttcacgacctgtgagatgaattactccttgctcgaaagaacatgttgtgctttagtatgggcatcccatcgcctaaggcagtacatgcagagccatactacctggttgatatccaaaatggacccggttaagtacatctttgaaaagccagctctcacgggacgaatcgcccggtggcaagtcctgctatccgagtttgatatagtctccgtcacc

SEQ ID NO: 227189 - DNA, 468 bp, Glycine max
tactcaagcttagcagtttattcactcttttagtattgttgaatcattttattcattcaaacttttgtttgtgaaagtcaagagtgaattagtgttatggaatacttgggtggtcttagattcaaaaggagtggcaggacaaaatacttgtttgtaattaaagttttgattagtagaattctttacagtcacataaaggagaattgaacattgctttgtttaagtgaactagtataaaccaagtgttaccacatctttcttaattggttttattgagtattcttttaagcttatcttgacaccgtttctcaccaagtgtttacctgaaaaacctttgtggaaatattactttattattactggacgaccaaacttggttttcatcaaacttgttttgcttattagtggatgactccattgcatctatctttttggacgtggaataaaagcctctatttgaaaaatgtt

SEQ ID NO: 227190 - DNA, 484 bp, Glycine max
  unsure (1)..(484): unsure at all n locations
agcttgctaacccatggaagctcctaatatctcttacactttntggggtgggccattcttggatggccttgattttctcaaggtccacttggaccccatttctaccaactacaaaccctaagaaaactatattatctacacaaaaggtacacttctctatatttgtagagagggtgtttttcctaaggactgaaagaacttgcctgagatgtccttagtgatcatctaggctcctactatacactaaaatatcatcaaaataaacaactacaaatctacctatgaaatcccttaagacatgatgcataagcctcataaaggtgtttggtgcattagtgagcccaaaaggcatcactagccattcatacaaaccaaacttggtcttgaaatcggntntccactcatcaccctttttcatcctgatntggtgataaccacttttaagatcaatctttgaaaagatattggcaccatgcaactcatc

SEQ ID NO: 227191 - DNA, 482 bp, Glycine max
  unsure (1)..(482): unsure at all n locations
tactcagcttctaaggaagctacctagtctataaatagaagcatttgtaacacttgttgtaactttgatgaatgaaagtcttatgagacacactccaaagttccacttctccccctcttttattccttcaatttcgtgctccccccttctctctttctttttctccattaaagcatcctcttcaagcttcttatccaaggcacattcttggtggtgaagctccttcttccatggcttattccctagtggatggtgcctcccctctcttcttctcctttgccttccgctgcctccatagaagctccacaagcaagcttccatcaagtggtatcaaagcacaagagcttctagtaggtgctccttanacctacattaatgctttgctttaccttctcacatgtcttgtgctaaatgttgttaacatgattctttagagtttccaccgattaaacttgctatagaagctagatttgattntctat

SEQ ID NO: 227192 - DNA, 432 bp, Glycine max
  unsure (1)..(432): unsure at all n locations
agcttgtagacagcactatggctacaacattctatgctgaccttttccaagccccgtcacccttgttgcccaaattcctttgatctctcagtccatcagccaataaatgttccatctccaaattccatgtaaaataacttcatttttcctcattatttttttcctaaaacttttcttttgcccatcattttttcattagatgactccattgaagttaatgtcacttatttaacctgcacataacaaatattagatacaacctactttattcatttgattagtccactgcacaatcatagaaaatgtttcaagcaaagtttttatgcaatagcaaagttgatgcaatcctaacccgcaagggcattggatagaagactccaagtagatcgggtcagagatgcaagagaaggccctanggttctcatgaccctt

SEQ ID NO: 227193 - DNA, 454 bp, Glycine max
  unsure (1)..(454): unsure at all n locations
ctacacaaatntaattcctaaatgactttatctctacagagctataaaggttcatatttattaatataattcaaacatttcatgcatgctttcagttgtgtgtttagatcaatgttctcatataatagtctttaaacctacaaattttgtatcttgtctgtaggggtttggatcccttagcccctctcttcttttcactgagtgatatgccttcaaatttatcagtgagatcctaaatcatattcaatctgtaatagtttaatgtgtgtatatatgtgtgcaactcttttattactacctctntgtttttgcctcttcacctttcaacccatccatttaatgttgcatgtactctgccttaaattggattatgcaatatgatatttatctatggtggatattgatatggagtctcttacctaccatatagaanacaaatgtctccataatttga

SEQ ID NO: 227194 - DNA, 212 bp, Glycine max
  unsure (1)..(212): unsure at all n locations
agctntngtatctcaatttgagcgtctcgaattattaaatgactcaatcggatatccgagtcagaagctattggcgtttgaatccgctcagagctattgtgtgaaattcgaatgtctcgatttattaccggactctatcgatcatccgagttaaaaggtaatggcttttgaatttgcttacagatactggtatcaatttcctgcatctccat

SEQ ID NO: 227195 - DNA, 455 bp, Glycine max
  unsure (1)..(455): unsure at all n locations
tactcaagcttgtccaanatgcaaacaataataattgtcaaacggatatcctattgagtattgtaatatatcgagacgcttgtaatggaaaacagaagctcgtagaaaatgcaaatcgcaataacttttaactcggatgatcgattgagtcccgtaatatatcgagacactcgaaattgaaagcagaagctctgagcaaattctaacgacaataacttttgactcggatatccgattgagtcatttaataattcgagacgctcaaaattgaatacagaagctctatgcaaattcaaatgacagtaactttcgactcggatgtccgattgagtcattttatgaattgagacgctcaaaattgaatgcacgagctcttaccagatccaaatgacaataactttntactcggatgtacgattgagtgccgtaatatatctagacgctcaatattgaaa

SEQ ID NO: 227196 - DNA, 416 bp, Glycine max
  unsure (1)..(416): unsure at all n locations
agcttgcaagcctcactctcctattctttttggttcgtgaagaggtataaaaggcgggaaggaatgggaaatggtttcattctttcttttctacatgctgatagtggtgacttcactaccaaagttcttgttttgatttctcttgatgtatttgagaagtggctacaattttctctttagaaaaataattatttttcagttgggaatgtctaaatattaagggtagactatgtccaagagaatacatactatacttgagtaatggtgtgtgatttaaaaatgaaaaaacaccttanttttccttacatggctctcaactagtccaagaaaaagggaaaataaatctggttttgtgtcactttggattgtattgattcctaagcccaacatntaacatataatgaagatgaagtgga

SEQ ID NO: 227197 - DNA, 479 bp, Glycine max
  unsure (1)..(479): unsure at all n locations
tactcaagctcttatccatggcttcctatggtggtgagcttcttctttactttcttctccttaaagtggcgtctccaatcatcattcttccatctccattccgctgtcattaatcttcaagaagcaaaggactccattgatgaagaagatccaaggcctacaagctccacaaggagctacatcattttgggtttgatatctagacttttagtccactattactattgtgtagggtacatttgtcctttgcaacaattaataagtataaattaacataaatatctcatcatcaatataatattctcaacaacaacatgataaattacaaacaaaaaattatagaccaacccacccatcataaatatgtatgactttaccattataacaattntatacttcatgtttaagggtatcaaaacccctcataagtctttgggtactatctccttcatcttttattatgtgcatatgaccttcat

SEQ ID NO: 227198 - DNA, 407 bp, Glycine max
  unsure (1)..(407): unsure at all n locations
agcttgagccaatatcctgactcactatataccttgacccagggtgagaatgtcaatccttaccctcggaagcggaaagaatagaagggaaatttccaatcaaagaaaaggaaagaaggaagatttccaatcaaagagaaagcaaaaaaagaaaagaaggaaaattccccaatcaaagagtgggagaaagcaaaaagaaaagaaagaaaattcccaatcaaagaatgggagaaagtaaaaaaggaagaagaagaaggaaagaaagctcctgatcagggatcgaaggaaaacagaagaaatgtgcagaaaggtctttggaccggacaatatctgaacaatacagaattgtcccaaatgncaaaaagaggaaaggaaaccacaccttaatggtcttctcctttattacc

SEQ ID NO: 227199 - DNA, 441 bp, Glycine max
  unsure (1)..(441): unsure at all n locations
tgatgctngagtgtccacatgggtgcatgcatgaccagttntgcataaaatttcctaatcatcattgttgcatgtgtttcatggaaataatgtaggacatcccctttatccccgaaccgctggccaaatcctgacatgtatcatgaccagccgttctacaagccttgagccaaaatcctaactcaccataatccttaccctcggaagaaaacacaaagagaaggaaaattcccaatccaagaaagggagaagacacaaaaaaaggaagagagaattcccaatccaagaaagggagaagacacaaaacagaaagaaaattcccgatgaaagagtgggagaaagcaaaataaaaaaagaaagaaaaattctcgatcaaggatcggaagaaaacagaagaaacatgcagaaaggtctttagaccagacaatatctgaacaatac

SEQ ID NO: 227200 - DNA, 396 bp, Glycine max
  unsure (1)..(396): unsure at all n locations
agcttagtcgtgannattggaaaatgctgacttcatatgaaacaatgcaatggaaagttgtacaatgacattctttccttattntgtgattntgattttgatttaaactttnttttttggaaaacactgattgactatccttttgaaagaggtgataattcatgcaaccttatcctatcttttgcaaatctctccgggaactccctcagagtgtatgttttgtttgatttagtcacttgaccattttggagtgatggcaatggagccgtttgacgtttaatcaatccatataaattccagggtttgtccctttcttttgtttaaaaacatcgacgggtgagaacttttgatctgccnctatgttcacttgaggctcatgcatgatgtgatgcaatc

SEQ ID NO: 227201 - DNA, 399 bp, Glycine max
  unsure (1)..(399): unsure at all n locations
cggattctttttactctggaaacctcttctttctatgtgaacctcaacccaatctctgggttggtaaacaacctttttgcgacccttgtttgcttatctagcatagctctcattcctcttttcaatttgggccttgactctttcatggagctttttctcacagtccgctttggcttgtacttcctcatgcttaaaaactgaaatattaggcattggcaacaaatcaagaggagttagtggattgaaaccataaataacctcaaaaggagaacaactagtggtgctatgtatagccctattataagaaaattcaatatgaggtaagcaaacttcctaattnttaagattctttttcaaaatggtccttagcaagatacccaaagtcctattcatgacctc

SEQ ID NO: 227202 - DNA, 481 bp, Glycine max
  unsure (1)..(481): unsure at all n locations
ttagctaagatgcctgagacatgtcgaatgatggatgatggtcatatgatgaatggacaacgttgatgattcgacaatggacttatgacttgtgactgcaaccatgtaaggcttttatgagtttcatatgaattattttggtggtgtgctgacatttgccaatggatctcaatcccttgaggatttaggatactttcatctaaataaagctaatacaggaccactcaaccaaacgggatactcaaggcagatactgttcaactttcatgtctttttagttttgccatctatatgtgcaaatttatcactgctacaaactcagaaagtcagcaggctgatgcatgaaggaaacatacattgtttattcacacaaccagaaaatcaaaatgatacaagagttttatgtgatgaagatagtatgcataattagaaatctgtctcctaaccccgctctntatnttattccatatagatattatta

SEQ ID NO: 227203 - DNA, 427 bp, Glycine max
  unsure (1)..(427): unsure at all n locations
agcttgagatgaggaagtgtagaagggtgaaacttcctgcttttattcgttgaccacagagtggtacctggagatatgtcgcggnggtcaggagaccttgngaacgtcaggtggggtgctattgcccaaatccaagcttgaccaatcccgacccaacccgggcatagtcgatcagtgagaacctgtgatgtacctaaacaggcgagctcctggcaatcaacagataaaaggaacaaagaccacaaagcaaggaggcttgtggtggctggccagctatgaacttgattcatatgtgagatatggcctctggtaatcgattaccaagggtgggtaatcgattacaaggcttaaaaatgaagataggaggctaagatggtctctggtaatcgattaccaaggggtgtaatcgattaccaggcttgaaaac

SEQ ID NO: 227204 - DNA, 397 bp, Glycine max
  unsure (1)..(397): unsure at all n locations
cttttttatacctaagatttttttgttatggttttcttcatctgtttatgtgtgtatatattatatagaaactttaagatgattcaaatttcttggtttagcatctactacggtgcccatagacatgatgtagaaaaatcatcattctacatcggttattagaacaaccgatgtagaatggtttatgatactattacaattttggcagcacgtgatgtagaaagtatgacattctgcatcggttataggcacaactgatgtagaatggtttagaaagattaacattctacaacggttcggcgttaataaccgatgtagaatgttcactattctacgacggctnttacaagacacccatcttcgaatgtgtggtattctacatcggtcagataatcat

SEQ ID NO: 227205 - DNA, 379 bp, Glycine max
  unsure (1)..(379): unsure at all n locations
agcttgtcggccgtgattgacgaagggcacagaatacgacttttgtctctgcgtgctatcaggctgtatgtcttacagacaacaaatactctatacggataaccactcgggtatttccgccagtcagcgtgactcacaagtgagtatgacagatcttgtgagcgcggaatataatgtaaatctccacgtgtcaacgggcttgtcggccgccattgacgaaaggcgcagaantcgacgttacgcactgcatgccatcaggcttttcgtcttatagacaccaccaagaatatacggataaccactcgggtatttgcggccgtcagcgtgactaaatagtcaatatgacagatcttgtgagcgcggaatatgacgtatatct

SEQ ID NO: 227206 - DNA, 575 bp, Glycine max
  unsure (1)..(575): unsure at all n locations
ccacaccgttctgcatgactgccgcgatatttcgtggcgaattaccggcgctctacgcctgcacaatatgcctgctaactatcgcttcgtcacntttccggccctgannnnnnaaccgacggctcactgtcacagattgcacccaacaataccgaactcttttcttctctaggctatcagaagccctccctggaatgttggcatatcaagagctatccgcgcatgtcttgttaggaagcactcccctcactctctactattgaattgactcgcaacctgacctttggcgggggtgtgacaaggcctatcgaatgggccaacggagcatctgccgatgaaggaaaatgtgcggagtcaccatcagcgtttatgtgacgataacgtcctaccaaccaagatggaacaggccgagggtttgcgtgtctcgaaaatcaagatactacagttgtcgtcgcccaggaggtattaacaccatacacacccgacacaagcaatgcagatacaccaaagtgtataatatgactgaacacatacgttcctggtggctgatttacatcctgattacacctacgccc

SEQ ID NO: 227207 - DNA, 460 bp, Glycine max
  unsure (1)..(460): unsure at all n locations
agcttatgtcatgggatgcaactgtgtttagggtgtacatatgataatgtccncttgtacataaagcatgaagatcttggggaaatagcacatgatggtcaacatctaaacatcgttgttatacaattgtggatcatttaagtaactttaaattacagtccattacctaattcattgttttgaattgatgcataatttactttattttttaacaacaatccattacctaggagcctacttgaatgggtaagtaaaactgaacaaatcaatttaaataatgtatgcattataataacttaatgtttttcaatgcaatggacattggcaattggtggttatatgtcctaaggacaatgttgtcacctggttntattccttgcaccataagtgatggaagcttacttgtggngctctcatggagggtggatctntgagcttccatgaggtcctttaatgttga

SEQ ID NO: 227208 - DNA, 590 bp, Glycine max
  unsure (1)..(590): unsure at all n locations
ccacagctcgccgcccgacacccgtaagtttgcggacggataactagttgtgacacacctccgcgcgctcgctnntcgcgccgactatgcgctcgtaccgctctcccngccngannnnnnagcactctacgcgcaggtgtgggagacgaacgccaagcaggcccaatatactatgatgatgtgacgcacacagaggaccagagtccacctagccctactgaccaccaatgagggacatcccaaagggatgaacccaccggcattgacaaccacagaacactgtatacctatacagctggaaaggcactataagtgcgcctacgacaaaaagtagcaattgcggcaggcgcctagccaggtctgatcgagatagctataatgcaacgatcttgcctcatcagccagtaccacgctgaacatgcaaatccatacgcacgagtacgccttgtactcgaccgctacaagaaggacgacggccctgccagtacaacccctgaggacacctactacgggtgcctgacgcaatcgatgcgcacagaaaggacaacgatctgtagctccaccaaactagagggatggcacccacgcca

SEQ ID NO: 227209 - DNA, 474 bp, Glycine max
  unsure (1)..(474): unsure at all n locations
atccttaagtcacctgcggcatgcaagctnntcccagtcctaaatgatatttcaaactaatattaactcactttaacctccaattaccactaaatccagatntagctnttcaaatccttaaagcatcacactnttccactcatatcactacattctcacttttaaccctaggttaactctacccttcatctctatcagttttccatcaaccatttcagcatacaagcatcacaagcatcatcataaaaaccctaaaacagaatgggtaagcttgacttataccaaacatgacaagtttaacatgttttcatcaaatttcttcacaaataactatcatgaggcataaacctagtaaaactacccttcataactcccaaaacccaatacccaggaaaattcatgtgataagaagtctacccaaacctgaaatgtgaagtcccacaatggagaggtgctcttcatgactccgaaaat

SEQ ID NO: 227210 - DNA, 480 bp, Glycine max
gcttccttgagaagctagagcttagctacacacccatataatagcttagctcacccccatgaaaaaaaaacatgaaaatacaaaaaaaaaatcgtactacaaagactactcaaaatgccctgaaatacaaggctaaaaccctatactactagaatggccaaaatacaaggcccaaaagaagaaaacaacctattctactatttacaaaaaagagtggacccaaccttggcccatgggctcaaaaatctaccctaaggttcatgagaaccctaaggccttctttatcaactctagcctaatcctcttggagcctcttgctcatggctctggtaactggtcctttcctagggaggattgcatcatcccctcccccttgaagaggatttgacctcaaatctgttggttcctcctcctctatatcagctccacctgcaaaaggaattagatcagaaatattaaaagtggtgctaacctcatact

SEQ ID NO: 227211 - DNA, 381 bp, Glycine max
  unsure (1)..(381): unsure at all n locations
agcttgtaactnttgttctctcaagatttttgttattagaagggaaacagcatgtgctctatctcttcanaacagaccctttatttggttcttcctcgtccatggccatctaaaagacaccaccacaaccacaggcaccttctgttgggcatgctcaacaggtactgttctatatagtcttgtagatctctagctaccatagtcttttgtgctatttctcacagcttgtgtggttgtgttctgtgtgtgttgtaaacattggcttgttgaatgatgatgatgcagaaggagggcacacttgaaagaagcaagacaaangacaaggattgttgtcgtgaaatcacaaattcacatgaagaacttgaaactgtacatggagaa

SEQ ID NO: 227212 - DNA, 408 bp, Glycine max
aacacgacatggagactatctagcatagctaatagggaagacaacaactaaacattcccagatggtaagcgtgcaattataaatcccaattccactgcagtacatgatcacaattcctattaactgctattggcagtaaccaagttcataaagaacagtccacaactcaatgcggccggatctgcccgcaatatccctaaatcgacagccatgcgaccacaatctaaaaccttggtagtaacataagcatggggccaaatacatgaataagagaggctagttttactttacccctgagcaaatatgcgaccagcctcaagagcattgtgaccaacttcactattacccatgtcatcttctgttggaaagtctacagcggtaccatgagccctaaccaatctccatcgt

SEQ ID NO: 227213 - DNA, 484 bp, Glycine max
  unsure (1)..(484): unsure at all n locations
agcttgtangattatggngtacccattatatgtgtgtctatgtggcggtcaggcgatggtgcaaaatgattctccacatccacaaatcacgtataacccatcatcccctgttgcccacctccaactgagctcacgtactcccacgtagcacttatcctcgttcctctcaacgccgggtccccatcaatcctcccaagcttccacaacatccaggtaattccacatccaaccatcatggactaacaaaaccaagcaaaacagggcaaaggcagaaaactctgcccaaaacacaactcagaatcacagctgttcacatacaaataccccagtaacatttcctttgatccaattcgttaaccggtggaccgactcgaannatttactggaagtctctagtacataagtctacattttgaccgttgggatctgctagaaaatgtncagaaccccatatgtactacctcttttacaaccagccatacac

SEQ ID NO: 227214 - DNA, 465 bp, Glycine max
  unsure (1)..(465): unsure at all n locations
tactcagcttgtctaccatcgaactcggttntagacgtgacgcattaaatgtaagtttcttcaggtggtctttggcatcacatttaaacttgaaccattgtcgatgagtaccttanggatgacatggtccatgcatctgacagacacatgtagagctttgttatgctctctcccctcaactggaatctcttcttccgcgaacgcgatatagttattggtagttatgtgattaacaatgccttcaaaaccctcgactaagatgtcgtgtgctacgtgggcttcgttgaggacctttaccaatagtgcacgatgaggctcggagtttatgagcaattcgagcaaagagatccttgttggggttttattcaattgctcaactactntaaagtcactctgttggatgagacgaacgaactcatgagcctcttccaaggtcaccacctttccttgaagaccttctttctt

SEQ ID NO: 227215 - DNA, 218 bp, Glycine max
  unsure (1)..(218): unsure at all n locations
aatggcagacacttactccacccccgaagagattcatgggcttctcggctattgtcagcatatgatagacttaatggcccacataattagaaatcggtaggaaacttgtatggtctctcagaccttgactagatacgacttcctttcttttganataaaatgagttggtcccatgtctctactccaaaaagcttgtgcanatcaaatcactcctacat

SEQ ID NO: 227216 - DNA, 470 bp, Glycine max
  unsure (1)..(470): unsure at all n locations
tactcaagcttctcatgctgagtaggaccccagtagtaccctntcaatcccactacattgggatgcctgatgtttgcaatttttttagcctctttggtaaattcttttctctttgttgccattccttctcttagccacttcactctcaataacaaaccatgctccagagttgccttgtaagatgtaccatgactgcttctccccaaaacttcagctggggctccagacagctcctcatgtgtcaatgttattgcatcatcaagaaaataaagttctccagtcaatttatctgctgatcttgcatatagtcttgcatgatttcctacagaaactgaatcactagatcctggtgatgaaaagtggctattttttgatggggagaaccttgttgcagctgccattttttcatcatggctgataatctcagatgacgaacctttctgtgaggtcacaaaatcctcggctgatac

SEQ ID NO: 227217 - DNA, 472 bp, Glycine max
  unsure (1)..(472): unsure at all n locations
cgagccataatatatgtctttgataggctatagaccaggctcaggcctcaaagattcatcgtaggctaggctctggcctttcaaagccatgcttgacctattcccacccctattgcttagtagaatccagctaagtatcatctcttctcctaaatatttgttagagtcttgttaataaaacaaatcttnttttaattttttaatcaatactcttaaaacaaagatcaaacacactttctaaaagtattccattttatttattttatgaataaggagtattaaagtgtatttcactaaaaaaaataaaaaaaaatgaaatacagtacattgtttaataagatgaagtaaaagaagtgaaatatatatatatatatatatatatatatatatatatatatatatatatatataactttcatacatggaataataaaataaatgaaaagacggcgatggtcattctcatccgtgn

SEQ ID NO: 227218 - DNA, 437 bp, Glycine max
  unsure (1)..(437): unsure at all n locations
tactcaagcttgtatctgtggattcactttcgatctcaactataccataaggtataacattattcaccacaaaaggaccaatccactttgacctcaacttaccactcatgagtccgagcctagagttatacaataaatttttttgtccaaccacaaagttcttcttagctatcaagctgtcatggaacttcttggtcttctcctagtagaatttggaattctcataggcttctaaacggatctcatctagctcacttagttgcaacttcctttcctctccagcctggtccataaagaagttgcaagtctttacagcccagtaggctttgtactctatctctacaggaagatggcatgtcttgccaaagacaacccgataaggagacgttcctatgggtgctntgtacgcagtcctatgcgcccaanaagcatcatct

SEQ ID NO: 227219 - DNA, 477 bp, Glycine max
  unsure (1)..(477): unsure at all n locations
agctagaaatccaatgcaatccaagttatgatctaatcatttatctattccatatccaattgactaaattaattaacataagtgcataacataaccaccacatatctaatcaactggatttaaagttgcaaccgtgccaattcgacgataatataaaacgaagtaaactcacgaacctatcatcatcattattggtgtattgaactaattaaatttttttctatcgtcaaacaaacatattattattatagtaacaggtaccagnggcaccacatatcatacatatatatataactaattaattagtgcaacatatacacaataaaacccaactgtctagccaaacgctctaataacaaaaataaataaactatatattcttataatgaagactatcaagaaaggaataagaaacaatggagattatattccacggcaccaccatgcactattagtatattactaatcatccatgga

SEQ ID NO: 227220 - DNA, 339 bp, Glycine max
tcaagctgtcgacatcgtccgcttatgaattactcttttggtttttttagaggaaaccttcaatcctagaacgcaatgtggcggacaaaagtggccaattaacttgaatgaccattattgtcaatgcacaaagtattctgcttttcactatccatgttcacacattattgctgttcatggttacgtgagcatgaattattatcaatatgtagacgttgcttacacatatgagcatatccttaaagcttattccgagcaatggcggcctcttgggaatgaagcggctattcctccttatcatgagccatggacacttataccatatccaagtacaattcg

SEQ ID NO: 227221 - DNA, 435 bp, Glycine max
  unsure (1)..(435): unsure at all n locations
agcttgtcgccttgtgtaataacaaatatacaatataaaanataaagagtgacacgtgcggnggaccgaatcaaccagctagtattaactatttaacaaaaatatccttgaactattattaatttataatacaaatttaaattttcccaaaatcactcatttaccaaaatcaatttaaagatactacaattaaagattccatgatacgcatggctgaccaactagctatgtattaaactgaagcagataggcgtcttccactgttagcattattattaggagattaattagtatacacggttagtgtaaacctactttacataaacacccaattatatntaggctattagccatgtgagtataacaattaanaatatatataaaattacaaaatcttanattacgagagtaactctgtcaccttgaacccattat

SEQ ID NO: 227222 - DNA, 459 bp, Glycine max
  unsure (1)..(459): unsure at all n locations
ngatatgtaattatgtcttttcaagaatgacctttatcagttttacaattggcggcaatttgaattctaaggttaaatttgttgtgatgaagggttcaacactaatgaaacctactgctagtctgttggctaagcaaaatcagccccatccaattgttagctcaaggtgattattggagaaacttgtcctttgtcatggttcaaggcatgaattattagtgaaaatcaaacagtcttgcaacgcttgattagttggcaaacattttttgaattgaatcatgtcactgcattctaccataagatatttgtttgctccgcatggtgcattgatataaatgctttctttcttggatggttactctgttctttatgaaatcgtgaattgtattaagtaggattgccagagtattactgcatttattccctacttttctctttgtgctatgatgtttatggttg

SEQ ID NO: 227223 - DNA, 464 bp, Glycine max
  unsure (1)..(464): unsure at all n locations
agcttgacattattaggatcatgttgcaagctgtcttcaagagagagagcgtgttattcggcaggggggccaagtacattggcaagttgatacttggagggttggtcttcctgcacttcaggtttgttcaaattgattgcaatggtgcatatcatatatttggaaatgattggttttatttgtttcttccatgtgcattttatgaaattggaatttgagctcattntttcttctaaatcatcatcatttttgttgttagttaattcaaatgacagttaatactgttattagtcagttagttaggtaaatcagttgctgtcattgtgtgtgcaatataaaaggacacatgtacaagtgtaaatcagagtgtgtgtgtctacctgagttntcaataacaaactacatttccttttctcatctatctttctttctctgagtgtgttagtggtttcttccctgtgtgc

SEQ ID NO: 227224 - DNA, 323 bp, Glycine max
  unsure (1)..(323): unsure at all n locations
cgngtgatgttgcgcgtactgatggataccatgatgtgtttgctgggctttgacccacgcgggtgttgaagagacagcatgggcatctcccttcttactttatgaccctgcagccccgattcttttggcattcgcgtttgtggaggaaacgttatccaactttgctactttcaaggctacctcgattctatactcggcaaacaccaaagccgctaagctggactgcatgtcacctactagcttctcatagcttaacactggcagcaggtcactcatatggtgatcatctctctctcaacatgggaggagctcttgtgcccccg

SEQ ID NO: 227225 - DNA, 496 bp, Glycine max
  unsure (1)..(496): unsure at all n locations
agctngtcaacaaatagtttccagtccactagctattcccatctattaacatgtgcaaattaagaatgcaccaagttattggagagtaaaataatgatgattttgagcaagctaacatgtgagaaataattgatgaaaaagacagacttaatcgtactgagctaaataaagaagataaattgggctgtttggcccatcagacataagtgtgaaatggctattaatcaaataaaaccctctgggctgcaaatttgttgacctggaccagccttgtgtaaggctagcgggccaacaagtcaaatcattcctaattaagaataaccataaaacataaaattaatcatacttaatatacaaaatgctaagaaatgtatataaattaacaaaaaacataaactaaaatggttaattgagttgggtcataaaagccaggtttgttcacggcttaaatttatgagtctagatcggcttgcccacaacttttttaactaaattt

SEQ ID NO: 227226 - DNA, 462 bp, Glycine max
  unsure (1)..(462): unsure at all n locations
aaaaatagacagcttcagttntgaaacatgcaaattattattctctttttctatcataattttacatatatatttctttgttgtttttctccctttatttttgtcttcttattagcattgtgttgcgagtatgtttaacttgagggtaaatctaaacacgctcatgttaaaactttgagaaaacaaataaatttagttaagtcaatttgagtatttgtttttttgttaaaattatttttaatgtgctaaaataatgtttgttataccaatttttgttttttaaaatttttattttgaacaaaataactaaaaggtttaatataaattcagttataaataatttttgtgtcatgcagaagagatgttttgataaattatttatatagtcaatattttggaatatataactattaatattttatatgaaaattaatatatatntattaaattattcatgttgac

SEQ ID NO: 227227 - DNA, 446 bp, Glycine max
  unsure (1)..(446): unsure at all n locations
gatccttaagtcacctgcggcatgcaagcttgctgcagtgcaggagatagtaattgaaattgtcttcataagacgagggtttaattacctcttgatatttataattgtaacgattcttttagatgtttaaactttaagacattccattttaatatctatagttacagtattttaactnttttgttctcaccgtctaaaattcctaacgctgtcacggattgttttaaattgttaaatataactaaacctgacaataaaaaacagcaaaaacaaattaaacagttcttattttacagcggatttaaaacatcatcacttatcatacttatactttctcttcaaagagtcaaatagccatgggatcactttacaataatgaaaggccaatctcctgtactcatttgttgtgcagggcagacaaatcttttaacaacttctaaacacat

SEQ ID NO: 227228 - DNA, 466 bp, Glycine max
aagctttagcagcaggtattaataatcccttggaattcggccaacttgtcttactaacgaacaaagcacagggaattcgtgaatagattatgaaaattgaaaaagtcgtaccaagaaaaaataataaaaataaatcgcgtgacatggcaaaaaaataatcctaaatcctgaaatgaattaacggaaacgatgagtttaattcccataaaagcaagttctcgtaagtaaaggacaagttaatttacatattacatgttaatgtaaaaaaaaaaaaaaagctggagggagaaaagcagaccaatgcggcagcgaattattattcattcatttataaatagctagagaaagagaaatactgaattactgatcatataagtatgattcttcatggttaaactgggaattgtaccaagtgagggttccaatgagaatatagcccattagcattactgatggaagcaaaatt

SEQ ID NO: 227229 - DNA, 412 bp, Glycine max
  unsure (1)..(412): unsure at all n locations
agcttcggaagaaagtgatgaggtacaagccctataggcttagcttgaaagagcccgggtagtcgaagagaagttcaagtccatagccatcaaagtctgaaaagagtatgatgaactaagggacgtcaatatggccacagctgaagctttggaacgagaaaccaagaatgcccgaaaggaagaacacgaccaaagcaaagttttgaggggctttatagggcagcaatagtgagctcaagctccgaagaggtgaaaggaatcatcacgggtcaaaggcatgatcttgaaggacgagctaaaggtttgccttangtcgaaaagaaanttgtcccaacagttaagcgagactgaagggaatatgtgggccatcatcgataagtgcagagagaagctaaatctatcggcgactcac

SEQ ID NO: 227230 - DNA, 414 bp, Glycine max
  unsure (1)..(414): unsure at all n locations
caagatcatttgaactgggtacagccgtgcctttctgagttcgaattaaggaactgtaaagttgtcgagtgacctgcagtttccatggcgaacataatgtgctttgttagtcttaaccgtatagttgggcctatgatttatggttttgttcttgttagggcgtttgtcttttgctatcagatatataaaatacgatatcttcttcatttgttcttgcaccttcatacattctcattcatctgtatgtttatttctgtgaaggtactaataccgaggaccttgacgtcgattatgagcgaatagcaaaccaagctgaggatgaagaagataaagatgcggggtttcccctatagctagaaaggatggtcacacagganaaccgataaatgaagccacacgaagaagagacggaaa

SEQ ID NO: 227231 - DNA, 288 bp, Glycine max
ggctgttatctctaactccagcgctaggtgtagttgcaatcttcattgcgtcgtgatgctgaatcaagatcgattcaaggtgttgtgatgataacaaagataatgccgaatagcccaagagaattacttcaagattgagtcgagaacaattcaggagtctggagaagagattcgagagatgatttcatcaggaagattccagagtgtggagtcgagactactcaagatcaagactcgcgtgatcatgattaagagtcacgactctaagattccggaatcatgagaaga

SEQ ID NO: 227232 - DNA, 421 bp, Glycine max
  unsure (1)..(421): unsure at all n locations
gaatcaagccaaggctattgtgcaagcaatcaatggggcaaaacacaccaaatgattataatgatggatggctcaaattctcacaaaggtaaaatcatcactttcaaattgagctttcaaaactatcatgacatgtagagaagaatcaaggatttcaagtcacaaaatgtcaagaacttttattttcaaaacaattacccatttcttgaacatatcctataattcaaagaanaacatgcaaagtcgtacgtgcacacaaaattgacccaaaatattaaactgaaaatccgacgaaactaacaacattaacaaattaacacaactaacaaattaacaaaaccaacaaaactagcaaaaccaaagaacactcccncccccccccatacttaaacaacacattgtcctcaatgtagcacaatta

SEQ ID NO: 227233 - DNA, 448 bp, Glycine max
  unsure (1)..(448): unsure at all n locations
agcttgaaattgaacaacggaagctctcgagattatcgagtggtcatataatttcacacagatgtccgattcggggaaataatatatcgagacgcacganattgaacaacggaagctctcgagaaatttgaatggtcataacatttcactcggatgttcgatccggggacataatttatcgagacgctcgaaattgaacaaccgaagctctcgacaaattagaatggtcgtaacttttcacgcgaatgttcgattcggggacataactcatctagacgctcgaaattgaacaacggaagctctcgagaaattcgaatggtcataagttttcacacggatgtccgattcggggacataatatatcaagacactcgaaattgaacaacggaagctctcgagaaaatcgaatggtcataacgtttcacacagatgtncgattcggggacat

SEQ ID NO: 227234 - DNA, 390 bp, Glycine max
gaaagaaggttgtcttcgaacccggagattgggtttgggtgcacatgagaaaagaaaggtttccggaacagaggaaatcaaagcttcaacaatggggagatggaccatttcaagtgcttgaaagaatcaatgacaatgcttacaaagttgagctgcccggtgagtataatgttagttccaccttcaatgtctttgatttacctctttttgatgcagatgtagaatccgatttgaggacaaatccttctcaagagggagagaatgatgaggacatgaccaagagcaagggcaaggatccacttgaaggacttggaggacctatgacaagggctagagcaaggaaagccaaggaagctcttcaacaagtgctgtccatactatttgaataca

SEQ ID NO: 227235 - DNA, 600 bp, Glycine max
  unsure (1)..(600): unsure at all n locations
cccgccacgcntacgctggcagtgtctcaaacgaggcggcangcgcccgcgacaatctgacacgagcggatnnntngtacgtgnagacccgcgactgactcgtcccctgcaaagccgnnnnaaggcgggcgcgagggcaacaccccaaggagttcggncaacatctttcattatctacatcgcctcagggaacccagaaatacaatatgagaactgaggaggccaaaccactataaaagcgtcataataactcgagtgagatggcgaaaaagtaatactggaaggtgcaacgaaataacggcaacgacgagcggaagagaaaacaaagcacaatcttaaatgaaaggacatagcaacacacacacgacacgtaaacgtaaagaccccaaaacagcgcgagggagacaaccagaggcatgcggcagcgagtnattagtcaggcatggcgcactagctgcagaaagagaaatactgaagcactgctcctgtaaggcagcacctacatggccaaacagggaacagaccgacagacggctccaatgagaatccagcccatagcattaccgatggaagccgcaccgaaactaactcggagcccca

SEQ ID NO: 227236 - DNA, 489 bp, Glycine max
  unsure (1)..(489): unsure at all n locations
agcttccatcaactagtacccaaggtgctacccttatgagatagcaagagatcgactcatcgagagggctggtcatcccaaatccacaagatttggacattagatgtaggaaatctatgcagttaacatgatccttagggatgcagatgcatgcaacctttgtcgtgaaacttggtaaatgcggacttcatatgaaacaatgcaatgtaatggaaagttgtacaatgttcatgacattctttccctattntgtgattntgattttgatttaattntttttttggaaaacacagattgactgtccttttgaaagaggtgataattcatgcaacctcatcctatccttttttgcaaatctctccgggaacttcctcagagtgtgtgttctgtttgatttagtcacttgaccgctttggagtgacgggaatggagccgtttgatgcttaatcaatctattgaaattncagggcttgtctcccttttttcttg

SEQ ID NO: 227237 - DNA, 463 bp, Glycine max
  unsure (1)..(463): unsure at all n locations
cagctcgcccaggcgagcaaggttgcttcctccagaataaacaaccttctggaggaatcttttggagggcccaagtggacctggttgctatttacacccccctttttactaaatgcacccccttatatatttttctgtaattctttttccgtaacgttacgaaactttacgaatttcgtaacgatacttattttcctttccgcaaggttacgaatccttacggatttatgtatttactctttttggctttcaaagaagttacggaaactcacggattgcgcaaaaacacctcttttcgatttccgccacattacggaatttcacggattacgcaagcctgcttccttttggatttctgagacgtctcgggacttcatttattgcatgtcatcaatttataatcctcggacgaaattaaggtatgacagttgcccctctntacttacctctcatcggagataag

SEQ ID NO: 227238 - DNA, 300 bp, Glycine max
  unsure (1)..(300): unsure at all n locations
agcttataacactgctagtgctatntattgaactaacattaagcatctaaagaagttccaacataacaacaatagtccaaacccaaacacagaacaccaaatttctcgaaaccaaaccaaatgaaatttcgaaaaccatacacacataaaaggattaattggaatttgtgtggtttagtaatggaatttgtgataaacatttgtagatcatggttaagactagaggattacgccatgcattatgtagggttgttgccagaggtctggggagaggggagggtgatgattctaatggtgctc

SEQ ID NO: 227239 - DNA, 370 bp, Glycine max
tatttttttttaatccatgcttgagctttaagtgctcgaatcaactcaaatcgtttacacaaggtttctctaatacacacacaaatgcatataacttctaattataagaaaatttcaagtacagtataaaatatttatgaattagtatattaattacttaataattcaaagattggattgctaaatatcatgttctgttaaaagtttcctgattttcagtgtgtgaagttgattgagctgttcccatactccttacaaataataataagaaaatgaagtaaaaataaaaaaagacaactaaaggagttcccggaaacagacaataatagaaataactgacccaccaagaaggcatagtctaagaaccttc

SEQ ID NO: 227240 - DNA, 195 bp, Glycine max
gccctatagtgagtcgtattacaattcactggccgtcgttttacaacgtcgtgactgggaaaaccctggcgttacccaacttaatcgccttgcagcacatccccctttcgccagctggcgtaatagcgaagaggcccgcaccgatcgcccttcccaacagttgcgcaacctgaatggcgaatggcgcctgatgcg

SEQ ID NO: 227241 - DNA, 408 bp, Glycine max
  unsure (1)..(408): unsure at all n locations
agctntaacctcatcgtctctcacagtctntatatttgggagccaatccagtccttgtgttcgaactctcagccacttatgatagccgccgatgatcccattactgcttcccctaagctctctgtcctttcttcatgccgcatcccatgccttgcgaactccttggagtaccctcgcgttgtggtcactgaaacctcgtgcgatgaaaggcgtgatgctttcgtctgatggcactcctctcatgggacatccttcgcatgaagatagaatcctgattcttccttccttctagcgagggaaccatttaacagacgcccctccatgctagccaagagttggtgcacaacaaacaattcttgcgccgctcttttacatccccggtcgaacgtgtcatacatggccaaaatg

SEQ ID NO: 227242 - DNA, 372 bp, Glycine max
tgaggaagtgttgaaaggtgaaacttcctgcttttattgttgaccacagagtggtacctggagatatgtcgcgggggtcaagagaccttggggacgtcaagtggggtgctattgcccaaaaccaagcttgactaatcccgacccaacccgggcatagtcggtcagtgagaacctgtgatgtacctaaataggcgagctcctggcagtcaacagatgaaaggaacaaagaccacatagcaaggaggcttgtggtggctggccagctgtgaactttgattgatatgtgggttatggcctctggtaatcgattaccaacggtgggtaatcgattacaaagcttaaaaatgaagacaggaggctaagatggtctct

SEQ ID NO: 227243 - DNA, 419 bp, Glycine max
  unsure (1)..(419): unsure at all n locations
agctctgtcaatgagtgtgcatatatatgtggattntaatttaattcaactcataaatatcagtgtctatttgaagcattacaatgttcacattcttaatgtaactaatttgcagtatgttagggaagtgtctgcactatgcagtgagataggatgtttcgtattaaataggttttttcttgaactaagttttatgattaagctagttctgtttcatctttaattaatacgatattacaacttattcaattgtgatgttagatcagtgatatatatgctagctgcattttcattcttagatttaaaactttcaaaataaaaggatagagtgttggcaattacttacagaaatctatacatacaaattatcaagcatctttccgttgacaacaccacccgcacgagattcttaatattgt

SEQ ID NO: 227244 - DNA, 315 bp, Glycine max
  unsure (1)..(315): unsure at all n locations
ctaagcttggcaggccgattatgtcnttttgatcaacatgaagatgctattgngggatctctcaagcaaagcttggtatgctggttttggtcttgttattgccatattatgatttttgacttctgagaaataaaatctataaccatttcttgggtctaaatttatgcagctgttgtttaatgttgtaaccatagtttaatgtgcattctaatgtacattcacaatattgttgtaaatattttaattgtttgacaggatgtaatgttaaatgccgctacaatatttcattttctgcgtttatgatgcatgttgaaa

SEQ ID NO: 227245 - DNA, 478 bp, Glycine max
  unsure (1)..(478): unsure at all n locations
agctngcattacaatagatgtttttaaagataaattaaataaattattattattatataatagcatacccaaagcgaatcatttcttgattaggtaaaatgttcactaacttttgcttagattcctaagtagaagcatcctttctaattcattttttttctctcttcttttttataattatttaggtggtaagtcctactctactaggtgactatgattattaaagaatttggccatcaacattagtattatttttttaataaacgtgttcatattttaaaggatataaaatgctcagattcaagtgcaagaacagaatgtattacaatgataaaaattaataaaaacaaattatttataaaatttaagactggataagttctcattaataattatgtatactctattcctataaaatataagaatggtggcttaattatgtattctctacttgccatgcaacatntttatgggtcat

SEQ ID NO: 227246 - DNA, 409 bp, Glycine max
tgagcgcttgccatagcttctaactcaagccttctggcctcatatacttgggaagcctcttctgcagtgttgaaagtgcctaaccatatacgattgttctgaaatgggttatagatctcagaagcccatttaccccattttctctgcctgacacctctatatttaccaggagtcttcctcctcgctgatggggtatgagtcaaaaccctcttcttactttggggttgacctttagtgctaaccctcattgtatttattttgttattcaactcacaagaactagtttcaagagtggtgaatgtgtgaagaagacggagaagagagatctcacacatacttcttttaactattctcgggttctgaatcctcttggagtcatcatcggatgaatcagtagcatcaggatcgt

SEQ ID NO: 227247 - DNA, 229 bp, Glycine max
atgtcgtttttagccctttaatatatcgagacgctagagattgataacgggagctctaagaaaagtctaacgagaataacttttgactcggatgtgggattgagcgctctaatatatcaagacgctcgaaattgaatacagaagctctttcatgaactaaactacaataactattaactcggatgcactattgagtcccacaagatatccacacccttcaatattgaaa

SEQ ID NO: 227248 - DNA, 321 bp, Glycine max
  unsure (1)..(321): unsure at all n locations
gcttcgccatatattacgggactcaatcggacatccaagttaaaagttattgtcgctngactcttctgagagcttccgctagcaattttgagcggctctagatcctatcttacacaataggacatccgactgaaatgatattgtcacttgaatatgcttatagcttcaattttcaacatacgagcgtctacagatgttacaggactcaatcggacatcccatttacatgtcatagatctgtgacaatatttaaatctttcgacctcaatttccagcgtatggtcttccacacggctcaatctgacatcctaattcaaagtt

SEQ ID NO: 227249 - DNA, 489 bp, Glycine max
  unsure (1)..(489): unsure at all n locations
ctcacttgatgcatagagaagagtaacaccaccacctgcacaaagcacaacacantcaaattgattgaacaacatagaattagaactaagcatacaactgccagtgctaataatctacctggtactatgccctcctctacagctgccttggttgcatttaaggcatctgtcactctatccttcttctcaccaacttcagcctcactggctcctccaatctgcanaagtaaggtttcagatgttaattttatcatgacaaaaccatatgatgaagcaccagataagacttaacagcaagcaaggtaaactcaaataaacaaaccttcagtactgcaacacccncagaaagcttggctaatctttcctgtaacttttccttgtcataatctgaagtgctattntcaattgctgatctaatctgcttgttaaaattcatcacaagacacaagtaaaacacatcaataagtatcagtacatgaaacagaatac

SEQ ID NO: 227250 - DNA, 378 bp, Glycine max
attaaggcgaagaagtgggaacctgaagaaggtggtggaggaaggcgcttgcggaaaagcgaggagaagagagagtgagcgctgtaagtgatgagcctctgagcgggatccaccagcttcgacaaccaaccattgttgttcttcctgctagggtttctgagggacgttgggggccgatcgtacggcgtcgtttggatcctgctgcggaaggggcgtttccgaaacttccctcctgctcccccttcgtatcccttctctttctcttccgtcgccatcacactaacactgagggagagtgtatgtgtgtgcgtgtgtgcgtacgttctgtgaatcggtgcttccaagacggaaagagaacatccatagcactgcgatgta

SEQ ID NO: 227251 - DNA, 491 bp, Glycine max
  unsure (1)..(491): unsure at all n locations
gcttacanagagaatcatctagatataacaactgtggaagttctcttacgaggctatgcttttcaagctttaagattaacctcaagctagcatgaccaagcttctcatgccatgcccaatgatgctctttgactgagagtaagcatgacacttttttactggatagatcaccaagtctaatcttatagagatttccttgtctcttagcagagaagagtgaagacctatccttgttttggactatacacatatccttaataaaggtgacattatatccactatcacataattaacttatgcttagtagattatgcttcaatcctttaacaagcaacacattntcaataggaggatagagagggatacaaatcttactgacactagttatcaaatctttttgattccctccaaaagtgatcgccccatcagacatagggcttaggaattagaacatagactntnttcctgtcatgtgtcgtgagcagccactg

SEQ ID NO: 227252 - DNA, 377 bp, Glycine max
  unsure (1)..(377): unsure at all n locations
tcagtgtcatactatngatcaaaacaaagcaggtataaatatgcaatactagactcaaaatatgcaacaaacactagacctaaatcagtgtcacagaaattggaagaaaatattttatccaagcacaaacttcaagccttattccatgtattggggggaagttatggctggccatatgggtagaggtgtcatagaggagcaggtatggaggaagggaccttggactgctgaagaggacangttgcttgttgagtatgtcaggttgcatggtgaacgtagatggaactctgttgctaggcttgcaagtaagaaacaccaaactgttatcactgtttcgctactaaaatatatgatcggattttcacatttacaaccga

SEQ ID NO: 227253 - DNA, 434 bp, Glycine max
  unsure (1)..(434): unsure at all n locations
agcttgtcacccgattaaataaatagattgtatgtagagtctattattatcactatgcactaatcaacatttgaaaatcgctgcagttatcagacggtccatattgaatcccacaacacactaatagtgactggttatcaattgaaatgagtcttttgctataaatacaacatatatcttttccagcgagctgatgtctttgtttacacgtgacaaagttggtgttagagtactaatgacaagtacttttataggagactntacagntgtcttcataattataagcacccatagcctagcgtacgagcatagtgtaggttgcatgcatacacgaaattgaggcgcttgaaatggtaaatttattgcgtactcaaattaaaatacgcatgccgttgaaatggctatctgttgnggatattttttttttgcaattg

SEQ ID NO: 227254 - DNA, 137 bp, Glycine max
  unsure (1)..(137): unsure at all n locations
gtctcacattatctgcctcaattcttggagtgcagcttatgtatctattgngtaacttcactcagtgtcaattgattttaagatgaaatctaacatggtatcagaacccataatctatcttggttctcgcctattct

SEQ ID NO: 227255 - DNA, 268 bp, Glycine max
  unsure (1)..(268): unsure at all n locations
cttgcaacanatgagttgagcaggttaaattattcgtcttcaaactcttagaggtgactgtgagcgttcgtctatggaggagtccgcagtcattcctgattatntttctcgagtattggccgcattctatcaactgaaaacaaatggtgacgatgttgatgaagtgccctgtctctatagacacctacacccnctgcgatcaanggcgtgatgctttggtctgatggcactccattcatgggacatccttcccatgattattgaaccc

SEQ ID NO: 227256 - DNA, 412 bp, Glycine max
  unsure (1)..(412): unsure at all n locations
tctaagttctttaacaagctatgaacaatatacnatcctcttcattaactgtctctgcgcttggcggccacgctcaacaaagtactttcgacacctactgtacgttgatttgaccaatgctgttatgggaatattgcgacaatctttcaaaaccttgttgatacattctgagaggttggttgtcatgtggccatatcaacgtgcttctctatcataagccatcgaccatttttcctttgaaatgcgatcaattcatgttgctatggctggactcaattcacgaaatatttctaaatgttgataaaaaatgtgcttggaagagtgtacgctgcctaaaattagatatcaataacgtggatgagtctctatgaaacgtaaataaaccggaccatcaaatatcaaatcttaccca

SEQ ID NO: 227257 - DNA, 132 bp, Glycine max
aagagacattgttatgatatcaatctaagtagtgtgctctatattgaaggcattagacgtctgttggatcatgatctatgcaggtgtacataatctagtattaaagaaatgataagtattgtgtatcctatc

SEQ ID NO: 227258 - DNA, 152 bp, Glycine max
agaagtgaatatgattttcgttcatccctcctggtaattcaagaatcacttgaaattagtgaaaaaaattggtttcgtgaagaaaatccgagccgaggcgcttccgttacgttttcgtggggattatcgcgaagattctcaaccgttcttcc

SEQ ID NO: 227259 - DNA, 313 bp, Glycine max
  unsure (1)..(313): unsure at all n locations
agctntactgtaacaatgaagaatgcttctatgaattacttcatccccctgaagattgcaatgtgaactcatccttgtcattcacacttcaggtactttgtaaagtattggcggtgtggtacctttagttctactaatatccgcccttctaatagttgaaacttgaatttctgtatgttgcctttctagatctgcagagtcgatgacatcctttgtgaaagccttataaaaggttctgtcgatcatttccacagggcgaggaccataagtgttgaatcttctggaacaatatctgcctctggaatgggtatgc

SEQ ID NO: 227260 - DNA, 468 bp, Glycine max
tactcaagcttgtagattattgatttaaacattatttagtttattctttcttttatacataatatacatttatgtaaagtttactttcaccatttagtttgtcaaattatatcaaattcaagttagacaacattattttcaatatttgactcattgtattaagttgaatatgacaattctattattatttgtatctaaagataattattataaaattcaataaatttacattacattccctaaaaaaattataatacataatattttataatattttataatttgatgacaataataatgataaaatgcattaggctagttaactcaactgaaaccttttcaatgaaatttatgtctttaaaatataatatcatattaaatatgaataactttagtctcatgtaagtatgatataatatggacttaactcataaaattctgacttttacattactcaagctttattaa

SEQ ID NO: 227261 - DNA, 390 bp, Glycine max
ttaacacctgagctgcagcttgatgcaacatttgggaggtattgattcttcgagatgatgcgctccatgagaggttggatcaaatggagaatagagatcataatgaagaagataggaggagacaacggaatgatggtgtttctagacaaaaccgaattgatggtattaaactcaacattcctccatttaaaggaaagaatgatccggacgcctacgtcgagtgggagatgaagatagagcatgtcttctcatgcaccatctatgaggaggaccagaatgtgaagcttgccgtcacggagcattccgactatgctcttgagtggtggaacaacctgcataacgagagagcaagagatgaagagccaatggttgatgcatggacggagatga

SEQ ID NO: 227262 - DNA, 454 bp, Glycine max
tactcaagctctgatggtgttgagaagacatcacatgtttgtcatcatcaattatggggagaatgtgaatgtatgtatacatgattttgatgatgtcaaaagaagaatcaaacaagactcattttgcttcaagattaatacaagattgtttcaacaaacaaagccttgattcaagatttcttcaagatcaagccttgtctcacaatgaaaggtttcaagtcattcaaggcacatgtaatcgattaccaatacatgtaatcgattaccaatggtttgaaattgtgtaatcgattacacatcatatgtaatcgattaccagagactctgaatgttgggaattcaaattttaaatgaagggtcacaactgttcaagaaaaacaactatgtaatcgattacactaattctgtaatcaattaccagagaggattttaaggaatatcgccacagtcacat

SEQ ID NO: 227263 - DNA, 416 bp, Glycine max
  unsure (1)..(416): unsure at all n locations
ctgcaagcttttccagtntggtggtctctatatttgtacccattctttgtgccataagatggtttccatcattcattcttgcatggtgttctatatcagttatgagaatgcacagtcaattgtgattggaaagggaactttctctagaatgtgtatattatgagtgttaatagtgcgattgagtccaaaagaggaggttagggaattgtggcgtgggagcttctcgttctattcctcaattgatgtttcttaccatattgcgtgagaatatagggttgtctgtggggcaattcttgcagatttggcctattgtataggttttatttccttatcagacagcatgaagttgtaccatatgacattntaatgctatttatctattaagtttgcagacaattggttcttcacacaataat

SEQ ID NO: 227264 - DNA, 404 bp, Glycine max
ctcaagcttctcttcctctggatggttcagtttctcactctgatgatgatgacactttctgtagatcatctccatacatatcagatgatggtcaaagccctcgctctgactataattctgatcagtgggaatctgatgagactccggaaagcagtgaccaaggggtgcatgattctccttgcagaaggtcatcaactgaatctgtgtccaatgatgataccaatgcaaaaagtggacatggtacatgtactatgaatggtgtggaacattctctgtccaggcctttacttgattttccaagttacgataatgttaatcctgcacttgagaaagaaagtaaaaaacattccaaatgcaataatgctgttatgtcacatagtcatgcagagcctgcacaaccacca

SEQ ID NO: 227265 - DNA, 462 bp, Glycine max
  unsure (1)..(462): unsure at all n locations
agcttctttgagnaaacttccttgagaagctactgcttagctacacacacccctctcataactaagctcacctccttgagaagcttccttaagaagattcctaaagaagctagagattagctacacatacctctctaatagctaagctcacctccttgagatgaaaagctagagcttagctacacaccccctataatagctaagctcacccccatgacaaaaaaaaaaaaaacatgaaaatacaaaaaaagtccttactacaaaaactactcaaaatgccccgaaatacaaggctaaaaccctatactactagaatggccaaaatacaaggcccaaacgaaggaaaaacctattctaatatttacaaatataagcgggctcatacttagcccatgggctcaaaatataccctaaggctcatgagaaccctatggccgttccttggatctctagcccaatcta

SEQ ID NO: 227266 - DNA, 414 bp, Glycine max
  unsure (1)..(414): unsure at all n locations
tactcaagctccatgattgaatcaagagtgagtcatgaatctagattgattcatgatgatgaatcaagattgattcaagatgttttgatgataacaaagatgataacaaaaagtccaagagaatgacttcaagattgagtcaagaacaattcaagaatcaagaatcaagtttcaagtttcaagtttcaagtttcaagaatcaagaatcaagaatcaagaatcaagaatcaagaatcaagaatcaagagtaatcaagatcaagattcaagaatcaagacaagactcaatcaagataagtactaaaatgtttttcaaaacattgagtagcacatgaagttttcacaaaagctgttaccaaagagtgtttactctctggtaatcgattaccagtttactgtnatcgattaccagtag

SEQ ID NO: 227267 - DNA, 418 bp, Glycine max
agcttcccgtatccgtacttgtaatgatctgattaccgccttcctaaggcagtatcagtacaattctgatatggctccggaccgtactcaactgcagaatatgttcaagaaagagggtgaaacctttaaagaatatgcgcagcgatggagggatttggcggcacaagtagctcctcccatggttgagagagagatgatcaccatgatggtagacactctgccagtgttctactatgagaagctagtgggttacatgccgtccagctttgcggatctggtgtttgccggggaaagaatcgaggtgggattgaagagaggaaattttgattacgtctcctccacaaacgtgaatgccaaaagaatcggggcaacatgggcaaaaaggaaggaaggagatgcccatgccgtctctcaacac

SEQ ID NO: 227268 - DNA, 438 bp, Glycine max
  unsure (1)..(438): unsure at all n locations
ctttcttcacccttattgcagttctacatcatccgcaccaccttaaccctaaaaaccaacataaaacacatcaaaaccttgaaatagtacacctttatgaaacttctaaaagtgcctatggaagaaaacaaaaatggaggatgagaggggaaaaaaaagggtttcttacctctaaaatcaatccaaattcgaaaaatcctttgtgctaaggtttcaagtcactaaaaactaagtgtatgactcttcctctattttctatgcgcaccgcatagcttcctaagctcacttactccattctatatcactcaaggcccattcatcttagcccagacatcctanaacagactattcacacccaaacaaagttnttcgcatttgtaaacataacatacatacaagtaccacacattgtcatctcataataattaattaattaat

SEQ ID NO: 227269 - DNA, 458 bp, Glycine max
  unsure (1)..(458): unsure at all n locations
agcttagctngaaagcttaacttacagaatgaatctggggcttagcgtaggatggcgcacttagtgcagctataataaattntcacaaagaggaagtggcacttagcacatcatccacgttaagcccactgcttaaggtgcaacttacagtgaagatgttcggcttagcgtagcaatgtgcgcttagctgaaccattcagccaatcaatcaggggtcattgcgcttagtgcgagtgatccctccccactgcaattactttttgtgttcttgtgttctatgttgtagcctaaaaaactaaaccctcgatccctcgtcaggctgaatatccaagcttcgtctgcagatccttcatttaagactacacccgatttaggtagccctcttaggtttaaactaacttanactgagtttcgtctgcagatccctcatgtatgactagactgatgcaatcctccct

SEQ ID NO: 227270 - DNA, 422 bp, Glycine max
tgtaaggattgattgaataagtgtattatgtgtattgaaaagttaatcaaagccttgcttttatagactcttcatgtttggccaagaggaccatttagaagagttataacttttagaaaaacttaaaaccaatttgaaaaagtcaaaataccttttgatgagttacatcttttgatttattcagaaacaaacactggtaatcgattaccaaattagtgtaatcgattacacaaagcttttgtgtgaaaggatgtgactcttcacatttgaatttgaatttcaacgttcaaaggcactggtaatcgattaccaaaacattgtaatcgattacagctttttgaaattaattggaacgttgtaaattcaatttaaaaaccttttcaaatccattttgctactggtaatcgattacaacaatatgg

SEQ ID NO: 227271 - DNA, 490 bp, Glycine max
  unsure (1)..(490): unsure at all n locations
agcttcttagtctcggctaatgaagatgaattctttgctacttcatgcactcctctaatgacaatagcatcatttctggcactaatttgctgggagttggaagccatcttctcaattaaatttctggcttcagcaggggtcatgtctccaagggctccaccactggtagcatctatcatacttctctccatgttactgagtctttcataaaaatattggagaagaagctactcaaaaatctggtggtgagggcaactggcacatagttttttaaatctctcccagtattcatataggctctctccactgagttgcctaatgcctaaaatatcctttttgatggccatggtcctgcgaagcagggaaattttttctaagaatactctcttgaggtcatcccagctcgtgatggaccttgnggcaaggtaatatagccagtccttctccactccctctaaagaatgaagaaaagccttcagaaatatgtgat

SEQ ID NO: 227272 - DNA, 448 bp, Glycine max
  unsure (1)..(448): unsure at all n locations
agcttctatcaccctggctgtgctagactcatgaatgggtgcgaaatcttgttgaatcaatccatgtnatctcgcacacagtggcaggcactgcacagagttgtcccacaggtgcaatgtgttcactaaattgcatccatgtatcatccctttcttcaatagagacagaagacacaacaggatgtgccataatagtttagatgtatccaaactgtcgtactaccctgttcggtcggcgaatgaccatcaaggggccccatgtgagatagtcccacaataatgagatgacctcaaattctctaaatgaacggtggtctctatactgaacctagtacaccacgtcaggggtcagtctgtccagacgcctgtgatacatggaaactggcagcgccttgccagaggtccatcagcatgtacgcaatctcctgtcatcataatactcaatatg

SEQ ID NO: 227273 - DNA, 350 bp, Glycine max
  unsure (1)..(350): unsure at all n locations
agctntgagcaaattcaaacgacaataaagtttgatctggatgtccgattgagtcgtgtaatatatcgagacgctcgtaatggaaaacagaagctatgagcaaattcaaacgacaataacttttgactcgggtgtccgattgtgtgtcgtagtatatcgagacgctcgtaattgaaaagggaagctctaagaaaaatcaaacaacaataactcttaactctggtgtccgattgtgtcccgtantatatccagacgctcgaaattgaaaatcgaagctctgagaaaaatcaaacgacaataacttttaactcggatgtccgattgagtcctcttacatatccagacactct

SEQ ID NO: 227274 - DNA, 287 bp, Glycine max
gttgacacactttgtggtagatttacggatggcctttgtggataactagtaggtgggtcacgatgaagttagtcatcggctgagttatcacattgatgggtcgcggggaaacttggacgcctttgaatcggcttcaccacatcagtgcttccctctttctcaccctcttcatctgccccagttgtctaagacctcttatcacgatgatgaaacttgtctcttttcagatccacttcgatcctttcacaggcgaagaccccattcgctaccttgaatgtgtgtcaccc

SEQ ID NO: 227275 - DNA, 303 bp, Glycine max
agcttgcatctccttctagtatggaatctattctttctttatggatgccaagccagtcaccctcattaagaactagctcttttcttcctctattgcctctagaggaatacaccttagctcgattctctatttggatcttaaccctctcatgcatcttctttacaaatgctgacctatattccacttctttatgtataaaaacaacatgtcagcgggaggtgaatgacgtcgaacggtgttaggggattgaactcatacacaacctaacaaggggactgcttggtggttttatgaacccccctg

SEQ ID NO: 227276 - DNA, 458 bp, Glycine max
  unsure (1)..(458): unsure at all n locations
aagcttgttgacacgcggtgatttacgtcatcttccgcgctacaatatctgtttactgactttngagtcacgctgacgggcggaaatacccgagtggtatccgataaaattttgctgtctgtaagacgaaaagcctgataacacgcagagactaacgtcgtcttctgcgcccttcgtcaatcgcggccgacaagcccgttgacacgcggagaattacgtcatcttccgtgctcacaagatctgtcatactgacttttgagtcacgctgacgagcagaaatacccgagtggttatccgtataaactttttgcattctgtaagacgaaaagcctgataacacgcagagactaacgtcgtcttctgcgaccttcatcaatcgcggccgacaagcccgttgacacgtggagaattacgtcatcttccgcgctcacaagatctggcctattgactgttgagtc

SEQ ID NO: 227277 - DNA, 469 bp, Glycine max
  unsure (1)..(469): unsure at all n locations
agcttatccttatggcctgcctccggacttcactttctgtgtccccccggaagatntaagccaagcccctacttttgaggggcaactcctaccttatgaagactatcccgggcaagacgatggggaaggagatacccatcttggccccctgctccacctcatagatccatccccgcatgaactaccccagctgaacatagtccgccatatcccggcctcatccgcacccgtaaaagaatctattccctttgcggaagataagggaaagattgaagcgctcgaagagaggttaagagcagtcgagggcctcggtaattacccattctcagaattggcagatatatgtcttatgcccaacatcgtcatccctcccaaattcaaagtactagactntgataagtacaaacggacgacatgtccaacagggcatctccggatgtattgccgaaagatggtggcgtattctgcg

SEQ ID NO: 227278 - DNA, 403 bp, Glycine max
  unsure (1)..(403): unsure at all n locations
gacataatacatggcggtgttagagctggctcaatgtattatggatgccccacattatttccatgacacaaatgcaaaaatgatgatttggaaattctatgcaaaactggtcatgcatgcacctatgcggacactcaagtgtcaaatctttatggtcatgtgatgctacggctcaagattcatttcctctatttttagtcaaccgaatgtttccaaaatatgttcttgtatcaatttgtgcattcatccgagtccattttgggcgtccgggaaaatnttcacagcattcacccttcatgtgtatacacatttttcagaaactagatatgatcagcgaattttttcaaagaaaagttggaagtcctctcttttcaaaagcatgttggattttcagctagacaac

SEQ ID NO: 227279 - DNA, 258 bp, Glycine max
  unsure (1)..(258): unsure at all n locations
agcttctacttatgtggcagggcgggcttncttcacttttcttgtctccaacgcgagctctgaccactgttatctcttcccgcgatgcttcttttcatgtccgcctgagtgggcttatagcctaaaccatacttnccacgatttccttgggtttttatcacgctagatgtgccgccatagtctttgtctacacccatatcggagctataaccgttccccaacataactctggccatcattaccgccgcatcggacaga

SEQ ID NO: 227280 - DNA, 430 bp, Glycine max
  unsure (1)..(430): unsure at all n locations
aagcttctcccgcaattgtctataaatagggggaggagtgaagtgaattatggttcatccccttaggcagttttctctctttcgaatttgcttggaaaaattgtttccgtgaagaaaatctaagccgaggcgcttccgaaacgtttccgtaacgtttccgtaaggaatttcgcgaaggtttcgaccattcttcgacgttcttcatccgttcttcatcgttcttcgatcttcaacgggtaagtacctcgaaccaagcttttcgattcattctatgtacccgtggtggtccacattgtgtttcgtgtatttttattctcattttatttactttntatacccccttttgacgtgcttaagccattttatttaagtcatttctcgcttaacctataaataaaataaatttccaccaatcgtttgaattgtatta

SEQ ID NO: 227281 - DNA, 364 bp, Glycine max
agcttgtcagggaacaattatgcatgtattcatagatgagagctttcttgcgtccttccaaacagaatcaaagaagtatgacaacattaacatgagaagttctactgatacactattagaaaatatgttttctacatcggttatttatgactttcaacatcggtttttcaaccgatgttgaaagtaccgacgttgatagtattatcgttaacatcgggttttgaaaaaccgatgttaacgtaaaattaccaacatcggttatataaataaccgatgctgctaatatgaattacacccacacaatgtatattaatgctgaaagttaacatctgtttttacatagaaccgatgttgtgttcagaat

SEQ ID NO: 227282 - DNA, 451 bp, Glycine max
ctcagcttttatccaggctcatcttggtggtgaagctccttcttccatggcttattccctagtggatggcacctcctctcacctcttctcatttgtcttccgctgcatctccatggtggaaaatcaccattaaaggacctcattgaagctcaaagatccagcctccatagaagccccacaagcaagcttccatcacaagataccttggacacgcatgtatatggcaaaatagctcacaaaatatacgtatgtttaggtagcaaaatacctcaaaaaaaaagagagagagcaaaaagagagcgagcacgacaagaataagataaaaataataataaaaagttgtctagctaaaaaacaacatgcttgtgaaaagagataatttccaacttttctttgaaagattatactgatcttaaccagtttttcgaaaaataaaaatgtgtgtacatat

SEQ ID NO: 227283 - DNA, 491 bp, Glycine max
  unsure (1)..(491): unsure at all n locations
agcttgtatttcanatattatggtgtgcgcttgttgtaacatgttatgtttgctactgattnttaattctttgaccctttgaatgaccaaattggctttcgatgtcttcatgagacttgtagagaattttatcctttacattcaagcactggtatcatgttatttggaccattacaacataatcaatccttaaagcattgcagttttgttatattgtgaggacaaactgacatctctatcttcatggtcagtttcttccaagatccaagccttatttgcccatgacttctccataaaagatatatatatctttctcttagctttctacaaccactgagatcatcccaaattcacttttgtagctcaagtagttntcaaattattgcacacatatgaaactgtcaaggcaaaccagcgtctttaacttcaggctcagttntgtccatgatcaanggtgtatttgaccgtgacttatttcataaagttgaata

SEQ ID NO: 227284 - DNA, 437 bp, Glycine max
  unsure (1)..(437): unsure at all n locations
tactcaagctntacatcagaatttagtaatgatccactaacctagaattaaaataacttaattccattaacctagggaattaaaagaacttaatggctgagtgtaattgaaattgtggcaaccaaaagtcacccccaacagccatcaagtcagccaccatttggtctcctaaaaggcttatgcctaggttgccaattaggcccttattacaacttgaactaaaccaaactaaagcccttgtagttgattgacccaaaacatatttttgatcagccaactttacaaggattgggccattatttagaaaaactaaacactctaaaattgagacaaagtggtgccatttagtcctcctccatttgggccatgatacaactcacaaccttggacttttctccttgaaacttgggcttgtattcaaatagtatggacaacac

SEQ ID NO: 227285 - DNA, 488 bp, Glycine max
  unsure (1)..(488): unsure at all n locations
agcttcttccagattgtgaacatgatgtcttcctcataatgatgatgtaggagtagacaaatgcgataaatttgtgttggataatctcaaccacggaagtttgaatgttcaacacatgttttcaaaacgaaattaaaccatcaactttgtcaccacttgatacgtccaatccttttccactcatctcttatctgagccaactgtatgaggcggctgaggtccgtgggatgatttgatttcgcaaacattntattgataagaatcagattaaattattcaccttgtggaaaactttgctagtttctatttttctctctcccgtaggtatatgttaaataacaccgcccaataaatgtgacttagtcgataacatagttgagctttaactntaacatatcatatatcanaaaggggcgaagacctttaacatgattaagccttanaaattagcctcgtangaatagaaacctgtaaaaatattttaaagt

SEQ ID NO: 227286 - DNA, 376 bp, Glycine max
gatcattgcaccggccggagattctatcactgactactgagaagaccttccctgtgcattcctgactctcggaggctctgctgcaattttaatcggctgcagtgctaactatgatgcccgctccgatccttctatactacatgacgcacattacttggaaggccacatggcactcacgtagcggagaaaaccatcctactcggttgtgcagtagatctcaccacgtatcgatcgcgatctgtactatcaggtctgataccgcatatgtcatgcaactccgaataccgtcctctcccgcatactcttccggtgcctagaccagatcctatagctgttaccatgcttacatcgggattgacaatctcaattgctctag

SEQ ID NO: 227287 - DNA, 455 bp, Glycine max
  unsure (1)..(455): unsure at all n locations
tgcatatgatctcaaaagcttgggcctcagatactgtgtggcctttgctatgttattacttaatgaacaaagttgcatcgagtgaacacatgctgcgctctgcatcatatgaagcttccttgtgaagctatcttgatatacttgtgcttatccatacacacctctctatttacttatctcacctgctgagaggcttctgcgaagatccttgtatcatacttgatctctagagcttactacacatgccctgtcatagcaagacacacctgctgacatgagactctaatggcttatctacacacacccgctacaatagctcatctcatctnctgccagaatacatgattgtacataacagctcctattacaatagactactcatctctgccctgagatacactacgaacaccctattcttgtagaatggactcaatacantgtccgagaatatgaca

SEQ ID NO: 227288 - DNA, 335 bp, Glycine max
acaggatgacgcctactctcgcctatgactcggagtatgctactgcatacgcatggaggaaattcgccattgatagacctgatagaaactcttagaatcagactccatgaagctcacaccgagcgccataactttccttgaaccgcatagctcgtgccgtccgctgataatcactcacccacccctgtctatttacaaccgtcagccacgcaactagacaccagacgtttgagccatagtgtgccacactatcatcgctagactcaccatagtcctgtacatcctctgactgagcggaatcttttcctcactattatgaggcaagacacgaaata

SEQ ID NO: 227289 - DNA, 471 bp, Glycine max
  unsure (1)..(471): unsure at all n locations
agcttattctactagggactntagacaacatgcatttcatttttttcttttcagattcatacagattgttcacattcatggtagcaacacgcctagagggtaacttcacatcagcatgcaaatattgtaataactctttaaaccttctatgttcaataaaagagaatggaagatcatgctcaataatcatcatacatataccacactntgatctattntcatatttcttaatctcccagcatgatcgagaataatatttccaacatcactattagaacgcgtcttcaaatatacatcacatttccccatacgacgttgtaaggttgaagtcccattcttattgtcaccacccacataatctttcaaacaatatttgcatgtgctcatcacttttccatcactatgcataacaggtttctcanaaaaattccacatatgtgatgaataatttctagccctcttntttgacat

SEQ ID NO: 227290 - DNA, 474 bp, Glycine max
  unsure (1)..(474): unsure at all n locations
tacttcaagctttcanaaagccccctttccataactctcaaggtgcatattccttaatgctacatgtctgtatatttcaatttgttttgatggtttgttgttcattcacatttcacaacattgaaaagaaaatgtattgtagttagttatagagcaataaaaattgataattaatgccttgttaatttcttttccaacaccttatgattttaatcatgttaatatacaacatttggactattatttgcaacttaaaaacccttgaaatataaatcttgattgaatgataagacaaccaatttttctatgttggatcgagtggcctcagaataattaagggggggttgaattaattattcctaaacctttacaaattaaaaattactctnttaaggctnttactaaattgttaagagaatgaggagtagaagagaaaacttaacagaaagtaaaagcgaaaattaaatgcacagc

SEQ ID NO: 227291 - DNA, 442 bp, Glycine max
  unsure (1)..(442): unsure at all n locations
agcttattggagatggagcttcggtggagagataagtccttgtttggctgatttaaagcatttgaattacttggacttgagcggcaattatttacttggagcaggtatgtcaattccttctttccttgggacaatgacttccttgactcacctcgacctctctgatactggattctatgggtagattccatctcagatntggaatctctcaaatttggtgtatcttgacctggcgtatgccgccaatgaaacaattccatctcagattgggaatctctccacattggtgtatcttggccttggaggtcattctgttgtcgaacctctgttagctgaacatgtataatgggtatcaagtatgtggaagcttgaatatcgttatttgagtaatgcanacctatccaaagcatttcattggctacacactctccaatctcttcct

SEQ ID NO: 227292 - DNA, 371 bp, Glycine max
  unsure (1)..(371): unsure at all n locations
ntgcacttgccaatngccatgatgtaatctccttcttgacagtctctcatcaagttggagtggtatcacagcattgaactaaggtgaacgttccaatgggatgatggttttgatcgctgcacataaagtgcgtgattgtgagtttctggtcccatgagttaaactataaagactaagaaaaatattgtctgtattttaacggcccaaaggataactaaacctttcattatttacattatgctttttaacaactggttatatatatgtagcagtttattctaaacaatggactacgtgtgagatctttgaattctatgtaacaaatgttgtttcacacttctcatcagacttcatgtcgaagatggcatgct

SEQ ID NO: 227293 - DNA, 419 bp, Glycine max
  unsure (1)..(419): unsure at all n locations
agcttcaatggagcttacatcatgtggtattaatagcatcttcatctaggtgatgttcttttgcttcctctatcttttggttcggngaattctcttaaattcctttttcttcatgatgcaatcctaccccgcaagggcattgggtagaagactccaagtagattgggctagagatccaagggaaggtcctagggttctcatgaaccttanggtagatttcgagcccatgggttaagtttagcccgcttatctttttaaatattagaataggtatttccttcgtctgggccttgtattttggccattctagtagtatagggttttagccttgtatttcggggcattttgagtagtctctgtagtaaggactttctttgtattttcatgttttttgtcatgggggtgagcttagctattat

SEQ ID NO: 227294 - DNA, 458 bp, Glycine max
  unsure (1)..(458): unsure at all n locations
ntgcctttagcgcttgtacctcatcactttcttccgaagctttaacctcattgtctctcacagtctttagaattgggagccaatccaatccttgtgtccggactctcagccacttatgatagccgccgatgatcccattactgcttcccctaagctctctgtcctttcttcatgccgcatcccatgccttgcgaactccttggagtacccttgcgttgtggtcactgaaaccccgtgcgatgaaaggcgtgatgctttcgtctgatggcactcctctcatggggtagccatgctgtcttatggcgaggacgggattataattaatacaaccccttgttcccatcaagggaacatttggacatccttcgcatgaagatagaatcctgattcttccttccttctagcgagggaaccaattaacagacgcccctccatgctagccaagagttggtcccaat

SEQ ID NO: 227295 - DNA, 485 bp, Glycine max
  unsure (1)..(485): unsure at all n locations
agctngtttctctactgaatccttaaggtggattctgatgattccgattaaaatgttcctagtccggcgacaagcaacgacggcctatggtggccaccgatggttgtgggtggtggagaaggtgttatggttcgggtatgcatttggagagaagaagagtgaaaaattgggtttttcacattgatgaatgtatttataatctgtaaatctcgcttagcaagctaatctcgcttagtgaaattcaacttttggcgccaagcgcaacatttcgcgttgagcataatttctccttgtgttggaattgtgcttaacgcgctcatctcactaagggagatgtccaaaagtgttatttcacanatcccaatggtcaaagcatgaagacatgggttgaaaacctatagttcaaatctgaaggtgatccaacggtttacgagtccaagattatggccttaccaaaacagggtttgggtaaaacttgaaatctc

SEQ ID NO: 227296 - DNA, 443 bp, Glycine max
ttatcgctaaccacagattaccatgctgaataatatggacaaattcgacatccttgtctctctcatgctctcacaatcacatcttggcttattcaacttccaccggaatgtgagtgtaagccattggtttgtttgcttaagcgacctgcgctcctgagttttttttttttacttccaagatcgttcaaattagagatttctcgtcctacacgttggtgagggtgcttgaaacaaccagttaagcataaaagttcaaaaagaaaaagaaaaaagcattcgattgactgtgttctcaagttaaaatatagacattcgtatgacctcattttatcattcctgataagcttgtctttctgacacacaactaaattatcaacaatatcactcatttgacttaatctatcaaactaaaagaatccttcatatgtttctcgataatcaac

SEQ ID NO: 227297 - DNA, 440 bp, Glycine max
  unsure (1)..(440): unsure at all n locations
agctntgaaatctgaagtttaatattcacatgatcaaagttcataaaaaatgcacacacatgacctctatttatagcctaagtgtcacacaaaattggagggtttgaaattgaatttgtggagccaaactttggagccaaaatttcactaattatgattagtgaattttagttatggttcagcccactaatccaagatcaaatataatattctccactaagtgtgcttaagtgtcatgaggcatgaaaagcatgaaggacatgcacaaagtgtgactatatgatgtggcaatgaggtgtagtaagcaaatgctcacctgcccctctaaaatttaattggattgggcttctaccaattcaattaaatntatttccaaccacacacatcaaatatccacttagtgcatgtganattacaaaactacccctaatacanaaact

SEQ ID NO: 227298 - DNA, 446 bp, Glycine max
agctttctctcacaattaatgtgtctactgactaacaattctaaatgcaagttcacattcttgtgccttctttgtctaacatacacacttgctcaaactcatgaaaagagacacaaattccatcaaaatcatgcactcaattcaaaataaagacatacacccatttttcacaaaaagataaaagtacttcactgccatatcattaaaactaagttaaactgttcaaaatgcttcataataagcaaacaaactacccataaacaaaactaacaaaaaggaattaatgtactaaaaccatgaccataataataataataatctaaaaggcaacaacaaaagaaacacaaaatcatcaggaatatcaacattcttgtcagtgtgagccacaatttcctcagcagtccatccagtcagaaaagtcataaccatcatctatgttgcaagat

SEQ ID NO: 227299 - DNA, 415 bp, Glycine max
  unsure (1)..(415): unsure at all n locations
agctngagatgaggaagtgttgaagggtgaaactttttgctttattgttgaccacagagtggtacctggagatatgtcgcgggggtcaggagaccttgtggacgtcaagtggggtgctattgcccaaaaccaagcttgaccaatcccgacccaacccgggcatagtcggtcagtgagaacctgtgatgtacctaagcaggcgagctcctggcagtcaacagataaaaggaacaaacaccacanagcaaggaggcttgtggtggctggccagctgtgaatnttgtgtgatatgtggattatggcctctggtaatcgattaccaagggtgggtaatcgattacaaggcttanaaatgaagacaggaggctgagatggtctctggtaatcgattaccaaggaagtgtaatcgattacc

SEQ ID NO: 227300 - DNA, 411 bp, Glycine max
catcaagtggtatctgagcacaagagcttctagtatgtgctccttaaacctccattaacctcaattgttgtttcttcatttttatccatgtatttcctcacatgtcttgtgtttaatgttgttaacatgattctttagaacttccattgattaaacttgctatagaagctagatttgattctctatggttcaaatttcttgttcttgttcttgaaccatgaattgtgttgagtttaggttcctttgagttttgtattcctatttttttgtgtggttgaaacctaaaccataaaattcttacaaaaacattaaagtagaggaaaatctaaaaaatttagagtgacttgttcacctattgtagttttgtcatagaagtcatgtctatgttgggtcgagtggcctcagaataat

SEQ ID NO: 227301 - DNA, 504 bp, Glycine max
  unsure (1)..(504): unsure at all n locations
ggatccttaagtcactgcggctgcagctctccgttttcctataatagggagtctttggtataataaagacgttcaaccttcctggtatctgaggatcacttganattagtgaaaaaaaatcgtttccgtgaagaaaatccaagccgaggcgcttccgtaacgcgtctgacacgtttccgtgggtgattccgtgaagattttccgccatctatcgttcgttcttcatcgttcttcgtcgtcctgcggtcttcaaccgataagttcccgaaatcgaacttttcaattcattctatgtacccttggtggttcccacttgtttcgcgtacttttattntcatttcatttactttctgtatccccttttgacgtgctntagtcatttatttaagtcattctctcgcctaatcaaaaaataaaataaatttccaccgatcatttaaattgtaacatttgttaatctctgttaaaatgaaatccgaccgttcggtcatgccgtaatcacgt

SEQ ID NO: 227302 - DNA, 483 bp, Glycine max
aagcttgtccactcaatatttcttcaaatatagtaagtcatatacacgttcatgatatttcaagaacctcatgttttttagttgtacatccacccaataaagcatcaatttattttcttccctatttttttattttctgattagagaaaaaataagaaactataggagaatataataataataataataataataaaacaaagcacacaaaaagaaacttgatcgttgaaatatgatacaatgattcaacaattaattacgtgtatattaatatttaatgaattattatatatagtaatcaattattatatgttaataaatgtaatgaaagtcataatttcttgatgctgaatcattgtatgttaagatgatttgattggataacaattaaagtaattaaaaaaattcaattggaataatatgtctactattactattagcatcaacattgaataaattaaataaatattaattgattacatg

SEQ ID NO: 227303 - DNA, 412 bp, Glycine max
tcaacttttggagaaactgataagagaaaacttctataaattagcttatgcataagctaatcttagtttatagagaagcttatttcgttttctctaatctttttttctcctataagtatttgtggagaagtttatcccaactgatcctttatatgttcgcggctttattttccagtttgtttgtagcatgcacctgtctctgaaacagtcgcaagtgatgccatttcacattgttgccctaaattctgttgacattccaaatgttcttcccttgcccaaacctgattgctgtgcaggttttactgcgtcattctccatttaaacaattgttcaagaggtaggcatatgcatcttgtctggttgcaaataagtatttcatgctgaaaccatcttttacacttgaattttacat

SEQ ID NO: 227304 - DNA, 471 bp, Glycine max
  unsure (1)..(471): unsure at all n locations
aagcttcgctcaatntgcaaagtgctggataatatccagtttaattaatgtacactcttagaggattaaaatgaatggctgagatcaactcatcaaaactcaccgtatcatttatctcattcttttttcctttgaacattcacttctggtgactctagtatagctctctgccttctatctaagcaaatgaaatctttcgattctcctcataacatctatctattttttgttgttatccctcgtccaaaaaaatgtcggacgcgtttcanaacaaaatacaacagaaaaacatgaacaaaatgataatctaacagaaagttaaaaaaatagaaatggtaggtttttaatgattttcttaaaaaactaatactaaacatcaaaatttaatattctcatttaagatttttgaaaaagttaagacatttccttatcaattatttctttaaataaaaagtgtattcacaattatta

SEQ ID NO: 227305 - DNA, 469 bp, Glycine max
  unsure (1)..(469): unsure at all n locations
agcttcacanaatgtggagataaggatgttatagtacaagttcctttaactagtacttctacttcaagaattgttgttccttatactgttgaaccacacaacaatcaagaagaacaacaaattaatgatcctgaggttaacaatgaacctatagtagaacaatcacaagacatagtattaagaagatctcatagagaaaaggagatctgctatttcgaatgattatgtgatttatctacaaaagtcggaaaatgacttaagcattgataatgatccatcagtttcattttcaaaagccattaatggtgatgattctggacaatgattacatgctatgaaagatgagcttaaatcaatggcacanaatggtgtatgggaccttgtggaattgcctgaaggatgcaagagagttgggtgtaaataggtctntaagactaagcgtgactctcatggaaatattgaatgacac

SEQ ID NO: 227306 - DNA, 461 bp, Glycine max
  unsure (1)..(461): unsure at all n locations
taagcttaccaccaagatgagcctcggatagaagcttggatatgatgcttcaatggaggagaataaagagggagagaaagagagaggggggagcacgaaattgaaggaagaaaaagggagagaagctgaactttgagttgtgtctcacaagactctcattcatcaaagttacaacaagtgttacacatgcttctatttatagactatgtagcttccatgagaagctgtcttaagaaaacttccttgagaagcttctttgagaaaacttccttgagaagctagagcttagctacacacacccatctaaaaactaagctcacctccttgagaagcttccttgagaagctaaagcttagctacacacacccatctaaaaactaagctcgcctctttgacaaaatacacgaaaatacgaataanagtccttactacagagactactcagaatgccgctgaataca

SEQ ID NO: 227307 - DNA, 478 bp, Glycine max
  unsure (1)..(478): unsure at all n locations
agcttataagaacaanaatgcctcaatcatttccaaatatgcatgtgaattaggaagcatcaacaagaatcaagccaaggctattgtgcaagcaatcaatggggcaaaacacaccaaatgaatatgatgatggatggctcaaattctcacaaaggtaaactcatcactttcaaattgagctttcaaaactatcatgacatgtagaggagaatcaaggatttcaagtcacaaaatgtcaagaacttttattttcaaaacaattacccatttcttgaacatatcctataattcaaagaanaacatgcaaagtcgtacatgcacacaaaattgacccaaaatattaaactaaaaatccgacgaaactaacaacattaacaaattaacacaactaacaaattaacaaaaccaacanaactagcanaaccaaagaacacttcccccatacttaaacaacgcattgtcctcaatgtagcacaat

SEQ ID NO: 227308 - DNA, 444 bp, Glycine max
ctcaagcgtggagaggatgcttcgatggatgaaacgaacgagggagagatttatagaggggggagcacgaaattgaaagacgaaaaaagggagagaagtggaactttgagttgtgtctcacaagactttcattcatcaaagttacaacaagtgttacacatgtttctatttatagactaggtagcttccttgagaagctctcttaagaaaacttccttgagaagcttctttgagaaaactttcttgagaagctagagcttagctacacacacccctctcataactaagctcacctccttgagaagatttctaaagaagctagagcttagctacacatacctctctaatagctaagctcacctgcttgagatgagaagctagagcttagctacacaccctctataatagctaagctcacccctatgccgaaaaacatgaaaatac

SEQ ID NO: 227309 - DNA, 482 bp, Glycine max
  unsure (1)..(482): unsure at all n locations
agcttagtcaatntatatccaaccttatgcaattactattatgatatgtagtccttggagtgttacattacctcaagatatcttggctatggctgagtcttcccttcaaaataaagtagcgacttgttctacaaattacacttacatcattattgtgaattgtgatagtaagttaagttgttctacaaattggttaaaattctaccttccaatgaatgcacaaaacacatcaagtagagacgataaagtggatcgttttgccctgctttgtcgtaatcttaccaaaacgtgcacaaaggtcaaatcacctacttgtgggatgtgttgaaaaatgtagctcaccccatttacggatagacaagcagattaactcaccaaacatttaaaagaaagaaaaaatagaacaaaataataaaaacttanaaatataaaattctcatttgttatcacaacttcaatgccgcatttatnacctttagtta

SEQ ID NO: 227310 - DNA, 451 bp, Glycine max
ctcaagcttgaagagatcttcaatggctacgaacaacaacgcatttcattttgcttcttctttccccaattacatatcacataaagtcgaagatacaagctttcttttatggcgtcaactagttaagcctattatcaaatcaaacaaacttcaatgattcattgctaatccgcaaattccactttgatttctctttaaagaagatcatgaaattggacgtgaaaatctagtttatgaggcatgggagtagcataattaggtgttattaatttggcttcaatgcattctttctacactgattttttctcatgtgatcggttataatcactcctatgaagtctaggagcacatccatgattacttccacaagcagagcatcgccacaacgcgtcagttgcacattcaacttcgagcaatgaaacctggaagcaagttgatgcaatagtttcta

SEQ ID NO: 227311 - DNA, 478 bp, Glycine max
  unsure (1)..(478): unsure at all n locations
agctngaatagcagatccagtgcactcatcatattcatgttcaaccacaatgtttcctgaaaattctgtgggattgagtaaactaaaaagtaatgacaaaattgattagtttattaattaatggatgactttttttttatcggttaatgaatatgtacttgttgcatgcattactctaagtaagttggcataggaaaaaataaataaataagaagcacaatcattactctaagtaataattatgtccacttcaagatggagttggatggaattacggaaaacaaagtatgataagatcaagagacaataaagagatggatataatattgtaatgaaaagattaaaaagagacaataatgcagataatatgaaagtgtcaatagaagtatcacggttcataggatattaaggcccacgagtnttgtatatattantcatattgactaaccttgaattatgattggataaaatatcttat

SEQ ID NO: 227312 - DNA, 457 bp, Glycine max
  unsure (1)..(457): unsure at all n locations
actaagcttctaaggaagttttctcaagaaagcttctcaaggaagttacctagtctataaatagaagcatgtgtaacacttgttgtaactntgatgaatgagagtcttgtgagacacaactcaaagttcaacttctctccctttttcttccttcaatttcgtgctcccccctctctctttctctccgtctttcttttcctccattgaaacatcctctccaagcttcttatccaaggctcatcttggtggtgaagctccttcttccatggcttattccttagtggatgacgcctcctctcacctcttctcctttgtcttccgttgcatttccatggtggaaaatcaccattaaaggacctcattgaagctcanagatccagcctccatagaagccccacaagcaagctgtcatcacatggctccaatcacatccaaataaaagccttaacacttggga

SEQ ID NO: 227313 - DNA, 406 bp, Glycine max
  unsure (1)..(406): unsure at all n locations
agcttgaaggtaggagaagatgagtggatggagaaggagcacaaaattttgtgcctcacataaggtttgtactttgaagtgtaattctcaaatgatcaaagttacaacaagtgttacacatgcttctattaatagcttaggtagcttccttgagaagcttccttgagaaactagagcttagccatacacacccctctaataactaagctcacctccttgagaagtttccttgagaagattccttgagaagattccttgatacgctagagcttagttacacatgcccctctaatagttaagctcacctccttgagatgaaaagctaaagccttagctacacacacccnctagaatagctaagctcatcccatgccaaaatacatgagaatacaaagagttcctatta

SEQ ID NO: 227314 - DNA, 457 bp, Glycine max
tcttatccaagacacattcttggtggcgaagctccttcttccatggcttattccctagtggatgacgcctcctctcacctcttctcctttgtcttctactgcatctccatggtggaaaatcaccattgaaggacctcattgaagctcaaagatccagcctccatagaagctccacaagcaagcttccatcactttccctttgaaccgcaaaggctcgtgccgtcagcttcttaatcactcacccaaccctttcttcttcccagcgtcaacaatgtaactagatttcattcgctaaagccttcttgtgccgcactttcgtcgcttgtttcaccaaggtagtgtacattctcttcctgtttgattccatttcgtttcgaatttgattcaatatttgaaataaaagcttttggcttattcgattgttcataaaccacttgcatttagaatcgtgtaatac

SEQ ID NO: 227315 - DNA, 402 bp, Glycine max
  unsure (1)..(402): unsure at all n locations
agcttgtaggattatggngtacccatcacatgtggtactaggtggcggtcgggcgatggtgcacaacaagttttccacatccacaaatcgcgcataaacccaccatccnctgttgcccacctccaactgagctcacgtactcccacgtagcccatatcctcgcttctctcaacaccgggtccccatcaatcctcccaagcttgcccaacatccaagtaactcaacattcaaacagcacaaactatcacagccaagataacagagcaaaggcagaaaaatctgccaaaacaccaaccgaaatcacagcttttctcacttaaagaccctagtaacaattccttcgttccaattcgttaaccgttggatcgactccnaaattntactggaagtctctagtgcata

SEQ ID NO: 227316 - DNA, 427 bp, Glycine max
  unsure (1)..(427): unsure at all n locations
aagcttaatggggctgatcttgagcttaataatgtccttcaatggtgattntcaaccatggagttgcagcggaagataaaggagaagaggtgagaggaggcgccatccactanggaataagccatggaagaagaagcttcaccaccaagagagtgtattgggtaagaagcttatagaggaagcttcaatggatgaagagaatgagagagagagatagaaaaaagtggtgtgggaatgaaggatagatacggagaaaagttaaactttgaagtgtgtctcacaagactctaactcatcacagttatgaccagtgttacacatgtttctatatatagctaggtcactaactaagataaagctatcttgagataccttcttgagaagctagagcttagctacacacactcctctaatagctaagctcacc

SEQ ID NO: 227317 - DNA, 455 bp, Glycine max
  unsure (1)..(455): unsure at all n locations
agcttaacctcacctagttatttcaatctaatttatctttagctaatactgatataggtaaataaattattagcccaatgattagatgccccnntggtactcatncnatcatttgcgtctgaatctgattcgtgagtcttcttgtacagttgcncnnnnntataagtacagagaaatggtgaaataatagtaggtgaaaaaaatactattacagtaatgtaatccaggatgagacacgacatagttgcaacttaaattaaaggacaacaaaagcttgtggatccattcacgggcgtagcttacacctagggaaaatatttataattttttccaaagactataggtattcttcacggaaaacaatattgctccagtcggataagaacactctacagtctagattgaaagttctctttcaaatattaatagaattgatacttaagattcacattgag

SEQ ID NO: 227318 - DNA, 302 bp, Glycine max
aaactaagcttgtaaagtgctggatgggcttttccttcgcaagttgacttgaagatgtacaacagttaccctgagctctctgatgccttgtgcaagatgtataactccttcaccattggtaactataattaatccataatttaccatacatcaacttttttttatatagaatttaatgactgatcataactcttacgtatcagtatctagattgttttctgtttaatataactacccaaaagatatggatcttaaatttgatcatgttgaaagctcactaatggtgtatgtgaatattaaat

SEQ ID NO: 227319 - DNA, 432 bp, Glycine max
  unsure (1)..(432): unsure at all n locations
agcttgaacctgctaatcaaaagcccttcttctgttcccaaaatcaagtctttaatttatctgatattttggaaacacgtcaatttctgaaatatatactttatganaaacgattcttaaaattaattagattgatctcaataatgcagattttaatctaatgccctttgtttgagtttatcttttaaatattaaaagatatgtttaacaaatgttgcaataattgtgaataatataaataacttaaaagacgtctccaatgctntttccatatttgataacgcacatttaaaatagtttgtaacaaagctgcataaagaaatacttaatttttaataatgaataaacaagcagatctcaaatctatcagcgactggtatagacatcatacataaagagcacacatactatgaaggcttgtcattgtgaatc

SEQ ID NO: 227320 - DNA, 454 bp, Glycine max
cctgactgttacaacttacaagttgctttccatttcttatagttgttccccctcttattatgttgtttgttttgtgaatgtttcttggtttggttccttagaattaattctctctctctctctctcaatcttggatcacttatctactttgaactatttttcttgtatgcactgggacagcataacttatgcttgtatctcatgcttcagtctgagttcagtacaagttccatatctttttcattttataatttgcttttgggatgtgcactacacggctctcagtctcagagctaaatgtagcacaggcaaattttgataaatatgagcgtgtgtactggttgggatgtttctcacttatttattttgtcttcctcccccagatatcctgctatctctacttgttaacttaacgctctctcttgtagtgacaaactgcaaacgtaatatttga

SEQ ID NO: 227321 - DNA, 451 bp, Glycine max
  unsure (1)..(451): unsure at all n locations
agcttaactatctccctaatgtatatgtctgccaatntgtccaatttgtaggtttccttaattggcaagaagtgagtagacttggttagcctgtccacaattacccatatggtattgattgagcatttgtagtttagaattnttctattcttcttagcataattgacatctctntaatccttattttttcactttaacttagttntggtcttaggcaaatgattgagcttaattaataattgtggcttatttttcaatttttgtgcttacttgacatatcttccttgtgcagggactataggacaccacaaaactccaaattgagcatgtgagtggtttctgtaaagctaagaaaaagatctntaattttgtcaaaaataatcttgggccaattcgatcatttcgagggtcaaattgcgcttgcgagtcaaaatctctgcacttgaataac

SEQ ID NO: 227322 - DNA, 475 bp, Glycine max
  unsure (1)..(475): unsure at all n locations
gaagttagatatatgtgattatctattcgttatatatatatatatatatatatatatatatatatattttgcagtttgttaattaagacttaaaggcccatgtcagtgttatatatttattgttttgaattggttagtgcatgtatattacatagattttatactattattaattaattgatgttgaagatgttataatgttgttatgatatgatttttgaaaattagttgattcagtgtatgtgtatataggttgtgtcttgtaaatattgctatgaatgtataatatgatatatgagtataagtgaagtatgcgtgcttatgaatatatgtgaagacaatgtgtcatggtatgtgtgtgtgctgcgaaaaaatgtgagaagaatctactcccccgggataggaatctncaagagatnttgaaattaaaccatgtgcatattgtgtgtgaaccatgaatcatgttgtgcatatg

SEQ ID NO: 227323 - DNA, 392 bp, Glycine max
  unsure (1)..(392): unsure at all n locations
agcttctcaaggaagttntcttaagaaagcttcttaaggaagctacctagtctataaatagaagcatgtgtaacacttgttgtaactntgatgaatgagagtcttgtgagacatacttcaaagttccacttctctccctcttttattccttcaatttcgtgctcccccccccccccctctctttctctccctctttcttttcctccattgaagcatcctttcaagattcttatccaaggctcatcttggtggtggagctccttcttccatggcttattccctagtggatggtgcctcctctcacctcttctcctttgtcttgcgctgcatcttcatggtggacaatcaccattagaggacctcattgaagctcaaagatcgcgcctccatag

SEQ ID NO: 227324 - DNA, 325 bp, Glycine max
  unsure (1)..(325): unsure at all n locations
agcttctatatagctgaaccactttatcaataaacacaagttgagttttattcagaanattagagtttatctcttttatcttagtgagagtgattctcctaaattcttgagtgattcaagaacaccctggctgtatcaaaggactttcacaacctttgtgtgttgccctcgctggaaagagtgattcttttcatcctttcatcttcacccttgttctttcaaaccacaattccagaanatccacctctgcccagaattatctcgtggccataactcccattntacgcactcaaattaagtgattcttgaccctaaattgacttta

SEQ ID NO: 227325 - DNA, 474 bp, Glycine max
  unsure (1)..(474): unsure at all n locations
aagcttctgtttaacgaaatgggtacaggactgattatatcaaagtgaatatactgttgttttgtaatttgaagccacacaatacttcaaaagggtaaatgaataaagatttatcaccccttttgaatcactttcatcgtccctttttgaccttacatatttgctttgacttttacgtacgctgcagcctgttaacagttgctacttttaagcatgcatggctatggccaactaaatcaattcatttcagatatcattggaatgaatggcacgattatgtcaccatttactgtatttacaaggatatggcaaatgcaaaacaatggcactgtgtggccaaaggggaactcgttggatgggaaaaaacaggtttagtgactcttagttgaaaggttcaacatttatgactntctatgtagattctgtttgcatgttacagaataatggtatgctacgctcttgaaattgagtact

SEQ ID NO: 227326 - DNA, 404 bp, Glycine max
  unsure (1)..(404): unsure at all n locations
agcttcaagttaaggagtgtctgtatcacactgtttatcactttcaaataaaaaggaaagaggctgggagggggaattntatgctttcttccatacataaacaaagcaaagctaaaaaaacaactatacctgtgtccattcaagctgtataaaagtgtcccaagttccacatcccatagctntaccgatgaatcaaatgatgcactgcacaaaaagatgagtaagtagcttacaataaacaaaacaaacttttcatctggtattaagaaaaatataaaaacacaagcaagcatgattgcatgtatatgcacttgcacatgggacattggtcaacataaaactgcatgacaacaatattttaccaaagacaaacagcagcaatttaatagaaaccttgccatata

SEQ ID NO: 227327 - DNA, 436 bp, Glycine max
  unsure (1)..(436): unsure at all n locations
tatagagtagtagtagaatgacctttgtttatatatatattttggtcaaattattaattaataaaaattcttcaatatatccttctcacgttgaagataggacattttaaacagaaaatttactaacatcctgtagactcctttttcttataccatcctatagactcttatacaactttaaaacttagattttagccaaactcaacttacaaagtaccctattatccctaatatgtacatcctttaagtataaatttgctcttttaaagagagaagcatctcgaaaattagtcttctctcattattgatantcttattttaacttttacatttaatcttgtacgatcagcaacttaaggaatagtcataacaagcgagaagtacacgtgtntcttttcttttgttccgattctcactttcataaatttattgtatc

SEQ ID NO: 227328 - DNA, 469 bp, Glycine max
  unsure (1)..(469): unsure at all n locations
agctntccttcactcttatagtagttctatatcatccataccatcaaaaaccccacaaccaatagaaaacacattaaaaccttacaattgaacactttcatggaagtttgaagggtgttcatgggggaaacgagaatgaacacaaagagagaaagataggggtttgcctcacataggggcaaccaacaaacattaaagaaggaggaatatagcttctttttgcacaacaccaaagctatgagcttctccaatggtgatttcttggaatagaggaagtgagtggaaaatgaaaagtttcttttatgagatatttctaaatatcaaggtttatgagagggtatttctgactctctagagactctctatctgcacttanggttctactaagtacccttacctctctcataaatcagaacccatctctttatgcctaaacacaccaaaattcacttatacacatagaacacat

SEQ ID NO: 227329 - DNA, 401 bp, Glycine max
aatgaaaagtcaatggacgcagaagctttgggtgaaagggttcctcaaataatcaaagcagactctagtccttttgattgtgattctgacaaatccctttatgaggaagaagaagcccccaagtctggtcaacacgtggagtttaccttccacggttcacacacccctccttatggatattcagaagcccacaatcatattgggccttccactattaacaccccacaagcccatgtgaacgaaactcatcagcagcatcaggagatatcctagggtctacaagtgtatacaacaaagaagtggttcacaagaaagaagcccacaagactctctcacagagttgaactctgctctattacaaaaagaaaaagaagctattactgagagacagcgtgaacttc

SEQ ID NO: 227330 - DNA, 423 bp, Glycine max
  unsure (1)..(423): unsure at all n locations
agcttctacttatgtggcagggcgggcttccttcaccttcttgtctccaacgcgaactttgaccattgttcttccttcccgcgatgctccttttcatgtctgcctgagtgggcttatagcctaaaccatacttcccacgattaccttgggtatttatcagtctagttatgccactgttgttttttcctaaacccatcccgggctcataaccgttccccaacataactcgggccatcattaccgctgcatcggacagactangctgcccaaagagggagtccacggaggaaatgctgaccacctcaaaagactggaaagcagtttctaacaactcttctgcggcttccacataaggcatggaggatgggcagcttaccaagatatcttcctcgcctgacacgatgaccaagtgcccctctacta

SEQ ID NO: 227331 - DNA, 76 bp, Glycine max
cgagaagttccgacgtgccattgcccgcgtgcctatgattgctgaccaatattccgacctctacgcggaaagagat

SEQ ID NO: 227332 - DNA, 458 bp, Glycine max
  unsure (1)..(458): unsure at all n locations
agcttccaannaagtttgggaaatttgttatcatgtgttcccggngctgtggtcactactcaaacaaaattggtgtttaaagagggagaaatggtacatggcaaaaaatgcttaaaggtgtcttttgatcattcggtccatgcattaatgggtttgcatagtgcaaaaccatcatggtacatgactttatgggacgtatactagcacattattgatagctaccacacaccatatcttcccggttgcctagaaagagagacaacttcagcatgtgggttcttcctaaagaatttgagaaggcatgttatttcgtaaagtaacatttctctcatttcagatagacaccctttggttataagtgcctacaacaacccaagtaacttatgggttagggacacatctcatctcttctgcctgtgccacattgcacanaatttccttcacggtaaccccaactg

SEQ ID NO: 227333 - DNA, 402 bp, Glycine max
  unsure (1)..(402): unsure at all n locations
atctaaagactgaagcataaacataaatctaaagactgaagcataaacataaaatctaaattataaaatgtactaagacattgatattattaaactggtcaaaacacaaggaattaaaaattcttattcttgccattaatcttttccaaagtttttggcttcttatttcaaatcacatccaggagtgcctgatgatgaatcctgaggaaggggtaggtctggcactggtgcagatgactcaggctgagaagaagacatgtccagcactgtagtggaaggctctggtgtcacttgtggggtagctgctactagataagtctaaaaaatgaaaggctcgggtggagtgggctctgaggcctctagaatgtcatcctcctantttggcagaggctcttgggatgt

SEQ ID NO: 227334 - DNA, 481 bp, Glycine max
  unsure (1)..(481): unsure at all n locations
ctcgacccggatccttaagtcactgcggctgcagcttggtcctgattanaagaaatcttctttaataaagccaatctagttcgacaattggtgaagttggagtataatgatggtcatagtatgattgagcacttgaataattctaaagggctcgtaaatcaattaaccaaaattgagatgaagattgatgatgagttgcaagcccttctactccttagttccttgctggaaagctgggacacactcgtggttacacttagtaactcagctccagaaggaaagctcaccatggatacagtcagtgacagccctctcggtgaagaagcaagaagaatggaacgaggtgagtctatccatcccgaggctaatgttattgagaatcggggtaggaatgagactcgtggatgtaataagagccgagatctgagttttcccaacactattcaacactatggatgtaatgttattgagactcgttcac

SEQ ID NO: 227335 - DNA, 462 bp, Glycine max
  unsure (1)..(462): unsure at all n locations
tactcaagccttgaccaaacccncagcagcagttgtttccttagagacttgcctcgacaccttgtctctgagactgaggataattgcattgtgtgccttctgcagtagtgttttcttatccccatcagccatcatcttttcaagtttggcttctccatctagtgcttccaccaggccctgttggacaagaagagctctcatcttcaattgccatagcccgaaatcattttgccctgtgaatatttcaacctcgtacttgggcgagcccatttcttgaatcgaactcaaaaaatcgctccacgctcaccacaccaatttgttgtaccaagatcaaattttacttcacaaaagaatgagtttcttgtatgaacaagaataagcaaaatgcagaaaagaaaaaaaaatgaacgaacactgcactgtgctcacaacagccactctattcaatctctacataatttc

SEQ ID NO: 227336 - DNA, 397 bp, Glycine max
  unsure (1)..(397): unsure at all n locations
agcttgaagganaacttgatgcctttgtcaacctagtaactcagcttgccatgaatcaganatctacacgtgttgagagagtttatgatctatgttcttctgcagatcaccatacagatctttgtccttctgtgcaacaatctaaagcaattgaacagcctgaagcttatgctgcaaacatctacaacaaacctcctcaacctcaacagcaaaatcagccagaacagaacaattatgacctctccagcaacaggtacaatcccgggtggaggaatcatcccaaccttagatggtcgaatccttcacaacagcagcaacaacaacctctatttcaaaatgctgctggcctaagcagaccatacgttccttcaccaatccagcaacaacaacagcaaca

SEQ ID NO: 227337 - DNA, 382 bp, Glycine max
cttgacttgagtcatcaagagattatttatatgtgcccatggcatgagtttcataaatcatccttcaacatctttatcactatcaatcatctttgaatcatctatctttcaatcttttttaacatcatctctcaaacatctttcaatgaatctttcaatatctttctatagaattttttgattcatttctcttcatctttctaaaagttttttatcaacactttctcttccaagaaaagttctttgttaaaaaacttgtgttattcatctttttcattctcttctccctttgccaaaagaacgaaggactaaccgcctgaattcttttgtgtctctcttctcccttacaaaagattccacggactaaccgcctgagaattct

SEQ ID NO: 227338 - DNA, 262 bp, Glycine max
  unsure (1)..(262): unsure at all n locations
agcttaacggcgaattttataaaactcttctntgataccaatgatacgaacgcagttttataaaaaccgctctctgttaggaagcctattactctggctctataaaaaaacacgctccattagcattacttccactacaagataaataacctatgcctacagacgcttcattgctacagacatataataccgtaggtgaatcataaacatactcttacttaccactgactatcgttagcaaaattcaagcacttgtaccaac

SEQ ID NO: 227339 - DNA, 326 bp, Glycine max
gtttcgcaatattggcggatgattagtataatagaggttatgatgatatttgttcaaatattaaccctgttgaaacttattgtttcattcaagcatatgcaaattgctagttctaaatgaacttgttcccttctctattgtctctgaatcaacgcctattttggacttatatcaccttgcatatggtggatgacgacatgatgctgagtcatcttgaaaatgggaattatccctttttatgtgagcttttctggttgatcacttatttttgtcttaatctctatttgtaacctcaaaatagattggtataaagcatatgcgtattt

SEQ ID NO: 227340 - DNA, 398 bp, Glycine max
agcttgcatacaagattcttcttgcctggcacttcaaaaccttctggttgggtcatatagatgtcttcctctagatccccatgcaagaatgcagctttaacatctaactgctccaagtgaagattctctgcagctactatgctcagaataactctgatggtagtcatctctacaactggagagaagatctctgtgaaatcaattccttgtttctgctgaaaccctttcaccacaagtctcgccttgtatcttcttctaccgccagattcttcctttagcctatagacccacctattctgtaatgccttctttccttctggcaatctacttaaagaccacgtcttattcttctgaagggatgacatctcatctttcatcgctagctcccactcaatagt

SEQ ID NO: 227341 - DNA, 408 bp, Glycine max
  unsure (1)..(408): unsure at all n locations
acactataccactactcagcttagtgacatccgtgacttgatcttgagcgaagttgttcgcaatatagattcangagaatcttccagtcatgtttccaattcagcattgaatactgaaggcacgggaaggactacccataatggtcagaatggtcgacgcagatcaaagtcaagagggaaaggtcagagaaaatttcaaagtgacgttacttgttggaattgtgacaagagaggtcactgtagcaatcactgcaaggcaccaaagaagaacatgtcgcacaataacaagaagcgcgatgatgatgaatccgcaaatgcagcaactgatgaacttgatgatgcattaatctgcagnttggatagtcctgttgattcatggatcatggactcaggtgccgtcgtccacac

SEQ ID NO: 227342 - DNA, 115 bp, Glycine max
gctagcagagggatgtcatatatgtggatgaacacatgagtcagacttatgcatggttcaagatgacacacccaatgaagataactacatgggctgtcataatcatcaaggatct

SEQ ID NO: 227343 - DNA, 334 bp, Glycine max
cactattgatgctgcaattgagtgaagagatctggctattgcaagaacgagtttcgttattacagagagctatcacgatacacaacgagcccacgctgttgtttgttacttatatttaatatgttaaattacttatttattcttataatttcgttctttgtattttttaatttcaatagttaataatgtaattttcttaaatacttatagtttaaaaatatttttctaattctgaccatctgcattctaattcttttctacctcatatcgcttaaaattaatctttttaattcatataatttcgattttaatcatctttaatccctgtccaaaa

SEQ ID NO: 227344 - DNA, 134 bp, Glycine max
gcttagctgaattcagatcgaattgaagttacgctttgctcatctcttggccagcttagtagaccatatcattctcagatgcaagggttgcgcgctaaccgcttgagactcgtggcttagcgcatgaacagata

SEQ ID NO: 227345 - DNA, 201 bp, Glycine max
aagctacctagtctataaacagaagcatgtgtaatactcgttgtaacttcgatgaatgagagtctcgtgagacacaactcacagtgtaactcctctcccttgtatcttacttcaagttcgtgcactcacctagctctttgtatgcctactcgttctacggcattgaagcatcctctcgcagctcactagccaacgcccctc

SEQ ID NO: 227346 - DNA, 443 bp, Glycine max
  unsure (1)..(443): unsure at all n locations
aagcttgtaatcttnttgcacttgtttgggctctgattnttgtattttgatcaagtgttttctttttcttacattaatacattagtcttttgctatcaggagacctcctgacattgttctttcttggaacaattattattgcttctctaaatcaatcacattcattagattatagtcggtatccttattttctttgaagaaaagacagcgtgcgcctttaggctttcaatgtgaacatattcaaaatgaattgaatgaatctttgtgtgattgatcaaagacatttccatatctaattaatcctttntgttttggtatgtataattgaaaatctaaccacgaaattaagaaaatggacaaataacatcacctaactgatgacaatcgtgcatgccatttcctactttatttcatatcactaagccccactccatatagacaaa

SEQ ID NO: 227347 - DNA, 431 bp, Glycine max
gcttgactatcaaaattatcttacgagcaagaaaactctcttctcaaacttgggaatatttaaaataataatgagcacaagaggtttactatgagaagctgcttctcaaaagtagtttgtaaatacacaggttctgatgtactacaaaaattgctactattcaagcccatatgaaactcaaaaatagaccaaattgaatagataaaaatccaaagagcatagaacgaagcatggtcaattggtcatgactcatcatgactatgtgatagtttatgaatccattctgttgagtaatgtaatgacccctccaatatcttggtcaacatatacacgaactttgaatttattgagcaggtgtccgagtcattatgaatctctcgataactggcttttgatgtctatataccaaacaaaaatatatagaacttttg

SEQ ID NO: 227348 - DNA, 429 bp, Glycine max
  unsure (1)..(429): unsure at all n locations
cttctttgagacaacttccttgagaagctagttcttatctacacacacccctctcataactaagctcacctccttgagaagcttccttaagaagattcctaaagaagctagagtttagctacacatacctctctaataactaagctcacctgcttgagaagctttcttaagaaaattcctaaagaagctagagcttagctacacatacctctctaatagctaagctcacctgcttgagatgagaagctagaacttagctacacaccctctataatagctaaggtcacccncatgacaaaaaacatganaatacaaaataaaagtgcttactacaaagactactcanaatgccccgaaatacaaggctaaaaccctatactactagaatggccaaaatacaagggctaaacaaaggaaaaacctattcta

SEQ ID NO: 227349 - DNA, 439 bp, Glycine max
gaggatataagacctttatcattggaaaggtggcgggttacatagagaaagtagcaccgatagttgctaaacgaaagaaaatgtaagtctatgaatatgaaagttaaatacctaaggccaattctcatgttaataaataatattataggcttgttaaaagacttgctctactattagagtatacattacttcctgaggtattcttgctttattcttagttagcgattgttatcactagtttgttaggactaactctaaggtagacttcattaacctcagtgcattaactacagttaagtgctaatgtgtaaaaatataattatagatcctcacctgagaacaattactctaatatatactgaagagtgtgttaaacttgcttgtaaccttacatcaatagtctctgaaaactacttgacattatagcgttgaaatcctg

SEQ ID NO: 227350 - DNA, 334 bp, Glycine max
gcatgcaagcttgccgcccagctcgcccaggtgagcaagtgttgcttcctccagaagcaacaaccttctggaggaatcttctggagggcccaagtgggcctggttgctatttacacccccctttttactatatgcacccgccttttctatatttttggaattctttttccgtaacgttacgtaactttacgaatttcgaaatgatacttattttccttccgcgaggatacgaatccttacggattatgtatttactctttgttggctatcaacaaactatccgaagctcacggattgctcagaaacacttcttttctattatgacaccttcctg

SEQ ID NO: 227351 - DNA, 196 bp, Glycine max
gcttaaagagggtgcttcaatgtttgacaagaaagagagaacggtttattacgaacatgtacgaactaaagagggagagaagtggaactctgaagtgcgtctcataagactgtcattcatcatagttacaacaagtggtacacatgcttctatttatagactaggtagcttcgttgagaaactttgttgagaaaac

SEQ ID NO: 227352 - DNA, 386 bp, Glycine max
  unsure (1)..(386): unsure at all n locations
gcatgcaagcttgcagactatacctccaaccgaacactgttgtgtttctatctcggcccaagtttattacgggctgtagcaccggtttcgcttccctagccgtattggaggcggtcaccgtggcattatcctctatagttttctggagttntagcatggcctccatgatagaagccatttgatcttttaaggctgataggtcggccttcatctgttcttgcacgccctcttcattatccatttttctggatcgagtgttataggggtgcctttgcgctttcttagttatggtgagttccctaaagaaacaaacaacggtgagtatgccatcaaaacatgaatatgcaaatgaatgatcggagcacttggatccacctcagggtttt

SEQ ID NO: 227353 - DNA, 432 bp, Glycine max
  unsure (1)..(432): unsure at all n locations
ntctaatgggcctaagtgggcccaagggttgaggaatgcccctaaattgaccattntgcccccatgttgtgtattttgcccctacagattgtgcgacaattggctttaagcagctcaactcagctagcaaaaatccacatgttgacaaacattcgttcccggacgaaattagggcatgacacccactaacccacataccacatcttcagtacgtgcccactccttgggtgacatgtatgcaagagtaacaagcgtgcgatgcacttgcctatgataaaaggcaaacgaaacgcttgtctncaatgtgttcttcaacggtcaaaaaagggcataatngtcaaatgcanggactccacccacttgacacgtctgactctacctgcanagcgaanaccgtatccacctggacaacttaatagaagtagcacggat

SEQ ID NO: 227354 - DNA, 269 bp, Glycine max
  unsure (1)..(269): unsure at all n locations
ctgcangcatgcaagcttgcttctacaatcaagaatgatatgaatgttctaattctgataataacaatcactgagtggataatgttattgattagaggaagctaattgaagccaccaggaaagaccattacccgcttcccttcatggatcaaatgcttgagagacttgcagggcaatctttctattattttttagatggatattcgggctataatcaaattgcagtggatccttaggaccaagataagatagctntcacatgccccttc

SEQ ID NO: 227355 - DNA, 279 bp, Glycine max
cttctatgactatgctctattctctctaactttggatacgtgattaataatctgattctgactgtcaacatttcaacatttcaatagttgaatgatcaattatgtttatcacgtgaaagacgtatcgtctatgcataaagatataacgatgaccctaacatcattgaaattccaacaacactagaccctactttgagaaagatatggcaagccacatttgctttgatccatagatatccaagacaggtataccaatgcgtctaacacatcttatgtacc

SEQ ID NO: 227356 - DNA, 462 bp, Glycine max
  unsure (1)..(462): unsure at all n locations
tgacgcatgcaagcttattaaggtgtagagatatgagatacgttnttgnttctcaaagcacaacactaattgtgtttataagaatactattaaatcttattgctatcatcgatagccagcagacatatgtatatttttggaaccatactcattgcttctctaagtccagcacatttcttacatcatcgtcggtatcctgatttcctttgcataaaagacagccggcgctctcaggctctcaatgtgaacatactcacatcgacttgaatgaaacgccgtgtgaccgatcaacgacanctccacatccacttaatcctcttcgcgaccgcatgtctcatcagccactatcaccactccaactctactggccacttcaacctctctcaccgaccgtccctctctcgctaatccaactctatccactcctctcccctcctgacacaacctgcgatgagtctctcc

SEQ ID NO: 227357 - DNA, 360 bp, Glycine max
gcatgcaagcttgtagaatggctagacatgatacacgtcatggtttggtttggttcaaggataaaagggatgccccacattatttccatgacacaaatgcaaaaatgatgatttggaaattttatgcaaaactggtcatgcatgcacctatgtggacactcaaatgtcaaatttttatggtcatgtgatgctaaggctcaagattcatttcctctattttaatcaacccaatgtttccaaaatatgttcttttatcaatttgtacattcatccgagtccatttcgggcgtccggggaaaacttcacagcattcacccttcaggtgtatacacatcttttcaaaaactagttatgatcagt

SEQ ID NO: 227358 - DNA, 435 bp, Glycine max
  unsure (1)..(435): unsure at all n locations
taagctgggagaaaagcttgaagatgtttcatcttttacattcccaactcttttgagtggcatttgtattggttgttatattgaatgttgcatcttagtccatatcatatattttgtgcatcatgcatcatcatgagtaagtgagaagaaactttctaaagttagaaaatttcttcagaaggcaaaactctgttttaatttgttatagccttatcataatcaattacataagttgtcttaagcttgcaaagttatgtctcatatgttggatcgagtggcctcagaataattaagaaatggcggttgaattaattattcctaacactttaccaattaaaaattactcttttaaggcttntactcttgctcgtaagagaatatggaatagacgagacacttaaccgaaagtaaagcgaaaattaaatgcacagcgga

SEQ ID NO: 227359 - DNA, 70 bp, Glycine max
attaacatgaatactcctatgaatgatcggagcacttggatccacctcacgggtttttagaatacgtgat

SEQ ID NO: 227360 - DNA, 125 bp, Glycine max
  unsure (1)..(125): unsure at all n locations
gagaaagagttcttgggtcaagacatgagaagcaatcaagtataatgttacttccttcactaaagcggtgatccatcttcacacatattttatcaatagccacatanaaaatctctgcacggtaa

SEQ ID NO: 227361 - DNA, 401 bp, Glycine max
  unsure (1)..(401): unsure at all n locations
tctatggaggcttgatctttgagcttcaataaggtccttcaatggtgattttcagccatggagttatagcgaaagataaaggagaagaggtgagaggaggcaccatccactagagaataagccatggaagaagaagcttcaccaccaaaagagtgccttagataagaagcttagagaggaagcttcaatggaggaagagaatgagagagagagagagaaagagagagagtggcagagaaattgaaggagaataaggagagaagttgaactctgaagtgtgtctcataagtttctcattcaacaaagttgggacaagtgttacacatgtttctatntatagcctacgtcactaacgttgtgaatntcattttcatttcatgtgaacctacaagggatattcc

SEQ ID NO: 227362 - DNA, 324 bp, Glycine max
ctcagctttccttatcatgtacacggatcatttttaaggcccagcgccttaaaatgatcacctttcaagtaaaaagaatcgcttgattcacgcttaagacagaactacgtatgttctgattcctcatcgatggagggtacgtacgagcaaaagccccgcttttgtcgacctcaaaaaataaaaagagataaaagttaaggtagtacaatttccacaattctaaaaaataggttggcgtcctttgagacaaacgtgagaggtgctaatacctttctcaaacgtaaatacaactcccgaacttagaattctcattctgatcggctc

SEQ ID NO: 227363 - DNA, 296 bp, Glycine max
gaggtccaggaaggacaaggcagcagaaggaactatttccgctccggagtatgattgtcaccgctttaggagcgcggtacaccagcagcgcttcgaagccatcaaggggtggtcgtttctccgggagcgacgcgtccagctcagggacgacgagtatactgatttccaggaggaaatatggcgccggcggtgggcaccactggttactcccatggccaagtttgatccacaaatagtccttgagttttatgccaatgctcggccaacagaggacggcgtgcgtgacatgagatcct

SEQ ID NO: 227364 - DNA, 450 bp, Glycine max
aagctcgcttcttaccattccaagaaactaggtctttccgtatctattttgtagtaccacgagagttcttattatcagacttgaatcctgcccagtccttatctgagttacgcagaagagatatcgtaacacccctcaagtgccagacctcatcatccaaagtgatctgatgaccatataaataccgcaaaccgcgaccctgtaagaatagattgggagatgcacacatgcaaacggtccacttaatgataggtctactagcagtcaagggaagtatggaataaatgataccttgataccttgttggatcaatagattttcctattatattagcactaagtgtgcaataagcatcaaaatagttgctgcctgcttgatgtgtccttctcagacctttcataagatgattgtgtggacatgcgccgtcacactgtaaagggaattactctc

SEQ ID NO: 227365 - DNA, 314 bp, Glycine max
tacctcatgtactcctctaatgactatagctatatttctggcgctaaactgctgcgagatggtagccatcttctcaactaaatttctggcttcagcatgagtcatgtctccaagggctccatcactggcagtatgtatcatacttgtttccatattactgagtccttcatacaaatattgaccaagaaactactccgaaatctgatggtggcggcaactggcacatatgtttttaaatcgctcccagtactcatacaggctctgtccactgagttgtctaatacctgagacatctttcctgatggctgtggccc

SEQ ID NO: 227366 - DNA, 284 bp, Glycine max
tgaatggttcgttcagtctgaccatctgtttgaggatgataagctgaactaagcttcaactttgtccccaaggcttcatgtagactcgtccaaaatcgcgaagtgaacctcggatccctgtcagatacaatactagaaggaattccatgcaaccttactacttccttgatgtacaactccatgagtttctccattctatacttcatattcactgggataaaatgagcagatttggcgagtcgatctactatgacccacactgcatcatgtccacgactagtctt

SEQ ID NO: 227367 - DNA, 376 bp, Glycine max
tactaagcttcaggttgctcattgactccaaattgttgcaaagaaggacaattatctgtatggtgatctgcagaagaacatagaccacagactcttgcaacaggtgtagatttctgattcatggcaagctgggttactaggttgaccaaggcatcaagttttccttcaagctttttatttttagtagatgaagatgaatccgtggccacctcatggactcctctaagaacaatagcatcatttcttgaactgaattgttgggagttagaagccatcttctcaatcaaattcctagcttcagtacgggtcatatcaccaagagctccaccactggtagcatcaatcatactcctctccatgttgctaagtccctcat

SEQ ID NO: 227368 - DNA, 203 bp, Glycine max
aatgtgctttgttctaaaatctacttatcatctaacacatcatttcttggacaaatagctttatactcatgaaatgaaacatgaatccactcttcagttgtcattgttctcttattatacactctataagctctactatgcaaagaataaccaccgaaaattcctccatctgacttagcatgaaactaccctaagtatccttt

SEQ ID NO: 227369 - DNA, 422 bp, Glycine max
  unsure (1)..(422): unsure at all n locations
gactatggngtacccatcacatgtggtactaggtggctgtcgggcgatggtgcacaactttcttntccacatccacaatgcgcgcataatctcaccatcccctgttgcccacctacaactgagctcacgtactcccacgtagcccatatactcgtttctctcatcaccgggtgcccatcagtgctcccgagcttccacaacatccaagaaaaacaccattcacacagcacaagctatcacacccaagcaaaacagagcacacgcagaaaactctgcccaaacaccaaccaaaaatcacagcttttcccactcaaagaccccagtaacaattccttccatccaattcgtaaccgttggatcacccccaaatcttactggaagtctatagtgcataagcctacattttgaccgttgggatctac

SEQ ID NO: 227370 - DNA, 257 bp, Glycine max
  unsure (1)..(257): unsure at all n locations
acacgacgtacataagacggacgcgtgacaatgtatgctaccttcctttgacagaagacacggtggtgcgactgagatgcacgctagcactcgatggggggttgatagcataattctcagacaaacttggagatagcttgagcgaggtagccattatcacgcanaaggggcatatattgaagcttaatgttaacgttggtgggcgtgcacaaatgtctttgataatcacgatttctactacagtgattacaaataca

SEQ ID NO: 227371 - DNA, 395 bp, Glycine max
  unsure (1)..(395): unsure at all n locations
gcatgcaagcttgacaactttagcccagttaatctcaacattatttgctctataacccanatcatatgccatattcatatcaaatagaatgacccanagctcaacctttagaatattacaatgcataagtctccttgaaaacaatttcagaaaatcacctttactattctagagtgcaacacaacaagcagcaagggctgctaaggcaaggtaagagtcatcacaattaatttttgtagtactctgcagaggcttcttccacctttcaaatgcatcatggttgccatatcatcttttggtgctaatatcatatgagtgagtttgtttctacatatatcatatacaccactccaaacactcaacactagacccagagtgtatgtcacttattacta

SEQ ID NO: 227372 - DNA, 287 bp, Glycine max
tcaagagacagtgcctgagctgcttaaaaactccttgcttgttatgaagatgaggggtatactggcccagaggagtgccttgggtggtgatagtctgtgggaacttacatggctacacgtgaataacatttcaccatcattgcaacttgaggtattccctgagcaggattctgagcatttgcagcacaaacagggtgaatcaataagtttgctgcctgatgaaaagggtttcgtgccttcaagtgaaacaacaatctgcgaacatgctggcattcgttggtaactat

SEQ ID NO: 227373 - DNA, 406 bp, Glycine max
  unsure (1)..(406): unsure at all n locations
agcttcttatccaaggcaattcttggtggtgaatctctttcttccttggcttattccctagtggatggtgcctcccctctcctcttctcctttgccttccgctgcatctctatggtgaaaaatcaccattgaaggacctcattgatgctcaaagatccagcctccatagaagctccacaagcaagcttccatcagacccttcctttggtaattgcataaaaaaaattggacccattccaaaatatttctctcccttttaaatggtccttaaagtaagaaaattggataagtaatttttgaaatattaaaagtgaaaataagtagtcttctaagtattgaaaaatgtattaaattagtctatgcatgtaaagatggatgttcttttgcaacatanataatatgaata

SEQ ID NO: 227374 - DNA, 456 bp, Glycine max
  unsure (1)..(456): unsure at all n locations
gtctcataagtcctanattatatttcaagctagtattaacttactttaacctccatttaccacagaattcagacttagccttccaaccctcagagcctcactctttttttttcactcataacaccacattctcactttccaaccctaggttaactctatatttcatctctatcagttttncttcagcaactttagcatacaaacatcacacacatcatcacaaaaccctaaaacagaatgggtatgtctaactcacccaaacatggcaatttcaacaagctttcaacacaagtcttcacaaataatcatcacacagcagaaacctagcaagactacccatcatatctcccacaaccccatacccacgagatttaagagagagagaagtccacccaaacctgagatttcgaagtcccactcgtagccacgcacttcacgaccccgaaaattccctcc

SEQ ID NO: 227375 - DNA, 380 bp, Glycine max
caggcatgcaagcttcattcctttctcactcatgtgtccaagtttttgatgccacatggtcgaattattgatagcttcagtaactgctaccttatcctcatctgcaagcatgtaaagaagaccttgcatttttccacgagccacaacgagattgccttttgttaccttccaagctccatcaccaaaagtggtgtgatgtccctcattatccaactgctctatagatattaaatttatctttaaggcgggaatatgtctgacattgtgcaatgtccatagggattcactggaggtcttgatgttgatatcacctcttccgacaatgtcaagagactttccatctgcaaggtaaactttcccaaatcttccagaaatatagc

SEQ ID NO: 227376 - DNA, 454 bp, Glycine max
ttctgctgtgatcagcattttctcggtgtgtgtgatttttgatgacccacaggatgatgacacacgtgatgaactacaggctcatgtgaatctgagaacatttcgcgagaatcccgactcacgatcacgattcaggacttaggaatcacgactcaagatctcatgactccagatcaagattcccgacttaagatctcacgactcaagatcaagattcccgactctagatttctagaatgaatatacgactctatcctgatcagctagctttttgcggactttgaatagcgcatgacgttttgacccacgctttaccaaagagctcctactgcttgctaatcgataccacattgctgtcattgattacctcagctcacagaggttgcaccagttctcacactgaatctaccacgcttccgatatattacacaggtcggatcgtttccatgtttcg

SEQ ID NO: 227377 - DNA, 172 bp, Glycine max
tgttatggttgcgtgtctaagagatgaatgcttgggaggtgtatattcggctcgttatgctagcacctccatgaacgagtggatgctacatccagagtgagagtgagtctggggtacatggagcctgtgctgagacgaatcgggcgaccattaactgcctgtgatgagtata

SEQ ID NO: 227378 - DNA, 184 bp, Glycine max
tatcttaaacttttttgaccatgtatttacaggttattacgctctgagttcagcaagtcatcgtaaaactgatgatgatgatgataacttacacggagttcttgaggcgatgatttcgcgatcctagctaatttgattgtggtcacaaaaggattcatcacaagaggtaagacaaactcctatt

SEQ ID NO: 227379 - DNA, 499 bp, Glycine max
  unsure (1)..(499): unsure at all n locations
cgcgcaaccncgngacanctttgatccccttgcganancgcgactctatataatactcaagcttgtgaatgagtgtgaaacaatgcttaaccaccttttcccggttaacgatccttcgacttctggcgaggcaccctccacaagctgagggagggatgtgatgcttcaacttctaccagcaccaagagtattgatcatctgctgatgcctaatgatttagcacctcccaaccatcacattgatagcctttatatgaggagaaccactgtcacttagcctgtttggcacgatattctacagggaagctaaccatgtagcatgttttcattgccaccatcgcagataagtggcttggaagaacatggaccaaaatccctatcttggaacacaccgccaagtaatgtgctcgatacattggcgattgaaaaccacctacttttagtggcttgcgagcttcacctctactttatattttttactcttcacaaactaccgcccc

SEQ ID NO: 227380 - DNA, 484 bp, Glycine max
  unsure (1)..(484): unsure at all n locations
tgccagcgtacatntataatcgacctgcacgcatgcattgctatgcctttattatgcaactatgacatattatgtccgagaacaccattcctaattaccatgcattacggaccattgtcaattatctttgttttaagtgaaacgggttatgatcccaacatggtgtggcttgggtgcctaacacatgaaactaagaatgtagtgaagtttcaccttctccctctttggttttggtttgtataggaagaacgcattgaatgancaaaacatgaaaaacacatgggtgtgccaattttggcagcatcacaataggttgtgcttgaaccgcttattgcactgatggatgccaatgacttatagcataaatgtgaaggctggaatatgatatccggaccaatgcncgattaggtcaatcttgatgcaatgacgagatgcttaggcgaatcatgagtctgatgcctttcacggaccggatagcctgacg

SEQ ID NO: 227381 - DNA, 321 bp, Glycine max
ttatgcgcatatttccttacaaacgttctcttgcacaagacattctattaaccgaaaaaatgcacccatatacaatcaaggcagcttcgttacctagattatttacacgtacttccaaggtgtatttgttacttacatcacacacctccttggctaaactcacatacatgcatactcaaagcattttggggtaccaaaaattgcacatgtgcacatcttggtatttctaatacctatacatacacaaacttcatgatgaatcttaactatctacacaataaggtgctacattttatgctcttttcaagatttagctaccta

SEQ ID NO: 227382 - DNA, 276 bp, Glycine max
tgcgcaatccgtgaaattctgaatgtgtcggaaatcgaatttaggtgtttttgcgcaatgcgtgagtttccgtaacttcttcgaaagctaaaatagagtaaatacataatccgtaaggattcgtaaccttgcggaaggaaaataagtatcgttacggaattcgtaaagtttcgtaacgttacggaaaaagaattaccaaaaaaatagaaaggcgggtgcatttagtaaaaagggggggtacaaatagcaatctagcccacttgggccttccagatc

SEQ ID NO: 227383 - DNA, 430 bp, Glycine max
  unsure (1)..(430): unsure at all n locations
gacttttaagctgctctctctacctttataaatgtggttctaaaatatttcacaagtcatcacttactagatcttattaccaataaattttcaagacatacttgcatgccatgtttgcaactttgaataattttttggcatctgtttctgttactagttttctttcaatattaacacatggttgacatcaactagtagttgatgacaaaatattgcacaggaaagagataacatgtgaagaagttataaaagattgatgagccatgatgacgtcatctaaaagaagaacaagtcaaaacattcatcatccaccanagaaacaaaaaggaggtaaaacttacccttaacttgttcatcccagcatagcttagtagccaaagtggttttccccattccacccaaaccagtgagcagaacaactgacactcca

SEQ ID NO: 227384 - DNA, 450 bp, Glycine max
  unsure (1)..(450): unsure at all n locations
gaatagtgtaatcaattagattcttgatttaattgattaaagtgtttctgatcacttctgggaacactatcaagaagcattcccctatatgtctgcatcttgttgtaaccatctgtagtttcatcaaacttatggactccacctatgtctagaccagcaacttccttccacatggaaacatctgcgaccatatcgactccattaacaatatagaagaggttacgttcaaggtcaacatgtgcataagtgtagaatactttgactagttttatgttaaatgtctctttcatccgcaaaagctttgccagcccttgaacttccagtagattgggaaagttaaacccttgctgagaaaaccattccaagtccagatacttgcgaactttcatgtnttttacaacataatttaacttgtagtcgctcttctttccttaatctgtgaaccatgta

SEQ ID NO: 227385 - DNA, 264 bp, Glycine max
tctgaacgctgtttaagtttctcctgagacgtgttctctcgaatggctgcactccaagacattgcacgatctgccgtggatcttaagagtcggagggcccaagcgcagtccgacagcttcttattaagcacttcagcctatgctttcgcgtcgcttacataaaaggcacttctcttcttctttctgcaacccattttaaagccaggatcttttcctacccacgtcccacaaccttgtgttctcttgaccccccccgagggaccc

SEQ ID NO: 227386 - DNA, 265 bp, Glycine max
ctctctctttcgaatctgcttaggaaaatcgttttcgtgaacaaaatccaagccgaggcgcttccgtaacgtttccgtgagtgatttcgcgaaggttttcgaccgttcttcgacgttcttcattccgtcttcatcgttcttcactctttaacgggtaactaccttacaccaaccctttcaattcattttatgtactcgtggtggcccacatttggtttcatgtatttttattctccctttcatctactttctataccaccttttg

SEQ ID NO: 227387 - DNA, 346 bp, Glycine max
  unsure (1)..(346): unsure at all n locations
agcttagatgcagaacaagagaggttacatggatatataagagatctcgagcaaaataggtcgcgtatgatataatttaaaatgtaagtccaacattggttttcaatacaaaaccgatgttaacagaatgatgttaacgttaacatcggttttcttcaagaaaccaatgttaactggtcatacgttaacatcgattntcagaaaatcgatgttaacgaacataggttaacatcggttttcttcaaacccgatgttaacgaagagatattaacatcggntttggaaaaaccgatgttaacaaattaatgttaacataggttttacaagaaccgatgtaaacgtcact

SEQ ID NO: 227388 - DNA, 446 bp, Glycine max
  unsure (1)..(446): unsure at all n locations
cgcttgtggagcttctatggaggctggatctttgagcttcaatgaggtccttcaatggtgaattttcaccatggagatgcagcggaagacaaaggagaagaggtgagaggaggcgccatccattaaggaataagccatggaaaaaaagagcttcaccaccaagatgagccttggataagaagcttggaaggatgcttcaatggaggaaaagaaagagggagagacagagagaggggggagcacgaaattgaaggaagaaaaagggagagaagttgaactttgagttgtgtctcacaagactctcattcatcanagttacaacaagtgttacacatgcttctatttatagactacgtagcttccttgagaagctctcttganaaaactctcttgagaagcttctctgagaaaactctcttgagaagctagagcttagctacacacac

SEQ ID NO: 227389 - DNA, 419 bp, Glycine max
  unsure (1)..(419): unsure at all n locations
gaagtttgtttttacatgccgaaatatctttagtgtaacttgtattgagtgttatattgtgtgttgcatcttagtatctattatttcatatgtgcatcatgcctcatcatgtatgagtaagaagaaatgtttttgaagttagaataactcttttgaagttaaaactctttgttttaatagattacatgttgatcgtaatcacacaagtgtttgtagcttgcagaanagtccctcgtatcggtttaatcgattataggcttatagtaatcaattacatagttcttttttagaacaatgatgatttttcaagagtctctactttaatcgattaccagtgatataattgattactcctcttttaaaagtgtgttagaagtgatcaagagcactntaaccgattacatcaagaatctaattga

SEQ ID NO: 227390 - DNA, 360 bp, Glycine max
  unsure (1)..(360): unsure at all n locations
tttgattcttaattttggtgtacgcggagagcttgagttaaatggtgcggcccatcccaaatggataaaacctagaggcatactgacatttgagaatggtgaacttgatctatttgccacacaggtatgtgtaatgttttatttttacaactcctgtaaattgtaccctgtggcagtgcagtttctactaggttggntntcttttggttcgtcttgtgtatttcttgacacatgttgatgttgatacaaaccatttcaaaatgcangtgaggctaaaacgagagcatctaaacattgcaaagtttgagcctgaatatggactagatccaatgctttgattagctttggttggatctgagt

SEQ ID NO: 227391 - DNA, 449 bp, Glycine max
  unsure (1)..(449): unsure at all n locations
cgatgccaatgagatgacgaacggctgttgacaacattttgatatcacgaaaccagcaactggtacagtagagaagcttggtggctagagacctgcggacgtagcgagggtgctattgaccataatcaggcttgatcaatgcctgaccacccctggcttagtcggtcagggagaacgtgtgacgtacctaagcacgcgagctcctgttggtctacagattacaggaaaacacgaccacatagcaaggaggcttgtggtggctgagccactgtgaatcattgtgtatttgtggattgcgtgcctctgcaatcaaacaacaaggagggtgatattactctaacgtgttcatctcagatatgttggtaccaaggtggttgtactctttcatcaaatcagttatcacatcatctgctctttctctttagatctngaatcttacctactaacgc

SEQ ID NO: 227392 - DNA, 293 bp, Glycine max
  unsure (1)..(293): unsure at all n locations
catgcaagcttatgcgcatatntccttacgaacattctcatgcacaagatattctattaactatagaaaaatgcacccatatacaatcaaggcagcttcgttacctagattatttacacgtacttccaaggtgtatttgttacttacatcacacacatcgccttggctaaatttacatacatgcatactcaaagcattttggggtaccaaaaattgcacatgtgcacatcttggtatttctaatacctatacatacacaaacttcatgatgaatcttgactatctacacaata

SEQ ID NO: 227393 - DNA, 248 bp, Glycine max
cttctacttatgtggcagggctgtggcttcttcactttcttgtcttaaccgcgagctttgacccccactcttcctttccgcgatgcttctctttacatctgcctgagtgggcttatagcctaaaccatacttcccacgatttcctttggcatttatcacgctagttatgccgccgtctgctttgactacatccattacgggttcgaaaccgctccccaacataacttgcgccatcattactgctgcat

SEQ ID NO: 227394 - DNA, 429 bp, Glycine max
  unsure (1)..(429): unsure at all n locations
caggcatgcaagcttctagtctcaattntagcgtctcgatatattacccaattcaatcggacatccgagtaaaaagttattgtcngttgaatttcctacgagcttctgttttcaatttggagcgtctcgatatattaaaggactcaaccggacatccatgtataaagttattgtcaattcatatttcttagagcttcggattaaaattttgagcgtctcgatatattacgggactcaatcagacatccgagcaaaatgttattgtcgtttcaatttgatacgagcttctattttcaatttggagaatctctccatatattacaacactctgtcgggcatccgagtaaaaagttattgtcgtttgaattctctaagagtttccgttttcaatttggagcgtctcgatatattacgggactcaaccggaca

SEQ ID NO: 227395 - DNA, 460 bp, Glycine max
  unsure (1)..(460): unsure at all n locations
cgaaggcacactggatgtgttggtcaactcggtaacccagctgttcttgaatcagaaatctgtacctgtcgcaagggttaggggatagtgctgctctgctgaccacgatacagacctttgcccttccatgcagcaacctagagcaattgagcagcctgaagcttatgcaggacatatatacaatagacctcctcaacctcagcagcanaatcaaccacagcagagcaattatgacctttccagcaacagatacaactctggatggaggaattaccctaacctcagatggtccagccctcagcaacaacaacaacagcctgctccttccttccaaaatgcttctggcccaagcagaccatacattcctccaccaatacaacaacagcaacaacctcagagacagccaacagttgaggccccttcacaaccttncctcgaagaacttgtgaggccaatgact

SEQ ID NO: 227396 - DNA, 319 bp, Glycine max
gcaggcatgcaagcttttaataattggctcagcttcctccatgtgtataggctccccagtcatggtagtctttgaaagcaaaagctgacaacttctaatctttgagctaagctcccaggcaaggtgaagattatcgtgctctttggcaataatcacataagacctggccagaaccatttgctctgctaactgccgtgaaaaggatgttgcacttaacatttcctcagtaaaattatatctcttggcaaaatgttcaactctagcatttctctcctgcaaagtaagtaacttgctctgtaagtacccactacccagaggg

SEQ ID NO: 227397 - DNA, 198 bp, Glycine max
gcttatccttatggcctgccttctggacttacttctccgtgccaccccggaagatttaagccaagcccctacttttgaggggcaactcccactctatgaagactatcccgggcaagacgatggggaaggagatactccatcttgccccctgctccacctcaaagatccatccccgctagaactaccccagccgaacat

SEQ ID NO: 227398 - DNA, 468 bp, Glycine max
  unsure (1)..(468): unsure at all n locations
catgtagctntctctagaagcttcattaagaggctgtctctataagcttcctcgtggcttctttgagaagctttctcaagaggattctttgagaagctagatccttatctatccacacccctctattaactaaattaacttccttaaaaataattacggatgaaaataacgcaacaaataatcaaacatcaagcataattactaataatatatatatatatatatatatatatatatatatatatatatatatatatatatatatatatatatatcgccggggccgcactanacgcctaccatctactcgcttcacctattgactcctgaatctttaccaaacacccacgcctgacccacttccttctcgaactctccttcacctccccactctattcctcacccgtctccgactggccacctccgcgcgtgccctttgctcgtccctcagcgtgctgactctcctcc

SEQ ID NO: 227399 - DNA, 200 bp, Glycine max
cgcctttagacagctccacccaagtgcggttactggagttgcccgtggagaattctctatagggccctctcgcgtcgttcatctgttattctggggtaggctccgggtcactctacggcatgattagttgctgtacaaaattagtggcccgtcgggcgcgctttgcataatctttctaatcatcaaatgctccgctcgct

SEQ ID NO: 227400 - DNA, 106 bp, Glycine max
  unsure (1)..(106): unsure at all n locations
cgcatattaagcatacccgaaactcgccaacaccccgtgactcctantcttgtctatcgtcgcatctcactctcttgcttgcctcctctcgatcctttaccctacc

SEQ ID NO: 227401 - DNA, 186 bp, Glycine max
aaggcttgtgtatgtacaatcatggccttcattatgttctcatttatacatttcattctaaaattcagagattgatgcaaagattattactccaagctagtcgttcactcacagagtaaggtcacactctcaccggttctgcgttaagcttttctctctcaatcactatgtatactgactaacaat

SEQ ID NO: 227402 - DNA, 335 bp, Glycine max
cgcgtctggaatgctgactcgagagatcttgacaacccactctatttcttttacgccatcacactcaatgcttgaggggtcgtacatcatacaaaatgggaatccccactataccgactcaagagacagcgacaactcaggcgtaagcatttatgccattaggctaaatgcttgaggggatatactccgtgcaagatgaatatcctagtaagaatgactcaggagacaaggaagactcacccttaagcattttatgcccaaggataaatgcctgaggggttgtacaccagaccgatatgagtattttggagatattgcctctagtgaggagatga

SEQ ID NO: 227403 - DNA, 279 bp, Glycine max
tctagccaaatggacttaccttgaattaattcctttgatatctcttttcgagccttgtttacctttccttggtttgaagctcactacaagccttatatgaaaaaccatgatatgaccatattcttaccgaattttggagctttggaattgttttgggaataagcgcggggggctttttgctctattggataactcgttctcgtggctatgctttatgatgtatcttgcgccatacttcatgtacattgtatattgcttaaatgttggacatgctgaatg

SEQ ID NO: 227404 - DNA, 120 bp, Glycine max
ctgtggatgcctttaaaatttaaggctgatgtcaagacattatgtggaaagcaaattaagatcgtgagatttgatcgatgtggagagtactatggcatatacatggacaatggacaagct

SEQ ID NO: 227405 - DNA, 162 bp, Glycine max
gactatacgaggtatcttccttgcgtatagcattatatctaagggctaccgtgtcttctacttgcgaactaagaaactcatcatcagtcgagatgttgaagctgatgagtacactctttggaattgggatgactcaacacgcccgaacaatattcttatccc

SEQ ID NO: 227406 - DNA, 238 bp, Glycine max
gaataataatcaaatattactaaaggttacattatcatttataagtcaaaaccaaatagaatccagtcataaaatactaagtgccaaataccaaaatataactaatagtcagagaatgataacttataaagcatagcccaatacacggcttaaaataaataataataataatctaaaactatgaaggtggtggaaggtcgagcaccgaccaaaataactcacatcctcttcaagctga

SEQ ID NO: 227407 - DNA, 348 bp, Glycine max
  unsure (1)..(348): unsure at all n locations
cgctacattgatgcatcttggctacggaatcttcgaattgggcacttannatttggaggcttaagtctgctatcaaaggagaagatggtaagaggactaccctatattaatcaccctgatcaactctgttaaggatgtttacttggcaagaaatttagaatgatttttccaaaggagtcaaactcaagagctaagaagccacccgagctaatacatgttaacgtctgtgggccaatcaagccccaagctcactacgtaaaaataaatatttcctctttctcattgattatntttcaagacaaacatgcgtctatttcttaaagcacaaatcataagtcttttccacct

SEQ ID NO: 227408 - DNA, 400 bp, Glycine max
  unsure (1)..(400): unsure at all n locations
atcttaagtcgactgcagctgcagctattatttcanaacgagttttgataatttatcattataagaacaaaatatatgcatgttgaaatttataagaatgaaatctaacattatatgatataaacatatctttaaggtttgatataatattcataataacctacttaaaaatatattttgaaataatacatttaaataagacataagcttattttttaataaacttaactataaaatttagtctaccgctttatataaatcaacatgattaacattttaaaaaataaatacatgtaagattttaatgtattatatcaaatttaatataataataacactaataatgaatatttatttatgaacttttaaataaatgatcttggtaagtctaaaaaagttt

SEQ ID NO: 227409 - DNA, 458 bp, Glycine max
  unsure (1)..(458): unsure at all n locations
ntcaacaacctccttctattctcttggagctcgagcacaatatttnttaagtactgtctattgttacaacagtatcattcgtctggtgcgtatccacctatattctaaagaaaggtactttcatgctaacaagctggcacattgttgtgcccataccacactttgttattctcggcgggattctatctcacctcttcgttaagcatgactctgttacgaatcaaattctctctcctgcgtacaagctttcgtatcttatcttgagggtcttgggctgatccttncatctcgctactgtcgtctctctcctcacacctcacacttcataccaaaccacgcacacacacgctcggttgcgctccccacgcaaaccgcgcactgtccttctccgcgcgcataactctcgtatcatcatgttcgcatccgcagcgatctgactctctcggcattctctaccg

SEQ ID NO: 227410 - DNA, 395 bp, Glycine max
agcttcatgcttaagtatgtatggttaaacttcattactattgttcaagacatactagtgagcttgtaataaatcttctagacttggagtgatcacatgcagtcctcttgaacccttaccacccactctgtcatcatgccgagactcaggaaggccaataggtttagccttctcaatgtattctgaacaaaatttaatggcttcttctgcaatgtacctctcaataatagatgcttctggacgataaagattctttatatacccttttaagatcttcatgtatcgctcaaccgggtacatccacctcaaataaacaggaccataacatttgatttctctgaccagatgcacaatcaagtgaatcatgatgtcaaagaaagcaaggggaaaataca

SEQ ID NO: 227411 - DNA, 358 bp, Glycine max
tcatcctcctcacgctttgtttaaccggcgaacacttaggatttagaggtaatctgtgttgtacgatgtccgaactcaaaccgggcatatcttggtatgaccaggcaaagatgtcttgatagttttttagcagggccatcatttcttcatggatgggtgcgatcatacccgtgcctatctttacttcctttttcccactattggttcctaagtccactagttccgtctcttcttgatgacggcccatctcttcgtcctatgggcaactatattcccaactctggggaagcccccaccccatcctcttactttcccccgacccgttcttgctcgcaccacggcggttccactataaccc

SEQ ID NO: 227412 - DNA, 421 bp, Glycine max
  unsure (1)..(421): unsure at all n locations
aggcatgcaagcttctacttcagtggaattagggtttgtgccatgtcaaagaagatgagacgcaggattggcaaaaggccatgcttgaaggattcgcgccttgngtgaatcatggtggttgggtcccttgccaatgaagatggcatgcacgacaaaggaggtcgaggagctaggagggggaaaagtctacggggaagaggtggtaggtggcggaaatggaagatgaaaggacggaggaggagaattctcaatgtttgatttatatatttatttactttaattgattctaacaattttttactgtcagagaatttaaatatgattttgaaacaaataccgacgaatttttaagctgtcacaaattgcgctatcaaatatttaatgaacacatcatcacttaacgtgacgacagaatctaaaa

SEQ ID NO: 227413 - DNA, 452 bp, Glycine max
tgaaatgcaaatttgtgttgagagtatggactgagattcatatctttgcatgtctacggtttctagagagagacaggtccaagttccagagagttttgagagatcttgctgtgtgaagatctgcagagaccagagcttgaagcaggagctggtttaagagcttgagatgagtctgtaagtgattgtgagatcctagaggtgaaggagacatcctcaccacttgtatttttgcaatctttcatcttgttcttctctttggtgctaagaaggcttcctggtatggaaagctaaatcctctattggatcttccctgtaggtacctaatgtaaatatatttctatctatttaatgatgtcttgtgtgttctctgtgctatctgcctttcattccagtatgtctatatcttgatcacgtagatgcatgcttttgtacggtcattcaacagtggaaac

SEQ ID NO: 227414 - DNA, 189 bp, Glycine max
catgcaagcttgtaattgataactgaagctctgagcacattcatacgacaataacttctatctctgatgtccgattgagccctttaatatatcgagacgcttgaatatgaaaacgcaagctctaagaaaagcaaacgacaatatctctatactcggatgttcgattgagccctataatatatcgagacg

SEQ ID NO: 227415 - DNA, 371 bp, Glycine max
  unsure (1)..(371): unsure at all n locations
ggcatgcaagcttctaccactggtatttaatctatntttatcttagaaaataaataagaaaattgtccaccggtttaccaacttctcttatgcctattgcctaatcctaaatttctgatttcttttaaaaaattacaccatactatatgtacagtatatgattgggtaagaaaaaataatttagactaaacaaacgtatgtatagtattacgatttaatcaacttaatcatagattattggtcaaaggatgcacttattcacacacaagaaatactattatgattgaaacttacttaatattcacataaatatttaaaaaggaatttatgactctgaaagttaatcttcatcgtctatttttatatcctat

SEQ ID NO: 227416 - DNA, 177 bp, Glycine max
  unsure (1)..(177): unsure at all n locations
tgcaatgtattgctcgacaaggacatgaatgctngttggttatcttgggcttgcaaggctgcatcaccatgaacatgtggctgacacaacaagagtgatagggactctggggtacatggcacctgaacttgtccgaatcgggcgaccatcagctgcatgtgatgtgtatagtttcgg

SEQ ID NO: 227417 - DNA, 359 bp, Glycine max
  unsure (1)..(359): unsure at all n locations
atcttctatataatctgaactattntatcaatattcacaagttgagttttattcagaanattagagtttatctcttttatcttagagagagtgattctcctaaattcttgagtgattcaagaacaccctggctgtgtcaaaggacttttacaacctttgtgtgttgccctcactggaaagagtgattctttccttcctttcatcttcacccttgttctttcaaaccacaattccagaaaatccacctctgcccagaattatctcgtggccataactcccattttacgtactcaaattaagtgattcttgagcctaaattgactttcaaaacgagacctttcacctcgttttggaatcac

SEQ ID NO: 227418 - DNA, 158 bp, Glycine max
gcttcttcccgttcgtcgtcatgcaggttgtcaacatcttcattaagcctctgtctcatgctctatcttcaggctgatattccaagctgtgaatgatgaacatgcagtcccagcttgcggcggctctcagtcgaagcctacgtacgctggataatcaa

SEQ ID NO: 227419 - DNA, 264 bp, Glycine max
  unsure (1)..(264): unsure at all n locations
ttcttattggattataacaacgcccagaatntattcttcttcttattttcgcatacaaattattttatcactaaattgatcatctctctaacgactgaagagatcaatacaatatatatttacgtatttatctgagacctgtcgtgatatttgtttaaacaatgtacatctatatatttttaagagtacatagaaaaataataggactttaaatttaagccatcttcttgctctgttcagcacctttaatttcaaaatcaattt

SEQ ID NO: 227420 - DNA, 623 bp, Glycine max
  unsure (1)..(623): unsure at all n locations
ctccgcctcgacgtcgcgngcgcgccatacacccgcatcctgacacatgtcgntatnatatnnnnnnnnnnnaagggacgcgctagtgggngcatngnaggaggccgnccgttttgaaaccactctgcacnncccncncacncacgcccgcccatttgaaacccttcgananncnccnttntataccgaactcaagctcttctctctccttcgcaaccgcacaatcgaagaagcacggctctcctactcccacccacgcagctctctaaactcaactggcccagctgcttggcccctcaactctcttaccagaacacactctcttctctcacgtgcgtccaggccatcactatgtgccgcccgaatgagcgtcaacttaccgccctgacgccacctgtctcaactccctcgtcgtcttccggcaaccacacactctatgtcgcctccctccttcgctccagctcacctcccccaccgtaagacccgcacactgtcgtcgcccgcctcgcttcctccctgacctccacgatggccccatcgaggcctctgcgacagcactanaaaatttaaaacaccttattctcacaagatctaacacttagaagtacaactgaaaactaccg

SEQ ID NO: 227421 - DNA, 435 bp, Glycine max
gcttgtattgtgtgagcttgttgtagcatgttatgtttgctgttattttttaattctttgaccctttgaatggccaaactggattttgatgtcttcatgagagttgtagagaattctatccttgacatttaggtactggtcttatgtcatttggaccaataacacataataaatcttcaaagcattgcacttacgttatattgtaaggataaaataacatctttatcttcatgatcagtttcttccaagatccaaaccttattagcccctaacttcttcatgaaagatgtatatctttttcttagatttccacatcaattgagataatatcaaatacacttttgtagcttaagcagtctactaattactactacacacatatcaagttgtctaggcaaaccaacgtctgcaactttaggcttaattttatccatg

SEQ ID NO: 227422 - DNA, 455 bp, Glycine max
taagataatcatgcttcgttgtcctatattggtgccttcttaatcacagatttgtaagttgtaattctttgatttcggtgttttcgcctttaattaattaattgtttttttagtactttgtaagatagtagcatgatgtgctgctagctgttgcctattagatagtgacatacattctttgccgcgtatgctttatattctatatctatattcggtactaaaagtcaaaataaaggaaaaaatatatctacatatatgtgcagtaagatgcttcagctttcctttcattcatttattgaagccttaaattgtttgaagtttacttaaagattgtgaatattaattgtgatttctgaatttctttctcaaagcctcctttggacactcatatttatttatttgtcatttataatattaaaatatagacttaaatatgaattattattatgaaataa

SEQ ID NO: 227423 - DNA, 240 bp, Glycine max
  unsure (1)..(240): unsure at all n locations
gcttatcgtaatcgattagacaattattgggatataatgacttgttnttcaggagtctctactttaatcaattaccaggtgatgtaatcgattacttctctctaaaaagggtgtctgaagtgatcaataacactctatcgattatatcaagaatctaattgaacacattgttcttgcaagttatgcagattttgggaagaatactttattcgattgaaaagataatataatcgatttctt

SEQ ID NO: 227424 - DNA, 498 bp, Glycine max
  unsure (1)..(498): unsure at all n locations
cgcnccgggtatgagccccttgangtgcggcccattgagacacttgagcttacggcggttttcttatgctgaaagatccaacttattccttttctgtcagattgaccacaacatttttacatccgtggcaaagcccctatccttggtgctaacatacaccacccaagtataaacgatggcggtgatttccaaagatctccccagctgatttgtagaccatattagttggacgcttgttcaatacatgatgcgggacctaaatgtgtcctagtgcccaatcatgatttgcacactcatttactcaccaatctctcgctgatactcgccattaccaacctcgtggccccttcctgcccttccccaccttccaactacagcccatcgcaatcaccctctccttccttctagctaaacatgcgtccacctcaagtgctacctccttcgcttcgctccccctcctcacccgcccccgttttccttctcttcgcgccctcaccc

SEQ ID NO: 227425 - DNA, 103 bp, Glycine max
  unsure (1)..(103): unsure at all n locations
agcttgactaatcccgacccaacccgggcatagnctgcnagtgataacctgtgacgtacctaatctggcgagctcctgtcagtcaaccaataaaagaccaaag

SEQ ID NO: 227426 - DNA, 159 bp, Glycine max
tgcaagtggtagctcctccagtgaccatcttgtcggtagagttgtctattaaaaaggtatcctgttctgtaaccttaccttctactgcgaaagatgttgatggccccagtgcttaagtacctcaacaggtacatggaaccttacctctctattgcgaaa

SEQ ID NO: 227427 - DNA, 346 bp, Glycine max
  unsure (1)..(346): unsure at all n locations
agcttataatttaaaaaaatcaaattaattaaaatataaaaaagcgagatattttccacaaggctatctactttggtactatgtcattgttaccctatgtcggtgttactctgcgtaataataaacattntgtatgctatctttttcatatttgttcaagtttgattctacactcccaccatatcaaccattatcatactaaactgttttcttctaataatggctgcaacaacacgttcccttgcatccatctacgatgtgttcctcaacttcagaggggaagacacgcgctatggttntactggcaatctctacaaggctctttgtgacaagggaattcatacct

SEQ ID NO: 227428 - DNA, 463 bp, Glycine max
ttcttaactaatcccagaacaacaggcaagtaatcctcaagagcctgcagaaggtcagtcagtgttgaacctcctgcagaagaaatcaaacgatgccgatgcatcaataaattagagtaacttattcatcataaaatcatgttgttgttggtaaaactaaccatgctgagtttttctttttgttcttgtaattgtaggaccttcttgaccagccattacaactatacgcgttctaagagcagacaggcgttccactatattcttggacaaataatcaccaagtgattgagcaaaatcaacaggtttaggaatcctcaaaccaggaacatatactgaaagttcaccaatactcccctggcctcttctatttcaccagagtccttcggagctgacaccacacagcccatgtctaaaggctcactgtatctgctgaatgctggcacagataagataaagagaatca

SEQ ID NO: 227429 - DNA, 70 bp, Glycine max
agcctcgaagacctttccgtgcctcgacactcactactagccctaagggaaaaaccatgatttcgccata

SEQ ID NO: 227430 - DNA, 525 bp, Glycine max
  unsure (1)..(525): unsure at all n locations
cgcgattgaaaacccttggaannagcggatctttgaacccctccactcgcactgttctatcgaagactaacaacttgcttgtgcaaagctttaacactgtcatcttcctattttccactctgttgggcggcattcggttggccgttatataggatgttgcacctgcgccgtattatatgatctgcgcatcatgcataaactcgggtcagagagaaaaaacgtgcttgcgatagaaccagctctcaggaatgacgaccctgagagaagttgatatccacgcctcatcattcaattacatacctgtctctaccccgccaccgcatgttatgtatgttggatcgtgaggcaccacaataatgaaaagcggcgggaccaacacactacctctaacaccttaccacgctcaaatgaatcgttatgcgcattgcgttatatcgacgagtgccgaggagatactacctcctgatcggcgggccgatcgtccttatggtgtcgcgcggcttataccacctcgcagaatgaccg

SEQ ID NO: 227431 - DNA, 301 bp, Glycine max
gcatgcaagctagcagtagtgaaagtagctttatgtgatgttatggattaaaaactctctcttgcggtaaaacggcacgcctaaagtattcatttcatactacaagtaaacaggtatattcataccagcacgcaactggttgaagctataactgcccaacaacacacaaggggactcctccagcattaacgtgattgaagcatgtgacgatgccatacactaatctgatgaattatcatgtcgtttgaaagctcgaggtgctatgccctgcacctacataacacctacattatatgctctt

SEQ ID NO: 227432 - DNA, 600 bp, Glycine max
  unsure (1)..(600): unsure at all n locations
catctcacctccactgtcgtatgccntcacctatttancatattcttttcccccctcancccnnnnncacccggccccgccgattgagaccctgcnannngcngacatttgagacgcttcgaacnacacaccancatgcnacagccacgctatacacggagacgactcttatatctacaaagcaacgatctatttacttggcgtactgagtagtgcgacncggcgcttcactcaacacgatcacaaacctcctcgcgagataccaggaacacactacgcaacactagtgtcacgtcttactatctgtactgacaaacattaacccgtacgatggatagcttatgttgagccaacgcaccactgcatgacgattaagactaccttacggagctctatacagagaccagaagcttcaacgatccaacgaatcatcatgtcaaatccaaaagcgactcggcgcacacaaacaacggacaccacacgtatctccgaatccttttacaaaccaccaaggaactcagtcgattattcgccctcaaacactaaacttaacctacccccagataagcgcactaacggctctggcacgccttagccccc

SEQ ID NO: 227433 - DNA, 389 bp, Glycine max
agctttgatgcaacatttggagagtgttaatgaatcaacgagatgatgcgctccatgataggttggatcaaatggagaatagagatcataatgaagaagaaaggaggagaagagggaatgatggtgttcctagacaaaaccgaattgatggtattaaactcaacattcctccatttaaaggaaagaatgatccggaggcctacttggagagggagatgaaaatagagcatgttttctcatgcaacaactatgaggaggaccaaaaggtgaagcttgccgccacggagttttccgactatgctcttgtgtggtggaacaagctacaaaaggagagagcaagaaatgaagagccaatggttgatacatggacggagatgaaaaagatcatg

SEQ ID NO: 227434 - DNA, 446 bp, Glycine max
  unsure (1)..(446): unsure at all n locations
tatgcgcatatttccttacaaacgttctcttgcacaagacattctattaaccgaaaaaaatgcacccatatacaatcaaggcagcttcgttacctagattatttacacgtacttccaaggtgtatttgttacttacatcacacacatctccttggctaaattcacatacatgcatactcaaagcattttgggggaccaaaaattgcacatgtgcacatcttggtatttctaatacctatacatacacaaacctcatgatgaatcttgactatctacacaataaggtgctacatttcatgctcttttcaagtttttgctacctaaggccgcatgcaaattcaagtatattntccttcgctggctaaaattggattcaaattaaaagggatacattcttttggtaatgtatcttctttacatagcatgcaacatatttatgtatattt

SEQ ID NO: 227435 - DNA, 349 bp, Glycine max
  unsure (1)..(349): unsure at all n locations
tgcaagcttatgaagcctatttcgcaattanttctcttttattcgagtagcatctctactatgataccagttatgaaaacactgcacgaattctaaaatgctactcttagcagaagggtccatttggaacgctcatatagcaattcaattctaatccatatatcacgtattttatatatattcatattccccaagagactacttttcaaatataatttgattccatcaaacgtatgtgaatccacatagtaaaaatatgagagcatgtagagacaaatttgagaacagctgtggctcaacttgcacccaataatgagaatgactcttgagccatactctggggatacct

SEQ ID NO: 227436 - DNA, 148 bp, Glycine max
catgcaagcttcaagaaaaagatggcctcatcacacgccgcttgtttcagaagggaattctattattagacctcccatctataatggagagggttaccatcactgcataagccgaatgctaaacattattgatgctacctacctcaaa

SEQ ID NO: 227437 - DNA, 287 bp, Glycine max
ttccatcgcttcacacctccttcatgagcgtagtaagtgcacctactcgtagacgtaggatcaacttcactgtctcaatgatgccttccgatcacgtgaaataaagatcttcaccacacgacatcacaactacccccctctaagaacagacaggcgccacccatttctcgtacaacaaccaccaatgttcgctcataccacccgctttcaactcctaacctcaacctacctcaaatccaccaaactcctcgccttcttcatctcaccaaatccctcgagctcaacca

SEQ ID NO: 227438 - DNA, 354 bp, Glycine max
  unsure (1)..(354): unsure at all n locations
gcatgcaagcttgagggtgaggttgccggttctcgggtccgatttcgaggaccgtgtcggtggtgtttatcgcggatctccgaaagatggtgtccagaattcgagggttgatgaaaatgtgttggcctctgctcttgtagaaacgtagagcttcttcgccatcgccatcgccatccccatctccatgcaattgccgcactgatcgtaacctccgaggaatgaatccaactacgcgtctagaggcaccaagcatgtgccactctcatgtacantttttatgcgtttcccaagcataagcatagatacctagtttggttgctcctttcttccaaggcccatcaaagcccaactgga

SEQ ID NO: 227439 - DNA, 415 bp, Glycine max
ccaatatgaataacatcttccaacaatcaaaataaatatttattctataatgataaaatcattttcaattctttttaaaaaaaattaccctgtatgaaattgaaaaagtcaaatcttttactttacgtgttatttcaaaaatctaatatttctatttttcttttgcagaaatgaaatgacagctatacataaataggaatgacaatgatcaagatttacatagggtcctatagtattccttatataacttttaaaatatttattataaaaattaataaatttatggtttgatttataaataaatgacatattggaaagtgaaaaagatctttacactatcaatagatatattactttctatatttctcagaaaaggctatatatatatctatattatcacttaatagtctctata

SEQ ID NO: 227440 - DNA, 55 bp, Glycine max
cgcgtcctctaagacacctgcagcagcttgttgaagatatgggaacccatcacat

SEQ ID NO: 227441 - DNA, 527 bp, Glycine max
  unsure (1)..(527): unsure at all n locations
cgccaccgcaatgagccccctcgaccccggcgctcatgaacaccctgcacnnccnncnnnnnnngcacggacgttgagacccttgtanancccncatcttattgtatactcaagcttgagctcattgttgctgccccacacagctcctcgcaatttatctcgaccatgttcctccttgtgggcccttatggtttcttgttcaagggctctcgcagcggccgcgccttcctctcgcaacttggagcactctttccggatgtttgtagccgctgtctcgaattcactttgccgaggccccccttccgtacctctacctcatcacctcgctatccatcaaccgcctcccccactcgcccctctccccatccgcccctccccatgccccctccccccctagctactctcgcctcccccctcatcctcactcctctcaactcccaccactacccctcctcgcccgctctctgctccgcgccggccccacccgcctcccgccatcttcgccctctgcacctcgtcctctccgg

SEQ ID NO: 227442 - DNA, 298 bp, Glycine max
  unsure (1)..(298): unsure at all n locations
aattaataatactaaaattagatagacttgtttgaactttaaattggtctgatatctagtttggatatagtttatcaaattgcatttcttactacaccgcgataacatatattgtagtaattacaatgtttgcattattacattaattatactcgtcatttgtgtaatatttttttataatgtcaaattttaccaatctaaattntattaagcagataatatttatataaaaaacagagacaatatgtagataattagattaatttcttaagcatgttattaagagggtcttattctg

SEQ ID NO: 227443 - DNA, 380 bp, Glycine max
  unsure (1)..(380): unsure at all n locations
taagctacacagatccgtttgcatccatcaatatatttgcacatttaatatccctataattgagaggaaataattaggtagatacaaagcttgtttcatgacattgcataaatgaaacaaaaatacataaaagaatatgttacacaaaatatgagcatactgcacaaccctaaaaaaaacactagccagtaaaatatccaacacttaatcctcatgtgacatgtatggtttatgcagttcaagttccaaagacaaatgttccttatactctacatttagaacttttgtactttatttntcttggggtaattctcatctctccttttggatttagcgaatcattcagnctctcaagcttaaccttgttcaataccaaagaa

SEQ ID NO: 227444 - DNA, 456 bp, Glycine max
gctgaaagccacattaaccaatatgagcaactatgcatatttatctggaggaggcgtgaaggtttttgtatagacgcagatgctcgatacattagaggtaatgccatgagacaatgactcgacgatgactttatgtcagaagagggatgatgaggctggattggttctcatcctagctatcaatgtttaccttaatccaagacacgaccatacgtttgactcggaggacgaagatgggccccatatacattcggacaactatgaattgtggattataacatgagggacttattagcataacggatgtatagatggaggctttgttttacactccaaaaagatcgggactgtcttgaataatggtgtacacttgcaggcacccaaacgcccattcaccttttaaatgacgtgtagatgaaatcactaatatcgaacaactccctaacgactacagtg

SEQ ID NO: 227445 - DNA, 239 bp, Glycine max
ccacatctacaatgtttgcgttgagtcgccactgtttctacctcactggctaagctgcatcctctaaaaggatcctatgcatgcacgcagatgggctaataccacgaatgttcgctaaagttccatccaatggcccttttgtgcttcttgagcaccggcaacaacctctcatcttgttcacatcaatggaagcacacatgatcactggaaatttgatgcaatcctaccccgcaagggca

SEQ ID NO: 227446 - DNA, 333 bp, Glycine max
attccctttttgtttactctttataccccctgctgacgcgcttaagccattttacttaagtcctttctcgcttaacttaaaaataaaataaatttccaccgaacgtttgaattgtattatccattaacttcggctaaaataaattccgaccgttcggtcgtgccgtaaccacgttggaaatcaaaaagaggtaaaaaaaatattataataataatcatacaacatcctttatgtaaataaagcggataatcaatcggacatttcttctttgggatttctcattcttaatcgaattgattaataactaaagtgaaactaacgcttaaatcaact

SEQ ID NO: 227447 - DNA, 331 bp, Glycine max
tggacattacttcttctatggacgctatatctacgcgcataatatatcgttacgctcaaaatcgaacaacggaagctcttgagaaattcaaatggtcataaccctttcactcggaggtccgattcatgcgcataatatatcgagacactcgaaactgaacaacggaagctctcgagaaattcaaatggtcattacttttcactcggaggttcgactcaagcgcataatacatcgatacgctctacattgaacaattgatgctctttagccaatcaaatgggcataacttttccctcggaggtctaattcaggcgcattatatatctacacg

SEQ ID NO: 227448 - DNA, 401 bp, Glycine max
  unsure (1)..(401): unsure at all n locations
cttaacanaaggcattcaaagtgggtggaatttctagagcatttcccttatgttatcaaacataaaagggaaaaggtaatattgtagccgatgctcttcctcggcgtcatgcattgctttctatgcttgaaacaaaattgattggtcttgaatgtttgaaaagcatgtatgaaaatgatgaaacttttggagaaaattttaaaaattgtgaaattttttcagaaaatggtttctttagacatgaaggctttctttttaaagaaaacaaattgtgtgtgcctaaatgttctactagaaattngcttgtttgtgaagcacatgaaggagggttaatggggcattttgggtccaaaagactctagaaacattacaagaacnattttattggcctcatatgaaaa

SEQ ID NO: 227449 - DNA, 451 bp, Glycine max
  unsure (1)..(451): unsure at all n locations
ttgcatcaggatcagtttcagcattctgcatgagatggcggcttatagcccaaccaactatcttctctgcatctgcaatatagcaaaaatgttatatgagatatttaagcagcaaatccttaagcacatactggtagaaaatactagtatgtgctttcgatacaagtcacaagtgtttttgagatcttttctactggaaatatagagtttttttcagtagagaagctcttaaaagagcttctagccttgtatccaaacaggctctaagtgtctaatccttaatgcacaaggtctcgagtccttcacactccaccccacaacggctcanaacctataaataaaattaaatgaaaacagttaagaacatcatcacaacaattatagtctacacagctcaaaatatttaacatctttaattatttttntctttagtacaccaagtcatgaacat

SEQ ID NO: 227450 - DNA, 306 bp, Glycine max
aagtttaacaacctaagtagttttttatcattctccatctagctctagtaacaaatcattagatttgtggaagtttatgggtgcacacagaatatcttactacttatagatgagaatgaaactaaagctcattagtgtctttttctctcaagattttccaagtgttctgaaagctatataacatagagaaatttacaacagaagagaacttgacggaggtaaagaatatgcaattcaaaagcatcacatgagctcttcaaatcttctcgtatttataggcttcttcaacaagtaaacgttgtccct

SEQ ID NO: 227451 - DNA, 431 bp, Glycine max
  unsure (1)..(431): unsure at all n locations
catgcaagcttcccaacatccagcaaatttcatttatcatcacaagctatcacagccaagcanaacagagcaaagacagaaaactctgccatacaccaccaaatacagctttctcacttaaagaccccagtaacaattccttcgttccggttcattaaccgttggatcgactcgaaaattntactggaagtctctagtacataagcctacattttgaccgttgggatctactagcanacatccagaactcattctgtactactctttccacagccaatcacacaagcatttttctgcacttgtgcaaaattctgttgcacaatntcacagcaaaaatctgcacaaagtgcagatttcgaaaaccacacttncnctcatccaatcttgcccaaatcanatcctacaagtcccaaatcatgtatcaatcatgt

SEQ ID NO: 227452 - DNA, 432 bp, Glycine max
ctaagcttaccataattgtattttcttttaaagaattccaccaatttctaaagtgtctatattcatatctcacatgtgttggcttattgaacttttctgcaatatttgcccaaccaagcttaatgaagtggtcgtgacgtttatttccagcattcttcttcacctcttctatgcacactttcaacataatctctgtaacagccgtaacttttaataaataaatcagaaactaataaattcattaataagtaagtaaaaaaaataattacgtcataaattcgcactatataaaccaaatattaacctagagcagctgttagaaaacacatcttgttcctttcttctttgtctaacgcacaagaaccctaacagaacaatcataggtggagctttaagagcaccacatacccacaattacttacggaaacattt

SEQ ID NO: 227453 - DNA, 357 bp, Glycine max
aggcatgcaagcttagagccaattcaaacgacattaactcttttctcggatgtctgattgagactttttatataacgagatgctcgaagttaaatgtttaagctctgagccaattcaaacgacaataactttttactcggatgtttgattgaggcctgtcatatatcgagacactcgaaattgaatgttgaagctctgagccaattcaaacgacaataactttttactcggatgtctgattgagtcccgccatatatcgagacgctcaaaattgaatgttgaagctctgaaccaattcatacgacaataactttttactcggatgtctgattgagtcctgtaatatatcgagacgct

SEQ ID NO: 227454 - DNA, 389 bp, Glycine max
tacacattcaacttcgagcgtctcgatatattacgagtctctatcaaacatccgagaaaaaagttattgtcgtttgaatttgctcagaggttcaacattaaatcttgagcgtctcgatatatgacgggactcaatcagacatccgagtagaaagttattgtcgtttgaattagctcagagcttcaacattcaatttcgagcgtctcgatatgtgacgggactgaatcagacatccgagtataaagttattgtcgtttgaatttgctcagaacttcaacattcaatttcgagcgtctcgatatatgaccggactccatcttacatccgagtaaaaagttatctgccgtttgaattggctcagagcttcaacattcaatttcgagcgtctc

SEQ ID NO: 227455 - DNA, 383 bp, Glycine max
  unsure (1)..(383): unsure at all n locations
catgcaagcttgttcttagcttcctgaactctgaagcattttaacacaaccaatcttaacatcaatctacctcaaagactaacatgaagtgacaacttgttgaacataacaataaaatatatgaagatgtcaatgtaatagtaataggcaccatccatatccctcaaccctgtatagcaaaactagagtggtattacacacggaaacaactcgagtgaacaagaacatttggatggtaaattattgggttattaacaatcagcaatagtggttatttttctctactggaattngatcaaagcttcctccttgaatggaacacaggtgacatggttgacatctggttcatttctactcagatttttagtatgcctatagctttt

SEQ ID NO: 227456 - DNA, 455 bp, Glycine max
catgttatatcacacattttatcttactatagcatataacttttgctaaagctctattacaacgtagcgccagtacttataccctataagcctatgatttggacagccgtttttgaaatatactgcttgtctgggccgccctagtcactagagttcatagaatctctattgcactgaacatacttgctagactcctccactacactgtggactagatgctatgtggacagacctatcattgaaaatagtatgatcgctgcttgcgctggtgtgtattgggatgactccgcgacacggatgtatagattctatatataccatctaattgaatcagcttacaacatcatcgccacacttctgtcctacacggctcaactacctaaaactctaattattctttctttacccacctaggccggaacatcttcattccaactcagctcttagtaccatcc

SEQ ID NO: 227457 - DNA, 360 bp, Glycine max
catgcagctattggaaacactcttgtacaaaactattttatcaacaaaatgaagattttttagatgataaaaaaccagaagtacctccattgcacaaagatagtcatttccgaacgtgaggctcatcgaggaccggctggtcgaagccctatgcatgtgcaccaagatgagcaaaatgaggatgcagacattagtggaagagcctttgtgcctcatcgattactggatgcaagacacgctcagggaaatcaaggaggccaagctcgccagagacatgccggatccgttctacaccgacaccgagatcagaggctacctctgcgatttctcttcgtggcgaggacgcatccactttgcact

SEQ ID NO: 227458 - DNA, 585 bp, Glycine max
  unsure (1)..(585): unsure at all n locations
tccgccctacgctccctcttcttantgtgncactactttccttttatctctcnnnnnnncaggcctggcatgaaccnttgannngcggaacatgaaaccttgaannncnanaacgataaanacatttgataccctaggattccccggtcgtcgctgagncggacatnttnttatatgtatcgtcatccaccgattgagcaatgagaaagagagctgtcgtgaatctctttactgactacctggacgaaacccttacactcgtggcttagcgacggctcatacgtgcttctcgaaaccattccttacgatattccacacattttgagcctccagaagcgccttcataatgatacctccattgttacaaccgtgctttgcgagcactagccttagggaaggacgacctcaattcgtcatacttcaacgaacacgaagctctgaccccactttgtaggaactgaggccatntatgaacatgaacagtgcccacgtaaattcgagacnttgaatagtaacacgatatgaaagggaattctttatgcagcaagaactaagcagttacttcaactaaagggaagatacacg

SEQ ID NO: 227459 - DNA, 431 bp, Glycine max
  unsure (1)..(431): unsure at all n locations
gcatgcaagcttagaggagcactcanaccggttgtatttacttctcaaggcctagactccaaagagtccgccaaggtctctccctcttgattaggtccaacccataaaactttntagcatgcagactctatctatgaattgtacaaaacacacgactcatcaattattctcaaaataattttaactcatcgcacctcanagtgatttaactcatcgggttcccatagtagaccttatcacaatactcgtcgtccttaaaggatcttacagtagtgtgattgtatggttcatagctcacaactcaatgcacacaacatctcaatacatctgtgatctcacaatttaacacatactcaacttatcacatacacccaatgaaattctattaatttttaaagaaaactcttcttatttatntgatcgaaaatggg

SEQ ID NO: 227460 - DNA, 387 bp, Glycine max
tgagatactatatgtgaaatgagataattgattatcccattctataattgattgtcatgtttctaacaatgcataacaaagaggaatttgaacgaattaatcgattatcccatttgtcaattgattaaatctgttttatctgttaaaactatgtataccctcacttgtccattctcattagtgactcttgatgagatcttatcttttgaaaaatactttctaagagtcatctaagggaatccctctacgtttcaataagagattcataatgatcaagattcattcattattcatcatgcgttgagcaaggaaagaaaggcttgaagatattatgatctacacattcacgtgcattcaatcttattttgattctttctagcttctgac

SEQ ID NO: 227461 - DNA, 382 bp, Glycine max
  unsure (1)..(382): unsure at all n locations
gtccgctgccatcttagacgacctgcaggcatgcatttcttccacatcatccaagcgaaacaacattacttctgtcaagctatcacagccaagcanaacagagcnaagcagaaactctggtaacacataaccaaattacgttttgtacttaagaccgagaacaattatcctccaatcgataccgtggatgacccaaatttacagaagcatagcgcatagctacattggaccgtgggacactacaccatcagaatatctgtctacttttcaagcaacaaccaatctttctgccaagtaaagctgtgcccatttaaagcaaagtgataggcaaatgaaaacactctttatcaagtggagaaccctaaatcaacctgaaagagtc

SEQ ID NO: 227462 - DNA, 324 bp, Glycine max
agcttgtagttatagtcagtcatattcctccattttaaatgctattatgtacactaattagaattatatataatagaatcttgattcttggaaattccataattttgaataacccatcaatatttctttttttttttatctctatcttcttattacatcatattacatattatacctatatttttctattttgtttaacacgctttctataagtattaaccagcatgctctctttaagtattaactagcatttggatgtgcacaaatatttttcctataccatattaacacactctacgaaaaagacaacggatgacttaagtg

SEQ ID NO: 227463 - DNA, 227 bp, Glycine max
ggacaagtacctaagaatatctgttccatgagattctgaagttttttcaagggtcttctcactctaacttaggcgtctaacttcaccgcctgttttcaatttatccttcaggcaaccctcgagtttcgtattatggatagtgattatgtgcttgtaatcaggtgaacacacctgatatggtttgcgggcacatctacatgcactttcatttccctcatgatgatcac

SEQ ID NO: 227464 - DNA, 212 bp, Glycine max
acccgtcacatgtgttactaggtgttgatcggacgatggcgcaaaacaactatcgacatccacaaatcacgcatgaacgcaccatccctagctgcccacccttaactgagctcacgtactcccacgttgcccttatcctcattcctttaacaccagagccgcatcaagctctgcaagcaatacaacatccaaacatcatgaactatcagaac

SEQ ID NO: 227465 - DNA, 286 bp, Glycine max
tgtggcagggcggacttccttcactttcttgtcttctacgcgagctctgaccactgttcttccttcccgcgatgcttatttcatgtccgcctgagtgggcttatagcctataccatactttccacgatttccttgtgtatttatcaagctaaatatgccgccgctgtttttcgctaaacccatcccgggttcataaccgctccccaacataactcgggccatcattaccgctgcatcggacagacaaggctgtccatatatggagttcacggacgaaatgctgacc

SEQ ID NO: 227466 - DNA, 432 bp, Glycine max
  unsure (1)..(432): unsure at all n locations
cttgcagcttgtccttatggttattaatgtatgaattgttgcttttgcacctcttccttgttttgttatatatctgtttgcattcgggattccaattttcatcaacagtggttaccctactcctcacgtgaagtggaacttgtgggttatccacaagctgctgcttaccctagtttatggtntcatactgttcatgtatcattctaggtggagagaaaggttacctggttagtgtcctggattgttatattattttatctttaattagttttatgatagcatagtttatcttcctcttttngcagcaaggcctgcttactataagtatgttaccattatgttcatcttgaatgcaattgcgctgtttgctcgcggcattactggaaacggtgctgctttcggattctggttagattcttctattctatatct

SEQ ID NO: 227467 - DNA, 416 bp, Glycine max
cgtaattataagagttcaatggtcatactctattagtaccaatttattgtataatatactattggattagaaatctatcttttaaagtaattacgtttaattgctaatttggtccttatacttgcacacgatctttacatattagtctctacacctagaagctacttgttttcgtccgcatgcaacactttttaattcattttagtacatactatcctgaacggtaggtactacaagagattaaaaagtgtatgtgtagacactaaaaccaataatttctagcgtaaaacatgaaaattgtgtgttataaagatcaaataagttattaaagcttgtcattatcacagaagttaacacttttaccatatatcatgacaatttatgatcgaacgacaatataacaacccttatactat

SEQ ID NO: 227468 - DNA, 385 bp, Glycine max
  unsure (1)..(385): unsure at all n locations
gcttctaaagatacagattgtaganaatagaaactgaaacctctcccccatgacaattacttctgtttctaaagcaatgccaggaatttagagaanaatgaattggaatacactggcattatatatcaaacagaaggagaaaaaagatcttanttagcatagatgactcaattgtttacatcagcagccaataggaaaaacaagcgatgtcttggttgctgacaagataagatgagcatcaatcacggtagaaagcaaaacaagcaagcaaaagtgcaaaactattatgactatcctgaaaaaagatgcaaaattaccccctcccccaatctctttaactatagcagagattgaaataggagaaacaattactaacctcttgtca

SEQ ID NO: 227469 - DNA, 442 bp, Glycine max
  unsure (1)..(442): unsure at all n locations
nggacagttctcaccttgcaagccagtttcgtgggactgagttatgccctaagcccaaatactaataagtacaactacttcatggttacccatccaaacatcccttttgtagggaaggtgggttagtcaactcttgtattctgcatgtgaaagtcattaagatgttgtgatttgtatcctaaagtatgttaaacgagctcctaaaaaaagcttatgtatgaagatcagggacgagcatagataataagatactcataaatgccaatcaggcatgctctcctacttacaaacaatcccttttttgggaattgtgtactcattangggtaatatgatagccaggaagaataagaaacaaaaacaaggtcacaagatccagtgcaaaagcagactggcaaatcatggcttcatctacttgctagctcattngaatgaaacaactt

SEQ ID NO: 227470 - DNA, 293 bp, Glycine max
  unsure (1)..(293): unsure at all n locations
gaattttttctggctattttcttgaagtttgncggaccttaataaaggtatattatgtgcatgttataaatgatgcgacttggccttgggtgaactacaagcattatcgattaacattagctattacgttcctcatttttctataatatacgatgatcagagtttgggtgagaatatgatgaactacaagcatttaccacctgctactatttcatatcagcttcttaaacagctacttcatattttttatttggatattcttctgtccccacacctgttgataaaatgaaatt

SEQ ID NO: 227471 - DNA, 268 bp, Glycine max
  unsure (1)..(268): unsure at all n locations
atcaataagcccattntaatttatgaaaaacaaatatttcattttctatcgtatatatatttataaaaatctactccgatgatatcataattaccagaaccatgataatgatggtgatgacgacaacaacaacgacaatcataattatggacgacaatagtgatgaagacaacaattataacaaggatgacaatcatgatggtgtaatagcgatggcgatcacgataacagtgacagtgactatccttgtggtggtggcggtgatgat

SEQ ID NO: 227472 - DNA, 396 bp, Glycine max
catgcaagcttgaaagtaagggtgatggctattgttgttgtggattatgctggggtgtgttagtacttctgttccactaatttggagtgcttattgtttcactcaccttttgtgtatatactataatatactatatagcacttcagctcctcttacgcatatctatcggtttgatttaaagttttaaacattattaagttattaatcaaactcatagaatgtgcccttttcttcattcccacagctaaagtcgtggttgaacttgcaaaatccagactaatccaagctgccgcgctattacatccatcgattggctctgtggatgatatcaatggtatgaattctcaatatttatgttatttcctacatttcatattggttcacagaatattactt

SEQ ID NO: 227473 - DNA, 450 bp, Glycine max
  unsure (1)..(450): unsure at all n locations
tcacacataatgaattcggtcctatccaactaanataatatatataatacaaataagaaataaaagtctatgatcagcagctaactttgatctcactcaacaagacaattatctctttaaaaatgtccgtagtatttgcttaactgcgactatccaattcaacccaatcaaacataattgaattgggctgcatatcaagattaaactcaagtcaacttgaactacttaccccgataatggttaaccttttttcacagcttcatttttctctgctccaaaagacaacaaatattaaccagctcaaaaaacgaaatccggccaacttggaaatgccacagatgtctgacacttctcacatgttctccacgtattccgcattcgtagctgagcgaccaattacaatacaatagatgtcaattttatcatcagnagcaacacacttaaagagag

SEQ ID NO: 227474 - DNA, 430 bp, Glycine max
  unsure (1)..(430): unsure at all n locations
cggcatgcaagcttgtaaatatgtaacaagggtactaggaactnctcntcacagagtgaagcgagagataacttttgtcatcatgctgataaatcccttattgagtatgctttgattcgtctggcggccgatgattatcaattcggaatttaagagtgacgttctctattatatcaataagagaacgcccttgtttgtttttctgacgccactccgtctcatatacagtatcgatatacaactatgcttacgttggttgtgtgcacggctacacggacatatggtgttacaagttgacagttagatattctctgcgaaccaattgtattgtatgtaagatttttgcttggtcttattcttcttgcacacttgcttctctttgctcgctgcactgttcctcctattctgatcagactttcttgtttttccg

SEQ ID NO: 227475 - DNA, 586 bp, Glycine max
  unsure (1)..(586): unsure at all n locations
tctctccctctcaccttcatgccacnttcancttcanttcatctnnngttttctnnnnnnnnncnnaagggacgcgattgacnccctttgcatcnacgtgacacttgagatcatttcaactncnacacgcttcaccttgccaggcatttctcaggagactgattttatttcctacactccaatacttatatatacaactactccgatggtgaccgatcatccttcctttgatggaggtgggatacttactctcgcattctgcttgctgaaaacacattaggaaggtgcgaccagcatgctaaaccatgttaaacgatctcctatgataacgctatgtttgactatcaccgcctagcatatacaataacatacctcatacatgccaatcagggctggctctctacttaccaacaatacctatttttggaattgtgtactcaatacggggaacatgatcgccacgacaaatataaaccaacccacgtccaagatccagtgctaagcagactgccaaacatggtttatcacttgttactcaatgaaagaacacctttggacacgtcattcagaagcttgtaaatgcccg

SEQ ID NO: 227476 - DNA, 358 bp, Glycine max
catgcaagcttctcggctcatactgggaatacctctagttatcacccgagcaacctaaggcacccacccagagggaagctccccaagttccaactccgaacacgactcgaccggccggtaattccaacacgacgaggaacttccctccgaggccatttccagaattcaccccactcccaatgacgtacgaagatcttctgccatccctcatcgccaatcatttggccgaggtaactcgaaccccctttcccgaagtggtatgaccctaacgcaacttgcaagtaccatgggggtgtccacgggcattccgtcgaaaaatgcttggcctttaatacatggcccacacttaatggatgct

SEQ ID NO: 227477 - DNA, 216 bp, Glycine max
agcttgttggcataaactttggtgacgaaagactattaaattgtaaccgacacgctcgaagaggtaccacaatgcggtggcataaacgagcaccgcaaccgcttccacgccaattattcacaacaccacattatattagcaactaagcctttgccgagaacacgatgaaaggatgagatacttaggttatgccaagattgtcagaagaatgatgaa

SEQ ID NO: 227478 - DNA, 380 bp, Glycine max
tgtctcagtgtttatgcgagacggagaccaacatgctagctatcatcgctaagtaccaagaagagttaggtctagccacgacccacgagcatagaatcgcggacgagtatgctcaagtatacgcggaaaaagaggctagaggaagggtgatcgactctttacaccaagaggcagccatgtggatggatcggttcgctcttaccttgaacgggagtcaagaactctcccgcttgttagccaaggccaaggcgatggcagacacctactcctgccccgaagagattcatgggctcctcggctattgtcagcatatgatagacttaatggcccacataattagaaatcgttaggaaacttgtatggtctctcagaccttgact

SEQ ID NO: 227479 - DNA, 382 bp, Glycine max
acactgtgttcatgctctcccaacagcacatgtatactcacgatcccaatcagacactatgctagatggcacaccatgtaatccgacaatatcactactatacacggaggccaacttctccacggaaaatatgacactaatgggaataaagtgagcagacttggccagcctgtcaacaataacctatataaatcaaaccttttgggtttaggtaggcctacaacaaaatccatacaaatattcgccctcttccactggggtatctacaagggttgaacttccctaaagtctctggcgtttcatcttacccttctgacagactaaacatgcatacataaactcactaacctctctcttcatgttaagaccttacaacaggatc

SEQ ID NO: 227480 - DNA, 142 bp, Glycine max
atgtcgaactgcatcagtgtgccagctgattgcctatttattatcacctactggcccgtagcaacttctattctatgtagaggtccggagtatgatattcatcattatatccaaagacaccttcagccttagtctgtttttg

SEQ ID NO: 227481 - DNA, 384 bp, Glycine max
  unsure (1)..(384): unsure at all n locations
ggacaactccaagacccagttggacttcttcgggtccactatgtgtcttgcaaatgcgatccctgcaaacaatagatgaaatcagaaattagttgagcgatgtgcatacttacctatgtcatgatgacgtgaccttgccgaggggaaacgggcaccctgtaggactacagaggcccgtaaccagagctggaaaccctatggccctgttggacttctccgggtccactgggtgtctttgtgggtgcgattcctgcaaataatagatggtatcagaaatcagttgaaccaccatatgtatacttacctatgtctcgatggcatgacctcactgngggaacgggcaccctgtaagattgacagaggcccgtaaccagagctggaaac

SEQ ID NO: 227482 - DNA, 377 bp, Glycine max
  unsure (1)..(377): unsure at all n locations
agcttctagccaaatggacttaccttgaattaattcctttgatatcccttttgagccttgtttccctttccttgttntgaagctcactacaagccttaagtgaaaaaccatgatattaccatatccttaaggaattntggagctttggaattgttttgggaataagtgtggggggtttttgtttcattggacaacttgttttgttgactatgcttcatgatgtattttgngccatacttgatgtacattgtatanttggtaaatgttggacatgctgaatgaaatgttgtttctcanaggctagtttaaacaacaataaaaaaaaaaaatttcgaaaaaaaaaaaaaattcgaaaaaaaaagcaatagagtgagtga

SEQ ID NO: 227483 - DNA, 358 bp, Glycine max
ttaagatgagaagtcatcgcttagcaacacacactccctataatagctaagctcacccctatgccagaatacatgaaaatacaaaaaaaaagtccctactacaaagactactcaagatgtgctggaagacaaggcaaaaccgtatactactagaatggccaaaatacaacgcccaaaagaaggaaaaacctattctaatatttacaaagaagagtggacccacccttggcccatgggctcagaaatctaccctgaggttcatgagaactctagggccttttttagcagctctagttcaatcctcttggagtcttttatccaataccctcgcgagtaggattgcatcaggtatattgca

SEQ ID NO: 227484 - DNA, 201 bp, Glycine max
taaatttctgggaagccataacaatatggccttatatacccaccacagtagaaagagttcattacatggtcgctcgtcaagagaaagcatactcatagatcatactctagatagatggtgtgggtaggatctcacacgtatacaatcctaccttctttccaacagcatgataccgtctgtcctacgataggatgaatattc

SEQ ID NO: 227485 - DNA, 126 bp, Glycine max
atagatgttatcgactggtgtgaggtgagagtttgtctcaaatttacctcattctaaatgtcactctttaaacctagaaaacccattcgattgacgggtgtcggacacctatattctgtgttgccg

SEQ ID NO: 227486 - DNA, 267 bp, Glycine max
actttcacaatgaaagattagccaaaggaagacaccacaagggtgatggataacccctaataagtccgaacgggttcaaccttcgacctagagaatactctcacaatacacaagtatttgtttgaaaattcaagttattttattccatggtaatttcgtgtacatataggcaaccaacctttaattattctaaatgcattttaattcatgaaaagacaccaaggctatcgatcactaatataaataaataaaacaaatacaacttta

SEQ ID NO: 227487 - DNA, 461 bp, Glycine max
  unsure (1)..(461): unsure at all n locations
tgtaggattatggngtatccatcacatgtggtactaggtggtggtcgggcgagggtgcacaacaattctccacatccacaaatcacgtataacccaccatcccctgttgcccacctccaactgagctcacgtactcccacgtagcccttatccccgttcctctcaacgtcgggtccccatcaatcctcccaagcttccacaacatccaggtaattccacatccaatcatcatggactaacaaaaccaagcaaaacagagcanaggcagaaaactctgcccaaaacacaactcanaatcacagcttttcacatacaaataccctagtaacatttccttcattccaattcgctaaccgttggatcgactcgaanatgttactggaagtctctagtacataagtctacattntgaccgttgggatctgctaacaaacatccagaactcattctgtactactctt

SEQ ID NO: 227488 - DNA, 337 bp, Glycine max
catgcaagctgtatcaccatcacttagactttgatacatttttaataatgacacgtaattcgcctcacacaatgcatgggtgttcctcctacgaccatagcaaaccactaatcacactaagagtactaaactgactaagacgtggtcttagaagaatcgatactctcctcctcaaacatatactccaactaccttagaagtatctggtactcctcgaactcctcggacgacatgtctgcatggtctccttgatctgttataacctctattacgtgcacttgctccatgttgtatcgacaaacgttgccccgcccatcatactccattggagtcaata

SEQ ID NO: 227489 - DNA, 302 bp, Glycine max
aagctctctattgatatctattcaaggaagctacttattctataaatagaagcatgtgtaacactggttgtaactttgacgaatgagagtcttgagagatacaactcaaaggtcaagatactctacctttctgcatgcttcaatatcgtgcgcccccctaactgtttatctcacgtctctttttcctccattgagagcaccctgtccaagcatcttatccaaagatcatcttggtggtgaagctccttcttctcatggcttattccctaacggatggtgacatctatcacctcgtctacttt

SEQ ID NO: 227490 - DNA, 216 bp, Glycine max
ttaccataccttacgaatttggagctccgaaccctgggcaagagttcggggtaacgttcatggctgcagactggggcttcctctgatgttttgcccaactgggggtcccgcgttgcttattgtgcccctgatgttgtgtttgagcgcattttaccaaaattcacgtttcgccacacacacattaaacactgccttttagcgatatcttcattcact

SEQ ID NO: 227491 - DNA, 232 bp, Glycine max
acatttgatttacaaccgaaaaaacatccgtgccactaacgactagacttcacgacctattcgtccttaagttgtccataacccccggctcaaaaacaggatgcaaatcaacctaggacacctaccagaaaccagcaaggtaaatttgccaaacaactaaacaagctttgcatcaaaacccaaacattatcttcaatagaacgtgaacatcaaagtacgaggtcagacatag

SEQ ID NO: 227492 - DNA, 62 bp, Glycine max
  unsure (1)..(62): unsure at all n locations
tatgcttgcttccatactgcatacattctatntttattgttcgcatgtgatgatcattcatg

SEQ ID NO: 227493 - DNA, 544 bp, Glycine max
  unsure (1)..(544): unsure at all n locations
gactctgatactccttactcaagaagcgcacccttcancatnttatcacantgcgcagctttaaactctcttaatgtgtgtgatttgacactccctcgggcagtagtccattcctgatggcatatccacctcctcggatgaattctgcaatgtcctcaaaagatgagacactagcaagctctcttgagactcgagatgtccttttgatgcatnttcccttacttgaccacttttgagctagtatgataaatacttcgatccttcctctgtgctttgtgaaaatgaaagaaaaaaagagaaagaatgtttttcctgttgtgtagtaattaatccacctccatctatcagaaataaaataaaatacaaagggttgcgataaagatgagacaaaatttggatagctgcctataagaaatagccacccctcctactcacaatggaaacggtgaattatttaatggatggcgaatggaagacccctcctcacattttaatggagaccctgtgtcctgttttatttctcctacatctccctccaccttct

SEQ ID NO: 227494 - DNA, 413 bp, Glycine max
  unsure (1)..(413): unsure at all n locations
cganatagatacaccctcatatttntcttagttgaaaatttacatatgcgttccagcggttccttctattatattcattatgctaagaaaataaaataaaaaaggtatagaaacgtaagggaaataggtgtgatatcaagaatgatggaagtgtaactaaagctaatacgtcaatgtaatcattctagggctttgctttagtctcgtgtattattttcttttcaaaatatagatctataataattgtcgtagtttattgttatcttttacttttatcattttcaagacggaaacttcactcttagttcgggaattaatttatacagcagaattccatttctatctactcattgttagttatggatgattggattctgtgccattgttaattagataattcagttctgttatct

SEQ ID NO: 227495 - DNA, 250 bp, Glycine max
  unsure (1)..(250): unsure at all n locations
gcatctatcatacttctctccatattactgagtccttcataaaaatgttggagaagaagctgttctgaaatctgatggtgagggcaactggcacatagtttcttaaatcgctcccagtactcatacaggctctctccactgagttgtctaatacctgagatatctttcctgatggctgtggtcctggaacanggaaaaaattttctagaatactctcttaaggtcttccagctcgtgatggccttggagc

SEQ ID NO: 227496 - DNA, 437 bp, Glycine max
  unsure (1)..(437): unsure at all n locations
tccaaaagtgtagaacttccttctannaaaccaaataacaagccggaccgcctttatatatatagattccttttcagctcgcatggaactttgaataactttatttcatcaaacataatcaccaaagagacattcctaaaacgcagacagaaggtacatatggcataaaacctcagaatctgagctaaatgaatggcaattatattatagatgaatcctctgcaattgacactgattcactgaacaggaaacttaccttcatccctcttcacactttccaatgtccacaagccccatggttggcccaatccctcccatagccacagtttcagtgaagtggtgattgcgatggccatccnctcccatagcgaaacaggtacgcatcttcaggacgtggttggtgggggccaaagcgatggcgtcngagaagtagtgaa

SEQ ID NO: 227497 - DNA, 290 bp, Glycine max
  unsure (1)..(290): unsure at all n locations
ccgttcggtcgtgccgtaaccacgttggaaatcaaaaagaggtaaaaaataatataataatcaaaaaatatctttttagtaaaataaagcggaaaatcaatcggacgttttctctttgggatttctcattcttaatccaattgattaataactaaggtgaaactaatgcttaaatcaactcgcctagtcaagctcgtccacaaaaataggcttttgaagtatgtcatttcatttcctcactaagtanaatggatcattntaacgtccaccccttataatgatcactctta

SEQ ID NO: 227498 - DNA, 486 bp, Glycine max
gtgataaaatcgaagatcattatcttatctttccagggactactcacacactccattataagttctatagtgttctataggccctgcacaaggcagataggtcaagtaagcacaaaaatccgaaaataagccataattatcaattaaactcaatcatttgcctaagatcaaaactaagttaaagtgagaaaataatggtcaaagaggttccaattgagctaagaagaatagaaaaatactaaactacaaatgctcaatcatcataacacaagtaataggggtctaattagaagtcgtacaatgctgtgaaacaccccgactatgggttgtactagcagcctggctagcttgagtgacctatggtagtcgtccttcatgttggtctcgtcgatgtagattagtatcatctctaataccttcacaacgatggccctgatggccaccacgagatgtcttcgagtgaaacctcttatgtgagtcataaga

SEQ ID NO: 227499 - DNA, 199 bp, Glycine max
  unsure (1)..(199): unsure at all n locations
tgatacaatgattaatacttaaatgaaaaataaacatacaactaatgccccaactgtcccatgtccatacaaatttacaacaagagacacctataggagaaaagcnaattacaacctcttccacgtgcctactatggtcgaatgatattgttatttatccatcactagcatataaatattggtaagactattcatcaag

SEQ ID NO: 227500 - DNA, 506 bp, Glycine max
tagaatgcagaagaagcaacaacaatcaatttaataatgttctataaacatgcaaggcaaaattgattgcaataacataaatgagataagggaagagagaatgcaaacacaattttatactggttcggccacttcccgtgcctacatccagtactcaagcaacccacttgagatttccactatctttgtaaaatccattacaaagtctgaaccacaaagggacaacccatcccttgtgttcagatgctttacaacaagagactcacaatctcttaaccaatctcattgaataagaagaatggaagaagaattatctcttcaagagaagaatattacaatgaagatccatggatgaactcttaatggatgtgcaagtgcttgcccaagagttctttgagagagcatttgacaatgaagttctcttggaatctctctcattctcttttgagaggataagacactttggagcagcaaaactctctctctaaattcgtgcccagtcacct

SEQ ID NO: 227501 - DNA, 236 bp, Glycine max
caaaatgccctcctttcgcgatttggagcagaaatgagtaccaaaggttggagctttgttggggtttcaatggagaatgagggaggagaaaatggcaacgtgagagagagagagagctgtctgaaaaagtgtgggggctgagtgatgagagagaaaagctttttggttttaaataaaaggttttcctctttttttttctattatttattcaagctctgcacatgtccctattgatt

SEQ ID NO: 227502 - DNA, 455 bp, Glycine max
  unsure (1)..(455): unsure at all n locations
ttgagaagctctcttaagaaaacttccttgagaagtttctttgagaagctagagcttagctacacacccctataatggctaagctcacccccatgacaaaaaaacatgaaaatacaaaaacaatcctactacaaagactactcaaaatgccctgaaatacaaggctaaaaccctatactactagaatggccaaaatacaaggcccaaaataagaaaacaacctattctactatttacaaagaagagtggacccaaccttggcccatgggctcaaaaatctaccctaaggttcatgagaaccctaaggccttctttatcaactctagcccaatcctcttggagcctcttgctcatggctctggtaactggtcctttcctaaggagcattgcatcattctatgaccattcaaatttctcgagagcnttcattgttcaatttcgagcgtctagatgag

SEQ ID NO: 227503 - DNA, 342 bp, Glycine max
  unsure (1)..(342): unsure at all n locations
ctatgatagcctataaagaatgcagaggaaatttccaatcaaagctactgtagagggaaccctccccattcaaagagtgggagaaagcttagagaatagaaaggaagttcccattcaatgagtgcgatatagcttaaaggaaagagagaaaattgcctaccagagaatgggagactgtgaatcatggagggaacgaaggttctcgatcatagaatctagaagaaatatgcagagaggtctttggaccggacaatatctgaacaataccaaattgtcaccttatgaacaaaataggaatganaggacaccgcgacctataatggtcttctgcctttaattacc

SEQ ID NO: 227504 - DNA, 619 bp, Glycine max
  unsure (1)..(619): unsure at all n locations
ctaagtctcactcnctnntctattctcnntctcaanngtnntatttttntnntatttattttnnttnnnnnnngggcccgggctgaattgatgcccttgcgaacacttgcantacagagaacctaaacatannaaannngnctcnnactatctcactacaaacaggactcttgcgctctatgatattatcttccgaaaaaaatgcgcgcatatacactcaaggcagcctcatttcctaaattatttacacatacttccgaagtggatttgctacctacatcacacacctccttgggtaaattgacatacatgcatactcacagcattttgaggtaccaaaaactgcacatgtgtacatctcgtgatttctaatacctatacatacacaaactatctacacaataaggtgctacattgtatgctcttctcgagtttttgctacctaaagccgcactgcaattcacagcatatttaccctcgctgctcacattggattcacataaaacgaatacaacgttggngatggggcccttccatacatgcacataatattatatcatttttatttgagaaacttagccccaaaacttagtgcacacccccacactatgctcccccg

SEQ ID NO: 227505 - DNA, 260 bp, Glycine max
ttcgttaaccggtggatcgactcaaaatttactggacgtctctagtacataaatatacattttgaccgttgggatctactagcaaacatcaaaaactcattctgaattactctgtccacaaccagcaaatacatagcatgtttctgcacaaagccaaaatgctgcataagtgcagatttcgaatatcacactttccctcattcaatcttgcccaatcaaatctacgagtcccaaatatgtttaatcttgttaaaccaagc

SEQ ID NO: 227506 - DNA, 285 bp, Glycine max
  unsure (1)..(285): unsure at all n locations
tgtaatggtaagaanaaagcaacacacgtctttganattcttgtgtctgagtgaaacagtagctgtgaggctttggttaatgatccttccttgatatttgtcattcttactagcttatttcagctgtgtttcttaataatcatgttcacatctttgaaaagctgcatgtcttctgagaagctctggagcaaacaccttgtaaataaccattgtggttttgtcactcgaggacaagtgaactcgtctttctttgcttgacgacaagaaaaactgctaatttggcgg

SEQ ID NO: 227507 - DNA, 310 bp, Glycine max
tgtgttctgtcatgtccttttccggtgttccacacgtctgtggctcatttcatcctctattctaacttcaaagttttaactttgaatgaaatgtatagttaaaaatgacctaccctagattttaaattttgaatcaccaaggctttagtaatggacaatgaaatggccatctatgcatttactttttaagatcaacatatctgacatgaatactctacactaagcgtgtgttggtatagtggtcttaccagggaaatcgtatctcataaggatggctgtgtcatcaaaacttctacatttgggcagtttc

SEQ ID NO: 227508 - DNA, 205 bp, Glycine max
  unsure (1)..(205): unsure at all n locations
cttgatggatcattgcatattggtggtctacaccattcaagactttccttggtgaattgattggcattcatgaagaggaatctatataaaggaaacaatcacattacatgtgtctggactgatcaaaagatttatcaaatcagatggatatagcaaaacagtgatatatgctgatattatnttagttgataaatatcaaatgctt

SEQ ID NO: 227509 - DNA, 286 bp, Glycine max
cttactattaaacagacctataagttcacaagatcataggtgattgctaaactaccaatgccaatttaatgataacacagccaaatggatacatcaatgttcatctaaagcagtctaggcttgcacgctgcagatgcctaccatgggaagaatatgtaatctgtaaccctcatgtcaaaacagaatatatatacagttcgcctattgagaccaaacaaaatattccaccattaaaatgcatccataaaactggccacaatattcatatatctatacgaggccatgt

SEQ ID NO: 227510 - DNA, 211 bp, Glycine max
catgtgatgggtaccccataatcctacaagcttgagatgaggaagtgtagaagggtgaaacttcctgcttttattcgttaaccacaaagtggtacctgtagatatgtcgcgggggtcaggagaccttggggacgtcaggtggggtgctattgcccataaccaagcttgaccaatcccgacccaacccgggcatagtcggtctttgagacct

SEQ ID NO: 227511 - DNA, 413 bp, Glycine max
gcgcccatatactatcagagccgcttgctttcctcgattatcttcacatactttcgaggtgtatctgttacctacattacacacctacttggctaaatcgccatacatgcatactcaaagcattctgagcgaccacatattgcacatgcgtacattatgtgatgggtaatacccattcatacactaactatatacacaataaggtgcctcattgtatgctctcttcaagttattgctacctaaagccgcatgcgaattcaagtatatttccctttgctgactaatatcgtattcaacataaaaggtatacattaattcggagtgtatcttctttacataacatgcaacatatatatgtatatatgcttgtattgtgagacactctgactaccagatagtatgtgtacatacat

SEQ ID NO: 227512 - DNA, 334 bp, Glycine max
  unsure (1)..(334): unsure at all n locations
gaatctttcttagatattggagaaaaaagtctctntgtaatctattccttccttttgagtaaatcccttagcaacaagtcttgccttgtatctctcaatgttgcctaatgaatcccgtttggtcttaaatacccatttacatccaatgtcctttgccccattangcatctctacaaggttccaaaatttgttactgtacatggaattcatctcatccttcatggcatcataccataaatntgactctttacaactcatggctngatcaaaagtntaggatcattttcagttacaatatatagtcagattcttacaaatatacaatataatcact

SEQ ID NO: 227513 - DNA, 472 bp, Glycine max
tgtagggttaaagtctcatgactgtcacgtgctcatgcaacaattgttagccgtggctatacgagacatcttgccaaacaaagtcaacttatccataactcgcctgtgctttttcttccatgctatatgtagcaaagtcattgatcctgtcaagtttgatgagctggaaaatgaggccgcaattatactgtgccagttggagatgtattttccccctgctttctttgacatcatgattcacttgattgtgcatctggtcagagaaatcaaatgttgtggtcctgtttatctgtggtggatgtacccgattgagcgatacatgaagatcttacaaggtatacaaataatctatatcattcagaagcatctattattgagaggtacattgcagaagaagccattgaaattttttcacaatacattgagaacgctaaacctgttggcctctctgagtctcagcatgatgatagag

SEQ ID NO: 227514 - DNA, 156 bp, Glycine max
ttgggtggcgttttggagaagaggagagtgaacaattgtgtttttctcgttgaggaacgtatttataatctacagatctcgcttagtgatctcgtcttgctaagcaggagtccacttttctcgctcagcgtgcaaattctcgctcagtgcaacttc

SEQ ID NO: 227515 - DNA, 511 bp, Glycine max
  unsure (1)..(511): unsure at all n locations
tctaagcttgcaagttatgtctcgtatcgatntaattaattgcagccttctcgtaattgattacacagttgtttttgagacaatgactaatttattcaggagtctctgctttaatcgattatcatgtgatataatagattacttctctttccataagtgttttagaagtgaacaagaacactttaattgattactttgagtatctaatcaattacattgttcttgagctatttctaggttttgggaagaacactttaatcgattaaaaagataatctaatcgattaccttgtagatttaatcgattaaagatggttataaacaaccaccttgtgttcactcttataacaagtttttctaagttgtgaaaaacaacgaaataagcttctaaatgagctaagttcacatgttgttattagttaaagaaagaagagaagagaagtgcttagaacagtaactcacaccttcaaatctattgatcgtgaagatcaatgcgtagaacagtaactcac

SEQ ID NO: 227516 - DNA, 183 bp, Glycine max
  unsure (1)..(183): unsure at all n locations
ggcccctctaatcaaacctgtgaactcatccaagttggtttaaaaggaaacaatcaataacncttatgaaatagccagttccacgaaacccacatttggatattttgtaaatcgcgatttgtcgttccttcaacaagagagcttctctctctggatacgttatcaggaacacttccttaaccg

SEQ ID NO: 227517 - DNA, 444 bp, Glycine max
  unsure (1)..(444): unsure at all n locations
ntctcggggccatttcctgcgaaggcaaacacttggaaagttagttntaccagtgggatactattcttaaaacaaaaatgacatacaacctcctcccataaatacaaacatcaatgtaaatttagagcaagcttatgcgcatatttccttacaaacgttctcttgcacaagacattctattaaccgaaaaaaatgcacccatatacaatcaaggcagcttcgttacctagattatttacacgtacttccaaggtgtatttgttacttacatcacacacctncttggctaaattcacatacatgcatactcaaagcattntggggtaccaaaaattgcacatgtgcacatcttggtatttctaacacctatacatacacaaacttcatgatgaatcttgactatctacacaataaggtgctacatttcatgctcttttcaagttt

SEQ ID NO: 227518 - DNA, 268 bp, Glycine max
gggcggagtaggtgtctgccatcgccttggccttggctaacaatcggggaagttcttgactcccgttcaaggtaagagcaaaccgatccatccacatggttgcctcttggtgtaaagagtcgatcacccttcctctagcctctttttccgcatatacttgggcatactcatccgcgattctatgctcgtggaccgtggctagacccaactcttcttggtacttggcgatgatagctaacatgttggtttctgtctcgcatagatgctg

SEQ ID NO: 227519 - DNA, 138 bp, Glycine max
  unsure (1)..(138): unsure at all n locations
ctaagctatatagccctaatcttaaactaaatctaacanaacatanaaactcctanaaatctaaagctaccggtggagtcctctacccttaaggttagaacaggaaaagaagaaaagaatcatggaacttacttggat

SEQ ID NO: 227520 - DNA, 216 bp, Glycine max
cagctaagcgcgtgctcctctatacttaagatgcatcattttagctaagctggccagggccaggcttagcgagagttgaagcttttctaatctgcaggtctcactaagcagacatactctcgcgctaagtcgagtttctgttcaaaaaaaaaaattggtttcaagtttgaaacgtcggctaagcgcacgtgttcactaagcgagcctagttgagaa

SEQ ID NO: 227521 - DNA, 391 bp, Glycine max
  unsure (1)..(391): unsure at all n locations
tgaaaggatcgatgtgggtctgaaaaaaggcaaatntagtcaccctgcttggacgaatgagaaaactggggcaaatgaagagggtgaagatgaacgagaagcccgtgttgtgattgccattccaatacagccaagttttccaccaacccaacaatgtcattactcagccaataacaaaccttctccttacccaccgcctagttatccacaaaggccatccctaaaatcaaccacaaagcctacctaccacacttncaatgacaaacaccacctttagcgtaaaccaaaacaccaaccaagaaatgacatttgctgcgagaaagccttagaattcaccccaattccagtgtcctatgctgacttgctgccatatctatatgataattcaatg

SEQ ID NO: 227522 - DNA, 211 bp, Glycine max
aaaatctgaagatgaaggaggaagagtgtattcatgacttccacatgaacattcttgagattgccaatgcttgcactgccttgggagagaggataacagatgataagctggtgagaaagatcctcagatccttgcctaagagatttgacatgaaagtcactgcaatagaggaggcccaagacatttgcaacatgagagtggatgaactcat

SEQ ID NO: 227523 - DNA, 547 bp, Glycine max
  unsure (1)..(547): unsure at all n locations
ngggcgcgatgattcgtgcactacgtttacgcgaactatgaatctgaaacagtgctgttcatcttttaatgctcttctctctctgcctaaaagaattgaacagcgactactcagctgaattactatgtgtgtctctaccaccttccacatagaactaacgactaaccaactgaattgtgctgtgtctacctcctgcctttacttaggaatacatgctgactcagtctaacaatctttttgattcatccctttacttacacgaaacatttcatatgactaaccgactgagatactcttgtgtttcccttacagagactcctaggactgactgcgtgataattctgtgtgttactcacataggagggtacatgctttgatgcacaagtagagggcacatctacttgggttgtcgtgactgagaacaacagagggtacatctcgtttggtcacattaagaggacggtacatattcttggttgtcaaacagaacaacggatggtacattccttgttgatcttcagttgtaaatgtacttacaaagatgacn

SEQ ID NO: 227524 - DNA, 89 bp, Glycine max
ttcaactacttgatacctttcacgtctatcccttttaacttctttctggccttcaacgcctatcctttactcctaccccgacacgttca

SEQ ID NO: 227525 - DNA, 498 bp, Glycine max
  unsure (1)..(498): unsure at all n locations
gtgcatataacttgaagaggattgatagtantatactatagttgtactgggcttaaaagcccattagtataagtggtatacaaatatattcttgtactcctattttcattagacaaataaaattcaatgtctatagaaccaataacagccacaattgtaactagtaagaagagggttcacaaaataacaaaactacagtctatttaatatcgtaccttccaatagggtgagtggtacccttttccattgctgatacaacagcaagagcttctttttcacaggtgggaatgcaacacgaaggaacatttgattctgtgtttctaacatgatgaccataaatgggctcaattgccttgaatacgagtccaccagtggtcaatgtccctgttttgtcaaatgcaatagtatgacaagaagcatgagcatccagaacatgcccacctttgagttatatgccctgcaaattgggcaactgtcacagccacaatgaaagaagca

SEQ ID NO: 227526 - DNA, 200 bp, Glycine max
  unsure (1)..(200): unsure at all n locations
acatgaaggtaagctgcatgcatgtgttcagaggagtgcttttttctatccgaaccatcaaatcgtaacgtgcatctttaattgtccaacttaatgtcttgaatgcttcataggtgctagattaggtactcttgtcataactgctttaaatnttgatttgctggaacttcacaataatctgttgcattcttggggaaaga

SEQ ID NO: 227527 - DNA, 425 bp, Glycine max
  unsure (1)..(425): unsure at all n locations
cttattgcctntgcttgttattacagggttcttatataattcctaatatggaataatcctangaatattacaataaccattttattgataagaattgctcagcaggatcacaattccaagcaaggcgatctgggaaagatttgcagaagctcttgttttggcagtcttcctcacacgaagtcgtgaaggtaagtgggcctcttcacctttcttttgggctttacttcgttatgcacccgctcttttgtgattcccacctctgagtttgttgtttgttcttcctcttctgctggtgtggtcttgtgcgtatcatcccttgggccttggaaaatcaccttgtcctcaaggtgatactcttcctgtaacttggtccagatttcccatgaggtctcatctggggaaagaccttgccattgaactaacac

SEQ ID NO: 227528 - DNA, 248 bp, Glycine max
  unsure (1)..(248): unsure at all n locations
aaagatgaattcaagattcaagagaagaaatcaagaagacttcacaagggaagtattgaaaagatttttcaaaaaacaaacatagcacagttttgtttttcaaaagagtttttctcaaaattttctaagttaccagagtttttactctctggtatccgattaccagtggcaaagtttgatttcaaaagttntcaactgaatntgcaacattccaattgatttcaaaatggtgtaatcgattacaagat

SEQ ID NO: 227529 - DNA, 600 bp, Glycine max
  unsure (1)..(600): unsure at all n locations
aacatctcgctcctattacattgttaatatgtcagcttntatcatntnnannnnaagccgcnctgacctgtgctcgtacactggaactctgaaactagccttgaaattgagacattctcaacacatgagccttgagaagcttaagttgctgttgaagccatgtaccctatagggcagacaggacanggagacctcgaattacggttctaacattgggtggtgacattgactgctgccactcttttccccacatgaaaggaccaccttctctaagggccctagggattggtgtctcgaaagatagaatgcacatacaaggttttcgtgatcacgcagatctaagtgagctgctggtcagtcactcaagcaattgttcgatactttcgcctagcggaccgctgcgctaagcgatgcggagagacgatcggtttctgaacaaggatcgctcattggagacgtgcgctcagccgacgcttcatactcaaaatcagatttctcttgatgaacagaaacgcggatgagcgagacggtcctctagttagtgaggtttgcagatgacaagagatgcaactatcgctgagccaccctctggtgtgatcg

SEQ ID NO: 227530 - DNA, 156 bp, Glycine max
  unsure (1)..(156): unsure at all n locations
tgggtctgtagtcatcaaatgactggggatgtttaattttgggaatgagagctatgaaggaagcattactgcctctagggaaactgccatgtacatggaattcatcaacaaatcttctgaagtcagctntcagcatatcccanaattctttaatga

SEQ ID NO: 227531 - DNA, 377 bp, Glycine max
gcctgtgtgaagagataagtgcagaccttgcgctaagtgtcatctcttcatgcgctaagctgagcttactcacgctaagcgcaaagacccctgattgattggctgaatggttcagctaagagcacatcgctgcactaagcccaacatcttcactgtaagttgcaccttaagcaatgggcttatcgtggatgaggcgctaagcgccactctctctttgtgaaaatttattatagctgcgctaagcgtgccatcctgcgctaagccacagattcattctgtaagttgagctttgaagctaggcttagtgggaaaggacacgctaagcgccaacatcattttgttttgaaatcattggaagtgcgcttagcgcatgtagt

SEQ ID NO: 227532 - DNA, 279 bp, Glycine max
ttcctgaatcaaacaagtgggctgttcataaaaaaaaaaaaaaccctgtgaaagtcctaccccagttttaataggatattagctgccatcttttttttttctgattatggcatctaaaacccaatatattttgccctgaaaacattttttccgacttattgatatttataagttccattctaccctattccccagccaaataattgagcccccataaacctaaaaagcgttcataaaaggcccaaataaaaaaactccatcttgaaaaaaaaacctaat

SEQ ID NO: 227533 - DNA, 417 bp, Glycine max
  unsure (1)..(417): unsure at all n locations
ggttaaacaaacatataagcaactaatgttgactttcatacacaccaaatcttanaatgcaactagattcaatattaaatattcgatctcacaatgatcttagcgagtagaattactcgcgtgaagattcctctgtgtcgtaccaaatattttttactatgaagaatacttgacgttagcaacaaaaaagtttaaattcccttatatcatattagagataatttaactcataagattcattcaaaatataagggtcacgctacattcaagttgtgttcgattctttataaaatttccttgaggtaagtactcacatcagctatacaccttgaacatattaattttggagtcaatgagttaagcgataccttcagaatacaaaaacagagataatttgacactatatgctttcaatgt

SEQ ID NO: 227534 - DNA, 357 bp, Glycine max
  unsure (1)..(357): unsure at all n locations
aacaatatttgggtgttcttatatttagggatagtctaagggttgtgccaggagtggccttaagaatatttgtaaactagaagtggtaggaaagaatacttgttgtaatcaagtttgattagtggaaccctctactggtaggtaaaggagaactagacgtagcttaggttgagtgaaccagtataaaatgaagtattgttgctgctattcattagcttattaaagtatttcattgtccattactatngcactttgcacacaaggtttttactgaaagacaagtntgcacctcattggacacagtccaccttttgtcactgacgagggttttataacttgttattatacatcttcatt

SEQ ID NO: 227535 - DNA, 328 bp, Glycine max
gcttaacatcagaccacttccagggtgctggaactacttcacatggtcttgatggggcctatgcaagttgaaagccttggaggaaagaggtatgcctatgttgttgtggatgatttctccagatttacctgggtcaactttatcagagagaaatcagacatctttgaagtattcaaggagttgagtctaagacttcaaagagaaaaagactgtgtcatcaagagaatcaggagtgaccatggcagagagtttgaaaacagcaagtttactgaattctgcacatctgaaggcatcactcatgagttctctgcagccattacaccacagc

SEQ ID NO: 227536 - DNA, 253 bp, Glycine max
  unsure (1)..(253): unsure at all n locations
tcgattaccaagtgacaanggtttgaacaaacaatcaaaaagatgtgaactcttccaatggttntcagtttttctaaaggttataactcttctaatggctttcttgaccagacttgaagagtctataaaagcaagaccttgacttgcatnttgaaaaaaattcattacaatctttgacaacctttacaaacaactctttcacatacatctttacaacctttgaatctctttgaacttcttcttcttcttcttc

SEQ ID NO: 227537 - DNA, 438 bp, Glycine max
  unsure (1)..(438): unsure at all n locations
ctaagctagtcctaaggtgatggaccttctcaagtgttggacaggatctataagaatgtctataggttggacctcctataaaagtatggagtcaacaccattcttaacatttctgatctaatttcttttgcaggtggagctgatactagggagaaggaaccaatagatttgaggtcaaatcctcttcaagggggaggggatgatgcaatcctccctaggaagggaccagtcaccagagccataagcaaaaggctccaagaggattgtgctatagctgttgaagaaggcccaagggtttgtgctaatatgttctattgacactctntgttctttaacttcttctttcacggaaaagtacttcaattccatatgcttaacacccttagagtacttgtcattcttagagaaaaatactactgtgaatctatcacaatacat

SEQ ID NO: 227538 - DNA, 284 bp, Glycine max
  unsure (1)..(284): unsure at all n locations
cagcatgagctagaaccaggaaatgatcactcatatgaagccaccatcgctggagctgttgattgtaaaaaaagaagattagagacgagatccaatgaggttgctcatcatggaccagtgccagcgtcagctgatgcactagttccaggagtggatccatcttcacctcagcacgcagcagactcttccattcctgttttagagatacatgagggccagaccataccagttctgcctttggacactnttccttcagctactccagtatgacatctaacagatga

SEQ ID NO: 227539 - DNA, 503 bp, Glycine max
  unsure (1)..(503): unsure at all n locations
gctgtgtataataagtctgtattacttgagtcagtatgggtgtataagttntctaccatattgccatacaataattaggattatatatttcgtgtagaaatgagacctaattttctttttcttggctacacttttgagaaacatatggttcaacatattgtgcattgtttaaggtgttgcttgaagtccaaattaggcattatatgtgtttataaaaaagaataaaattaatatcacttgaaaatttaagacaagaaccatgatagaaagactagcttggtaaaattagcctggcaactaaagttagttntatgtgcaactgcatttttttttccaaagtaagaagacaagtaatttaacaatgtgcgtatttcttttacgcaaccagtatggtttcaaaactgcttcacttataagttataaacttcagcaaatagagtgttaaactatgcttgaattntcatagcctatctagatggtgagaatttgcatcaatgttgtta

SEQ ID NO: 227540 - DNA, 197 bp, Glycine max
  unsure (1)..(197): unsure at all n locations
ccattcttgctttccaggaattcatagttggntccatctaggattggtggtctgttcactggtcctccttctttctccatgttcatcagaatttatctccctagatctcactctgtgatttcgagtgttggctctgataccaattgaaattctgataccaggggacagatgtcgtaccggatgtcacgacatcacgc

SEQ ID NO: 227541 - DNA, 497 bp, Glycine max
  unsure (1)..(497): unsure at all n locations
tctcttggaccttgaacaagcaatcaactcctctntcagaaccatgctatgtgctcgcgactggtccctttcttcccttcgcaacttgagttcattattgctaccccatagagctccgcgaaatttgttccggccatactcttccttgcgagccctcttggtctcttgttcaagggctcttgcggtaattgcattctcttcccgtaacccggcgcactccttccgaacgtgtgtagcagccaacttgaacttctccttggcgagttttgcctttcctaactcgcttttgagagcttggacttcttcgtcctcttccggtgcttcaaaattctcttcgctgacgactcttgactntgacttggtagaacctcttgtcggtttgacttgttcccatgcttactaaagtgagataaaagctggtgcaaatcannaactcgatatntcatgggtggaatggatgaatgcatgatggaatgcatatgacacagatgcaatct

SEQ ID NO: 227542 - DNA, 103 bp, Glycine max
tgaaggaggaagagtgtattcatgactttcacatgaacattcttgaaattgccaatgcttgcactgccttggagagaagagacgatgaaaagctgggagaaag

SEQ ID NO: 227543 - DNA, 107 bp, Glycine max
tctactttatcatactttacacgcttgccattatgacattttaagcattgtgaaacgatttaaagtacaatctctctacgtttgctccaacttaaaagaaaagaagg

SEQ ID NO: 227544 - DNA, 378 bp, Glycine max
tacagaacattccttagaatcaggtaaatatacttgactgcatctttcacttgagctgaggattcatgcatcactgtacaatgttacatgtagtcatgtagatcactgtattgcgatagcgataatttacattgacaagaaaccaatctggatgacaataaacaaggtcaaaggattctgggttcacaggttcacaaaaagattcaactcattttcttaagcttcttctactttggcttttagacacccaaaaatgtttgtaatgtctcaataactgccacccctgctggaatcagacattcaaaatcacaatttcaaattgatccggtgcttgtgcatcattatattcttcctttacaacatttccccatacacttc

SEQ ID NO: 227545 - DNA, 490 bp, Glycine max
tttatgggatcttttatgcgtctgagctcattgagatctcgtttttgttggactcaaatgaatgagagggactcttattttaacattaggtgtaacacaactggttttgaatgtgggtcaaatcacctttgctctatagtggccaaaatattaggccaaggtctttgggaggttggtttatccctacatataagatgttttacgaatgtgtattacttgactttaaaatttgaatatattatttctcttcctcgaaacgacttattctcttagccctccacctattagtaaggtttgttacctttatatatcttctttcttataatctctagcttccatttctagtaatgtccctcattttctggatgtttacatttcttacttttctttttgctagttcgttatgctaattgacgcactgtctctggcgcataagcatgtatcgttacctatctattgtactctatatatctagataaccacttctacc

SEQ ID NO: 227546 - DNA, 386 bp, Glycine max
  unsure (1)..(386): unsure at all n locations
tcatccaactaatacatggaaagacaactgtatataccaggcatctaagatttctcanacattatcatccatatcagngattgaaaagagcctttgatgtaagtcaagaaaatgaaagcgcgccccgtccattagtaggaatagatgtctatgatcgggtaaaagatatcataactatgattgggaagacacaaaaaaaaccgtcatctgatgcaaacatatggaagaaaaggtcaatattctttgatcttccatactggtccaatcttgatgttagacactgtatagacatcatgcatgtagagaaaaatgtttgtgatcctttaattggcaccatccgtaacatgaaaggcaagacaaaggatggctcgaagcgtcgtcaagac

SEQ ID NO: 227547 - DNA, 235 bp, Glycine max
ttatgacacatacgtatttgcacacataaaaattttgtgtgaaacattttacaacacctattcatgtacatatttttttgaccaaacctttcaatgctacattctatatatatacacacattctttggaaggctttttttagtacctactcacaaatacacatattttgaaaacactcttacgctacccatccaaactttgtaaggcacttcacgctatatatattcatatatgc

SEQ ID NO: 227548 - DNA, 262 bp, Glycine max
  unsure (1)..(262): unsure at all n locations
ataagtgcgggtctgtgagacgaacgtcaagtgctctcgatatgtgaagtatatgttncaagtacttcggatttggttcgaccatgctcttctgatatccagctgggaaattggcgagtggaggaacgccccggtatttacgcaacaagcataatgtaaacctttacggctttaaaagctctatagttgggcctgggcttcagagttttcattatgataacgctttgtgtcttccgcttttgaatctataatacaaggatct

SEQ ID NO: 227549 - DNA, 213 bp, Glycine max
ctgtcgcggactttacacacgataccgtgcactctcatcccaatccgccttgccgccctacactttactccgtgcacccctccccacacccctgtgcgcttctcccatctcccccctccctcctcctctctcctaccacctactccacttcctcaccctatctttccctcgacacatcccattctctctccctcccccccgccgccggccgcc

SEQ ID NO: 227550 - DNA, 182 bp, Glycine max
gtggctggacaactaccaagcagaagcgagacttggaggacaccaagaggagcaacataggaatcacaatgcagaaaaagaagagacagagtagacgatagaggaagatagagacacatccatccaagatatgatcgacaacctccacaagaacaagaacccgcccagcaaataaaatgggt

SEQ ID NO: 227551 - DNA, 357 bp, Glycine max
  unsure (1)..(357): unsure at all n locations
tataagtganatcaggtgcaaccatttcctttagagtcctttcacgaggtggaggttgagccatatttttagaatgctcaaaattaggatgttcaaaactaccaaccacataatgcttagactcaccaataacagaacgctcaggatgctcaaaaggtacaaaattttcagggtaatcaagatgcacactatgcctaaccaatctatgaaatgttctatctatttcaggatcaaagggttgtaagtcacctggattgcctctagtcatgcactatatgcacgaggtcatgtgtctctcaatagggcaaaagaggcgggctaaaactacaactatacctacatgactatcaaatgagc

SEQ ID NO: 227552 - DNA, 241 bp, Glycine max
cggaataacgatgctctgggcaaattcaacgataataaacttttactcgctagctgatgagtccctatataacggacgtctgaattgaggcgaagctcgagaatttaaggacttaattttactggtgtgtgttgatctgtacaattaaacgttgactgaagcgagcctggagttaatctcctactttattggattcgtagatccgaatcatttgacatgtaatgatctgcgtctgaaatga

SEQ ID NO: 227553 - DNA, 248 bp, Glycine max
ctcaagcttctacattaatttcgagctcttcgatatattacgggactcaattttacatccgagcaaaaagttattgtagcttgaactcgctcagggcttcggtattccatctcgagcgcctcgatatattacgggactcaatcggacatcagagtaaaaagttattgccgcttgaatttgctcagagcttccgcacttcatctcgagcactctcgatatattacggtacctcaatcagacacccgagt

SEQ ID NO: 227554 - DNA, 229 bp, Glycine max
cattgtttcagaataccacataggcctaaggccatcccctacaacccctcaactctaacaaatcaagcataaaaaacctcaaaactgccccacaaatatgagcacattctcacaatttagagcaccaaaagatgaacaaaatgcaccaatggaaaagctaaaaacttcaggattgaatacttacttcgtggagtgagtaggaatacgaacaatgaaaacaaaatgcgac

SEQ ID NO: 227555 - DNA, 253 bp, Glycine max
gcttgagatgaggaagtgttgaagggtgaaacttcctgcttttattgctgaccacaaagaggttcctggagatatgtcgcggtggtcaggagaccttgtggacgtcaggtggtgtgctattgcccaaaaccaagcttgaccaatcccgacccaatccaggcatagtcggtcagtgagaacctgtgacgtacctaaacaggcgagtttctggccgtcaacagatacacggaacatagatcacatagtaaggagg

SEQ ID NO: 227556 - DNA, 312 bp, Glycine max
atatgcactaatgattgattgaaatccaataagactcaatcaaagcctaataccactttagtgtaattaaaacccaataagacccactatatgactttagtgtaacatattcatatgcaatactgatggcccaatcaaggctcaatatcactttagtgtaacatatgcactaatgattcattgaaacccaataaagcccaatcaaggactaatatatgactttaggccaaaaaaatacaataaccaaagcttaccattaattaaaagtactagtgcctgtcacatttgtgcacatttaaacacttgtttttt

SEQ ID NO: 227557 - DNA, 297 bp, Glycine max
aaagtcacacgactgtcacgtgctcatgcaacaattgttagtcgtggctatacgagacatcttgccaaacaaagtcaggttagcgataactcgcctgtgctttttcttccatgctatgtgtagcaaagccattgatcctgtcaagtttaatgagttggaaaatgaggccgcaattatactgtgccagttggagatgtattttccccctgccttttttgacatcatgattcacttgattgtgcatctggtcagagaaatcaaatgttgtggtcctgcttatatacggcggatgtaccc

SEQ ID NO: 227558 - DNA, 181 bp, Glycine max
  unsure (1)..(181): unsure at all n locations
acttttggcactttatgacttagcctctttttcacctgaaattgcacatatttcatcattaaatccaatgtacatattctagagatagctttctccataaaacaggaattatctacacaattcactacaaaataaccactaaatggagaactatacaaggtntggaaaatgttttctatac

SEQ ID NO: 227559 - DNA, 510 bp, Glycine max
  unsure (1)..(510): unsure at all n locations
cggcgactgtnccctcatnttgtgacctctngatactcaagcttnctcggggccattttccgcgaaggcaaacattcggcaagttagtcttaccaagaaatgctactcttaaaacaaaaaggggatacaagcctccttcaataacacaaacatcaatgttaatttaaacgcaactcatgcacatactttcttacgaacactcacttggacaagatattgttttaactcagaaaaatggacccatgcacaattaagggaccctcgtacctagagtatttatatggacctccaacgtggatttgctacctacatcacatgcacattcttggctaaatttacctacatgcatacctcaagcattttggtacgcaataatgcgacgtgccattctggatttctaaacccatgctatccaacttgtgatgactttggtattacaccatagggtcactcatgcttatcagcgtttgtcccaagcgatgcaatcagcttttcctcgcgataaatgcg

SEQ ID NO: 227560 - DNA, 104 bp, Glycine max
ttatgctgggtgaggcacttcccgtgcctacatcaagactaagcaagccacttgtgatttccactattcattgtaaagatacctttataagagtgttggaacca

SEQ ID NO: 227561 - DNA, 525 bp, Glycine max
  unsure (1)..(525): unsure at all n locations
cgcaccacggcctgaacctgatcccattgcatncacctgacactatcagaatactaagcttctcctnctccttctccttctnctcccgttaagaaatttatagttgatgcattttccaacgcggagaggcatcaatttaatgcacagtgactcttgccttcacacaaaattcacttgtaataaacaaattacctcgagaccctcgacttgtgaaccagttttttcgtatgaggggcttgagcaacgacactgtgtactacttcatccagcaaaagctccggggaccatctctgccatatctctgctatcccaacgttcttcctcctcaaacataacatactaatctctggaatattccccttactacacgccaatcccgcgcaccttctactcaccatacccattccttcggtagatgccccccttcagcctggctgtgtattacatccaggacctcaccacctggttgcccgtatccctgtcaaccatcggccactccactctcatccaaggccccgggccccc

SEQ ID NO: 227562 - DNA, 158 bp, Glycine max
tttaaacattatggacttgtcatggaatttctacttatcgagagcgaattaattgtagaagacacttactgtctatatcacgtgaattataatagaaagttctgcttacataagttctaaccacattcaaagtaaaaaacaatttctattatagctat

SEQ ID NO: 227563 - DNA, 445 bp, Glycine max
  unsure (1)..(445): unsure at all n locations
gggagacacanagganaacgaaaaaagctaagcagacatacaatgtgaaaagtggtacaccacgctaggcaccagcaactccaggaccaaaaatgaataggactaaggctggggttgcgcctgaaaaggagagggtggttttgtctttctgacacatttgcacatggngatggctgctacttttgttcctctctctgtaattgccagaaagacaaatgcattatacaatttcaatgttttgggagagacaaatatactactattatacataacttttactttgaggagagacaaatatttaatataactttactattgcgagagacgaatatattatattataatgataatttgattatctctcagacccaggcagggtgtggngctatgggattgggactggccctctatcattatgttgactctccccgctattcttgataca

SEQ ID NO: 227564 - DNA, 302 bp, Glycine max
  unsure (1)..(302): unsure at all n locations
tcttttctcttaacaccgggtccccatcaatcctcccaagctttcccaacatcaaagtaaaacgacattcaaacagcacaagctattcacagtcaagcaaaacagagcaaaggcagaaaactctgtcataacaccaaccaaatcacagcttttctcacttaaagactccaataacaatgccttcgttccggttcattaaccgttggatcgactcgaaaatttactggaagctttagtacataagcctacattntgaccgtgggtctactagaaacatcagaactctttaaatactctttccc

SEQ ID NO: 227565 - DNA, 420 bp, Glycine max
  unsure (1)..(420): unsure at all n locations
tcaaccaaggggagatggaccatttcaagtgctagaatgaatctatgacaatgcttacaaagttgagctgcccgatgagtataatgttagttccaccttcaatgtctctgatttatctctttctgatgcagatggagaatccgatttgaggacaaatccttctcaagagggagagaatgatgaggacatgaccaagagcaagggcaaggatccacttgaaggacttggaggacctatgacaagggctagagcacggaaagccaaggaagctctttcacaagtgttgtccatactatttgaatacaagcccaagttttaaggagaaaagttcaaggttgtgagttgtatcatggtccaaatggaggaggactaaatgacaccactntatttcaactttagagcggttagtttgctaaataa

SEQ ID NO: 227566 - DNA, 115 bp, Glycine max
attccggatgaaatctataattaatatacaccccactctagctaacattataatttttactgggaagagaatcaattatatcctgagcatccagaacacgatatggcgcaagaaa

SEQ ID NO: 227567 - DNA, 514 bp, Glycine max
  unsure (1)..(514): unsure at all n locations
cgacgcaggttggctgtaccctgaatcactcaagtacagaaantaagcttgtgaaatcaatggaatacaagattccattcganacaatctcgctttattntgttcttagacanatgacctaagcgcttatgtcataatgctctgtgagattgcttatcaattatacgcctagcaccacgcaattttatattaaaggactcaccatactaagttatagntttaacgacatatagacttatcttatgtacgagttaagctactctcaccatatctgctatcgccgaggacttaataccctgcttcttatgaatcacacatccactttgtcaaatcgaaattgaactcaactgtcttaaatgacagttgttagagctctctcatttctactcaattttcactcattaggcttcttatgctttacctatactctcgcgtctatgtgtcacgctcctcactgctcccctttggcctcttgcattcaactacctctttgtctcctttcctgtatgtccca

SEQ ID NO: 227568 - DNA, 276 bp, Glycine max
ataaataagataagggaagagagaatgcaaacaccaatttatactggttcagccacttcccgtgcctacatccagtactcaagcaacccacttgagatttccactatctttgtaaaatcctttacaaagtctgaaccacacagggacaacccgtctcttgtgttcagatgctttacaacaagagacttacagtctcttaaccaatctcattgaataagaagaatggaagaagaattctcttcttcagagaagaatattacaatgaagatcatgtaa

SEQ ID NO: 227569 - DNA, 474 bp, Glycine max
  unsure (1)..(474): unsure at all n locations
tgttggtttttagctagacaactctttattactattnnttattttctatattnttcttccatcttattcttttcttgctcgctctctttntgctcctttctttccatgagatattttgctacctaaacatacgtatatttttgtgaggtattttgctatatacatgcgtgtccaaggtatcttgctacctaaacatacatatatatgttttgtgagatattnttgctatatacatgcatatccaaggtatcttgctacctaaacatacatatatatattttgtgaagtattnttcctacatacatgcatatccaaggtatctttctacctaaacatacatatatattttgtgaggtatgactaccttccgagcttgtgcttgttntatttaaattcctaggatcatgagcaactaggtgtgtcctgctatgacttgagaaacaaaggtgatcaaataacaagcagagatttaaa

SEQ ID NO: 227570 - DNA, 169 bp, Glycine max
ccttgggaacttatcaggctagttatgccgccgttggtcttgcctaaacccatcccgggttataaccgttctccaacataacccgggccatctataccgctgaattcggacagacaaggctgcccaaagagggagtctcacggggagatgctgaccacctcaaaagact

SEQ ID NO: 227571 - DNA, 336 bp, Glycine max
  unsure (1)..(336): unsure at all n locations
tgccacccagctcgcccaggcgagcaaggttgcttcctccagaatcaacagccttctggaggaatcttctggagggcccaagtgggcttggttgctatttgcacccncatttttactaaatacaccccctgtctttcttttttgtgattcttttttcgtaaagttacgaaaacttacgaatttcgtaacgatacttgttttctttcagtaatgttacgaaaccttgcgtattacataatcattcccttctttgacctacggaatgttacggaacctcactaattgtgcaacaatgctctcttttgatttccggcgcgacacggaaccttacggatt

SEQ ID NO: 227572 - DNA, 236 bp, Glycine max
gtggtttgtgtgacatgggaatgcttgatgaggctagtaagtatgtggaggaaatgttgtccatagatttttctcctcattctgctgttgttcacgccttggtgaaggggttttgcaatgttggtagggtagaggatgcttgtggagtcctcaccaaggcactagagcatggggaagctcctcaatcggatacttggatggccataatgcctgtaatatgtgaagaggatgatgat

SEQ ID NO: 227573 - DNA, 443 bp, Glycine max
  unsure (1)..(443): unsure at all n locations
tccttcctaacaagccattactgccacgcccatcaacctcaaaactttntccacttccttccatctattcaaaattaaatatcccanaagattatattgtttctcctaacaacatcgatgctctcaagcctgcctttctttccctctcggcaatcacatttccattgttattagaaaccaaggcaagcaagcataaatctattatctagctcatcccattgtttgatttgattctgtgatggtgatgatgggtgtcgtgttattggcacaggatgcacttgctgttggtggagagtttgggatattggaaggaagatcatttgctctcatacaccccattgtgatgggttctttcttcttgtatacactgtgggcacggtacttgnggtggcaatggcggcgagttaggactatccagaatgatattaatgacctcaagaaac

SEQ ID NO: 227574 - DNA, 362 bp, Glycine max
atttcctggtgcttggatgagcatattccttatgcgtcattcataggcatcttctctaatatataaaaattaaaaattaaaaataaattggtctatctcataattttgcagacctatgatgttaaggtaatgttctcgcgcaatgcattactggtggacattgttggtgagagtatcggtcgagtattgaaactagattcaattcaagcttggccaacatggaaaggaatagatgtaatgatatttgattcttgcattggtggatcacacaggaagaaaacaccgtatgtactcattataactagttcactttcacatattccatgcaatcattatacactttttcatattttttttttata

SEQ ID NO: 227575 - DNA, 487 bp, Glycine max
  unsure (1)..(487): unsure at all n locations
tgcgcatatttccttacaaacgttctcttgcacaagacattctattaaccgaaaaaaatgcacccatatacaatcaaggcagattcgttacctagattatttacacgtacttccaaggtgtatttgttacttacatcacacacatctccttggctaaattcacatacatgcatactcaaagcattttggggtaccaaaaattgcacatgtgcacatcttggtatttctaatacctatacatacacaaacttcatgatgaatcttgactatctacacaataaggtgctacatttcatgctctcttcaagtttttgctacctaaagccgcatggaaattcaagtatantttcctttgctgactaanattgtattcaaattaaaagggatacatctttctggtaatgtatcttctttacataacatgcaacatatntatgtatatttctttgtgagacattctgactaccacaaactatatgtacataca

SEQ ID NO: 227576 - DNA, 327 bp, Glycine max
aaatgaagaccagtaaagtatatagaaaatatgtataaaggaacaaaactagaaattgtgaatcaaaatattgaccacctccattgctacttcgtgcattgataaatatgtatttatgtattagtaaagcatactacattgatgttagacaacttatccattctaattgaaaatgttctttcaatttatctcagcctgatatgccttattatttaattataacgaatctgatctcttatatatattaaattaaaatatatattgccctctgacaattttaataacatctattaccctctaaaaataaaattccacttgattattttt

SEQ ID NO: 227577 - DNA, 489 bp, Glycine max
  unsure (1)..(489): unsure at all n locations
ttcataatctaggtatctaaaacccctcaatttagtggactttcaaggtttgagaaatgaaaatgagaatggggtaattctggagtaaactctcatctcaaacaagtctataacattaatttaaacttgctaaaactggttttacgacaaaaactccaccgattcaaaatttgacccctcaacacccaatttaccctagaaatggctcttgctttcacctttgtcactcatttttctcatttgctctgtccaagcttaccaacaagtcctaattgacattctaaactaaaatcaactcactttagactccaatgtacaccaaccccaaatttagctcttcaaaccctcanaatctcacactnttctacctacaacattgtcattctcacatttaaccctaaattaactttccccctcatctctactagttttctatcaatcaatttcagcacacacacatcacagagcatcatcataaaaccctaaaac

SEQ ID NO: 227578 - DNA, 222 bp, Glycine max
aggcaaccatgtggatggatcggtttgctcttaccttgaacgggagtcaaaaacttccccgattgttaaccaaggccaaggcgatggcagacacctactccgcccccgaagagattcatgggcttctcggctattgtcagcatatgatagacttaatggcccacataattagaaatcgttaggaaacttgtgtggtctctcagaccttgactagatatgact

SEQ ID NO: 227579 - DNA, 344 bp, Glycine max
tcatcggatgatgccaatcgaacatttcctaatcgacatcatccaattgttattcatggatgaattgaataaacaatggccggtgtcggtcgttatatggccccgactgatatctttcagcctacattgcgcaatttcttttacaaacgttggccgataatgttttttttttaaggtagaggaagttttttgttctggtgttgccttaaaaatttaaaacgtacgtcggcaaggtttttccgtgcgagctcaaccgagggttcattccgaccgacactggcatgttgttcttcacggaaattgatgttaacctgactaggaacggatcacttgatacacgctgt

SEQ ID NO: 227580 - DNA, 163 bp, Glycine max
aaagacgaaccagaagcttgcggaagaagaagaaacgcctcgcggatggatgctcaactcgcggaagaagggaagggaatgcgcacaagaagaaaaggctgggtgcacaaaaatgtttaaaaactaacaagggtatttctgccttttcccgtttagtgttggg

SEQ ID NO: 227581 - DNA, 488 bp, Glycine max
  unsure (1)..(488): unsure at all n locations
tgtcatatagttgtcccttgcttanaacttatatgtctttntgttttctcttctaaatttaaggatatgaatttaagtatcacacattcattacatgttaacattttctatatatgaaaaatatatcangtgatgagagtataacaaaagagctaatatgaggaaaacaaagcatttccataatttcttgcaacttagctcgttcttttgttatgtttctcctcatcaaaacttgtatgctgccaatggaagtagctcaagcttaatggtggctgtggattgagatggaatacatctgatgtggccaatgcatggttctaaattaatcagtgttagttttaacaaagtcatagaaataacaaagtcaaagttagatcttcagagttaaaacctgactaataagacacaattaaactgatcacattgtatntaagtatgagaaatatcgaacacactaatatgagctcaatgcagaacctgactcacat

SEQ ID NO: 227582 - DNA, 258 bp, Glycine max
ctgtgatcgtatccccatattagctagatcttgacgggtattcaagtcatccttcctcttgccttgaatgttaaggagcatcccaatcacactgtcacaaacatttgtctccacatgcgtaacattcattcaatgtctaacgtctagattagaccagtctggaagatcaaagaaaatggacctctgcttcatatgcaactcttacttttatccttctttgggtctttccaatacagaatcaagtgttgaaccgctgat

SEQ ID NO: 227583 - DNA, 303 bp, Glycine max
  unsure (1)..(303): unsure at all n locations
gtctcggattctataacttactcgttgaagaacgaaatacggatgaagaacaatgaagaacggacgaaaaccttcacggatttgcttacggaaacatntcggaagcgttgcggaagcacctcggcttggattttcttcatggaaacaattcttttcacccagaacagctgaaatacatatttagggggctgagggatccttataacagccccctccagcctttttatatgaaaaagggggaggaggttgccgcccagctcgtccaggcgatcttagctcgctcaggcgagctgggcggcttcc

SEQ ID NO: 227584 - DNA, 165 bp, Glycine max
caaaccttcctcatatgcaaggctcatgcaactttcattcatccaacttcgatccatctaaataataactctgggatactcgcaaaattatttgatgcatgaaaatctcactttttcattataggtgtggccctatcccattcatgaagacattttttatggtag

SEQ ID NO: 227585 - DNA, 595 bp, Glycine max
  unsure (1)..(595): unsure at all n locations
tgtaatattcatagtaatcaagaaaatgacgttgggggggtcaatatccaaaccaattattatattatcttcaaatccagaatattccacctccatataccatattgctntgtatctggatagctcaacaagcataccttgtgcttagcttcaaatcatatgttgtctaaccacatgggattgtaacacccttctcaaatcaaaggaatttcaactccctttcatttttatattcatagtcacccaagggatcaatgagtgattaatacgaattgaattacactacctctaataaataaaaaaataaaatcatgatctctttgtctatgaggtgggatccgacaaatgaaatcatcactgtgatcctcacctaactacaacagaacatgaaccattcgctcttagatcaaacatatatcgtattcacatcctgttaacttactataaaaaacatttattaccaactacgtcgcaattcgctaccattataatattataatcatatccacattaattctaatcatatctgttgtacacatgctataataacgccaacaatacaacgacatccgtattattatacgtttatcagccc

SEQ ID NO: 227586 - DNA, 281 bp, Glycine max
  unsure (1)..(281): unsure at all n locations
tgacacccagctcgcccaggcgagcaaggttgcttcctctcagaattcaacagcctttggaggaatcttctggagggcccaagtgggcctggttgctattcgcacccacatttttactaaatacacccccctgccctttttatggtgattctcttttcgtaaagntacagaaacttacgaatttcgtaacgatactctactttttctcgtaatgttaccgaaccttgccgattacataatccatccctctctgacttaccacatgctactgaacctcacta

SEQ ID NO: 227587 - DNA, 156 bp, Glycine max
attctaaggggtaaaaccccctttgtgccaaccaaaaaaacaccccccaaaggtttttcccaaaagccttggggtccccaaatcggggggaagcacaccttatccaatacaccgattatcagggtccatacacaccagggttaaaccccatttaag

SEQ ID NO: 227588 - DNA, 427 bp, Glycine max
tccttctattagtgaactatgaaactaagcttgtaccaacatttgttctatatatatatatatatatatatatatatatatattaagctacaaatgatgattgaatacttatcgttactagtttataccactgcgcatatattagcatataagaactgttttaaaataatcagtaatctctgaatgtgattcttcgaaatgcttgtagtttaaacaactctgtgttatatggaactcatggtatgaaaatcttctaaaatggaagtttttaaaatatcgactgatggtgctaacttggctatcgtaaatatatgaggtaattaccttttctggggatatttttctaatatacgataacaattgtacaatgtgatgcagtgacattcttgtaatcgagatcactatactttatttctatgacccacat

SEQ ID NO: 227589 - DNA, 115 bp, Glycine max
gctttgtcatgaggccagtcctgaccaatcattacagagaatccaatgtcagagccaaatgaaagattatctttcaattttgattctcttgtcacgggtaaatgcacgtcgctga

SEQ ID NO: 227590 - DNA, 410 bp, Glycine max
tgtagtggtggttatgttatcatggtttaaatgcggatgtttagtcaacttttaagttagtgtccacttttgtgttatatattattagtatcttttgtgaacaaatactattttatatgttatatattgataattattataaacgttcaattgtttgcattttgttaattttatgtgaaagattgaatatgataacagcaaaaggcaaatgggtaacatgcccaatatgatgtataaaacaaaaacttatgtcaatgatatgtaattccagcccaaaggatactccttgcttttagcaaacctataacaaacttcaaatgtttctatcaatccttttattgtctttgtgtcctcttctgtcgtggctgtgattggaaataccataaaaaggagataacagagaaatgaca

SEQ ID NO: 227591 - DNA, 139 bp, Glycine max
gttagatacaaattatggaattgatgaaacagaatcaatactctcgttttctgaaaccctcaaaggtcttatgaagctcatatgttaacccccaatgttgatatattatgaaagactataacatatgattctccccccc

SEQ ID NO: 227592 - DNA, 406 bp, Glycine max
tgttgccttagcacgcaagttatttgaataaattccagacgatgtctatttggaccctctaaagacattgcctattgaggaacaacaaaggcataatgctgagaaggctaccatgatggagatagatggtgaaccagtgacgatggtggtagcgatgttggtggtggcaccaactgttattggtgtggtggtggtagtgacaatgatagtggcagtgacattgatggctgtggtggtggtagtaatgtccactgtgatggtgatgtctatggtggtagtaatgatggcggcagcggtagtgatattagtggtcatggtgatagcaaccaattatggcggtgacaattgataacgatggcggccgtggcgatcgaagtggtattggtggtggtggcgatgacagtgg

SEQ ID NO: 227593 - DNA, 61 bp, Glycine max
gctggctgtgacaagggtaatacatgtggggttctggacattttttagaggatgccatctt

SEQ ID NO: 227594 - DNA, 367 bp, Glycine max
  unsure (1)..(367): unsure at all n locations
cttaacccctntctaaatgataggctcataatgcagaagaagattaataagcaatcaatctaataatgttctttaaacatgcaagacacaattgattgcaataacataaatgagataagggaagagacaaatgcaaactcgatttatactggttcggccactttccgtgcctacgtcaagttctcaagcaacctacttgagatctttcactatctttgtaaaaatcctttctacaacttctgaacgcccaagcaatccctttaccttgtgttcaggaaactcatatttcacgggaccactagtctctcgattacaattgactntctgagaagaatagaaagatntctctcctttagagtggataata

SEQ ID NO: 227595 - DNA, 215 bp, Glycine max
acaacgatgataacctgatcccacggatcacacctgtccctcgtttatattgccatggaaaacgggcaaaatttcctattgcccttaatcaacggtgaccacccggatggtaacaaaattcttaaaccttagaatagcagttaccgaacccatttaattttgaaactcgaaaggggttttcaaagaaatttttctttgaaggtcagtaactctct

SEQ ID NO: 227596 - DNA, 220 bp, Glycine max
caaagaatcaaagtttcaagattcaagttccgtgaatcaagatcaagattcaagactcaagattcaagaatcaagagaagactcaatcaagataagtatcaaaatgtttttttcaaaaactaagtagcacatgaatttttcacaaaaccttttaccaaagagtttttactctctagtaatcgattaccagattattataattgattaccagtagcaaaat

SEQ ID NO: 227597 - DNA, 490 bp, Glycine max
  unsure (1)..(490): unsure at all n locations
ttgagtggagcaaaagggcccactttccctctttactgtgacccacactcagccacanaagtggggaaaatctgacctttgaaacgctaaaatcctgcctcggtttgcatgccgtttctctggttccagttcctcgcgtttctctgcgtccgtcggggccagttttcgaaagcaagcaatatatatatcaaaacgctcagaatagaaccccgagcgtggttcagatgttggtttcgttaaattttaagtcgcacgcaaaacgatgatttttaactaattaattaggaattaacccataacctcccagttatggattcctcttccttaattagtctaacccgcgtatcttgcccnccacttttcctacccttaccaagaacatatatgcatatacactgaataatacttatatatatatatatatcattcaaaatacatcgttttcaaaaattccgggtagaaatctccaggatgttacagatagtatgac

SEQ ID NO: 227598 - DNA, 147 bp, Glycine max
cttattaatttaatccccccataatttctcttaatatacactcttacgatacctacatcttttttatttattaaataacgtgataagggtatattcctaaaacttttgatttggaataaattaaatttacttttggcctgtaaaaaa

SEQ ID NO: 227599 - DNA, 476 bp, Glycine max
  unsure (1)..(476): unsure at all n locations
gcttctanaagacttgcataatcgattagagatagtctgataatcgattaaaacatagttntttcgctgaagaagtttctaactttagaaacaatctttctatctctacatgatgatgcatgatgtacatataaatagattaagactaagatgcaacaattaatacaaatgtcactcaaggagttggacatgtaaaaagacaaaactctctaaacttcaaagcttagtcttcatgttgctcccccttatctctaacactagtttctcaaattcatgattttggttcttcttgtttttaatcataacatttgatctccttaattttaaaaattggtgattctggttcatttattagattattaattgataattgtaattagtagacatattaagttaattataaattaattaaaaattattattcattaaaaaaactctaactaaaaattatgagatcctaatttcctcaacctttc

SEQ ID NO: 227600 - DNA, 534 bp, Glycine max
  unsure (1)..(534): unsure at all n locations
gtcacctatgtgtatagaatctttcccttaaaacgccctatgttttttatccccctccccttgaaatttcttcatctaacgagacgactttgccacacttttattacttacactcaacaagagaaatcgacctattatctccccaattggttgcccctcccactttgggataagtgtgatgaaagatgagttgcatcctatngaaaaaccccatatctatggaatcattcaaaaatctcaaaccatcccttgtatgtcttccaaaaggattttatgaaataatattatactattggaccttgctctttgagctccacacttcccacggcttcttacttcttacaccaacttgactaaaacctattttcatgtgaattgatgactgacccatccaaaccactatcatattttatgttcggcccatagcagagcttgacccaatgtcatatctcaatttcttcagactattggcctttcgccaggtctctcttattcacaaaatttattctattttccttcatgggttacaggatg

SEQ ID NO: 227601 - DNA, 351 bp, Glycine max
ccaatatgcacccttatagggattaaagtttaagttcttatggggggattgatatcctaactagtttcacatatatatttaaccttgtttctctaccctcattgttattcccaaatatctagccctgacgcctgctctatatatatatatatataagcctaattgtttgaatataattgttgttaagcctagtgcctccattcttctcttatatccctatctgccttaattgctccctgcgtgttatctctgcaggatacttgcttaaaatgacaagcttcaatgtcaaaagttattcttatctcgcaagtctgcgattggtgcttttagttaaccatatacacttgatca

SEQ ID NO: 227602 - DNA, 134 bp, Glycine max
ctggctatgttagtgaaatctcattttgaaggatgaagacttgacctaacctaaaattggggtgaataagcatataaaccattgtacctcatcagccttttcttttctctctataccgagtttaatctataagc

SEQ ID NO: 227603 - DNA, 492 bp, Glycine max
  unsure (1)..(492): unsure at all n locations
ggcattcgacagtggagctcatccaatggagtaattgatgctatagaaattcacgatttaaaggagctgaatgctttggaggctggtagttctgacagaaatctgaatcaatcagaagtggagctcaagaagtctctgcaggagcaattgtggcatgctgctaatgcctatgaatctttgctgaggcaaaaggctagagtgaaatggttaaaggaaggggacagaaattcagcttacttccacaagctgataaatcatagaagaagacataatgccattcaaggattgatcattgatggggaatgggttcacgaccctagtatggtcaaaactgaggctttcaatcatttcatagatagactttctgagcagaattntaatagaccaaccctggatggtgtgcagctaccttccattggtcanagcgagaatgaagcccttgtgggcagattntctgatgcagaaataacctcagctgtgtgggactgtcat

SEQ ID NO: 227604 - DNA, 236 bp, Glycine max
  unsure (1)..(236): unsure at all n locations
aaactaacccaaggcaacaagggggttgaggattatttcaaggaaatggatgtgctcatgattcaagcaaagattgaagaagatgaggaggtaactatggctcgatttcttaatggtttgactaatgatatccgtgatattgttgatctgcaggagtttgttgaaatggattatntgcttcacaaagcaatccaagttgagcaacattaataaggaaggagtggcttaagagttta

SEQ ID NO: 227605 - DNA, 447 bp, Glycine max
  unsure (1)..(447): unsure at all n locations
tgccacccagctcgcccaggcgagcaaggttgcttcctccagaatcaacagccttctggaggaatcttctggagggcccaagtgggcctggttgctatttgcacccccatttttactaaatataccccctgcctttntttggtgattcttttttcataaagttacggaaacttacgaacttcgtaacgatacttgttttctttccgtaatgttacggaaccttgcggattacataatcatgcctttnttgacttacggaatgttacggaacctcactaattgtgcaacgatgcttccttttgatttccggtgtgtcacggaaccttacgaattgtgcatcaatattttcttttgatttctggcacgtcacggaatttcacaaattgcctaatgatgggtgccaagcacctcataatgaccaaacacaagttgcatgccaccaagcac

SEQ ID NO: 227606 - DNA, 465 bp, Glycine max
ttaaaagatagaataacctgaaattccctttcaaagaatgggagaaacgtttaaatcagatgaagaaagggaagaaagttcccgctctaagaaaaccaaaaaatttgcggaaagatctttggaccggaccattcctaacatacaaattggttccaatgaacaaagaaagaaaggaaccctgacctaaagtggcttatcctttgattccatcaaattttggtgtacgacttttccccgcctttcaaaacagaataggtaggcctcagtaatttaaagccaaaccccttagccaaaccctaaaaaccttccaagatgcttgatctgaccctgattttgatgaagaaattgaagcatatacattttggtaaatagtaaactctgcaaatgactttagattttttttcaccgtgtctatggcttaacaggtatcaactctagggggttttgaattttctgagatttttt

SEQ ID NO: 227607 - DNA, 449 bp, Glycine max
tctagaaggagatcaacttgatgttctatgcttcttgaatgtggcagtccatgatgaatctccttgggaaagacatctttaaattcctgcaataacggttgaacactacgagaaacataaatagttaactgagtagaattatcactctctctctcttgtgtatcactcgtttcctcgggtgtatcactcttctttttcatattcctttgtggagcctcactactttctttctcttgttctctctttactctcattccgattaggtcatcacacacttttctatgggatagaggtttaagagtaaacgaggaagatctggctattcgtctgtagggcatctctttgtacggctcaactaacgttgcatttgtgtagtccacgcgtacaagaatcagcgctgagattcgtcaattgatatataaccaccattgtaccagctcttgcatgat

SEQ ID NO: 227608 - DNA, 305 bp, Glycine max
gacagtatgagagatctaaacaggtgacattaaacctgaaccactagaatataaggtatctagattttttttttcttctcggtccttgttacttttctaaaattctaaaaatcaatacttcaaaccaatttaatataattatcatagtaaatactaaataaccattagatgaagatattcaatttagtacatatgtcgttcaactacatttaaacccatattggatacttttattaacctttatagttttttaaagatacataatagtttcacattgaactaaaccaagttgaaatcattttaat

SEQ ID NO: 227609 - DNA, 468 bp, Glycine max
cgcggttgactaactcattggacttaaactcactatgaggtggtgcagtaaatgcatgctacctgtgattttctcaactgcttggtaatggatgatgatggtttcctatcacaatcctctatttgtagcatgagatataaatctacactttatctaaaattacccaatacaagttttgtgttggcagtctagaataggccttctctctatgtaaaaaagaggtagtattgctctgaggccccccccaaagatttgtgttttttcccctctcacttgtcaaggaaatggctaacggggaacgacattggtttaattatagggctacccttctcattgggtcttctaaatgaggagggcttttcacaataaggaacctccacagttatgggattcctttctgaaataatggggaaattggacaaaaaaggctatttataaccccgttacttttctcaccgggattttacg

SEQ ID NO: 227610 - DNA, 167 bp, Glycine max
accttcttctactttcgtcttcttattgctaccattaacatctcgacatattgacaatacattgaaatgatagtttggatctatgccagacatatcgactaacaaccatgcaaatagattagcattatcattcaatactcgaactacaagtgattgctcaatttctt

SEQ ID NO: 227611 - DNA, 445 bp, Glycine max
acatctccctctttctcaagcagattcttcttgatatcatcaaaatcttcgcgatttacattctctccctctttgatgatgacaaccacctgtaggttatgagcaacaacaaagaaaatatctatttgcatatagtttactcccccttggttttacaatgattgcttatatgagacaattgaagatttcatatttttcatatataaaaagctgtctcataaaacaatagataatatttcttactattttatcttctatctttctctcccactctgtcaacatcaaaaacaaatcatgaatagagaggagaaagatgttaccacttgtcgcaatgtatgagaatcaagtgattccaaaaggcattaaaacaatcacttaatattaatcaagctaaaacaagtacaataacacatcattcaaacacaatccaatacattcaatcatc

SEQ ID NO: 227612 - DNA, 113 bp, Glycine max
gttttagtgcgtgaggggatgaagtaattcaggtttttaatttatcaacaacataacatcagttttttaaaaataaccgatgttgacctaagtagttaacatcggttttcaaa

SEQ ID NO: 227613 - DNA, 470 bp, Glycine max
  unsure (1)..(470): unsure at all n locations
tgttcgcacatcgttcgtgtgtatgatattcactccacaaggtttgaagtagaggagaccttcaaccctataacgcaacgtggcggacaaaagcgggcagttaacttgaatggtcattattgtcaatgcggaaggtattttgcgcttcactatccatgttcacacattattgcagcttgtggttacgtgagcatgaactactaccaatatatagatgttgtttacatgaatgagcacatcttanaagcatactccgcacagtggtggcctcttggaaatgaagcggcaattccttcttctgatgaggcatggacactaatccctgacccaactgcaattcgtgcgaaaggtcggccaaaatcaacaaggataangaatgagatggattggctcgaaccatctgaacaccgaccaaaatgtagtatatgtggagcagaagggcacaatangccccgatgtccaatgcaatc

SEQ ID NO: 227614 - DNA, 261 bp, Glycine max
cccattttaacacttgcttgaagaacaacttacattctagcctatgaacagcacattaaatatttgtacttaccaaaacttgcatttgtggtagctggaatatctgtcaccatcctgccaatgttaaagagagaagattgattacaaacgaatttattttaggtagccagtccaaaatatttataaatttgagcacatttatatacttattaggtttagctctacagcttatataactttaatacaattacatcatatttt

SEQ ID NO: 227615 - DNA, 480 bp, Glycine max
  unsure (1)..(480): unsure at all n locations
tcataaggttatatatggcctcaaataagctcctaaggctnggtttgataaactaaatgagactctactaatgtttgaattcaaatccaacaagtttgatccttcactatttgtttattttaaggcttcatccataatctacattccggtatatgttgatgacatcataaaaacatgaaatgatattcctttattacatcaactcatttctaagctaaatatagtattttctctcaaagatcttggatcctcagattatttcttgggaatgaaagtaaagcatctatctgatggttccattgctttaacttanaccaaatatattagagacttaatgggcaaaaccaacatgttagatgtcaaacctatatcttccncaatggtaactggctataagctcacctacaagtggtttaatcctttctttttatccctatatgtatangtcatttgtaggaagcacttaatatgctactataa

SEQ ID NO: 227616 - DNA, 257 bp, Glycine max
tgttctcctctatatacctttgtaaggctgttcaacgagcttgaatgctttgatttccatacagcaagtgatgcagaaattcatgacctgcagatacaacattggttgaaattatgacataaaaaacgatgtcaatataaacaagcaaatagacctaatgatccacatactacattgtttagcataatcaaatttgtgaataagcacactctcaaatcacactctttatttgtagctgaaatttatagaaatcacat

SEQ ID NO: 227617 - DNA, 440 bp, Glycine max
  unsure (1)..(440): unsure at all n locations
gacacttagaatctaagctataggagcattcataccgggtgtatttacccacaatgcctagacttcgaagagtctttcagagcctctccatccttattcatgtccaacctatataaaattttaacatgcagactccatctatgaactataaaaaacacatgactccttaattgttctcaaaataattttaactcgttgcatctcaaagtgattaaactcattgggttcccacaatggatcccatcataatactcattgtgtgttaatttgtcgcccttacagagtcttacagtcatgtaattgtacagtttatagctcacaacatattaatacatgtgtgatctcacaatttaacacatactcaacttgtnactcatgcacaatttacacacattcattattccaagaatcacatcatcacgcctcatgcatgatataca

SEQ ID NO: 227618 - DNA, 206 bp, Glycine max
  unsure (1)..(206): unsure at all n locations
tcagttagactgtaactgtactgacggcagagtcagtagtctttaaatggcctctcaatagtttttctagttctaagctcatttgtaatcaataaacaagaaattatttctctctttactgttctcttcctactacatttgtaatatggtatcaagaatgtaaaatgagagaagctgangggatattggactgaanatcatgtgtc

SEQ ID NO: 227619 - DNA, 463 bp, Glycine max
agtctccacgccccacctgacaatgaaattccctacactgacagggaagattgtaactgtcaagcctgaccaaatgcaagcatgataatgctatgtagaaagcctgaggtaggactatatcctcccatccaggagcctaccatgcctcaccctacagcaactaaaggcactcaagtcatgacagtggaccaagggtcttaaattcgtgacctggccgtctgctaatccaacatagacaaagaatatgacatagatccatgagacgacacctccaacagaggcctgaaatcgatcaaataacttatccagctgtaacttggaccaaaactggggcagtgcacgcaactcaatagagacctctctagtcacgagcattggcgcatcgccaacgtgcttcaatgaaatgtagatatattttcctggcatccatctaaaatgtcggggattcactccagcataatct

SEQ ID NO: 227620 - DNA, 227 bp, Glycine max
  unsure (1)..(227): unsure at all n locations
cacttattntaacctgcaatagcaaattacatttaaaaagaactatccctaaccaaagtttcttctaacttgatagttagcaaacatattcatagctaatgtatctcgaaatctttgccattactcagtagcttgaatagttgtgatatcatctatgacattatcttgaactccttcccttgattgatggactaaactctcattaacaacagataagaatttaagtc

SEQ ID NO: 227621 - DNA, 592 bp, Glycine max
  unsure (1)..(592): unsure at all n locations
aganacacgcgggtgtattgatctctctagtgacaacgtagactactcaagcttgtccacanatatagagttttcgaagcttagtcactttcaactttctcatctaagctaataatggatcatctngtcaaggtccgagcgccttatatatgatcacgctcctacaagtaacaagagatttgactttgcttatcacagaactatcgctagtcgtgacttgtctctatctctattcgtaggatttcgtaaagagcattagagcctcgacttgtgatcgacctaccgccatgagagtcggtaagcggtccatgtgcgcttaagcgttcctccttctttcctatatataagagaatcggcttatgtggcgaagcgccttaacgtacctctcctatcataatcagatgaccgcctaatgtgtcaacaccttaaatgagctttcgttcactgatacatagtctgtgaaatgacagcgacccctatccatcactttgttcgagagaactacctggtctgaatacctatggaaattgatggagcatggagcaatgggcactctcttgtgtccaccaaggagaaaaactgagtactggcc

SEQ ID NO: 227622 - DNA, 420 bp, Glycine max
  unsure (1)..(420): unsure at all n locations
cgtgcaacgtggtggctgacaccctntctcacatncttgacccttagatttcaccatatgtcactttatccatgttgaacttcacattcttagatcagttgcaacagactttgctagctagttctaagttctgtttcttctccaacaaatttaggtaaacctcacttcccataagaatatcagcattagttgcaaactcattctttaaaggcaaaatatggttgaactctaacaacccattttagaccactttgttggaaaagttccataaaactccattgtgtgggcacttgggtgtagctaagacatcccataagctgcaacaaaatttctttcggaccaacatgcgtcatgatgttaaactctatgttacaaatgtaaaactctctaatacatgaaacatgaacacaaatgaccagc

SEQ ID NO: 227623 - DNA, 248 bp, Glycine max
  unsure (1)..(248): unsure at all n locations
gtgaaatcaggtgcagccatttcccttagagtcctctcacgaggtggaggttgtgccatgctctcagaatgtgcaaaatcagaatgctcagaatcagaatgctcaaaattataatgctcaagatcaggatgntcaaaatcaccaataacaaaatgcacagattcaccagttatggaatgctcacaatgatcaaaaggtataaaatgatgcctaactaatctatgaaatgtcctatccatctcacgatc

SEQ ID NO: 227624 - DNA, 191 bp, Glycine max
acttcttcaagcttttccttgagcttcaagctttaaccttaggttgttcaccatgttgttcatgttggttcccctatctctaaagatcttcccatctttggtttgatgatgcaaacatgatcctagtttatcctgaaatttttaacacttagagagatagatatcatcatcatggtcatatatattatatt

SEQ ID NO: 227625 - DNA, 254 bp, Glycine max
  unsure (1)..(254): unsure at all n locations
acccttatgagttgatgatttgtcaatattgaccctcgacctgaatgattatctncaaatatnctggttagattctaggagagcatatggttcaaggcaaattaaccccaaatttgggattcatagaaaaagatacagcatcagcacacacaacacataagttgtgtgaaaaaaaaaaaagcaatcaaaggaaatgtgtgctgatgtaataaggtcaaaagcaaactgaagtgaaaagctagtgagaagcccat

SEQ ID NO: 227626 - DNA, 181 bp, Glycine max
acccgtcctagcttttcctaacttttctaaaacgtttgagctataatgtgatgcctctggagtgcgagttggagctgctttgttgaaggtgggcaccctattgcttattttagtgaaatacttcatggagcgacccttaactacccgacctatgataatgagctctatgccttaatgagag

SEQ ID NO: 227627 - DNA, 203 bp, Glycine max
  unsure (1)..(203): unsure at all n locations
actaagcttatgatattctttccattntccttccncacactatgttctaaagttctctaagtctacatagctaagcatgtttacatcactgacagttttataaactcttcatcttctcctttatctttagtaatacgctatcagaaaaatgtcttaaattccaggaagttcactgcttaccatttcatgtaaagattaactca

SEQ ID NO: 227628 - DNA, 275 bp, Glycine max
agcttatgcattaggtagattcagctttgggagaagttactcatgagaaattttataataattcaagggtataagtataagttgcataagaaggttttagcctacgagaggacattaattaccaactcattttcttctactatagggcttattgtcgtagacatttacagcatgaatacattgaatacttttagttggattattataacattttcacttctatctttaaattttatgcaatatataactggcaatcaataatatatgatgggtct

SEQ ID NO: 227629 - DNA, 475 bp, Glycine max
cgatctccaccttcttgaggatgacaacttctgatatcaagaaatacacacacacactctttcctagtcgatcactcacataaatttccattctccccctttgttattgaatctatgcttctcttaaaattaagttgattactcatgtgagttcttgatttaatccctatttctctccccctttggcatcaacaaaaagccaaagtgcgtatcaaatttgaagtattcaaatataactaaacatccatacaacattcatggaaaaatatcaaccaaatcattaagcaagaaccatgaagcaacaatcattaatagattaattataaaatccacatagtcaaataacatactaaatatttgctcaaacataccatgcaaataaggaaataacaaattgttcacatatcataataatatagccaaaatacacggcttaataacacaatataataattatacaagaccagagagaagc

SEQ ID NO: 227630 - DNA, 63 bp, Glycine max
  unsure (1)..(63): unsure at all n locations
cactatttttatcanaatcgatataacatctttaatatagattgagttgtagttatgatttat

SEQ ID NO: 227631 - DNA, 300 bp, Glycine max
  unsure (1)..(300): unsure at all n locations
cttatcattctcctcatggtgtattaatctcatcaattccattctatgttcctgtaactttccaaacaaagtagcaagatacatgttagaaatatctcttgattcagtaattgttgttaccttgagttgtcattccttgcttaagcatctcanaaaattattaataagatcttcatttggaaatacttttcctaaggattcaagattaattatgtgagtgaatctctattgcatgttctgtatgatttcattaggattcattctaaataattcatattcatgagttaaagtatttatcct

SEQ ID NO: 227632 - DNA, 477 bp, Glycine max
  unsure (1)..(477): unsure at all n locations
tgcttactttgcatttgactatcaaggctcaaccaccttngttctgtatccacatggactactgaaaatcaccagttgccttctccattgtgccgagcaagcaggaccatcgtatgcgaatgccattcgactgtcgtctaatatggcaagacaacagcctcgtcatgtcttcactcatgccatcatatactatcgctctgcgttctagcacacggctagcgtcaaggctactattatatgaccaactaacgatctttcttgctattacgatatacatcgtaattgtgccttaagacataacttaggagcgatatctggcgtgtttaattcatctcttttaactcaacacgataggcttacactcgcttgtctcacctctatcataatgtggatggaactgcatacaaacgcaggaggttgatctcatgttgatttaatatacaaaacgccacattctcgtatgggaatccactcaat

SEQ ID NO: 227633 - DNA, 100 bp, Glycine max
gggacaagctacactggccccgaactttggtaatgccgactaaacgcgcaccctacaagagtttggtgaaagcctgtatggcaatagccatcgtttctga

SEQ ID NO: 227634 - DNA, 384 bp, Glycine max
  unsure (1)..(384): unsure at all n locations
ggtaaggaatgcaggttaacacatttattctacactttctggtcccaaaagagttaccaatgtcgtgtacaatataatgaaatgtattagttgagattcactaataaagctntcagcaccaggtgaatatctcttaataagatttttagctctctctcttttttttttttgcctgaaagaaatcattataaacacacatgtggaaaaagaagtggaacaaagttgttcagatattttcacctcaacactatttntgttnttatcctaatatttatcaccccttacttaattaaaaaattataagaattataattaattaagaaattaaaacaatcactaattaaaacaactactaacttattttactaaacattnttactccaa

SEQ ID NO: 227635 - DNA, 224 bp, Glycine max
aaccccccgatgtccaggaagatcatatctttctaaagggctttcctcattctttggagggagtggcgaaagattgactgtactaccttgctcccaggaccattaccaactgggatgaccctaagagggtgttcttggagaaattcttccctgcatctaagaccattgtcatcagaaaagatatttcaagcctcaggccagtggagagagcttgtatgagttct

SEQ ID NO: 227636 - DNA, 484 bp, Glycine max
  unsure (1)..(484): unsure at all n locations
aatcactaaaaagggtttgaaggtttatcatcttagttntccttatcaagtaaatggatcatttttaaggtccaacaccttagaatgatcaccttccaagtaaaaagaatcgttgattcacccttaagaaagaactacgtaggtctgatttcctcttcgatggaaggtacgtaggagcaaaagccccgcttttgtcgacctcaaaaaataaaaagaaataaaagttaaggtaatacaatttccacaattctgaaaaataggctggtgtcccttgagacatacgtgagaggtgctaataccttcctcanacgtaaatacaactcccgaacttagaatnttcattnttggaccggtttccttcggttttccgatgttttccacanataaacgttggtggcgactccgcgcatctttcctccttttggatagcgcacccgtgagcctcgtctcgcacgcatgcaanaggggcatgtgcgacactatt

SEQ ID NO: 227637 - DNA, 170 bp, Glycine max
atggcaatgaaggggctacatggcttttttttaccccacttgcattatataaattctagagacatatgcaataattgcacattggtgaacacatcatactgcaattcctcaaagctttctatatatcatggcaaaacaaaaacacgctttctcagaagctgccagaaaaa

SEQ ID NO: 227638 - DNA, 398 bp, Glycine max
  unsure (1)..(398): unsure at all n locations
actaagctntaatagcaacagtccattntcccttgactgagatgaaatcactatttncatattttactttggaaacaatggttgtgtcaagttctttaaagagttcaggtcattggttatatggtttgtgcagccgctgtctattaaccatgaatcactggaactattgcttgtggcaaagcatgttgtgacaaagagatgctcatcttcttgttccttcacaaccacctttggtttctttgatttgaacttgcatattcnctctacatgtnccatattgncacaatttccgcacttgacatctggcctccaccaacattttctttcaggatgatttgtctttttgcaatgcggacaaggaggaaaggtctcaccttgctgctcgttggagccttcta

SEQ ID NO: 227639 - DNA, 154 bp, Glycine max
acctatttggtgtatgtatttgggaaatttcattcataatagttctttgctaaatgcaatcatgttagattgtaaagcaaaaggaaagaaaacattattagaaaaataataaagtaagctaaagacaagtggatagatcggattttgaatgaat

SEQ ID NO: 227640 - DNA, 441 bp, Glycine max
  unsure (1)..(441): unsure at all n locations
cttcatttatgtttcttcttttgctaataccttaggttataagactttaagntagcacattgattcttaggtttagattgtaaatataatagataaaagttaggactctgttagaagatgttatgggtagataattttgattatgttgcatgtctgatangggcctattaaaggcctaaaagaggaagtcgaaagactttctcgtctgcgttttttctgcacaatgcgacaaactcactaagcacgactggtgcgctaaacgagttcatcaattaagccttgaacatatacatttnctaatgaactcgcttagccagcatacatgctgtcataccctaattttgtacggggaccatctgtntggtgggatgcgaccctcgcttgaccgcttctaggtactagacacccatcgttaggcaatctgtgaagttccgtgacatg

SEQ ID NO: 227641 - DNA, 331 bp, Glycine max
  unsure (1)..(331): unsure at all n locations
caatatgattcaaagatagatcttctaagagtcttaggaagaaaatttaagctgaaacagcaagaggtttggccaaagaatctaagataaaatggtttacaagagatatactctctgggtatcgattaccagaggatgtaattgattaccaatggccaaaatgcttcctgaaatgattttaaaatgtcttgaatactcttgaaacatgtaatcgatacacatgtctggatcganaccacagttgaactatttataaacctattagatattgaattcaatttacaaatggatcgttacctcgatggtatcgatacagtagtttgaccgttat

SEQ ID NO: 227642 - DNA, 503 bp, Glycine max
  unsure (1)..(503): unsure at all n locations
ttnggacatggaagtaaccatcagcctnctncctatcagagcgtttaacctctgtccagtttgtcatgcacaggtcacccgaattccagttcctcagattgcccatgggatcaatcaaacttttcttaatagttgcaattctagtcctaggagtgataaaagcaaccaaagcttaaccgacccatacaacgacaggatatgcaaatgtttcttaatagacactgtttaattcatagttaaacacaagcacaaaggaatctgagcaactaatgccatacaagaaatatgcaatgtaaatctaccaatttcataccatccataaaacatgacaaaaaccactaggcaataagtatgcagtttgtatatacttgcactgtcatataagtatacagttttaagaggcttaatatgcaacaataaaatcataggggaaaaatatcattataaaggatgatcttaccaggaatacacccgtaatggatagagtctggtatccgagcact

SEQ ID NO: 227643 - DNA, 189 bp, Glycine max
tgcacactttttgaagctgaatgatattgtcaaaaatttgaaccctgaacttaaataagtatctcttgataccttgcttagattctaggagagcatatggttcaaggcaaaattaccccaaatttgggggagtggaactaagaggtatgcaaagaaaaaggtaaagcactagcatacataaaaaataag

SEQ ID NO: 227644 - DNA, 264 bp, Glycine max
  unsure (1)..(264): unsure at all n locations
tctccgaagggcatggntatttccagtttcctganaatatctaatatatctctgtcaaatgacggtctttctccttctttgaaggtaccacaggatatggtacttctatactttcgttcaaagctttatcacttctccttctatacttctatacttctatattntgtgagcttgcacttcaggacgtccaatgctagtaaagaattgcggtactgagctggttgaataatcctcaagggtgatcctctggtgttgctcgcctgc

SEQ ID NO: 227645 - DNA, 276 bp, Glycine max
ttttcttctggagttgctgctacttctaaatcctgcaaaaaaaatttgattctctcttaattatgccttctacaggtggcgttaatctccaaatcaatgggaatcaaatcacctacagtagatcttctttgtatacaagagaacacaacaataagtatccacttcagaagaacatagtatatatgataactaagatatgaacacaaagaatcaatgaattaaagagaacaatataaagcaatgtctaaaactgaactatactttcttaatctagtc

SEQ ID NO: 227646 - DNA, 268 bp, Glycine max
  unsure (1)..(268): unsure at all n locations
tagctttaccaacaaatgctactgttaaaacaaaagaggcatacaagcctcttcaataaacacaaacatcaatggttatttagagcatactcatgcacagactttcttacgaacacttactcggacaagatattcctgtaacttagaaagatgcacccatgcacaatcaacgcagcttcgctacctagagtatgtatatagaccttccaggtggatttgatagctacatcacatgcacttccttggntaaacttacatacatgcatac

SEQ ID NO: 227647 - DNA, 99 bp, Glycine max
tgtatttccattgaaaaaacacttcagaagttactgtatggaaattaacaagacaaggtatctcaagggattaccggcttcacacggtcttaaacaata

SEQ ID NO: 227648 - DNA, 337 bp, Glycine max
  unsure (1)..(337): unsure at all n locations
agtgactggtgtgcaaccacanattntatagngttctcattgatatgttctacagtcaactttgcatgaatttataattgtcataacatatgattcttggatatgatctaggcattctttccttctttacatcttaaagccactggccataaagttatcccaatgtatattatttttgccatttgcaagccctttgagccaaacacttgatatttttggaacactaacctaggataaaagtttcctaccttaccttaggttaggagagaaaatgtgttttgttggngatttctatcatttggtggctaacgtaatgtaaatactctattcctaatat

SEQ ID NO: 227649 - DNA, 98 bp, Glycine max
  unsure (1)..(98): unsure at all n locations
taagcttgagatgatggaagtgtgaagggcgaaacttcctgcttttattgttgaccacagagcnggacctggagatatgtagtggcgattaccacaca

SEQ ID NO: 227650 - DNA, 61 bp, Glycine max
attttatattcaaatctgaactgcatgaaaaggtgcaagaattgtatatttcttaaagtag

SEQ ID NO: 227651 - DNA, 281 bp, Glycine max
aatgatatctatacaaaagttagtcttatgatgcgactaacactcatccctcttgtcctctatcgtaagttgatccttagctacctatgaagttgtttgaggatgcaacacaaatttagtgctaagatgggtgagggtaatctcattagttaggtctttataaatgatcttcctatcaagctgccatgacctttctaacagaatatgccctacctccatgggaactatatcataattaaattcattcttatatgttctaatgcagataggcaccttcactt

SEQ ID NO: 227652 - DNA, 267 bp, Glycine max
  unsure (1)..(267): unsure at all n locations
ctaacttctattaacttacacgaatccaagagccatgactctgtctnattatgnacaaaacatagatggtacaaccgaagatctccataagctataagctaatctaaactaggcccaattatatatctatagctacaatttacgcacgcatgtgtagttgatatagcagacgaacattgcttgatatcagtcatcacaaacgtaaggctgacaaggtatatgcgtgtaacgaccctctgaatggatctaggataggctttgatacca

SEQ ID NO: 227653 - DNA, 190 bp, Glycine max
actatagaaactaagctttatccaccacctatttagggattcggtgcctaataatacctattctgggcaccaacaaagcacaaggatttaatctcttgcgaaccaaaccctaatccaacaactgctttacttgaggaataaactcaagcctaagagatgtggcaatgctaacaagtgtctctttacaaag

SEQ ID NO: 227654 - DNA, 485 bp, Glycine max
  unsure (1)..(485): unsure at all n locations
ggtaggattatggggtacccatcacatgtggtactatgtggcggtcgggcgatggtgcacaacaagttttccacatccacaaatcgcgcataaacccaccatcccctattgcccacctccaactgagctcacgtactcccacgtagcccatatcctcctttctctcaacaccgggtccccatcaatcctctcaagcttccccaacatccaggtaattcaacatccaaatcatcacaaactaacaaaccaagcaaaacagggcaaaggcagaaaactctgcccaaaactcaaaccaaaatcacagctttttctcacttaaagaccctagtaacatttccttctttctaattcgttaaccggtggatcgactcgtaaatattactggaagtctctagtacataagtctacantttgaccgttgggatctgccagctaacatctagaactcattctgcactactctnntcacaaccagcagaacatag

SEQ ID NO: 227655 - DNA, 441 bp, Glycine max
  unsure (1)..(441): unsure at all n locations
ntntattctaatcttgaaattcaagagagtaccttgatttctgatgtctatgggactaaagacggtcattgaccaactcctcttctatgagttgacccaactgtctagtgatgatgcttcatctcgaaatccaccgcccgacgaccgcccccgccctcctctccaacgaaccaccccccccccccccactgttccacctccctccaccaccactacaacccccagtccatcccctccatcccaacagatcccccccccgcccggcgctcacaccacacntcccctccctcacaccccccacacccctcacatacctataacctccccccaccaccccccctctccgcaccaacccccctcagaacacccctcccccatcccaccccccccaccctccccctcccaccccccccccccccccccacctcccctccacccccc

SEQ ID NO: 227656 - DNA, 369 bp, Glycine max
tgagctcgttgttgctaccccataaagccgctcagatcttgttttggccccattcttcttttcgggccctcttcgtttaccattccaatgcttcggtcgtggcaatgttgatgtccctcagctcatcgcactctttatggaccttgatggccatcgacttgaacttttccttgaccgcttgcgcttctttaagttccacctttaaggcttgcacctcttcgctctcctcaggggattcagcctcttcctcatttgagatctctagcttcgggagtcaagttatctcttgcattttaaccttcaaccacttatgatagccaccgatgaacccaatacttgcttccctaagctctttatccttttattgca

SEQ ID NO: 227657 - DNA, 295 bp, Glycine max
  unsure (1)..(295): unsure at all n locations
tcaccttctggtcctcctcatagttgtggcatgagatttcttgctctattttcatctcccactccaagtaggcctgcggatcattctttcctttaaatggaggaatgttgagtctaataccatcaattcggttttgtctaggaacaccatcanttcctcttctcctcctttattcttcattatgatctatattctccatttgatccaacctctcatggagcgcatcatgctcgtgtacattaacctctccatatgttgcatcacaagctgcctttggaattgcgaaagccccact

SEQ ID NO: 227658 - DNA, 421 bp, Glycine max
  unsure (1)..(421): unsure at all n locations
tgtgtcatacttcactgtgacantcaaagtgtcattcacttgtcttatcaccaaatttaccatgagaggacaaatcatgtagatgtgaaactacacttcatcagagatgtgattgaatctgagaaggtgaaggtggagaaggtttcaacagaagaaaacctggttgacatgttcacaaagtccctatctagtgtcaagttcaagcactgcctggacttgatcaattttgaagatgcctaaggaagtctaatagaagtgcagccctgaatacaaagatatacacttgctggtttggaatcaaggtggagatttatggtgtgtgactcaaaattacaaaaggcacaagtgtgaaggtttcaagtggtgctgtcataactaacttcagctattgaatttagttgtcataactgaattggttttt

SEQ ID NO: 227659 - DNA, 250 bp, Glycine max
caagtgacactactttatagctttggagaggaaaaacttgcttgcacacctttcaaggacattcacgtttgctttactgtctttagacttgcgcgaagcgatttatgttcgccatggtatgcatgtgtgtaatttgagaatttacctcatacatgtctatcagtggtacagaattgtgtatttgtgtcgaaattccatatattgcttggcatatttgcgattcgagaattcattgtatttctcgatatat

SEQ ID NO: 227660 - DNA, 187 bp, Glycine max
  unsure (1)..(187): unsure at all n locations
ttgattgatatctccttctcacggctcgcagaaatngtatttcacactagccctattcctgtaccaatgctaagggtgtgcttgtccgagttggcggaaagctataaattggcaaattgataattaacactatttttgtgaaatatgataatgtgaaactaacaattttcaaatgctttactttgtc

SEQ ID NO: 227661 - DNA, 302 bp, Glycine max
cagcttgcagtctctacagactgggaacgcattcttttatgtcttttcaagtccaacatgcagagcaggaaaaaatgtctcctcaccggattccaacacttcgctagcatcctaaacagaaagacattgtcagcatttaccattctttaccaaactaccaaagtaaaaactgcatttgttaatagcacaattgccaccaatctccttgccaatataccaaatgtctaagaatccttccattggatgttcactagatcacccatgttgtctataggtcatttggtacaacatattggtaaagc

SEQ ID NO: 227662 - DNA, 382 bp, Glycine max
tattaaatactacatgtaacactatgaaaggaaatcttaattttaaaattgataaaaatttatctataatattacaaaatagattaaataaattaacaacttatctattaaaagtgaaatattaaaataaatgaaaaaattatttttcacctcaatttttgtgtgtgttaggtgtcatattctttacacacggcgtccgagtgatagctatccgtacccaagccagtagttagtagatacatggcacatcattcattcaaactgccgccctataaatattaatgaccttatacgatatccacgtaccataaagttttttattttatttttataaataccatagagttatttgacaacaaagataaatatgttagtactactt

SEQ ID NO: 227663 - DNA, 420 bp, Glycine max
tatcacaccagaagaccacttttacactaggatttggtactttaaaaccaattagtttgttagagtcacacagcttgtacgacttatatagggatcacgtgttttgcatgatctcgcttgtcggtgtacatttggctgtcgggattggcaccacgaaggtgctctttaagtcggggtcaaaactttgctatggttttccttaacaaactgaaggttctttaatttcggttgtaataggctagcgcaatatccagaactatatagtaaatagaacaaatttgaaaaaaaaaactaaagaaattaaattagaataatcatactaaaaagaaaagaagcacgcttcgcaggaaaaaaaaaaaagtgcttctgatctcaaatttggagttggcatgttaaagttgacaccatccccgtccgcgt

SEQ ID NO: 227664 - DNA, 380 bp, Glycine max
  unsure (1)..(380): unsure at all n locations
tgcataaatatagtgngcctttattcacttgcacttttattcttctcctgncttattttcatccaacctaagtttcctcatgaagctcgtttttgtttgtctacatcccacttttttcatccttctatccatttcttgtttccttcattgtgaaccaatgacacatgcacaacctagacctattgatggctcgatgttgtgcttacaagacaaccatatttcgaatcaagtgtgggaaggccaagagagaatgatttgctcgaggtataattatgtctgggcttttacacacttatatcagatagataatcgtgtcaaaaatctaatgactttagctggctttggtcttgttataaatggcgaaagaattgatattaacc

SEQ ID NO: 227665 - DNA, 401 bp, Glycine max
atgcttcaatggaggataagaaagagggattattttatagaggggggagcacgaaattgaaggaataaaagaaggggagaagtagaactttgaagggtgtctcataagactttcattcatcaaagttacaacaagtgttacacatgcttctatttatagactacgtagcttccttgagaagctttcttgagaaaacttccttgagaagcttctttgagaagacttccttgagaagctagagcttagctacacacacccctctcataactaagctcacctccttgagaagctgtcttaagaaaattcctaaagaagctagagcttatcaacacacacatctctaatagctaagctcaccttcttgagatgagaagctagagcttagctacacaccccctata

SEQ ID NO: 227666 - DNA, 202 bp, Glycine max
  unsure (1)..(202): unsure at all n locations
agcttcgtcctcagatccctttagttgtacttatgcttaactnaagcaacccttgtatgtttagactaatttaaactaagcttcgtccgcagatcccttcattaagactaggctcagcttanacagcttacgtaagtttagacctaattaacctaagctccatccgcagatccctcatttaagactaggcttagattaaata

SEQ ID NO: 227667 - DNA, 391 bp, Glycine max
tattgtaatcgattacacaattatttgtgagtcttgttatagattcgttcatgtgtctttgctttaattgattaccatgtgatataatcgattacttctctttctataagtgtttcaaaagtgatcaaaaacactttaatcgattatattgaggagttaatcaattacattgttcttgagaggtttccagttttttgggaagaattctttaatcgattgaaatgataatataattgattacttcattgaaataattgattacattgtagaataaatcgattacaggcaattataattggtttctctataaatagtcacctttgggtttttgttacaacaaactcacgaacttctaatagttctttgaatgagctagaatcatgtgctgata

SEQ ID NO: 227668 - DNA, 409 bp, Glycine max
  unsure (1)..(409): unsure at all n locations
tgtcaatatgttntgccttatgtttggctctaattgatgtttggaagtacgctttatttccgtcccccagtttgagccagtcaagttttgatctctgttgcagaatttcctcatcaatctcgttccacctaatcacagtttctgtacacatcttcactttatcaattttctctttattaatcttgtcatttacaagcgagtcttgagcttcagcaagatcttcccgagctttggccagctggagtttcgtatgagcaaattgttttgacagagtacctaaaacttttcttaatcttttcaatttcttccacaccactaccataggactaccatcaacagggctattccaactctgcgcgacagcggtatcaaaacctggcagcttggtcacacaattgagaaacttaaa

SEQ ID NO: 227669 - DNA, 394 bp, Glycine max
  unsure (1)..(394): unsure at all n locations
ggggcagtctgaattgtacaagacgatagtgagggtaagatttgtataganactgatagctccataccctactttgaacgcgaaagacaaactcataacctgcaggtaaataacacaactcgacgtcaaactattactctctcccgtaaataaatgctgaagaaataaaactattctagtactccctaaagcattgaatatgcaccaattgtagaccctaaagtgatgcatatgttaaaaaagtctaaagactaattaggagggtatatagaattaaagggactgccctgttagagttcgaagcattctagaactactcaagtggtgtgctttactgtaaggatcatttacttgcatcttcgggccatctttaagatacaacgacatttggagg

SEQ ID NO: 227670 - DNA, 274 bp, Glycine max
cccaaattcctgagaaagggaaagatccaggcacatttagcataccttgcattatagggaatagtaagttcgacaatgccatgctagtattaggagcttcttgttagggtatgcctctggctatttttaattctctatctctagggcccttgcagtcaactgatgtgggaattcatttagctaatagaagtgttgcctatcctggtggtttcatagaagatgtcttagttagaggtggggaactgattttcctgttgaatattatattcgaaat

SEQ ID NO: 227671 - DNA, 194 bp, Glycine max
  unsure (1)..(194): unsure at all n locations
actcagcttcactcanatatcttggaattcactagaatgcttcttttttttcattncatganatttatactatgttttccaatgtctatattctagataaataatactactacttgaaatagtccattttttactatatgcctcttaatttaattgtccatcaactttctttcctttctcttggcctaattttt

SEQ ID NO: 227672 - DNA, 391 bp, Glycine max
  unsure (1)..(391): unsure at all n locations
tgaagatgttcgtgatgaagntgttgaatcactagagaattatcttgttaaaatgaacaaagtgttggaactttgtcagtttagttggacgaaagaaatttgagcgaatcgagtgaaccttatctctactaagttagcttgtttccattgtattcaaacttactatgtgtttgatagaatatgtattctatcaaacaataattgttggatagaatacataatctatcaaacatttattgtttgggaaagccaggagtgacttcgtgacaaaaaaatacttgggtcttaatctcagggggagattaagggtagtgctagaagtggccttaagagtacttgttatagctagaagtgaccaaaagagtacttgattgtaatcaaagttttgatt

SEQ ID NO: 227673 - DNA, 377 bp, Glycine max
  unsure (1)..(377): unsure at all n locations
tactcagcttatccatatttntaacgaacaaaaatagtatgtaaggtcataccttgttaaangcggggattaaaaaagatattagatttttatatcgactcaaacaaactacttcctactgtcgtaaatataagaaaaaaattaactcaaactaattaagaaaggtagttaatcacatttaattatatcaatcttcattaaaaaattatttttttcaacttagcctttattggaatataagaaataaaaaggagtcattgaaattaaaacctaaattacataaaggtattttaaaaatagtagcattaaatgaggtaaagttaattgaaactcttatatttaagaaaaaaacaaatgtttttttcttcttatatttg

SEQ ID NO: 227674 - DNA, 428 bp, Glycine max
tctagcggtttgaattgtgagtccaaagaatcttctggtttatccttggaaaatctggaatcagcaataggctttgcattgttaggctgagttaatctagccactgccttcattcatgtgattatcaatgtttactcctgctgtactcacttcctgaccttctggtttgtgattcttgacatcaagaaaaatcaaatgcttgattacaatcagcatccgtataatttaagtgtgaaataactactatcttccattcatttccataaattatcatgaaattcatctctctctattccttttaatacacgttaaaatcaaaagataaagactaaaccaccctataagatttaaaagctaaattcactagaaattacccttacctttcgttaagttatcatgtattagtcataagagtgaacacttaatac

SEQ ID NO: 227675 - DNA, 341 bp, Glycine max
  unsure (1)..(341): unsure at all n locations
ggacattaaaactaagctgagatgagatagaactactattttaattttttttttaccgnatatcacaccatataggctttcaattgatgtattgtgtgaatatggttcattttaaagtaaaaggaatgtattttagagaatataaaatactaataattattattaattcaaaactaatgattaagagtatataattaattataaaaattattatatttctatttaaatatctctgaaatcataatcgctaattttttttaccataatcataattaaaattaattattagaagtattatttattttttaaaggccttgatacttttgactataaacatctac

SEQ ID NO: 227676 - DNA, 420 bp, Glycine max
  unsure (1)..(420): unsure at all n locations
ntcaccagatcatataagataaatgcattcacgcattctttatatatatcctcccaaacgtcaaattctccgcctatatattcaacctttccatcactggcacgtggagtgaatcttcctccatggtgcaatactaaagttatattgtcattcattctacacaatcagaaaccgcaaacatggtcagatattaggaaataaaaaaacctacctcaaaaagcgcgaagacattgacattgtcaaaaaccgcgaagacacaatcaaaaaccaaaaacattgtcatctataaaaacagagcatcataaacgaaaataataaacgatcataaacctccctacgaagcgcgaagacaatgccacagatgaaacccctcgaacatgtaaaaccccaaatcaaaccaccaaaacaatgctaacgaat

SEQ ID NO: 227677 - DNA, 409 bp, Glycine max
tggttgattttagatgagtaattgtacggtcaaagtctttttcataaatcaacagcgctgagcgatggtaaaatatttcgtgcaagtacgaactcttaccgataagcatttttcattttgaaaactcaccttgagataaatcttaaatctcgtgatgtgtcatcttttgagatcccggtttctgaagcggtgaaacataaagtcactgtattttctctattttgagttcttctctctaattttttttagacacagaatttatactttcttttataagaatgtatacatcttgagaagttaaaaccaattttattaaatgcctattaaaaaagcatcccatgtgattaaatagatcttaatatgaacgagtactccgcgcaataattatttatggcgtacgatatatatt

SEQ ID NO: 227678 - DNA, 334 bp, Glycine max
caaaacacgctctatcttcatctcccactctatgtaggcctctggatcattctctcctttagagggaggaatgctgagtttaataccatcaatttggttctgtctaggaacaccatcattccctgccctcctcctttcttcttcattatgatctctattctccatttagatcaacctcttatggagcacatcatctcgttgtttcattaacctctccaacagtgcatcaaaccttgatttgtaattgccaaaaccccctcatcattaggattagacctgacatctaaaccaacaatcttacgtacaaaacatttaagtcgtgtttaatattcac

SEQ ID NO: 227679 - DNA, 407 bp, Glycine max
  unsure (1)..(407): unsure at all n locations
aactataaaactcagctgcttctacatngagacttgaaaaagcaactttgttttatctggcaacctgcgaaggagccgctccagaatagtcaaattatgcatctcgatttctgtcaaatattccaaaggaaagtcatcatacctcatcggcacttgttgccaataaaggggaaacagggggtccccttatgaattgtagaaaaaattatcacccaacccaggaatgataactaccttaaaaaaacctactttaaagttcttataagaagaaataaaaggcctaaaaaaaggggtctatcttgatggcaaatcaatgatagacatccagctttatcagttggtcatgttcaaaaataatgaagaaacaaaatggaagtcagcttaaagtcgaaaaacctacacaaagc

SEQ ID NO: 227680 - DNA, 319 bp, Glycine max
ggacctataaatctcagcttctgagatgaaccagctgattcgagggtttgtttattctaaaagcccacaaagtgatccacgatgcgtcacaagttcaagatcaagatgaagtcagactaatcccagatgtcgagttacatcacacaagtcatattgagagaaatgacttacagggaatgatgatagaattttccaagccagacataggcacttggtttacagacatgtcttctcaaacttcttgggaccaaggtttactctttggtatcgataccagttcctgtaacgataccgactcggacgttgatgtcaaggcggt

SEQ ID NO: 227681 - DNA, 219 bp, Glycine max
  unsure (1)..(219): unsure at all n locations
accctacactctcgcaaatctggttgtcgatgtaaaggcatccattggaagaagagacagtggtgcacaatgtcagggttgagccaacataggaggtggaaggaccgacttgatgaggaggaagtcattgttggagtcctanatttggagggagagagaaagaggggaaggcgaaccacttgtcatcgaggttttcatggaagtgagaggagggggcaa

SEQ ID NO: 227682 - DNA, 413 bp, Glycine max
taaggattgtccaatccataagtggttcaaataatttttttttattttttttttcaaaaatgttttacaaattaatttaaaattaatgacccaaacaagaatcaaaccttcgatttttgtgttattagcataacactctaaccaactaaactaataaatcaattatattataaaataattaatgtcactatatgtaatactaaaatttttaatatttaatgcgcatgaaaatttagataataaattttgtaacaattaattttgatctaacaattaatttgtttacacatgttcgtagaaaaacaaccactagaccacatgtcattcacttattggataattcaacactgcagaagttgagtgttgactagcaacatagtaacaatgtggtgaaacaagagcctaaaagaaat

SEQ ID NO: 227683 - DNA, 343 bp, Glycine max
  unsure (1)..(343): unsure at all n locations
agcttgccgcccagctcgcccaggcgagcaaggttgtttcctccagaagcaacagccttctggaggaatcttctggagggcccaagtgggcctggttgctatttgcacccctttttttactaagtgcaccccctttctattttttggtaatctttttccgtaacgttacgaaactttacgaatttcgtaacgatacttatttttcttccgcaaggttacgaatccttacggattatgtacttactcttcttttagcttctcttgaaagagttacggaaacttgcggatagcgcanaaacacctcttttcgattccgcccattacggatttaacggatgcgcag

SEQ ID NO: 227684 - DNA, 403 bp, Glycine max
tgttgttgtgtgctgagtgtgtgagcaagtcatgtatgtctgttgtgtggaagggttcgagggaacctatatttatattagttgagcgagagtgttggtccttgtttgtaggggttgttgttgccttgtagataatttctgacttatagataatagttgggagcttagagataatgttagagataaacatttgaattatagataaaggtagaagatagttataccttgtagataatgtggcattatagataatttaatacccaccaatagataagatatttaaacacatttgaatattagtgaggttagagataacctgtttgttggggagcctgactattaaggctaggcgtttgcgctcctataacaaggctgatgtggagggtagacacgtgtatttgag

SEQ ID NO: 227685 - DNA, 382 bp, Glycine max
taagcacctgagctgcagctctaactttatacaagaggaagctctgatccacttgttatacaaggggcctcagatatcttaagaaggggggttgaattaaaatatctcaaactactttcccaagtaaaaatctatttcactttttattcaagttataaattcccttaacaatgaacttcttaaatattgactcaaataaaacaatttgaatatgaatataaagcattaataaataaaggagtgtaagggaagagaaagtgcaaactcagatttatactggttcggccacacccttgagcctacgtccagtccccaagcacccggttgagagtccctatcttgaaatttctttacaagtttaaacaacaaggcaatctttcct

SEQ ID NO: 227686 - DNA, 424 bp, Glycine max
  unsure (1)..(424): unsure at all n locations
tagtcaccttctttttcaccacatctagaatgatggggttgatttaccgctgnggctgcctcactggcttaactctatcctctaaaagtatcctatgcatgaaggtagatgggctaataccaggaatgtctgctaaagtccatccaatggctttcttgtgcttcttgagcactagcaacaacttctcctcttgctcagcagcaagggaggcaaagatgatcaatggaaatttttccttgtcctccaagtaagcatacttgaggtttactggtaagggcttcaactctggtgtgggtggtggctgaacagtggaaggaactagggtagtaaaagaaaaggagggttcctcagcctgtacctcataaagtaagtcagaagtatatgtacttcctgcaacatggttagtgcattctgactctaaaaa

SEQ ID NO: 227687 - DNA, 417 bp, Glycine max
tcacacatttagcttcagcaatcaatcattatctactgttctttatctaaatttcccacacttcacaatccacatacaccattcatgacgaatgtccaatgtcaaccaactgagctgaactaaaccccttcattaaaaaattgaaagaaaatttatatcttgtctcaaaaattaaggaaatgtctggtttggttgttttctatagaaaatgataatgaaatgtgtttggttggatttttaaaaacataggaaataaccagaaaataaaaacaataaaatattatttacagtgttttcagttgaaaaaacagaaatctcattttggataaaatgaaattgtgatgacaatcaatataatttcaagccaatctaaaaatataaaaagacaagaagtcaatatatcatacacttttaata

SEQ ID NO: 227688 - DNA, 187 bp, Glycine max
gattggattatattacatgacccaccttcaacaaatagctcgtgggggtgtagccattatgttgaagattattgtactttataatttttataagtgcaaaaatgaaacagcttgatggcataatataccactaacataagtgtttaatatatgctacgcgggtgacatatataacgatgagataatt

SEQ ID NO: 227689 - DNA, 403 bp, Glycine max
  unsure (1)..(403): unsure at all n locations
tttcgctgcanaantcatttcttgattggtgttttgttttgtgctaaaggtggtgtttagcattggttgtgtggtatgtgggttttgatgttgatttacggatggccttggtggataactgggtggtaagtaaggagaacggttgttattggctaagtaatgacattgttgggttggtgggaaacttggccgtataggaatgacagtcacaacatgggtttctcccttatcctcaccatcttcatttgccccaattttctcattcatccaagcatgatgattaaatttgcctcttttcagatgcgctttgaccctttccccggagaagaccaaattcgtaaagcttgaaggtgcgtaccccaccatttttcatangaaaacactggtaatgtgtctactatta

SEQ ID NO: 227690 - DNA, 411 bp, Glycine max
  unsure (1)..(411): unsure at all n locations
tgatcacattnttcgntgttgtcattgttggtgattgtttttgaancgacgatggcagtggtgaggctggtgactcttgtttcatggctgaaagcggagtctcaaaaagagagagaatagatcaaagaatgacacaagaaaaacaacaaaagagaaacaaaaagacaattagttctttgtgacagtggaatggtggtgtttctgtgggtggcaataatatactaagtagtggttgaagcaggatcatgccacctagaaaagacagagggtttatgcaacacctttgtatatggaagatgagaattaaaacacaatcagtggtagtatagtgtggccattgataatgaacagtgacacattctttgaacctcaatgactcaacacaatctggtgtgtgtgtgttttaacacc

SEQ ID NO: 227691 - DNA, 374 bp, Glycine max
tttaggttatgccaagcagaacaagaagagcctatttcttatatatatatggactcaaactttatgtttggaaaataggcttaatatatttaacgaaaatatggcgttgcttatttccatttttaattgcgaatgtaaagctattttcacttacttttcttcagaagttgaatgattgacaggcttcttataggtaaattgtacgcatcattttttcattgcatgatgaaagatacattcacattattccaagggataaacttaagaactattttgtttgtaaacttggaagctattagctaatatgtccaagtattctggattactacttttttgcttcttttctgctagaaattatgccaaatctaatttat

SEQ ID NO: 227692 - DNA, 355 bp, Glycine max
ctccaagtgtgacataattgacaactttatattttgtttttcgatcaacacaatagatgggatttcaaagatattctaacaaaggctttctccaatcatgatttgtcaccaaatcaatatttaaaatttctacttcttcctataatttttctttgagtagtatcaatgcttcgaaatttttttacttacatataaccagatgcaatttgagctaaatcattagcttccttattttttcttgaacgcatgttcgaatcaactcttcaatcaaccaaaactaaagcatagaaaatacttacaatactttgatgcctaaattatgagtaatggtgacgacactcaaactctgaaaaaa

SEQ ID NO: 227693 - DNA, 404 bp, Glycine max
  unsure (1)..(404): unsure at all n locations
tagaaagccncactncctattatatgcctacttatcttcttctttaaaggaggcatgagcacctagcagtgcctatctccctatctagatcaggctatccacatatttgatgtcaagaatgcaagttttggtcaatcggatagctgaaagctaagtcatgttataatgtattcccctatgacttgtctgtggttatgacggaaaattaatagactctttttttctatatgttaatgcatatcaactacgctagtatagtaagaaggcgaacgaaaaggaatgataggatgctaaagattggattttgttagcttatctgcagttcttggtcgaaaacatgctactcttatggagattgctgtggattcaacacaatagactatatgccctcattcttagcataa

SEQ ID NO: 227694 - DNA, 259 bp, Glycine max
  unsure (1)..(259): unsure at all n locations
agcttcttagagcgctggtttatcgcggtattttccattgnnggacggtctccaccttctcagccaccggttccacgcctttatgggagacaatatgtccaagatattcgacctgaatctgcgcaaagaagcatttagataacttcaggacgaaatgattatcaagtaatatctagaatgtggtctctaagtggcgcaaatggtcctccattgttccactatacaccaagatgtcatcgaagaagacaatgatgaattg

SEQ ID NO: 227695 - DNA, 404 bp, Glycine max
  unsure (1)..(404): unsure at all n locations
tgtaatgaggctgggctgcaaataaatcgtggtttttctatgatgcaaaggcttaagttctaggagagcatccgtccttagataaattttttttcttttccagcttcaattacttgccttaaagcacttggcttcacttcttcttagataacagcacacacacttttattttgaatacttacagtttttttttgaacaacaactctttacttgctgcatattgacttactgtgggtgctgatattttcttaccattagaagctatcacccaataaactcccccaaattagggacaaatttgctttcaaccataatgctctcctacaacctangacaaggtagatggagatgtaatccatacgttcaaggtacaattaaacaatcagattttagcccaatcatgg

SEQ ID NO: 227696 - DNA, 397 bp, Glycine max
  unsure (1)..(397): unsure at all n locations
ttccatanaagcagncaatgtgtgctgcctctgtcactgtttacattataanatacttctgtcattcgactgctgcagctccaaaacatctctataactgatatcacatactattatattaccctcattagagattctattattaaatcccagacaagctagaggatccagtaaccaattcacgacaagctagtgcgaagacctaattccgttaaatggttttatctttagcactattattattattattattattattattattattattattattattattattattattattcaatagaaaggccatgaactacacaagagtttcacattctttcagcattgaaatttgtactcaagaaccaaaatgccgatagacccactagctcacctataa

SEQ ID NO: 227697 - DNA, 53 bp, Glycine max
tagtcattcattgacccacatgggctttatagggcttgtaacacggccacggg

SEQ ID NO: 227698 - DNA, 394 bp, Glycine max
tgggctcttgcctcactcaccgcctttgtgggttcatttctagctatcttatacttatcccaagtttcagaatttctacacctagaccactccttgaaacactccttttttactctaactttgctctgaagattttcattccaccaccacgattctttacccctaggtccaaaacctctagattcacccaacgtctctttggccactttaataatctcttgggacatcttgttccacatatcatttgcacttccttgtgattgtccacaccaaccctcccatatcttttgttggaagatctcctgtttctcacccttcaagtgccaccatttgattcttggcgctaccataggactgtttctctttgcgctatctctaattcttacattcataa

SEQ ID NO: 227699 - DNA, 429 bp, Glycine max
ccttgaaactaagcttgatttggaagcggagctctaaagattacatgagaatatattttcaaatatcaagactttttatcaactaccaaattataaatcaaagctctataattaattatttccaaaattttaatatgaatatatataatgacaaacaaaatcattcaattatcttttaacatagttaatataaaataagatttgaataattttaatttttaaaaactatttttcaataaaaacaatagttacatgcaagtctataaattttcatatacacttttttgaaaagcatttttagtcaaatataactctcttttatttatatttccttaaaataaatgaagacctacaatattatacgatcttgttccaaaggtctcagttgaggaattaatataattaaaactatattcttgctaataaaaa

SEQ ID NO: 227700 - DNA, 420 bp, Glycine max
tctagtctcaattgtgagcgtctcgatatatgacgtcgtaataatcttacatccgagcaaaaagctattggcgtttgaatttcctacgagcttcttgtttcaatctggagcgtctcgatatattacaggactcagccggacatccttgtataaagttattgtcaattcaattttcttagagcttccgataaaaaatttgagcgtctcgatatattaccggactcattcagacatccgagtaaaaagttattgctgtttgaatttgatacgagcttccgttttcaatttggagcatctctcaataaattacgacactctgtcgggcatccaagtaaaaagttattgtcgtgtgaattttgtaacagctttcgttttcaatttggagcatcccgatatatttttggactcaaccggacatcc

SEQ ID NO: 227701 - DNA, 140 bp, Glycine max
agcttcttatgataaaatatcacatgaacatcgttatgtgaaaattgtgtctctctcttctcaagagagaacaattctttatatgattatatcaacatgaccagtgaatcttcttcaaaacatttcccttaaaaaaaaac

SEQ ID NO: 227702 - DNA, 427 bp, Glycine max
tcatgatgaatcaaaggtgattcaaaggtgttgtgatgataacaatgatgataacaaaagatgatgacaaaggtgatgacaaaaagctcaaagatcaatcaaagaacaactcaagtgaatcaaagatcaatcaaagaacaactcaagtgaatcaagaacaattcaagagttcaagataagaatcaagaagaattcaagactcaagaagaaagtttagagtcaagaatcaagattcaaggttcaagatctcaagaatcaagatcgagattcaagactcaagattcaagaatcaagagaaggcttaaccaagataagtatgaaaagcttttctcaaaaattgagtagcacatgatttttctcaaaacatgtttaccaaagagtttttactctctggtaatcgattaccagattggtgtaatcgattact

SEQ ID NO: 227703 - DNA, 162 bp, Glycine max
gactgacttatatattacccattgtctgagagaaaacatataagcgccacctgttttcatgagtcgcatggttccaacttccaacacaaactagtgggagtcatgtgatcgcacaacaacaaactgatgtgaacaaatcatccactcttggacccatattaa

SEQ ID NO: 227704 - DNA, 446 bp, Glycine max
  unsure (1)..(446): unsure at all n locations
tactcaacgctttacattacnnncacacacatatatatgagtatacatagtctcttttcttattgtctnngatgtaacgcccacgagttactcaaaccctatagaagccatattctaaatacatatcaacaagtggtcacttcctgttttcgctgctatgactaagtgttttggtgtttggcttttgtgtaacagtaagcttggttctagcacttggttctgtttctgctcaaccaacacgggctttcttcgttttcggtgattcgctcgtcgacagtggtaacaatgacttcttggcaaccacagccagagcagacgctccaccctatggcattgactacccaacacacagacccactggacgcttctctaatggcctaaacatccctgacttaatcagtatgagttcctttgtcacatacttgccaataattaaaatcaacata

SEQ ID NO: 227705 - DNA, 128 bp, Glycine max
actccccccaaaagcaacccacccctgacaatcagaaatcaaaaaagcctactcaagacactaaatgccgaaacaggctaacccaatacagagggcaaaacaggccaacgaagaagactatctatatt

SEQ ID NO: 227706 - DNA, 400 bp, Glycine max
  unsure (1)..(400): unsure at all n locations
tgtagtgaggctgngctgcaataaacaatggtcctttcttatattcaaaagcttaaattataggagagcacgaatcctaaaattaaccatttttttcttttccatttacattcttctcaactcaactcacttgccctttgtacttagctttatttaaaacttacaatgtttttttttattacaatctatttactgcctggaatacatcctcaatctgcaaaatcttgaatatatggggatggtctcttaaggctacaataccattggggtccccagaaatgtgttgagggtgtccacatcgaactttatcaagtgccctctcactttcacctgctttggtgagttatcttcaaggtcatagaggtttgcgtagaactccttgaccaccacgacatcaata

SEQ ID NO: 227707 - DNA, 375 bp, Glycine max
  unsure (1)..(375): unsure at all n locations
taaacaaaaagtacattgcagatattgaaaatgcttttttctttctcaacgcacctttccaagagcaggcgccccagtacattgcacatattgaaaacactactgcattcatcccatagttctatacatgttaattggtacactgacaaaaccatcaaagtcccatataatcttccggtgaacagttccacaatcatattcctaaccggtgtgctagatattataaatcgatcctatttatttgcctcattaagttcccaagaactaagacaagaagccccatggggcttatcaacatgcgttttccatctgatgcaanagatcaacagaactcaccacttgaccctgagtttgatcttcaagcctcaaagatca

SEQ ID NO: 227708 - DNA, 380 bp, Glycine max
agcttaaccgatgtggaacttgctaaggccctgtataaaaacaaaaggttgtgtttatgaatggcatgaattcaaaaatcaaacactagaaacatcatgtgctataattcaagagatctcaatcaaagggagaaaaatctcataataaaaattaaaacaatcttagacaagaatcaacagaaataaataccaaaaatcagaaaggaaaacaaaagctctcataagaaatcaatactacaaataaacatatctaagaaaaccagaaaaggaaaacacaatcacaaaaaaaaaactttgtttttgacgtagtcttccaccacaacaccccatgggtagtaacaataagaaaagcaactccacttccgaggaacaaaccctca

SEQ ID NO: 227709 - DNA, 411 bp, Glycine max
tcttagtttcagctgatgaagatgaattcgttgctactttatgcactcctctaatgacaatagcatcatttctggcactaaactgttgggagttggaagccatcttctcaaataaatttctggcttcaacagggatcatgtctccaagggctccaccactggcagcatcaatcatacttctctccatgttactgagtccttcataaaaatattggagaagaagctgctcagaaatctggtggtgagggcaactagcacatagttttttaaatctctcctaatattcatataggctctcttcactaagttgcctaatgcctgaaatatcctttctgatggtcgtggtcttggaagcagggaaattttttttctaagaatactcttttgaggtcatcccagctcgtgatggac

SEQ ID NO: 227710 - DNA, 409 bp, Glycine max
cttcttctggcttcaattcattagtgggctttccttctgtagccagcatcttgggatgttcccagcctttgatgacagctttccaggttctgctatccagtgatttgaggaaggccaccatccttgctttccagtattcatagttggttccatccagaatgggtggtctgttcactggtcctccttctttctccatgttcatcagaatttatctccctagatctcactcagtgattccgagtgcccgctctgataccatttgaaattctgataccaatgccagatgtcgtacaggatgtcactacatcacgctttagaacatgtcatatatatttgagagtatgaacagattaaacaggtaaataacacaagagaattgttaacccagttcggtgcaacgtcacctaca

SEQ ID NO: 227711 - DNA, 388 bp, Glycine max
gcttggtccactcaattcaaatagttccctccagaatctactttcgaacaatgggtccatgtccgatatgatgctacgaggcaacccatgaagacgaatgaccatggatgtaaacagctctgctaccttccttgcagagtgcttaataggtaacatacctaaatgtagccccttcgaaaagcgatccacgactacgaaaatagatgtatggcccttatacgttggtaaccccacgatgaagtccatgcttaaatcttcccatggccgatacggtaccgggagggggcacaatagccctgctggtttgcggttgtcggatttcctgagctgacacgtttcacctgctgcgacgaacgtacgaacatcgctgcgcatggagttccatgtg

SEQ ID NO: 227712 - DNA, 317 bp, Glycine max
acccccttaggcacttctctctctacaaatagctgaggaaaattaattccgtgaagaaaatccaacccgaggcgcttcgaacgttccgaacctccggagaaaacgcgaaatctcgaccggtcgtgtcccacctcacgggaagcctaaccactataatcatcagaccgggggcccatcggcacgacttacccaatcaccactttacccctttgccgccacgcggattatcatctcctaacaaaaaaaaaaaccccccaccgcgatggcctcgtaatcgaaaaaaccgacgtcgccgccgaccctggaaaaaaaaggaa

SEQ ID NO: 227713 - DNA, 414 bp, Glycine max
tgttaaaaacggaagaaaagaaaaccgagagtgaacaatttttatatgaaagccaacaaaacatgaaatgaattgaaagtctctaatttgaaaacttaccgattgaagaacaaagaacgcacgaagtgcggacgaagaatggcaaagaacggtggaaaatcatcacgaaattgctcacgaaaacgtctcggaagtgttacggaagcaccttggcttggattttctaactaagaggcaccttatttctactcgcccaggcgagtaggtggcttcgccaaaaagtttcccgaggcacccctcttttactaagttcaccatcctttttcgtaatttacacgaaagctatggaagcatatcggacttgagtatcttcttttttctcttccttatcactcatcttaagcgcaatatgct

SEQ ID NO: 227714 - DNA, 285 bp, Glycine max
agcttactgagtgtaatagtagaaaatgcttccttcattatcagttgcatggatcatgagaagcaccaaaagcatgataaacgccacaactctgaaggccatgagccatgcagggtgaattccttttaggcaaggcctccaagtttcatcctcatacaaagttgctgatgtttcttgttgtgtcacccggctaccattccttgctggttttctcaaacgctcatactttcataaaagcaagggtgagaaaatactgagaccgactccatatgcacaaagcaaaac

SEQ ID NO: 227715 - DNA, 417 bp, Glycine max
tagatcaatataccatctgaattgatattcttatgtattttgatggttctattttctcttaaacctcacaaactaatctctttatttgtatttcttttatattgttatagcagatttgttagctttgccaaagctgcacaaatgatgttgatgtcaaatttgcataaatcagtagaaggggttcagagtactcattattgtaggggtctttgggggacttaagcatgttatggccataccatattgacatcttgggcagtgctaatataactgatatatatttaccccttaagatttttatggctggagaattgtgtgttggtgagtatgtgttgttatctagaggtagagaatggttgtatgttatgattttgaattgatataattaaatcccctgatcaatctgttgttgatgtg

SEQ ID NO: 227716 - DNA, 328 bp, Glycine max
acaacccaaccataaaaacgctctttatcaactatcccttgctcctacacaatcaccaacatctttgtaggaaactcaaaactacattctcaacactataaactaaagctatgaaaaagtcacaaactcacaaagaaagtaaagacttttttttacaaggaatcaaataaacacaaaccttcaagtctatatttattgccattaacaatgatagctgtgtcaagcgacaaaaaaaaaaaatatgaacatgcgaactcccttcttattcagggcctacaacatatcaataagagcaaatctggaaacaacttcattactgccacaatat

SEQ ID NO: 227717 - DNA, 304 bp, Glycine max
  unsure (1)..(304): unsure at all n locations
agctncttaagaagatcctagagaagctagagcttatcttctcacacctctataatagctaagctcacctccttgagatgagaagcaagagcttatctacccacctcctataatagctaagctcaaccctcatgacaaatacagaaaagttcctactacaaagactatttaaaatgcctcgaaatacaaggttaatactctattctactagaatgggccaaatacaaggcccaaatgaaggaaaaacctattctaattttacaaagatagcgggctcatacttacgccatgggctcgaaatcta

SEQ ID NO: 227718 - DNA, 425 bp, Glycine max
  unsure (1)..(425): unsure at all n locations
ntgcctttanggcttgtacctcatcactttcttccgaagctttaacctcattgtctctcacagtctttagattttgggagccaatccaatccttgtgttcggactctcagccacttatgatagccgccgatgatcccattactgcttcccctaagctctctgtcctttcttcacgtcgcatcccatgccttgcgaactccttggagtaccctcgcgttgtggtcactgaaaccccgtgtgatgaaaggtgtgatgcttttgtctgatggcactcctctcatggggtagccaagtggtcttatggcgaggacgggattataattaatacaaccccttgttcccatcaagggaacatttggacatccttcgcatgaagatagaatcctgattctttcttccttctagcgagggaaccaattaacaga

SEQ ID NO: 227719 - DNA, 377 bp, Glycine max
  unsure (1)..(377): unsure at all n locations
ctgactgctgtctatgcgcaaaacaaactggagcatattatgaagttatggcatgatattgaacagatccaacatcaagggccttggtgtatagttggtgatttcaacaatgtgctaaggacaaaagacagaattggtgggaatcgagtaactgaggctgaatacaaggacctgcaagatatgatgattaaagttgggctatttgaagtgggatccaaaggtgattattacacatgggttaacaaacatagcgtggatcctatttattcaaggatagatagaatggtttgcaatgtagaatggtttcaaagtcaccaggataccattttacatgntttacccccaagtgttttttatcactctatactgtacctgac

SEQ ID NO: 227720 - DNA, 170 bp, Glycine max
  unsure (1)..(170): unsure at all n locations
gctcccccccacagcctatctctgcaccgaccaacacgcgcagcaccacaagaagcgttgtttctccagcnacccacagaccccccccccttccgccaagagaaacgcagaagcacaagcctccaaagaccgaaagctaacaaaccggcgcacccaaagtcgagaaaaag

SEQ ID NO: 227721 - DNA, 407 bp, Glycine max
  unsure (1)..(407): unsure at all n locations
ntagcatagcctccgngatagaagccatttgatctttttatgccgataggtcggccttcatctgttcttgcactccctcttcattatccatttttctggatcgagtgttataggggtgcctttgcactttcttagttatggtgagttccctaaagaaacaaacaatggtgagtatgccaccaaaacatgaatatgctaatgaatgatcagagcacttggatccacctcaaggccttttttagataacgtgatgagtttcagaacttctctttttataaaaaggaacaaagcttttatctagctaggatcatacaaaagtgttacaacagaacctaacggtttctaattatatgggccatcaaatctgtcatgtgttgacagcaattgattagcccatgaatttcctc

SEQ ID NO: 227722 - DNA, 416 bp, Glycine max
tcatgatgatgactcaagtatgagtcaagtagcttttatgatttcaaaaagcccaaaagaatgatttcaagaatgagtcaacaaggtctagatcaagattgatttcaagattcaagaaaagacatctagaagaatccagattcaagagaagatgaattctagattcaagaagcaacaggtcccgacttaacaagggaagtattgaaaaggatttttcaaaaaccaaacatagcacaattttgttttacaaaaagagttttctcaaatttttctaagttaccagagtatttactctctggtaatcgattaccaatttcatgtaatcgattaccagtgttaaaattcgatttcaaatagcttttaactgaatttgcaacatttcaaatgatttttaaatggtgtaaatcgattcaata

SEQ ID NO: 227723 - DNA, 404 bp, Glycine max
  unsure (1)..(404): unsure at all n locations
taagaagagaaatattgctatttggacgaaactggttattgctatctttgnctttcttgtcatcattatcattgtgggaaagaccatattttagtatgtcaagaacaactgttgcagagtatgagaaaatctgtactctgaaaagtttatgggttttcaataagttgattttaattattatttcattgttatttcattgctataatagtataatataaaacgaaagtagatatttctggctatcactcagacttttatcttacaaacctatgaagacattcacaatgttaaaataaaatcttgaaaccttttgattgcacgaaaatggctgaaatatgtatatctggggcatttacaattatttagccacagaggattcattataggtcatactcgatatttat

SEQ ID NO: 227724 - DNA, 250 bp, Glycine max
gccaagcccaccaactcttctctaattgagagacacaccttcaaacactcggcacacctcgacattcgagcaattgccccaacgaacgggatactaatatgtacctttataagcatctcaacaaatctagcgaattgaccatcctcactcttgccctcccatctttgaagaaagagaacactcacatgaggaggtctcaggacctccttcttaccctcttcgctcgccactggattcccattaatagaaa

SEQ ID NO: 227725 - DNA, 416 bp, Glycine max
  unsure (1)..(416): unsure at all n locations
actccgctattggaatgaaatcttaatatgtggagggcgttttttttattctcaagcaactttcaatggtgtaaactattatttgtaacaaacactctaaaatagattttaagcctacaaaattgagaaatcattacttggttctattaaaagatagtctcttaaagtaagccaatattttctcaaaaataattccactaaagcgttattaattatttacacacataaaaattttatgaacataaaagtgtgtaaatctcatttactcgtgtgctccaacacgtgaaatgaaaaaaaaaaaataaaacagcccacacgtgatgatgcaataanaagagaacacaggaaccacacgacgctggctaaattgagaaaaataaatgtcacacatgaaatacatttttttggataaaaaa

SEQ ID NO: 227726 - DNA, 420 bp, Glycine max
  unsure (1)..(420): unsure at all n locations
agcttgcctaattaacctaatattgttagantttgtttattacacacacaagatggaagtactaagtatntattacctatacttaacagaaaatacttataacactacaaaataaccataaattggaagagttngatacaatttacacaagttgtatacacaaaagttagtcgtattcatcgactaacaactcccccaaatttacagttttgcttgtcctcaagcaaaaaaagaatagttcacttgtccttgagtgacgataacatgcagtgactatgtacaaaggtgtatgcaacaaaagttactgattgcatgataagagaatgaagcattatgtactcatcacttgtctttcacaaaatatgtagttatttcaagacaagaataaaatgtaagctatactattagatgagattaatc

SEQ ID NO: 227727 - DNA, 432 bp, Glycine max
  unsure (1)..(432): unsure at all n locations
acgcgacactatgaatctcagcttcgccagtatccccattgatgaacctcgatttttacttttcagagctagtgagaaggctaaacgaangattacggaacttagaaaaactaaatccttaattgaaggcgtatgtgacaatcatagcgaattactatacangactggtagtttacttaaggtcattccagatactccccatgcctctaacaatactggataaatgaggataagacgtacctccagattaattaatgttattaatgaagatagtgaccaaaactcagataacacaactgatatagaatcagtgtcagataagaatatagatccaattaattccaaacactggaaaacaccctccatattatattatcaacgtccgactgcccctgaccttctatgagaagagagaggtgaaaacaattttaa

SEQ ID NO: 227728 - DNA, 346 bp, Glycine max
  unsure (1)..(346): unsure at all n locations
tggattaaaagaagacgatgttgtgaaaaagattgtctgtctccntaaaaaccaagttgaacaatacaacctatcattacgggttcactccatttactgtattttaggtctcattacacctaatcaatacatatacctttgaggtaaagtaaaacacagagaatgcagcagcctaattggaggttcttttttttggatcgacaaatgttaattgacagattttgttaaaatgttaatgggagggattcgaacatgcaaccattctctctccctttgctccttcaatcaccaagccaaccttatatctccgcctaatttgacggtatattcacttataaattattat

SEQ ID NO: 227729 - DNA, 419 bp, Glycine max
tataacattgcttagattgtgtaggtatcagattagactaatttgttttcaatatcaaaagaattcccattgtaattgacaggttgcaggctattagattagattagacaaatttcttttcaatatcaaaataaatttagaaacagagtaacacaggaactttgttttcttgtctcatattttttcttaattacatgtgtaacagtagtctaatagttgcatattagtatcctaacttaacttttttttttcttaaccctctcattcatcagggaaaaagaatcctaactaatccacataatttatgcagtgtatacagtcatttatacatcctaaccaaatgacagcaaataacaattcaatttagacatcctaaccaaatgaaagcaaaatacaataggtgatgtatcaaaattagg

SEQ ID NO: 227730 - DNA, 210 bp, Glycine max
agagaaggcgacgagattgtagtctccattttattgtcaacatgagagactgatttatctcttgaaaaacattacttcataaatcccaatggtgagaatgtgtgaaaatgggtttcgaaggcggtgtccaaatttcacgacaatccaacgatagaccagtcccggatcataatcttattggaatatgttttgggtgtctgtgggaaaaga

SEQ ID NO: 227731 - DNA, 413 bp, Glycine max
  unsure (1)..(413): unsure at all n locations
tgttatattaagcagagtggtggtataacatcactntttttattttatagaagttagtgcttttcgtaggggttaatcttgaatactggcatggagtggttgaccccaaaatgggatagcggataatgagatgaccactattcttatatgtgtaaaacacagtcaattaatatagaagtaaaatagtacatgaaagaaagaataaaaagcaacatagacctctttgacatgaatactgaatagaaatacaaaggatgtgaacagagggaggagaccagggaacaatgttttagagttccaatgtgcaagttagctggaaactccaccagagtgatgggttggtcagaaattccgttggccactctaccagaatgcaatgggtttgcctgaaactccattagagtgccatgggt

SEQ ID NO: 227732 - DNA, 271 bp, Glycine max
  unsure (1)..(271): unsure at all n locations
agctngatgatggtgaaaaaatctgtacagctgttattgtcttatttacattaattggattgctcaacttatttctagaaagcaaaattttgcatcgtgatctgcatctgttcacatgactgctacatgatgagcatcaatactgacatggatccaactaaacgtgcacaatttgtcttgctttctttngttcagtgaaatttaaccttttatgagtgtaatttgagtgttagaaacaagaaaatgagagtgtttgtatattccaactttg

SEQ ID NO: 227733 - DNA, 427 bp, Glycine max
tgagtaacctcgagttcagatgaggttcctgattctgtatctgtccaatccatgtgacccattttattgttcagaacgaatatctcagatgtaacttttgtagacccaggactggagaaactctgattaggttcatatgaatcaccaagtatggatgttgaccctggattctgagtagaatatgggctaggactctgagtatagacagaagaacttggtgacaattgtgccccagctccagaacttagctttccctataacatgagagtgcatacattaatgcaaaactcaaagatgggctgcccaacaatgttcctatgcacacacagaataaaacaatataatctaataattccgcccaagatatcaaatatgattcttaacaagatttaagtatatctttatttgaggcacaaagccattaaat

SEQ ID NO: 227734 - DNA, 425 bp, Glycine max
tgcctgtccgatgcagtcgtaatgatggcccgagttatgttgtggaacggttacaaacccgggatgggtttaggcaaagacaacggcggcataactagcttgataaacgccaaaggaaatcgtgggaagtatgggttaagctataagcccactcaggcagatataaagagaagcatcgcgggaaggaagagcggtagtcaaaactcgcggttgagacaagaaggtggaggaagcccacccttccacataagtaggagctttataagcgcgggtctgggggacgaaggtcaagtggtcgcgatatacgaagatggtgttccgagtacattggatttggtacgaccatgccctcctgatttccagctgggaaattgacgagtggaagaacgccccggcatttatgcgacgagcataatgtaaacctt

SEQ ID NO: 227735 - DNA, 144 bp, Glycine max
  unsure (1)..(144): unsure at all n locations
aatcaaataatataacaagtgatgattcttaaatgctcgttgatcnttatggagccctctattgttatgcctcatatacctactgattatngttgatgaaagaccattgcttctaagtcttttgtaaaaatttatcccaaaaat

SEQ ID NO: 227736 - DNA, 421 bp, Glycine max
  unsure (1)..(421): unsure at all n locations
ctcaagcttttgngttgagtatggagaaaactatcattccaagggctcttgttgtccagtatttactcgcaaaaggcttgaggaaaaagagtgccagctgttataccccgtttgttgtttctgaaaaggagtttatggaaaagtatgtgatacgttttaaggaggacacacatcaactgttaaagctgtaccaggaaaaaaaaaaattgttcaaggaaaaagggatgatggtgcagcatctgggtacttatcaaacggttaaattatgagtaaaaatttctcttactcgagatctcccattcaagcacttgtgttaaccctgtctaaattcaactgatttagtttaactgagttatttcattttgacgggttggaatggaaccctcgttggctgttgcactcttcaatttccatcacattt

SEQ ID NO: 227737 - DNA, 424 bp, Glycine max
  unsure (1)..(424): unsure at all n locations
agctctcacaacaccgaagcaatacagtttcctttcntcttgaactatcagaaccaagagaacagggcataggcagaaaactctggccaaaaacacataccaataccacagctttccttactcaaataccccagtaacattctcttcgttccaattcgttaaccgttggatcgactcgaaaattttactggaggtccctagcacataaatctacattgtggccattgggatctgctagaaaacgttcagaacccattctgtactactctttccacaaccagcaaatacacatcattttctgcacaaagccataattctgctgcacatttcaccagcaaaattcttgataatagtgaagaatntcaaaattccacttgctctcgtccaactgtgcccaaaatgaattctacaagttctaaatcat

SEQ ID NO: 227738 - DNA, 382 bp, Glycine max
tcttcttcctcgtgaacatttgtagaacttccttcgatttttatctaagacctcctttgatgtcgatcctgctaaaaatgctgccacatgagacttttggttcaaaaacacagaagtctctggatcagctgccttgaggaattctggatgggattggaaccatagttttacttgttctggatccgctttggatgagtcaaattgtgtccaccattttacaaatgcgtgtctttgtagtgatggatattggtttgtcttttcagtcttgctgtaacgatattgccatgagaatatccatgacagtgcaaagcttgaaaagtatttaagatctgctggaattcgtgattcctgcgaatcgtattgcttcttacattgggaaaat

SEQ ID NO: 227739 - DNA, 202 bp, Glycine max
  unsure (1)..(202): unsure at all n locations
accttaagtcacctgcggctgcgagctnatgaaaagaaccaagcacttttttttctcaaagccccaggatgattcagacttatgatcagcatcaagaatccctccaagattcacgattcggagaagaaatctagaagcaacaagccaagacttcctatcggataaatcttacaagatagtttttcaaaaacctaatatcaca

SEQ ID NO: 227740 - DNA, 347 bp, Glycine max
tcagccttatcactaagcgcgaatgaatgtcgcccttttttattccttaccgccacaactgaggtccatgaagctaaacgccagtcatggcagctaatcgagaatcattacgggagtgtgagcgctaagtgagttcttatcaactaagcgcatgctcctctgtacttaaaatgcatcatttttgctaagccaaccagagcctggcttagcgagagttgtagcttttcggatctgcacacctcgctaagcggtctgatccttgcgctaagccaaacctgtgtgttaaaaaaactgatgttgaatttgaaacttcggctaagcacgcggtttcgctaagcgagcctctt

SEQ ID NO: 227741 - DNA, 391 bp, Glycine max
  unsure (1)..(391): unsure at all n locations
acggacctataaaactaagcttctatccaagctatcttggtgggaagctccttctttttggcttattccctagcggatggcaccttctctcacctcttctcctttgtcttccgctgcatatccatggtggaaaatcaccattaaaggacatcattgaagctcaaagatccatccttcatataagacccacaagcaagcttacatcaccagggattttcgacaatgacaaaagaacgttgaggagattggctaccggtttctttgtgagtggtaccgtcttgtacaaacgaaaccatgacatgaccctcctgcgatgcgtagatgccaaaaaggcgaactacatgattgaggaaatcatganggtctgttggggcacatgcaatgggcatgc

SEQ ID NO: 227742 - DNA, 378 bp, Glycine max
  unsure (1)..(378): unsure at all n locations
tgtgttgacacannaaaatttatggtactccactattttgctatactctnccntctctatggacagccacacttttgttgtcagcgaaaccctctacgtcgccggttacaccaaatataaaacttttagtgctattttattgatgagattgtttgtgaaagctttttggtgatgttcacaatcaattacttcattgagaagcacaataacaacaacatagagacatatatagttcgctacaagaagagttttagccgcttaacgatcgatgatggcgatgacgatcgatgtgccttactgctgaatgaagggcagacaacgttcaagctttatgtgagcagaagaacctattgtcaatggttgtttctgacactggac

SEQ ID NO: 227743 - DNA, 345 bp, Glycine max
tattgatagtatcatattcccaaaaaggctctattattttgttttggcacacaaacatgaaacactaactcatggttggtgcaatcattagatcacacgaattcgccataatatatctaacccatgcataatatcatgaaaaaatggatacaaatttttggcttgaaaattacccactttacagtgacaaataccaaaagctaaaagccaagtgtaaatggaaaaaattataaccacaggtgattgcttaattgaccaatgttcatgtgcatttaatttctgagcatcacaaacaacccataagggggacgtatactcttctaagataacattaaatcaattttg

SEQ ID NO: 227744 - DNA, 436 bp, Glycine max
  unsure (1)..(436): unsure at all n locations
gaggctgcagctttgagtggatatatatgatagctcttatatattcactatgacacagggtagacaccaaaccttgaacaaggaagccagccacttaaagaaacaatagcacttaagttgatagggtaaatgtttccattaccatagtgccccaaaacatggcatgtagctgagtatagtgcagttgcagcacccatactgaagcccccaataccaagtttgactgtacagtaaacagtagtatttaagtcaaatcactagcaacttgagtntagttaaaagttaaaacattcccatgaatacaatataaatgtaataactggctttgctctaatttattaattaactaaatactacttcaataacttcactcaatatgtagaagtatataaatctaaacatcttattgatggcaaatgtggaaagttatttcaac

SEQ ID NO: 227745 - DNA, 204 bp, Glycine max
  unsure (1)..(204): unsure at all n locations
tcctggacagctngagtaattgacttagtgcaactcctgtttcaattttctnnttgagaattaagattcatttgtaattgtaggtgtaggctgagagaaaactttgactgtaacatatgcggcatctagtcgacatttaactttgcattattagaattaccgtcattgctttatttgttaaaattttgcattaaccaaacccat

SEQ ID NO: 227746 - DNA, 405 bp, Glycine max
  unsure (1)..(405): unsure at all n locations
gagggatctgaagatgaagcttagtttaagttagtctaaacctaggagggctgcctaaattgagcctactccaataagagggatttgaggacgaagcttggattgattcagtccaactagggatcgaggtttagtaattttggctacaacatagaacacaaaagcatgattgattagagaaatatctttatatacattagaaaggcccaacatatttacctactgctgttaattntacttgcatttttattggttttatcctagactttagttaattttgttttaaaccatcaattatcaatgttctttcaacaatgccttattttctaaattaacccngtcttagactcagttcctgagttcgatactccgattcattcattttaattntaaatacttgatgac

SEQ ID NO: 227747 - DNA, 416 bp, Glycine max
  unsure (1)..(416): unsure at all n locations
tgagaaatcttanggaaccgctagagacgccactatcgtttttttactacacatgtgagcccacttagaggtaaaagatgagtttatcacaattagggttagaatgaacatgtgtagagatccttaaagaatcaaattgaggcttattttgggatgtttattatattgtaattcttcctttacaattataattacgagatttttgtgtttgacggaccaattgatgccttaatgcgaattggttgataaaattaagtattcctattttttttcgtatttttgacctatgattttgattcctttaattttgatatgattatgtgaaattgtttgaggggttttactccccatgttgtgataggcattcatgtataatatgattgtgttttggacaagatttactagatttgcacaat

SEQ ID NO: 227748 - DNA, 258 bp, Glycine max
  unsure (1)..(258): unsure at all n locations
acctgcggcatgcagctcgtgaanagcttctatagaagccacgatttatctttgtatgaagcctcttaatgaagcttctagagaaagctatatgcagctgccttcgtaaaagcgctacctcaccttcattaaccgttggatctttcgaaatttggtcttaaacttcacaagacacttggccatgatctgaccggtgggatctttgaaagatgtctggagtgtgctataaaccttttaatgaaacttcttgaggaaccc

SEQ ID NO: 227749 - DNA, 399 bp, Glycine max
  unsure (1)..(399): unsure at all n locations
ggcctcanagaggtccaggaaggacaaggcagccgaatgttctatttccgctccggagtatgacagtcaccgctttaggagcgctgtacaccagcagcgcttcgaggccatcaagggatggtcatttctccgggagcgacgcgtctagctcagggacgacaagtatactgatttccaggaggaaatagggcgccggcggtgggcatcactggttactcccatggccaagtttgatccagaaatagtccttgagttttatgccaatgcttggccaacagaggagggcgtgcgtgacatgagatcctgggtaaggggtcagtggatcccgtttgatgccgacgctatcggtcaactcctaggaaatccgttggtgttggaagagggccatgaatgtgagta

SEQ ID NO: 227750 - DNA, 391 bp, Glycine max
tgtgtgtgggatacccaatgtgagcatagtttccagatctttattgaaagattgacgaccgctccagtgctagttttgcctaacccgagagaaccctttgaggtgtattgtgatgcatcaaagatgggtttaagcggagtgttgatgcaaaatggccaagtggtggcctatgcttctagacaacttaagactcatgagaggaattatcccacccatgatctagagttggttgctgtagtttttgcccttaagatttggagacattatctatttggctctaagttcgaggtgtttagtgatcataagagccttaaatacttgtttagttagaaggagctgaacatgagacaaaggagatggttagagtttcttaaggattatgattttgagc

SEQ ID NO: 227751 - DNA, 232 bp, Glycine max
  unsure (1)..(232): unsure at all n locations
ttaagtcacctgcggcatgcaagctatccttatggcctgtctccagacttcaatccccttgctctccgggaagatttaagtcaagcccctacttttgaggggcaactcccgccttatgaagactatcccgggcaagacgatggggaaggagaatacccttcttgtccccctgctccacctcanagatccatccccgcatgaactaccccagccgaacatagtccgccatatt

SEQ ID NO: 227752 - DNA, 350 bp, Glycine max
ctatgccttttgtgttattcattgccatattattttttcccctttttattgacatgaatttcctaccctttgtaacaaacaaaattgagtagggcaacaaaacacaaactctagtgtcaagatgggtgagggtaatctcattagtaagaccattgtaaatgatcttcctatcaaattgccatggccttcctaaaagaatatgccttgcctcgatggaaactatatcacaattaacttcatccttatatgtcccaatggagaaaggtaccttcacttgttgttaactatcatttccccttgctcattgagccattgaaagttctaaaggtttgggtggggaatgatagtga

SEQ ID NO: 227753 - DNA, 264 bp, Glycine max
  unsure (1)..(264): unsure at all n locations
ttaagtcacctgaggcatgcaagcttccaagaatgaagagtaagagttatatttaatatcangaataagagaagattactcggatatgttgtaaaggctcttctagacatgagtaatatatgtattcttctcaagacatgtatactagaagagatttgctctgcatggaatgcggtaccagattattgtatttatcatcatctgcaaaatggatctgaaaacgttttggatgaataacaacgttcaattgacttccaagagcgg

SEQ ID NO: 227754 - DNA, 416 bp, Glycine max
  unsure (1)..(416): unsure at all n locations
ttgatatcnaaataaggttgaatgtgaaagagggttctttttgaacatcgngtaaggttatgttggacgagagctggacagttcttgagtgagttgcatgaacatattgaacgttcgggagtttcactgtgaatggattgattcgtttatgggaatgaagattgtgcaaggagcacgttacctgaatctgtacccctggatcttatatccaggaggtgagagacgctttgaaagaaagagacatacctgggtttggtggaatattgtccatgccttataagaattgaaccacctctctctggttagagagagcgccgtgtcctctgcgaatggttcgtgaataagcgcaaaagccccttgctctggtcaggggagaagcgaacaaactcatgagactcgtgatgctgagctcgatc

SEQ ID NO: 227755 - DNA, 393 bp, Glycine max
tgactttgcgaaccgattttagccttaggatcactttttttattaggcaattcaattaagaaagagaaatccctaagagaaacgtccgaatgcttttttggtttattttactaaaagatatttcttgactattatattattattttacctctttttgggttccaacgtggttacggaatgaccgaacgatcggatttcattttaacagaaattaacggatattacaattcaaatgatcagtggaagtttattttattttttgattaggcgagaaaacggcttatacgatcagttaaagctcgtctgacacggaagaaaagaaatcattattgaaccaaatataaatgaaagcccagaaacaatttatttattaaaaggctcagatttggtaac

SEQ ID NO: 227756 - DNA, 368 bp, Glycine max
  unsure (1)..(368): unsure at all n locations
cggaactaaaaactcagcttgaataatacctagaatttgagctaaaccagaatctattttcctctcctataataagattctctcaaaaaataaaataaaataagttcaaaatctgaaagtgatgtgagtgaagtaaatatgttatatctgatccaaacaataataatgataaaattatatgaagtagagactaatgaagcattgtcataccgatccgaactatttccgcaacaaaaaattgggcaaaaagccataacctttccaccctcaccgtctctgcaactgagccttctcaatcgaccagacaaaaatgaaaaanaaattgaaacttgaagttgacccaccaacccaaatcaagcgcttcactg

SEQ ID NO: 227757 - DNA, 169 bp, Glycine max
  unsure (1)..(169): unsure at all n locations
ctgcagctgttgtagaaacctttatttattatgtgcatttatctaccagcatttatagttttagcnaaacagctatttaaattctttttgaaattatcacttatacatgttatctcaacaatgctccaattctgaacttaatcaggcttacattaacctccatacttca

SEQ ID NO: 227758 - DNA, 366 bp, Glycine max
tctatagaacaaaaattggtgaattctctgtgtttatgataagcaaaaacaaatctacttattctcaaccctcctcaaaatttcaaagcactgcatcacgtaaaaagctagatcaacataacatgaaaacgaacacatacccacattataaaaatccaaacttttggaatctgaggatgcaacaatacttggggcgaataaaaaaaagagtgaaaacaaaaaagagtaagcgtcatctttaccattgggattgaaagaagttcgagtgatagtggaaacttgtttgtaggcatcgatgttcttaagaaccacttcatggaggccaaaaaggtgcttatggccttccttgagcatggactatcccat

SEQ ID NO: 227759 - DNA, 347 bp, Glycine max
  unsure (1)..(347): unsure at all n locations
tttctggtatgngnagactgtcagagtcctgtttttcttttattgcnnccnccaaattgaaanccctgtccccttatgatgaggatgttggttttccgaatatcaaaaataaaaatatatttcttttccttatttttctctgatatgctgtacaggtttgtccagcctcaagatgaaagcgaaactaaaaaggtaacactttatttgcactgctttttaatacacatatagctcttgtttgcactgaactaaaaataataaagttccatgttgtcatgatgatctgttcacattttgattttctttaaaagtttaccaaacttcacttgtaacatatgaaaataatt

SEQ ID NO: 227760 - DNA, 286 bp, Glycine max
caattttttggttgcggcataatatctccactatataaacctagctttaaaccagagcatattgtaccaaacaccttctgacccttgatctttttctgacgcccacgaaccctagcgatataaccggaggacgaactctagagagcaccgaacacgccacaattgctattggagaacatttgagcgactatatcggggtactggatgagccactcacgctagaggatgataagatgcaagtctcaggatgcttagaggatcacatgtgggatataaccggttgttg

SEQ ID NO: 227761 - DNA, 286 bp, Glycine max
  unsure (1)..(286): unsure at all n locations
gtcacctgcaagctgcagctancagagttgcaagtgttatgatctgtataattctctaagctccccttctttgcgctaagcccagctttttgaagaananaaacagattttgaatttcanactctggctaagcgaacctctttgagaaaccaaaggtctctcacgctcgcttagagctgcagttcgctaagcgagacggtcgaaaattgcttaagtacgtgtaacatccgttacactcccctttgctaagattctcaaatcatgtttgcttcttctcctcacccaa

SEQ ID NO: 227762 - DNA, 271 bp, Glycine max
  unsure (1)..(271): unsure at all n locations
actataaaactaagcttntcttgattttcctcantctttacaagctttgatattatacttggccttcatttaactgtctttgggcttgacggccacgctcaacaaaatactttcgacacctactgtacgttgatttcaccaatgctgctatgggaatgttgccaccatcctttaaaaccttattgacacaatctaagacgttcgctgtcatgtggacatattgagcgcccttctctatcgaaagccatcctccatttttcctctgagatgc

SEQ ID NO: 227763 - DNA, 382 bp, Glycine max
  unsure (1)..(382): unsure at all n locations
taagcttcttccactgcacaaggctcttaatatttgaattttattcttgggnacccttacccgacgaagacactgacaaaaacttatcttctccttcttggacaaagtatggcaagctgggggcaagtaaattttcttcccatcaaaccttggatgcaactgtgatcatatacccatatcagctagatcttgacgggtattcaagccatccttcgtcttgccttgaatgttaaggagcgtcccaatcacactgtcacaaacatttttctccacatgcataacatcaatacaatgtctaacgtcaagatcacaccagtacagaagatcaaacaaaatggacctcttcttgcatatgcaactctgacttttatccctcttttgg

SEQ ID NO: 227764 - DNA, 153 bp, Glycine max
tagctagttcttgagttttttcgaagttctttaactaagcttgaacaatatacttgccctttcattaactgtctctgggcttggcagccacgctcaacaaagtacttttgacacctactatacgctgatttgactaatgcttgtataggaatg

SEQ ID NO: 227765 - DNA, 419 bp, Glycine max
  unsure (1)..(419): unsure at all n locations
tgtgaaannnnggactatttgtttgggatgttattttcttattgttacaactagtagccggagttcatcatttagcttctagatattgatatgaaccacaaggaaaataatgaacttagttatgtgtattttgttttattgggttaactttttgttaaggaaggagggggtttcacgttgttgtaatatattctcattcaagaaatatctattcccaaggtgtatatagttttagaattttataccattgtgtcaagttcattttgtttttaaacttgatcaagtacttgatccaaatcacttttgtccccaaatttgctctggtatagccagcctcatgaattattatacacccaagttccaagccatactattgtccagctatgtatattcattttatactggtgtctgagattgat

SEQ ID NO: 227766 - DNA, 417 bp, Glycine max
ttagttcaaacgttgcatgtgggaagacaacttttttttggataaggtgactgcagctcttagagaaaatgagagaatgatgagaactgaaaatgttgatgatgaacacaatgcaatagttgtggcggagtttgagcaagagaggaatcattcaaggagacatgatggtccaagagcaagatcaaaatctcaatcacgtttgcaacgagatatgagtaacattcaatgttactattatggtgagaatggtcatgtgcaagtgaggtgcaaacaaatgaaggaggatttgaagaaaataagagatatgaataaagatggcgccaactcccaaactaatgtagtaaaaagtgtttaagatgaagatgatgtgtttttggcaacaaatgattaggttgttaaaacggaatgggtgatgga

SEQ ID NO: 227767 - DNA, 363 bp, Glycine max
  unsure (1)..(363): unsure at all n locations
gattatggagcacccgtcatatgtttttctatgtggcaatcgggcgatggcacaaatcaactatcacatttccacaagccaggcataagcacaccatcctcagctgcccaccttttaaattagctcacgtgcatgtacgtagccttctcctcgttcctctcagcaccgggtccccatcaacccctccaagctttcacaatatccaatcaattcaatcccatttgtcatgaaactaccttanacaaagaaaaacagagtggaggcagaaatctttgcacaagattattcaaaatccacagagttttcctaccacatacctaagaacatctttttgtccgatccgtaaccatggacgcctaaaat

SEQ ID NO: 227768 - DNA, 410 bp, Glycine max
  unsure (1)..(410): unsure at all n locations
tctccaggtggnncttggcatcacatagaaacttttctcttattgatgagtaccttagcgatgacatggtccttgcatttgacagacacgtgtagagctttgttgtgccctctcccctcaactggaatctcctcttccgtgaatgcgaggtagttattggtagttatgtgattaacaatgtcttcaaaaccctcgactgagatgtcgtgtgctacgtgggcttcgttgaggacctttattaatagtgcacgatgaggctcggagcttatgagcagttcgagcaaggagatccttgctggagttttattcaattgctcaaccactttaaaatcactttgttggatgagacgaaggaactcatgagcctcttccaaggtcaccgcccttccttggagatcttctttcttttc

SEQ ID NO: 227769 - DNA, 172 bp, Glycine max
  unsure (1)..(172): unsure at all n locations
gatcttaagcgaccgcggctgcagctttatttacagacagaaattttgttattctgntacccactcggtatttccgcccgtcatcgtgactcagatttaagtaacacagatcttgtgggcgcggaagatgacgtaaatctccgcgtgtcaacgggcttgtcggccaccattg

SEQ ID NO: 227770 - DNA, 427 bp, Glycine max
cagcttttagagtagaaacatgggaccaactcattttatttctttaaagaaggcatatctagtcaaggtctgagagaccatacaagtttcctaacgatttctaattatgtgggccattaagtctatcatatgctgacaatagccgagaagcccatgaatctcttcgggggtggagtaggtgtctgccatcgccttggccttggctaataagcggggaagttcttgactcctgttcaaggtaagagcaaaccggtccatccacatggttgcctcttggtgtaaagagtcgatcacccttcctctagcctctttttccgcgtatacttgagcatactcgtccgcgattctatgctcgtgggccatggctagacccaactcttcttggtacttaacgatgatagctagcatgttggtctccggctcgcat

SEQ ID NO: 227771 - DNA, 361 bp, Glycine max
  unsure (1)..(361): unsure at all n locations
acctataaaactaagcttcttttcattcttttttcattgctgcattgttaatgcttaaggncatccgtagtagagacaacttaggacctatttgatccgcattaagaacctagttgatccgcattaggatagacgatccacattatggtagatgatccgcagtaggtagatgatgaggttgatccgcatgcggagaagggtgatcatgaagctcgcggatcaacttgatccgcatgattgatctgcataacttgcggatcaagttgatccgcaagtataaatttaaagatttgaaggcaataaacaccacttgccatctttgtttgtatgttatcaaaactgctttgctgaatattgtctg

SEQ ID NO: 227772 - DNA, 278 bp, Glycine max
  unsure (1)..(278): unsure at all n locations
agcttcttacataagaagctaatagctctttgaataacacttcatacctcgggcgagtcgaaatgaanacagcacgttccaactacacaacaacacatacttaaaaaaccacactttaacacagcaacgggaccacaccggaaaaatggcacttaaaaggtaagctagtatggactacaacaaaaaaacgcgaaaaaacaaagccgaaaccgtaagtgaagagggaccacaagcttcctttaaaagaaatatattgaggggaaaatggggatttttaa

SEQ ID NO: 227773 - DNA, 418 bp, Glycine max
gacacaagaaactcagctgtgagaaaaagaactattatatgatgtaagtcttgattttgttaacccatcttataagaaaaatagtatttcgtacagaattatatcaaaaataaataacatgatcaactatgtaggagttgagaaaaggtatataggaataatagagattatgtgcaaggtaggagacaaaagtcttttataatatgatcaattaagatttaaattattttttaaaaaaattcatatttaatttagtgcttaattgtaacttgaacataattgtcattaaaaaaaattgtgagaaaaaaaaatactacgtgtataagaattgagattatttgcaagggtgagagaaaaagtacatagtataaggatcagacatggttaggatttgtgcccatcgaatatgtgtgcatgc

SEQ ID NO: 227774 - DNA, 381 bp, Glycine max
  unsure (1)..(381): unsure at all n locations
tctaatttctatttctagaccanaatccaattattaacatctatgtcattaatgagttgactattatttgcccaaagaattttccctgagttatccttattctttctagattttaacttaaaaacttaagagttcgtgcttaggtatctatcataccctaatttcgtctggggaccattgtttgtcggcatgcgaccttcgcttgaccccttcaaaatgtttaatatccattgccatggaatttgtaaagctctgggacatttcagaaagaaaacaacaaaaataaaacacaatggggtgaacttatcaaacacggggagtgcgcttatgaaactctatctanaacactctagaaggtggggtgaactaatcaattggggg

SEQ ID NO: 227775 - DNA, 389 bp, Glycine max
  unsure (1)..(389): unsure at all n locations
taagtcatgaatcatacngcgagaagttgcaaagtcatgtttattggaagcgtgcaacgaaactaatgaggtatgtgtgtgaattaatgcatgtggaacgtgaaaagactgtgaactcgataagccccatatgatgagtagacctgaggaaatcaagagaccggggcttaagtaatcattaggccctgaaccaacacaagccattcgaaattacctgcctccattgaattagcaacatgcatatcattgcgtctttgtcaaccctacttctattttgggctatcgttttcttaatcctatcagtcaacatatatactctctcagtcattgacccactacaccggacaatgaatgaaagctaatgtttaaaaactcaattctaaacacgc

SEQ ID NO: 227776 - DNA, 331 bp, Glycine max
atgcaaggcaagggctcgcttatatatacttttcatgtctggtcaaaaacaccattggaagagttatgaccttgtgaaaaaaactgaaaacccttggaagagttacattttttgaatcttaattaaaacttggcactggtaatctgataccaaaaccatgtaatcgattaccacaagccttttatgaaaggatatgactcttcacaattgattgtgaaattcaacgtttagacacactggtaatcgactaccaacatcctgtaatcgaatacatcattttgaaatcattgggacgttgcaaattcagttgaaacttttgaaataaactttc

SEQ ID NO: 227777 - DNA, 473 bp, Glycine max
  unsure (1)..(473): unsure at all n locations
tataagaacanaattgccttaatcatttccaaatatgcttgttaattangacgcatcaacaagaatcaagccaaggctactgtgcaagcaatcaatggggcaaaacacaccaaatgattataatgatggatggctcaaattctcacaaaggtaaaatcatcactttcaaattgagctttcaaaactatcatgacatgtagagaagaatcaaggatttcaagtcacaaaatgtcaagaacttttattttcaaaacaattacccatttcttgaacatatcctataattcaaagaaaaacatgcaaagtcgtacgtgcacatgaaattgacccaaaatattaaactgaaaatccgacgaaactaacaacattaacaaattaacacaactaacaaaataacaaaaccaacaaaactagcataaccaaagaacactctcctcctccgccatacttaaacaacacattgtcctcaatgt

SEQ ID NO: 227778 - DNA, 460 bp, Glycine max
  unsure (1)..(460): unsure at all n locations
tctaaacagtaccacgtacaaattattgaaaagtttggttatggctcactctcaattgaatggacccctacccatttgttccccaaagcttaagaaccccatgttcttctacttctccccaactatccctcttttctttcaatccatatcatatccaatctatttgttgcctagaatgtgattcagtttcagggtttacacgtggccattttgactattggataaacaggacccctcctatatatattagcacataagtatattcatccgtgtccagcttttaaatgctattcattcacacgtctctttttctatgctctntttggaattctaaaagggtattattaactagtattaaacaacatgttaatgtaaattatcttacagtgcaccataggattataggaagaatatattaattattatgagtaacttaagggtataaataacacagtacttg

SEQ ID NO: 227779 - DNA, 461 bp, Glycine max
tgaaggcaaactggatgcgttggtcaacttggttactcatctggccttgaatcagaaatctgtacctgtcgcaagggtttgtggtttgtgctcctctgctgaccaccatacaaacctttgcccttccatgtagcaacttggagcaattgagcaacctgaagcttatgctgcaaatatttacaatagacctcctcaacctcagcagcaaaatcaaccacaacagagcaattatgacatttccagaaacagatacaaccctggatggaggaatcaccctaacctcagatggtccagccctcagcaacaacaacagcagcttgctccttccttccaaaatgctgctggcccaagcagaccatacattcctccaccaatccaacaacagcaacaaccccagaaacaaccaacagttgaggcccctccacaaccttccctcgaagaacttgtgaggcaaatgacta

SEQ ID NO: 227780 - DNA, 231 bp, Glycine max
cctgtcacctcttcacctttggctcccgctgcatcaccatggcggagaatcaccatctaaggacctaattgtagctcaaagatccagcctccatataagccccacaaccaagctttcatcaacgtgattgccccggaccatggtataatttttcacacaagatgaatgaaaaaattaagatctttctattactgaacataacatggtcatacatatcaaaagctcgcaaaa

SEQ ID NO: 227781 - DNA, 163 bp, Glycine max
accccaaataaaccccaacgaccaacgcaagaacggccagagggaagagaatcctcagaccatgaccatagcctaataacgcaaacaagaggcatcacgccactcaccgcgaactgatacctctcaacaaaacacgaacaatgggaaaaacggcacaggcgaa

SEQ ID NO: 227782 - DNA, 456 bp, Glycine max
  unsure (1)..(456): unsure at all n locations
tggtccangcatggaagcttacaaggcatgcatggaattattcctaggccatttgaagaaagaacattgatatgcatgaatctcanatccgggttctagaagttacaaaattcatacatgtactggaaagaagttcagaaatgtgtagaaaacatctgatgttgaattttgcattggtaatgtgcatacatgtaaggtactaaggtttataaatgtgtgtatatgtataagtgggactcctctcaactaaatttttcgtacacatcaaaatgcagtagatccgatggctctagaaaacaagtcatatgctacttacagaataaacaagtcaactcttcatcacaaaatgtgtattcgagatcttcattaccaaactctattgaattcagggtacataagaattgtaatactgcttatcgaatctattattcaattctagtcattagtatccccttt

SEQ ID NO: 227783 - DNA, 448 bp, Glycine max
ctcagcttctcaggaggtgagcttagttatgagaggggtgtgtgttttaagctctagcttctcaaggaagttttctcaaagaagcttctcaaggaagttttctcaagaaagcttctcaaggaagctacctagtctataaatagaagcatgtgtaacacttgttgtaactttgatgaatgagagtcttgtgagacacaactcaaagttcaacttctctccctttttcttccttcaatttcgtgctccccctccctctttctctccctctttcttttcctccattgaagcatcctctccaagcttcttatccaaggctcatcttggtggtgaagctccttcttccatggcttattccttaatggatggcgcctcctctcacctcctttcctttgtcttccgctgcatctccatggtggaaaatcaccattaaaggaccccattgaagctc

SEQ ID NO: 227784 - DNA, 457 bp, Glycine max
  unsure (1)..(457): unsure at all n locations
ntanaaaaaatgtgctatatgttattatgaccttgtttattnttccttgccaactacataaattatttgagagaaaaatgttaatacttttcatttcatttaattgtttttgtattttgtaatagatggctgctgttgctgcattgtgtgtgcaatatgaagctgagtttcggccaaatatgagcattatagtgaaagctctacagcctctactgaatactcgatcttctcactcaaaggaatcatccaacatgtaaattccaaaatcattctttccttctttcagactgcagagtatgttgaccaattgtccttgtgacacgtgtctgtaattacatattccgaggtattagtattaaaatatcatttgctgcgttattatatttgtatctcaacaaaacatgttataaaaatagtgatgtangtggcaagagatcatagatagttaaagttatgg

SEQ ID NO: 227785 - DNA, 447 bp, Glycine max
  unsure (1)..(447): unsure at all n locations
tcaagaataatggcctcatcaaactacttatttctcgaatggaattcaataaatatgcctcttatctttagtggagtgggttaccatttttggcaaacccgtatgcaaatttttatagaggcaatagatttaaatatttgggaagccatagaaatagggccttacattcccactaagggggcaggaaatacaaccatagaaaagcctagggaagaatagagtgaagaagaaaagagattagtgcaatacaacttaaaagccaaaaatataattacatctgccttaggaatggatgggtactttagggtatcaaattgtaaaagtgcaaaagacatgtgggataccctacaagtaacacatgagggcaggacagatgtaaaaagatctaggataaatacattaactcatgaatatgannatattagaatggaattcaatgaaagtata

SEQ ID NO: 227786 - DNA, 472 bp, Glycine max
  unsure (1)..(472): unsure at all n locations
tctagcgggttgaattgggagtccaaagaatcttctggtttatccttggaaaatctggaatcagcaataggctttgcattgttaggctgagttaatctagccactgccttcattcatgtgattatcaatgtttactcctgctgtactcacttcctgaccttctggtttgtgattcttgacatcaaaaaaaatcaaatgcttgattacaatcagcatccgtataatttaagtgtgaaataactactatcttccattcatttccataaattatcatgaaattcatctctctctattccttttaatacatgttaaaatcaaaagataaagactaaaccagcctataagatttaaaagctaaattcactagaaattacccttacctttcgttaagttatcatgtattagtcataagagtgaacacttaatacaaatgatngcaatatatagatatacatgaagagctgggttatta

SEQ ID NO: 227787 - DNA, 127 bp, Glycine max
cccccccccagcagttgactgagcgccaaaaaacgcaggcccgagagagggagttatcaacccagacgggggacgcaagacggaacacaaaacgagacagagagagaggggggccacgcacaaaggg

SEQ ID NO: 227788 - DNA, 444 bp, Glycine max
  unsure (1)..(444): unsure at all n locations
ntatggcattccctatgcagtaataacatctctttntctaactacgnattacaaacttaatataattagtattggatctttctttctgaatcaaatctaggtctaactcctaatttgtctatggtaattgaagaattttgttatgtggatggatttggtgacttatttgcatcaccatggccatgaagacaaattaccttggtatcgtggagaggtatcctttctttcctttttctttcttttccaagaaaatgttcgcttaacttggtctctccacttttgaattaaagataaaacttagatgtaattccttaggtgcgtttgattctgttatccaattaaaattgaaatttcacctaataatctgtgttaaaaagtttattaagatcacacaagttgaagaaaacttaattattggaaacacactaaaacagataaaacttg

SEQ ID NO: 227789 - DNA, 298 bp, Glycine max
gaacttaaaactaagctgagtgaaagcgcgaaagaaataacctattttatatgtgacccaagtggacctacagatatgtgggaggcatgataccttgggacgtatgtgggtgctattgcccaaaataagctgtgcaatacaacccacccggcataacgtcacgagaacctgcactatccaacaaggaactcttgcagctaaccaacaagaacaagccactaactatgagctgtgggcggtaggcactattattgggtgttctgaaaacccgtataaagacaccatcgggtatcattca

SEQ ID NO: 227790 - DNA, 395 bp, Glycine max
tttacgcgacactatcaaactcggctctgtcctaccgtttaaagacaaagtagtggaggtggtgccctacacagtaacgtcaataatctttgggcagaatccgcaatcactatgggtgatattcacaaaatttcaatctactctatcatagactttacccaatcgactctgaacatgacacactctttttgcctttcttcttgttagcattcgaagaactatctcttaagttattaaagcattatcatacctacctcttttggggatgagactactctaagaaggtccaataagcttgatcaaatgaggacaaatcctattaaccaactccttggatattcctgtgataaggacgtcacgcaaacttatgggttacacatctctcaaagtcatat

SEQ ID NO: 227791 - DNA, 440 bp, Glycine max
  unsure (1)..(440): unsure at all n locations
tatcagggataaactatataaaatcgcatgtaataactcttnataagacngaactgaaaataaataaattttggtggataaaaatcgtaacaaattgtgaaatcgtaaactcaatgaacaaagagggactaaaagtaacttttcgaaaatttgagggactaataaaaataattttttttgagaactaaaaaatacttaccgaaatttgaaagattaaaaatatatttaagccttaaatcaatcttataaaatcagcttgtaagatgaaaaatgtcccacacttatatacactaattngactatatctctagacaatgtgatctcgaacacaacctctcatgtcaaagataggatatctcgtgcgtgaagtttgcaggattggaagattatgggtagtgtgatagatgtccggtagagggtggcacaatatgcctaacaat

SEQ ID NO: 227792 - DNA, 410 bp, Glycine max
  unsure (1)..(410): unsure at all n locations
gagaaaaaggactcctattggatgatacactagctatttgtangagaatcacaacctatgagatcattgattgctggggatgattcaagggtaaagtattgctccttgctggtttcaaaagaaatagtggttccctggctgctgctattatcatggcatgaattgctttgcaatatttggtaatgagtgtcaggatcaatatcttgtgcangctgcaggtataaatggataccagctgaagttgggtgcttcttataaggttgcatctaaaaagaaattatttactcagtgatcagaacaatgagtggtcaaactttgtaattgtcaaaatgcttcctagctgctcctgatcaaatgcatactaaagtcctacaacaccggtntgctgtatggttagtctccattttgat

SEQ ID NO: 227793 - DNA, 318 bp, Glycine max
tcattgtcaaacatggacggcaaatcaacacacattaaaggaaccaaaaacagtgattcaacacacataaaacataagattaaagatggttgaagcttcccttacctatgaaactcaatgagttagtcttgagatgaagaaaaagaataaaggggaagagtttggattcaagatgaaagctttttttcacttctacagtaggtctacatcatccacacccccaaaccccaaaaccaacaaaaaacatagtaaaaccttgaagataaccactttctggaagctttgacaagtggtcatggaggaaaacgaaaatgaact

SEQ ID NO: 227794 - DNA, 445 bp, Glycine max
  unsure (1)..(445): unsure at all n locations
ttacagcagatgttaagaatgactcactaacctagaattataataacttaatgccattaacctatggaattaaaacaaacttaatggctgagtgtaactgaaattgtggcaaccaaaagtcacccccaacagccaacaagttagccaccatttggtctctcaaaaggctgatgcctaggttgccaatttggcccttattacaacttgaactaaacctaactaaagcccttttaattgattaacccaaaacatatttgtggtcagccaactttacaaggattgggccattatttacacaaactaaacactctaaaatatgagacaaagtggtgtcatttattcctcctccattggggccatgatacaactcacaaccttggacttttctccttgaaacttacgctngtattcaaatagtatggacagcacttgttgaagagcttct

SEQ ID NO: 227795 - DNA, 331 bp, Glycine max
  unsure (1)..(331): unsure at all n locations
tacggaccttaaaactcagctttcgcnagcttacngaaaatctgggatctagccatggtataattcttcacataggccattgcctccctcacccagtattatgatcagccgtagaggtgcttcaccttttgggacttctagctatcacccatggaggaagaatttgaagaaatcctatgatgccctctatgggggaagaaaccatacctcttacagggttctatcccttattagctagaatttccaagatagttcaaatctcagcgcatgaattagagcacaggaagcaagtcgaaaatggggtggttggaataccgagaaaatatttgga

SEQ ID NO: 227796 - DNA, 426 bp, Glycine max
caattactttttcttacttaactgctttgggcttggcggtcacgatcaacaaagtaattttgacacctactatatgttgatttgaccaatgttgttatcgatatgttgcgacaatccttcaaaaccctatttatacattctgagaggttggttgccatgtgggaatatcgacggctttctctatcataagccatccgccatttttcctttgaaatgcgatcaatccatgttgctatggttggactcaggtgacggaatttttcttaattttgataaataaaatgtgcttgcaaggagtgtagtctgcatgaaattaggtagcaacaacaattctaagtatatatgaaacgtatattaacgtgaccatcataaatgagatcttacccaacttcttcaacatttcttttgtttgcattattgaattgc

SEQ ID NO: 227797 - DNA, 421 bp, Glycine max
tgaagggtgtaacccactatattccataatagattctctttaatatgcctactatcattgatattatatctttcttcgccattgagggaaacacttgggctgccagttccctctacctttcggcgtattctttgaaagatccgtgccccctttttgcacatgttttgtagttgcatcctatccgaagccattacactgacattgcctaacgaaggcaaccattaggtccttccaagaatggactcgagaaggttccaagttagtgtatcaagtaacagctaccccagtaagactttcttggaaggaatgtatcagcaattcctcatctttatcgtatgcccccatctttcgacaatacatctttagatggttcttcgggcaagtagtccccttgtacttgtcaaagtccagcaccttgaac

SEQ ID NO: 227798 - DNA, 302 bp, Glycine max
tatcgagacgcccgaaatggaaatcccaagctctgagcaaactcaaaggacaataactctttctctcggatgtcagaaagagcaccgtaatatatcgagacgccccaaaacgaatatcgaagctcagagcaaactcaaacgacaataactgttaactcggacgtccgactcagacccgtaatatatcgagacgcttcgactagaatgccgaaactctgagaaaaagcaaacgacaataacacttttagtcagatgtctgatacagccccgtcatatatcgagacgctcggacttgaaagccg

SEQ ID NO: 227799 - DNA, 389 bp, Glycine max
  unsure (1)..(389): unsure at all n locations
ctacaacctattcacaaacttgtattgatattagttcgtacttcatggcattgatggacattcttgctatacttacttttatgaacgaaaatggcataatgcttaaataaggggaagactgaattatatttcttgatgaactaaaatacaatgcactaatagtgattataatatatacgctaatcctaataaaaacatgattcggaaatataggaaacaagtgtatcataataattaccgngcaattacatggatgtttatgacctgctgcaattgacaagagaatgctgtttcaattattatatgaattctcgctcatatacttatcgaggaggtctgctttgtgaaattactgtgcaaatggaatctacagtttaggaactccttta

SEQ ID NO: 227800 - DNA, 355 bp, Glycine max
ccgaagaaaaaacaaagaacagatgaagaacggtgaaaaacggcaaaaaatctacacggatttgctcacgaaagcgttacggaagcacctcggcttggattttttttcacgaaaacatgttttttcacccaaaacagctgaaatgcatagcatatgggttagagataaatttacacagcccacttcccctatttataaccaaaatggggaggtgcttgccatccaaaggctttttgaggaggatttctgagcgctttcccaatgtctaagtgtcacccccctttttcgtactttcggaagaagtacggtagcatttcagacttgattttcctcttttttctcttccctttaccaa

SEQ ID NO: 227801 - DNA, 291 bp, Glycine max
cctagaagagccaagcgcacccccataccagaagacatgataacataaagaaaaacagtccctattactaagactactcaaaaggccctgaaatacaaaggtaaaatcccatgctactagaatgaccacaatacaaggtcgctaggaacgaaaaaccaaatctaacacgtacaaagaagaatggatccaacctctgaccatgggcttaaaaatgcaccctaagggtcatgagaaccctatggccttcgtgagtagctctagcccaagcctctaggagtcttctatccaaga

SEQ ID NO: 227802 - DNA, 83 bp, Glycine max
tctattagaaatcccatattacgtgctaaggaaaacgtagacgaaacctaaccgtcccctttgctaaccaaatgttgaaatct

SEQ ID NO: 227803 - DNA, 442 bp, Glycine max
  unsure (1)..(442): unsure at all n locations
ttaaattcattctatgcacccttaggggagcattcttgttttgtatgattncatcttcatctcgcttactttcggcattctttntttggttttaacgtgctttgaccgatcgcttatcttgtaatcttgtttaatcatcggtaaaataaaatttaaccgatcgttcaagttgtaacctcggttaataaaaaaataagtaagtttcaaccggacattttactttgaaagttctcttttaaatgagtggagagataactaagtgaaactaaagctaaaatcaactcacaaatccaactttgtcccgaaaaaggtcattaaaactgttcgagatccacgccttaaacgggcctctttacttttatcagttaaaatatgtcgttcaaagtaaaaatataacactccgcacaacttactgcgtttcaaaaactacataagtctgagt

SEQ ID NO: 227804 - DNA, 350 bp, Glycine max
ttacgattgactctatgcacccatagaggtgcaggatgttttttatgcacccgatactcagtagcaagacttatgaccatacatgtatactagctatgtccgttgtgggtgacggatctctaatagaactttatgataattcatgaacactcgccagcgtagcattagatgacccatgatccatcgatatcattcatgtggatcatacgtgcgagggatacttatgagagcagtcaatgaacgtaggatcttcatgaggatcacaaagacctatttgagtatgctctatctcgaaatcagatagacgagttcatctttggataactcataatgatacgcattgcaccctc

SEQ ID NO: 227805 - DNA, 456 bp, Glycine max
  unsure (1)..(456): unsure at all n locations
gagagtgggttnttttaacacatggtggatattgtgtatttaatcttagncgggtttccacaagaaaagtttagagacattgagagaatcataggtctttgtattcgttgatcaagtcagtaatattagggtaggagcttttatgctttcttcaagaattcatcaccaaatttgtgaatatatgacttccctacaggtatggtagagtagaattgcatgaacaaagtggacttatcacttgcaacaagcattagaattatgtacatgaaaaaattaccaccatatacatcatggtatatgtggcctggtacatttgacattcatgtttcttgtattttcttttcaaatagaaactttcatgttaaacattattgataaatccacacagatattgtatttatgtattttctaaattttcaaatctttcatatcgaaccgaaatataagaatggatga

SEQ ID NO: 227806 - DNA, 252 bp, Glycine max
  unsure (1)..(252): unsure at all n locations
ctcagctattggtggctgtgagttgcttactgttttttcncaantatggctgaagctgatcctcagtagcatcaaatgtttgtgagtctaaccaaatggtggaaaatggtgcagaaaagaagttgagtaaaagaagatgtgtttggttcatataaattctgttgtgcatggggtaaaagaaaaaagtgttttggattgcattagatgtattggaataatgggataaggataatattgaagttcatgagatac

SEQ ID NO: 227807 - DNA, 458 bp, Glycine max
  unsure (1)..(458): unsure at all n locations
tcaagcacaacacactntggtgcttgtccaagaactactataacaaatataangatatcaaggtcactttaacgctctaaatgttgtttttgttgatgaaattattttatcttctatcttaattttctatcagcataaaggaagatggattctgatactggcctttaaataaattccccaattatacctcaccagccctagtgcatcacatggtcctcatgtacgcttctttttcactttcacgggctaagtacatgttcctccacatgacaaattctgtgtaaataagtatgacttatataaatgttaaccattaaaagagacaatattagagcacttgtctaaataagaaactacttggcaagccatggcaatctaaattcctttgtggttttgccctgcccacaaccataatgcatgctaatatattagtatgaactaaagtgctctcaatttac

SEQ ID NO: 227808 - DNA, 306 bp, Glycine max
acctccggccccttgtcgactattgtttcctccccgctctctctttgatctctgggctcttcattgtcgaaactctcagcattgccttcgtaatctacttgctcattatcaccgaatgcctggttatgctggccatcctggaggtgaagtggtctggagtggagctagagcagtggtcgagaaacgaacagtcttcggtcatttctggaaccagtgctcacttggctgctgtggtgcaaggactcctcaaggttatcgcatggatagagatctcttcacactgacgtgctaatctgccggtgaaca

SEQ ID NO: 227809 - DNA, 246 bp, Glycine max
ccattactaaagcattatactttccttctatgctccatagtcttgaaggaccaaacaaatgcaacaggtgtaggcggttaaaagtttcaaacatgtgtcttagatttagaacaaactcctaattgggtgcccttttgaaatgcattacccaacccatgcttcataaactttagctcaatacgacgttaactagcttttttaagatgagtcatgttaaacgattcatatcaatgttaaccacccttc

SEQ ID NO: 227810 - DNA, 298 bp, Glycine max
  unsure (1)..(298): unsure at all n locations
aagacatgaaaggcggctccatgagattacgactcccttagcaccacgaatataacctgggccggacttattttcagaagagctcggccttaagcatgttagtgaaataaatggcacacttttcaatcttaaaatcccaaagcaagtcaacttgaaacttgagagctatgtcaatgcagntcccactcttgaaaattacaaccacctttgaacaaaaattcatggaaactaaaaaatcaacagaggtaaccagggccacagctatgagggacctaaatgctaaccaacgctctcacta

SEQ ID NO: 227811 - DNA, 460 bp, Glycine max
  unsure (1)..(460): unsure at all n locations
tgtgctccaatcattcatgaacctatttcaaccaaatggtantatatttgtagnnttatattgtagggaccatcaattatcagttaatatataatttgaacaactactaaacaaaattaacttacatggtccacaactgtagtatggatatgttcaaacatttgtcacctaaaattatctcggttacatctgcgtgtgtgaataaaaaatcctctttgacattaggaatcccaaatttttccccatcccatggcaactcaaatggcttttggtaaacatcgaaaaagttcttaaccaattcttccaatggatcaactacaggcactgtagtgtccattcctgcaaatgtaaccctttttagcataagcatttgtgaatcctacatgnttaatngaaattcaattgtgatagctttcaagaaaaatgtcgttgcaattaatattgagagggaaaacactat

SEQ ID NO: 227812 - DNA, 249 bp, Glycine max
cccccccgggttgactgaacggccagaaccaccaaaacaggcaggggaggtgtgtgcaaaaaaaaggaagacagacacccaatgaaagaccgaaaacgcaaacaggccaatccagggggattcacaaaagagaaaaaaagagatgccccggcgggacaccgcaaagcaaaagcgaaaaaaatcgaagaaaaacaccccagaaaaaacaaataaagcaaaaaaatcaggaaaaaaaaaatggaaaaaaca

SEQ ID NO: 227813 - DNA, 466 bp, Glycine max
tccttttagtgcgtcacatttaaaaccgagctcgatggtttttcgagcctttgatggaactcggcgggaagtgatgggggaaatcgacatccccattcaaataggcccccacacttgcaatgtggtgtttcaagtgatggacataaatcccgcctatagctgtctcttggggagaccttggattcatgcgctgggagtggtcccttcaatgctccaccagaaattgaagttcgcagtgggtggacttttggtgatagtatcgggtgaagaggatatgttggtgagctgcccctcctccgctccatacgtagaagtggcggaagaatcattggaaatggctttccaatccttcgaggtggtaagctgcgcctctgtggaactaagtctgttgctaccttctctctccaacgcggccataatggtggcacgagttatgcctcacgaacggattgagcccggaatgggt

SEQ ID NO: 227814 - DNA, 246 bp, Glycine max
  unsure (1)..(246): unsure at all n locations
tatagaaactcaaccttcacttaaaaganagtcacatatagaggtagtgatatcttattgacgaggcgggtcgtacagaggaagttcgaactcgcggtgggtggtccattggtggctactatactactaaatgctatggtactcattggcaacctgccattgatccggtagcaaccatgctcttcttaagggatagggaagttttacttgggccccaaggtgggctccaaaatgcacctacaacgg

SEQ ID NO: 227815 - DNA, 437 bp, Glycine max
  unsure (1)..(437): unsure at all n locations
ctggtctatgatgtacgcagttgcacactattcattcttcttgcctgactctcatacctaaccctcccatcaaaccatctaattaaattctcctaccaaactttctttccctatatataatcccatcatttcacaagacatcacacacaacaacatccttacaaaagtaacctctattttaaactctcatagctgtcccacttacatcccctaaacacaaccctggtttaagaagttacaaagtggacttggttttggtggcctagaaattttggtaggcaagggttgtgaataacaaatctagatatcataaattataattttttattatttcttgtatttnntttggcactacttgtgctcaacctctcatattaataaagatttcaccttttaaaaaaaaaatacatattgatattagctcgataaaatacaca

SEQ ID NO: 227816 - DNA, 401 bp, Glycine max
gaacacggaccatggaagagatttgttttgttccctcacaccacgacggggtctcaaagccaagctatcaactcttgcattataaaagcacccaaaggttgaataacgggaaagatgcacaattatccataacaggtagaggaacactgactaaagcagctattcaagccctacctaatcacgtcatgtaaactacccttctcccctccatggttggtggagactgataaaaaattctgaaactttatgtggggtcatacaaaaaactcaattaaagttcattggaggaagtgggattccttatgcacccataagagtaacagaaatcttggtcccaaaaaagctaatgcgatgaaccaagctctcctaatgaagctagaatggaatctttgcacgacgca

SEQ ID NO: 227817 - DNA, 89 bp, Glycine max
cgaagggcacgaccgggagaggaagaacaagaaggcgcgggcgagaaccaaaacaaaccagcggaagcgagacacggcaagaacaaaac

SEQ ID NO: 227818 - DNA, 455 bp, Glycine max
  unsure (1)..(455): unsure at all n locations
tntacatatnanaaccatntaaacaagggctaagatggtttattacatccntccccctgtttaacctactgaccacaccaacttggacttcacgatttctgcggtctcagatttaagtttgttatgaagttcgtctaagacagcatggcaaaatcctttgatcacagcagtcaatcctgcttcagagtctatccccctttgttgaaagtaaaataattgatcttgtccaacgttggatgtagtagtatcatgcatatgttcaattcttgctgttggattcttcacctgcaaaatatatagtctgtgatttcatgatcaaattacacaaaagtatcatgcgcaattttctggataataagggaagcacggacaaaataaagaaaaagtgaagacacatgggttaaaactgcacaatttcttatcctcttgcatgcattcgcaccattctatacatt

SEQ ID NO: 227819 - DNA, 435 bp, Glycine max
  unsure (1)..(435): unsure at all n locations
tgtcnaaagggaagcaagataataactcttttcatagcaaattctttatttctacttcaaaaccccttgaactacttcacattgatttacttggttcctctagaactatgagtttagatggaaattactatggcttggtaatagtggatgattactcaaggtttacttggaccttgttcttgaaaacaaaaaaaatgacgcttttgatgcttttcgcaaacttgccaggtgattcaaaatgaaaaaggtctcaacattgtttcaatgagaagtgatcatggaggtggatttcaaaatgattcttttgaaaaattgtgaagaaaattgaattcaccacaatttttcagccccaagaacacctcagcaaaatggtgttgtggagaggaaaaatcgatcccttgaagaaggtgcaagaacccttcttaatgaaacaag

SEQ ID NO: 227820 - DNA, 432 bp, Glycine max
  unsure (1)..(432): unsure at all n locations
tctgcatatattgnatggaaacatggaaatgtgtaaattcttcttcttctgnctgtattcatatatctatatgaaagaatttctgtatgcttgattatggcaccattttgtgttaatgtgataattagcatatgacttatgcagaatccacggtttctgatgagtttataagattaggcagagaaatggttgcaaagtgtgctggtctgcctttgactatcattgttcttggagggcttttggctacaaaggagagagttagtgactgggctacaataggaggagaggtacgtgaaaagcgaaaagtagaggaagtcttggatttaagttaccaggacttgccttgtcaactgaaaccatgttttctctatttaagtcaattcactgaagactctgagataccaagaactaaactatatcagctatgggtag

SEQ ID NO: 227821 - DNA, 264 bp, Glycine max
atgaagagaacgttagctatgagtcactagaaagagtaaattacatttgagcccctaaaaatataaaggaccatcataataggttctgccagaaaatggcacatatattcttgaaaataaaaattgttacccataataatccatgctgctagttctgctagagtctacaatgatagtaaggtataaaatctaaggactataatgataagttgtacatgtccagaagtaaaatgagtaaatgagaatagcttgaatttcacgttt

SEQ ID NO: 227822 - DNA, 468 bp, Glycine max
tatccagaaatcgaagcactatgatcttctgctgaaaaattttttgagaaacattctctaggaccctgagaacaatcataaggaaaaaaactccaatttctgccttcaatccagctctaaatcttgacaccagactgatgaaaatggagcatgacagttgaaacacaatcaaaagagttgaagcactgttcttcaacaaggatagacataagtactgcttgatggcgcctaaaaacctgctcatccacaaccaaatttaaccatcaggactatttttgtcatctggaaaaattatgaagtaaaaaaaaaatatagtgtcaagtggtgtatagaacaaagaaagaaaatgttaatttgcattaatgatgagggacaaaaggtcatatgttaaattcaagagataaacacaaaataaataaaataaaaataaaaataaaaataaaaataaaattaaagtaatagtccata

SEQ ID NO: 227823 - DNA, 334 bp, Glycine max
tacgaccatgccctcctgatttccaactgggaaattggcgagtggaggaacgccccggcatttacgcaacaagcataatggaaacctttacgggtttaaaagctctataaatgggcctaaggtctagaaattttccttttgttaaggctttgggtcttttgtttttgaatttataatacaaggatctttcttcatctgttcctggtctctacccattctcagtcatttgcatgtttacttctttatctgaaacggcagaaccgatgacgagtcccccgaagggactaatacctgggaaccgtgtatagacttcgagcaagaaatggaatcaacc

SEQ ID NO: 227824 - DNA, 455 bp, Glycine max
tacccaaacatgcttgggattaagcaaataaaagaatagattgcaagctatcttgattatctatcatagaaattattatttggttcaaaatgagtaagacaatttttttatacttattatgaatatgaaattattttacattatcaataattgtaattttttagcatttatatcattttcttgtctctaactcaacctttagttaaatactaataacttagtaaaacaacattggcaattaattgttaataggaaaaagtggcaaaaaataataaaggatgttagtgcttagcactactgagtttaaaaaggttggctaagattttgttaaaacataagcacttacacaatgaaggaaagctggagttgctgcacatgatgtccaacgttatgtcaaggaataagatcgggctgcataatgcacaaggcaagataaagtgtcaagtgatgaattg

SEQ ID NO: 227825 - DNA, 453 bp, Glycine max
  unsure (1)..(453): unsure at all n locations
tcagaggtataacctaggggcaccataactatactttctataanaaaaacgttgtacttgtcaagggtattcctgtttagatgttaaaaacactggagagcaaggcctgtaaatgttggttggtggtagaacttattggaccatttatcaagaggagttaaccaaaagtatccgataatggaattgacttgaaatctttttggcactaaggagtccttaccagtcaagcgtcaaacgcatgattctcaaactcgagagaaaaaaaataaagggtttggttcctaagtggcaggtctacctaaatctatccaatctttgctcctctggtctcaactgtgaacccaccttgaaacaaaccaaanaattattacgtgttcatgaagcagcaactaatgcatgtttttatttttttttttttaagtntacaccattgattctagactcatacacgta

SEQ ID NO: 227826 - DNA, 381 bp, Glycine max
ataaaccacagactctggcgacaggtgcagatttttgattcatggtcagttgggataccacgttaaccaaggcatctagttaaccttcaagcttcttagtctcacctgatgaagatgaattcgaggctacttcatgcactcctctaatgacaatagcatcatttctggcactaaattgctgggagttggaagccagcttctcaattaaatttctggcttcagcaggggtcatgtctccaagggctccaccactggcagcatctatcatacttatttccatgttgctgagtccatcataaaaatactggagaaagggctgctctgaaatctggtggtgagggccactagcacataaattgttagatctctccaatattctat

SEQ ID NO: 227827 - DNA, 469 bp, Glycine max
  unsure (1)..(469): unsure at all n locations
ntaaacatgaaggaaaatgaagagtccaaaacaattctctatttatacaaacacaaaggtaaatgttttttaacacatgcatgcaaatgaacataaaggccaaaacgaacacatgcatgcaaacgtgtaaaaaaaacaaaatagaaacagttgtaggcatcaaaacgagcagaaaggcataaacaatagcaatgtaaatcataatcaggcaaagctcatgcatgttttcagcacttcagtccaaaggaaaccgaaaaaaggtaaactgacaatgaacacataaccgaaaaaaataagcaaatgcaacacaaaccaaaagtttataaagcaagcgcaaatgagagaaatagtgaacggagtgagcacaggaaatgcgaaaagaagaaatgggaaaaaaatggaaagcagaatacggaagaagcaaaaagggacaggatgaacataaacaaagggacaggacacgtggact

SEQ ID NO: 227828 - DNA, 412 bp, Glycine max
  unsure (1)..(412): unsure at all n locations
tcatccagaaacanacaattgctaaaagacatgctctttatcttcactccacggtntatccttcactatattttaaagtgcaaaaactatataaatttaattgtgttttaaaaaatacaaatgaaacagccacttcacagcacaattgaggatagcatgaaagcaacctattatgaaagacaagtcgtttctttaaattgacactgcacgatcaatctatgataactattgagataaatatatcccaagagtgcatagagacatatatatgagcgatgagttgtgtgctttatgctcattacggctttgcataaaagaagatcgcacgtatttgtataaacaagcagagtataccaaaattgacaaaaatgggctctgatgagatgcatgaacggattgataaatgtaaaca

SEQ ID NO: 227829 - DNA, 187 bp, Glycine max
cgaacggccgcaccacaaaggccaaaacggcttgccaaacacaaccggaaagcagaaagcccgggtcatgcacccacgaataggaaaccacccgcaaacacgaggagcccgggaccggaggccaagccagacaaaaacgcacagggacccagcgaaacacacccggaaaaacagaacgaacacccca

SEQ ID NO: 227830 - DNA, 478 bp, Glycine max
  unsure (1)..(478): unsure at all n locations
gacactaaaaactaagcttgcaccgcactctncacctaattctcgtgccgccattttcttcagctctattaaccttattcatgaccccttatttggcgtcatcttgatcccctgcctattccccttacaacgtcatcgataaaccattttctaagtggtattttatgtgagtttttgtgtcattttgcatgcattttattggcaaaacttacgtttgaacactagttttgtattgtcgaagtgaaatcgctcaattgaatgaacgagttggaaattgcgcaatattatgaagatttgaagactttgcttgatcatgatcgtggtacattaatcaccactatggtaattaacacgaccacagtaaaatgataacaatccatcaacacagtgtcaacattgaaggtctgggtaaattcacaagtgttgtggtcaaccatgatggtcacattcaatccataatggcctatagtttcaacat

SEQ ID NO: 227831 - DNA, 438 bp, Glycine max
tcacgggtgcatggcattattttaaaagaagagctaggtgcttgcgcgaggtccaaaaggagtttggctcaacacttggaagccacggaacaaagcatgctatccatcataaggcaatacaaggaaaaattgaaccaatccatggcccatgaacaaaagctagtggaggaatttgcacaagtgtatgccgaaaaagaagcaagagggaaggggattgatgcgctgcatcaagaagcgactatgtggatcgatagaattccctttagcccaagcaaaaaccatggccgaagtgtgtacttgccccgaggagaatcatgggctaatcaaatacttgtcacacatgatagacttgatggcccatataattaggaatcgttaagttctcttgaacaccttttgtataccctggctagataaagctttgttcttttataaatg

SEQ ID NO: 227832 - DNA, 357 bp, Glycine max
tcctctggccgtaaaaaaacattgtaagccaacaagcgttttttatataaatcgcgcaaaggcagctgaaaaatatcagtccggcctatttcacgaccggtgtcagctattgagttttctattcaatccctgaaagaaatatgcatgaagtccgatagcaaatatctttttgcccatgtgggctaatgttttcctggccgaataaatgggaaaatgccacttttgggcgaaacaaaacgtcggttgagctcgcccaagaaaacctaggcgacctacattgtacattctttatgcaacacccagacaagaaaacttcctctgtcgcgaaaaaaaaacaatgtaagccaccacgcgctt

SEQ ID NO: 227833 - DNA, 461 bp, Glycine max
  unsure (1)..(461): unsure at all n locations
ntgtcttgttccactcaaacgactacgtggagtttaactgattccttttttcatacatttctaaattctaacattcatttccgcgagataaaacgcacttcttctttttttccctctaatttccaccacatttgcaaataaataaataaaaattatcaagaacagcacacaccaccagattaaaactccccattcataatagtattccgtgatcatacataactcaaacttacacgtgcatcaacacagaaaattacacaacacaacagatcttagagaattagagaccaatccaaattcacaaatagacaattacatgaaacacattacaatacactaagcacacggaagggagtcataagttggtatggtggttggagctataagaaggccaacgttagaatctcccagtaacaaaacatattaattattaaatctgtcaatataanaataaaactaag

SEQ ID NO: 227834 - DNA, 436 bp, Glycine max
  unsure (1)..(436): unsure at all n locations
tcacatatttagggtcaatcagagagaaataatgttctttttccctgctngcgcatgtggctgtcaagtgtggcttgagcttgctatggcttaagaagttagctgttaggtggttaattctgttatatcctttataataaatatccagaagttagttagcagttagaatttgaatgtaaagctcttatataagacttgttcttcttccatgctaacactaatgaaatgctaatgattcccactctttcttctcaattttctattgctttctaaacactttaagttctgtgtactcgagtntgagatcatagaanacttgcagtatctatttatcataaccgttgcaatacttaaaataagtgttatatgtaagcaaactatatgcttatntttcgtttaattgcaaattacanaagatatttaagaatacgtgtga

SEQ ID NO: 227835 - DNA, 398 bp, Glycine max
  unsure (1)..(398): unsure at all n locations
cactaagcatatacaaaattacagatcccttctgcataaggggcaagaaccatgtctgaagagccacttatctatgcaaggtaggtgaaacatgtgatggcaatgaggcaagcctcttactgtctctccaagcataaaggcctatatattgcacaaatgcagaaatgttcatatcacaatacacaatcttagaaatatttagttcaaggcatagacatctagtggtattgacaaagaaaagcgtaagaactaacctgcaggcaaactgaacaagagactctatcaccggatgcatcaaaattgctgtctgctcgaatttntattgtggggattttttcaaccaaatctccagacaaacctttggaacctccggtgtcgaagatgctttgaacctcatc

SEQ ID NO: 227836 - DNA, 421 bp, Glycine max
  unsure (1)..(421): unsure at all n locations
tctgatgattncactgcttgtagctacaaaagggtgattatatgcaattatttagataccttatcttcacctaattttttttttaaatcttttctttctagcgacatcatttattagtatttagtatttcttcaatctgttttttctttttttttttcattctatccttccaaaaacagctgttccaaaacagagggagtgttttttgatgagtaacagaagaagtgttgtcctattacatgttaacaatgctcagtatgtgggaaagcagcaagctggttcaattcactagcctcattaattcatttatttctattcgaagacacagctaaggactgtttaatttacttaaattgtaattttgggattcaagtaattccactttgattatggaacagttgagtcaacataacatggtcat

SEQ ID NO: 227837 - DNA, 78 bp, Glycine max
acaaaaccaccagaaaaacccaaggaaaccccgcacccctacaaaccacataaccccttccccaaagcccatcacacc

SEQ ID NO: 227838 - DNA, 459 bp, Glycine max
tggccaaaaattaactaactacgtagatattgaagtttttatttcaccttttattctacggaagtaagcaacaaagcgtctatttgcctagagattgagtcatgtttaacgtcaattcactgtgagagaaagagtggcgtaagcacactaaaagtcttagagcaatatagggtatgaaagcgaccaaaacagaaagaatggaagagaaatataacagatagtagtagtagtagtatggaagagaaagcagggagatgattttactgttagcacaagtggtaaattggttgtacggaatatattctatttattatatttattatttatttattatattaaaacaataagtttagtgttgatcatgtatccaattacttttgttttatactcattttttcacattctcttttgttgattcgccttacagtattattattattttcattattaccctcgata

SEQ ID NO: 227839 - DNA, 467 bp, Glycine max
tactcagcttagacttcctgtgttctgggaacctctcctttcttaggtgtacccaaaccccatcacctggttcaagcacgactttctttctactttagttggcttgccctgcataaatcgcatttttcttttcaatttgagccttcacttgctcatgcagcttcttcacatactcagctttagcctgtgcatccttatgcttaaacataacaatgttaggcataggccaccaatcaagaggagtcaaaggattaaatccataaactatctcaaatggtgaacaattagttgtgctatggacaacccgattataagaaaactcaacatgaggcaaacatgcgttccaagaattaagatttttctttaaaacaatcccgagcagtgtgcctaaagtcttattgactacctcaggttgaccattaagttgtgggtgacaagtagtaaaaaacaaccatttagtattaatc

SEQ ID NO: 227840 - DNA, 258 bp, Glycine max
aaggctctaacctaataaccttcatccattatcatgactcgagtgccttccgccattattggatgaggcatagcatgctcttttatgggaggatacaatgttaccctccggctctctacataacattggcgggcttgcttttaataacccggacgcgtcaatttccctctttaagagggagttctctttaaatggggcaagaaactatatctccaactcgggaatgtcttttccaattaagcaaaaatatggtctgcc

SEQ ID NO: 227841 - DNA, 457 bp, Glycine max
  unsure (1)..(457): unsure at all n locations
ttctacaccggaataagaggatgagagagtnactcanattagacagctttctaacaaaaagtttcatgctggtggaccttcttctaccaattatgacttacagcagccttatatccctcttgcattcccacctagagcaattccaaacaaaaagatggaagaagtggaaaaagagatcttggagaccttcaggaaagtagaggtgaacatacctctgctaaatgccatcaagcagatttcaagatatgccaagtttctaaaggagttgtgcaccctcaaaagaaagctcaagggaaatgaaaggattagcatgggcagaaatgtgtcagcattgataggtaaatatgttcctcacattcctgagaaatgtaaagacccaggtactttctgtataccttgcattattgcgaaccaataaattgagaatgccatgctagatctangagcatcagttagt

SEQ ID NO: 227842 - DNA, 462 bp, Glycine max
  unsure (1)..(462): unsure at all n locations
tatcattcttaatgttactagatataattaggcttttactactaagttatgaaagtaagaaacaaaaacaaaaacttaaccaaaagtaaaattgataattaaaagtacacaacagaaattaaagagtgtagggaagaagaagacaaacacaagatttatactggttcgaccacaaactgtgcctacatccagtccccaagcaacctgcggttcttgagatttctttcaaccttgtaaaatcctttacaagccaaagatccacaagggatgtaccctcccttgttctctttgaataaccaagtggatgtacccttcacttgaactgatccacaagagatgtactctctcttgttctcagtataacaatccccaagtagatgtaccctctacttgtaccacaaaggatgtaccctccaatgtngtgggacanagaattctcaggcggttagtccttngaatctt

SEQ ID NO: 227843 - DNA, 456 bp, Glycine max
  unsure (1)..(456): unsure at all n locations
tgaccgaatgtaagatacatcttcttcaacctttggtattcttgactccatttcattgaagcgcatatccacttgccattccaaggtatcaaacctctcaccaacaaaggtttgaagaccatcaaacctttccaaaatcttcgaaagaagagatgaatcttctccctcatgtccttcttcaccaaaatttctagcacccttctttatccaagagccatcatgctccttaatataaccaaaggatgctatgactgaagcgcctataaggaatgatctcttgattggaacatagggttcaaaatcaagaaggatgttgaagtgttgaacgaaaagggtaacaagatgaggataatgtaaaggggcattcaattgcaatgccttatgcatgcgatatctaacaatgtgtgcccaatcaatntgtaaacctttaagaaaggccacatgacaatgagatct

SEQ ID NO: 227844 - DNA, 424 bp, Glycine max
  unsure (1)..(424): unsure at all n locations
tctggaggaacattctggaaggcccaagtgggcctggttgttattngcacccccatgtttactaaatacaccctctgccattttttgctgattttttttccataacgttacggaactttacaaattttgtaacgatacttgttttctttccgtaatgtcacggaaccttacgaattacgtaatcatcccttttttggcttccgaaatgttatggaacctcactaattgtgcaacaatgcttccttttgacttccggcatgttacggaaccttacgaattgtgcaacaatgtttccttttgacttccggcatgttacggaacttcacggattgtgcaacaatgggtgccaagtacctcaaagcggtcaagcaaagtttgcatgccatcaaacaatggtgcccggacaaaataanggtatgacacc

SEQ ID NO: 227845 - DNA, 138 bp, Glycine max
tcagctctaccaatgataactgaatattctttgtgcccttgaccatgtccttcttgtttgagctatacagcctaagtgaaaaacatgataccaccttacccttaaggtattatggagccttcgaattggtttgggaat

SEQ ID NO: 227846 - DNA, 419 bp, Glycine max
  unsure (1)..(419): unsure at all n locations
agcttctcaaggaagctacctaggctataaatataagcatgtgtnacacttattataactttgatgaatgagagtcttgtgagacacacttcaaagttcaacttctctccctcttttcctccttcatttttgtgctcccccacccccaccccctctctctctttttcttttcctccattgaagcttcctctctaagcttcttatccaagacactctcttagtggtgaagctccttcttccatggcttattccctagtggatggcgcctnctctcacctcttctcctttatcttccgctgcatctccatagtgaaaaattgtcattgaaggaccttagtgaagctcaaagatccagcctccatagaagcttcacaagcaagcttacatcaattagtttgtggtctatacctatattacaa

SEQ ID NO: 227847 - DNA, 435 bp, Glycine max
  unsure (1)..(435): unsure at all n locations
aaacttacttatcaactnttaactaatattatttcttatatctaaatatattacattttaattattgagttaccattatgactacaaaatttgaaaatttaaaaaaaatcgcatatgttttggtaatgattttgtatattccctacaaaaaaatagaagaggtaatgagttcatataattaagtgtttagtcaatgcactctatcatataaaaatctatactatagacttgacatacaatttattaaaataaatcaaaagtaactcgtaattaataaattatatatattaagaaacttattaaaataaaacagctatacatcactttcataaatttaaataattcttttataaaatacgcataaaccgacgttctgcttacttttgaccttagtgtgatatgcttacacctcatatatttatatatatatatata

SEQ ID NO: 227848 - DNA, 458 bp, Glycine max
tggggtacccgtcatatgtgtgactatgtggcgatcgggagatggtgcaaatcaactctcccacatccacaaatcacacatgaacccaccatccccagttgcccaccttcaactgagctcgcgtacccccacgtagcccttatcctcgttcctctcagcaccaggtccccatcaacccctccaagcttccacaatatccaaacatcatgaactaccctaaaccaagaaaacagggcagaggcaaaaaaactctatccaaaacacattccaataccacagctttccctgctcaaataccccagtaacattctctttggtcttattcgctaaccggtggatcgactcgcaaattttactggagggccctagtacataagtctacattgtgaccgttgggatctgctagaaaatgtccagaacccaatatgtactacctttcccataaccagcaatgcaca

SEQ ID NO: 227849 - DNA, 467 bp, Glycine max
agcttcatctaattggtcatacatatgaaccatcgcggtaactccccaggcataaccaccactctgacccaggtcgtgaaaagcctctagatgcaccacatgaacatatgttgcactcttgttagcaaaaagagtgcaacccaccaggtgcaacagataagcaagagctgctacaatccatcgtcgtgcctcgcatctcatctcatagatgtctcgaacccatcccagccgtacatatgccccgcgtgatcgtgttgtctcggctctagccttctcagcagacacctcaagcaactctatcaacaaaaatatcgcctcgtccacaaaaagagcatgaaagctatggaaggcgccactgataggcaaatggaggagtgacgacacatcatccagtgtgatcgtcaactcttctactggaagatggaaggtgctggtctccctatgtcacctctccacaaatgcggata

SEQ ID NO: 227850 - DNA, 77 bp, Glycine max
cccccccctcctctcttgtatattatatactcacgggtccggctccatagcgagggactgatcttgaaccccaaccc

SEQ ID NO: 227851 - DNA, 446 bp, Glycine max
  unsure (1)..(446): unsure at all n locations
gctaactaagaacagggcgagggtttatgttggtcggncgtgtcgaaatgtgcagacaacgcagtgatcaatgtggattttgaagagggttcatggatgttcatgatcacttcactgggtgtgttgctctccacatatgtggatgaataagcgtcctcactacccgcgtggatagtcgaatccaaccgtgccgtccggtacatagattctgatcattactctgttccacaaggcaggagagccattgagttgctctcatgaaaggaaggaatcatatctcatatggttgagaccaaaccagacaagctctacagcttgaccttctcattgggacatgctgatgacaagtgcaaggagcctcttgctgttatggcctttgtctgtgaccaggctcagaacattcactacacttccaatttccatctcaccttcacaactgctaacgt

SEQ ID NO: 227852 - DNA, 272 bp, Glycine max
tgaagaatggaaccacagttgatccagatccctgaggtactatgcgtcaagctaatgacagtaaaccagctctttttaaattcattttcacagcatctagctagagttcgcttgatcaagagaaagtatgacaaaaccatcaccatgtactgcattggcataaggggttgagtaagctattctgaagctgtggatgaaaaataactcactttctttcaaacatccactcgctaagcgcaccctacgcacaaagcaaatctttattcatgcgc

SEQ ID NO: 227853 - DNA, 422 bp, Glycine max
  unsure (1)..(422): unsure at all n locations
ntattttcttgataacaattggaaacaactttcattcgaagtgattgctacattgcaacctctatcgtgacaaacttatgagtttcatgagatatatgtctaaatatacactaaaagtgtttattactcaccagtaatccttacaagaacattctccattttcaaaatggtggaatctattgcgatctctaaccacaatttttcgcctagtaatctttgctatgagcttgatcattgcgtggcaatcatcgcatatccttaagattttcccaactctaagtgttgtgtaagcttcagttgagactagtccgtagcatattgcaagtctctcactatgcacagccaaagccaattccttgtgttcatcatcaatatcatgtaaagccacctcagttgctggtaaataaccttcgaactttgac

SEQ ID NO: 227854 - DNA, 455 bp, Glycine max
  unsure (1)..(455): unsure at all n locations
tatacaaacncagctcnctggggctggatcttgactcagtaaggcctttatgttgattttcatccatggagttgtagcagaagatcaaagagaagacgcgagagtacgcgccatctactagagaataagccatggaacgagaagcttcaccaccaacagagtgcctcggataagaagctcagagtgagagctttaatggacgaaaagaatgagacaaagagatggcggcgcgggaatcgaaggagattatggagagaagttgaactttgaagtgagtctcacaactttctcattcatcaaagttatgacgagtgttacacatgtttctattgatagcttagcacatggaaagctctcttgagaagatagagggtatgactcttccgaatgtagacgaagaaagcttccttgagaagctagatgggggctactcacacacctccaatagctaagct

SEQ ID NO: 227855 - DNA, 480 bp, Glycine max
  unsure (1)..(480): unsure at all n locations
gatctctaatcacctgcagctgcagcttctaggtgaaaagttttcctattccttanagncctctcacgaggtggaggttgtgccatgttctcaaaatgtgcacaatcagaatgctcagaatcagaatgctcaaaattataatgctcaagatcaggatgttccaaatcaccaataacagaatgcacagattcaccagttatggaatgctcagaatgatcaaaaggtataaaatgatgcctaactaatctatgaaatgtcctatctatctcaagatcaaagggttgtaagtcagatggattgcctctagtcatacactacattcagcatgcacacagctagttgccttgtcatgtaaataaaggtgtaagtttgaactacagctaccctcaaatgatatccatattacttgaatatttgtgagacaccttatacaatgatgataagatagcacataacatttcagaccacaattcaatgtct

SEQ ID NO: 227856 - DNA, 331 bp, Glycine max
ttggatatgcaacaaacacgctctgcggctgatttacgggtggcccttgcggatgattaggcgctcttggctgatacggtggtgggtaacgaaaacggatgatattggctaagtatttatattgttgagctggtgggaaacttggccatgtatgaacgacagccacaacatgggctcctcattccttcttattctctccatttgccctaggcttcctattcatcaaagcacgataatcaaatttgtctcttctcagacccacttcaatctctttactggcgaacactaaatctgcaaaagctgaagccatgtaacccatcatcttctcata

SEQ ID NO: 227857 - DNA, 433 bp, Glycine max
  unsure (1)..(433): unsure at all n locations
gcttctcaagcaagcctccatcacttggatatccattngatcaattccaagctttgcataacaaaatctaaaaaaattaaacttgaattgggggtctagaatgcatccaaagcaaagcaataatgctatactcaccctaatatttatcaattttctttttcatatcaattgtcatgtttctaatggtctcatcctcattattcacattttgaatcaacaaacataaaatcttcctgacttgcatgaaatgcatattagatgtaggataagaggaaccaaaaatcaactcattaatttgataaaatggatgcaaaaattcacacattttttcacctctatcccactcttcattagtaggacaattcgtatagcttttatcttcaaattcaagactactataagcacaacgatacaaaagtgaactctcaagcat

SEQ ID NO: 227858 - DNA, 454 bp, Glycine max
  unsure (1)..(454): unsure at all n locations
agctncttaggagagaagtggagtgatatntttctgttatcaaagcaaagatatatgaaattcttaaataatatctttttttcttttaaaaaaagcctaaatctatgcttctttaattgcacagaaaatatatacttaatactaagtgcaccagacacaaattagacaagttttagacctgaaaaaaaaaataaaaagatgatttattctttaaaattcaacttatcaaagagttgatgattaatctcgatgtaaatacatataaatttcttacactattaaaaagaattgttgtttcaaaaacacagattcacatagataagtctatttctctttattcattaatgttatatatattataatgaacaatatatcataattttttggtgtaagtgtggagcacaagtctctgtaactatcattgcaatgttctaacactataacgatttgaaaa

SEQ ID NO: 227859 - DNA, 451 bp, Glycine max
  unsure (1)..(451): unsure at all n locations
cccatcatgttacctctgacatatattccatggccggngttaggtgcgaccaaatactataggtaccatcaccgaatcgggcataatacacaacactattgggccttgaaggacaatatataaaagcttatacaaactggtacttaccccagtttgtttacaggtcggaaaaccacctattatgagaaagactttggaaacacccataggagtacatacgaatcacgatgtggacaaaagaagagacatagcataagatcaaggtatacagagacaccagcagcaaaggcacaagtgacaacctccacaagaacaagaatcagcctatcaaatcagaggtgtaatcaacaccattggagaggatatctctctggatgacaatctaaccagtcttgtaaatgccatcttccaccaattgggacatcgacatccaccttttcaacacaccatt

SEQ ID NO: 227860 - DNA, 454 bp, Glycine max
  unsure (1)..(454): unsure at all n locations
agcttggcccatttctgccatttcgagggttatattgagcttgtttgtcanaacctctacacttgaataatcgggttgcgaatttggactttgttttgtgtaattagtttaattaggtagattagatgggtctaatcaaggctcatcccttccttctgagtaataactgtatatattagtggaagttagttagttacttcattttgtacaaaaataaatttagttacttgtggaagctttagggtcaaaatctttgctctctttttctctcaattgttcttcattcttctccctcttttcacttctattcttccttntcttgcataaatnttgtggctcttccactgatgatgatcatggaaggctaaacactcaataaatccaaggatccactctanacaagcctgaatttgagtctaagttagatcctattctgatgaatgtcatcatttct

SEQ ID NO: 227861 - DNA, 454 bp, Glycine max
agcttcctttacttgacattgttggtatgactccttttaggatgacattttcagctgcattttcctatttggagggaaaacgtataaacaatgttgtttgggctctaaaatggttttgaggtatttttctgagacgtgatgcaatccctcaagttattgttactgatagagattcaacattgatgaatgcaatgaaaactattttccccaagtcaaccaacttgttgtgttggtttcacattgataagaatgtgaaggcaaaatataaaacctttgtgggtaaaaaaaatgcatgggattatgtcatggaagcatggaggagtctcgtggattgccttctgagcaagggttcgatgagttaagaagtttgaaattgcttgctcaccatggtcaatatttgttgactatgtcaaacaaacaaggttgattccctataaacaaagaatttgtaaag

SEQ ID NO: 227862 - DNA, 384 bp, Glycine max
  unsure (1)..(384): unsure at all n locations
agcattgtgttgttatgactatngtggcacttgttgatggacaccaaaatggagttgaaacataataatatagaagctcagtgttgtaaggactattgtgcctgtagacgatgccattttggagttgaggcatgatggtttcctattaaagcatgtaatttctctggctttcaagcacacatgagaaattatggattgacaaagaaaatggcaatatagacttatactaccttggcatgtcattttcttgctacactccacaatgatgactagtcaatggaatctgtattatttggaatcatgagaagcgttgcatattgagggatgaactctgcatgagcagcgtttaggatttttggatgagcttataggtgttatcttgga

SEQ ID NO: 227863 - DNA, 368 bp, Glycine max
  unsure (1)..(368): unsure at all n locations
ttgggcatagcacccacctgacgttctcaagtttctgaccccggacatatctccggtaccactctgtggtcacaataaaagcacgaagtttcacccttcaacactttcttatctcaagcttgtaggattatggggtacccatcacatgtggtactaggtggcggtcgggcgatggtgcacaacaagtntttcacatccacaatgcgcgcataaacccaccatcccctgttgcccacctccaactgagctcacgtactcccacgtagcccatatcctcgtttctctcaacaccgggtccccatcaatcctctcaagctttcacatcattcaagcagaacaacattcaaacagcacaagctatcacagcc

SEQ ID NO: 227864 - DNA, 421 bp, Glycine max
  unsure (1)..(421): unsure at all n locations
agcttggttactaagcctagggtatatgtgtggtaattattctagccctcacgaaactgaacacatgttcaaaaaatagaaaacatgcgcaaaccaaattgtcccataggttgtttccctataaaatcatgcgcaaatgccattgaggcatttcaccgaacacttggtgggcgcgcgtttaggcataaatagcgagagaacggggacaatgtggcatgccccattgcctcaaaatgcattataggcctagggccatctcatacaaaccctcaattcaacccaaccaagcaagaaaacaaaccanaattgccccacatatatgagcacattcccacaatttagagcaccaaaagaagatcaaaatacaccaatggaaagctagaaagcttaaggatggaatacttacttgttggtgatgaat

SEQ ID NO: 227865 - DNA, 278 bp, Glycine max
cagacatcttgcccaacaaagatatggtaaccataaattgcctttgctgtctctctcctgctataaggagcagagccattgatcctggtaagacttgatgagactggaacaatgaaggccgcacaatatactcgtgccactctgcgagacgtatacttccacctgcctttctctgacatcatgattcacttgaatgtgcattcgggcacagaaatcaaatgctatgggcctgcttatctatggaggatataccccgctgaacgatacatgaagatctt

SEQ ID NO: 227866 - DNA, 401 bp, Glycine max
  unsure (1)..(401): unsure at all n locations
gctttccacaacggatatgggagaattttgagagaagaaagtggggttgttgatgatgttatttccccagatctcgcatgggtgaatgaattactgatgtagattatatgcatttgaagatgatgatgacaaaaagtggttcgtggtgggaattgtgatgaggatttaccaagtgtaaatacatgttggagctagcaacatatattacatccttggcttcttttcttattattggtttaagaattttattgctttctgaatttgttttaagatttgtcaaattaaattctgtaatttttatgtccattaattagatttgatcttttattccgaggattctgtagaaagtgaaactgattcttggaatgggatngttgaattttctctctgttttggatttt

SEQ ID NO: 227867 - DNA, 445 bp, Glycine max
  unsure (1)..(445): unsure at all n locations
caagatctagcatgatctataatctgccaaatcttgattctcaatgcctcacaggttgcttcactcacaactctcagttgtttcacacttgaaggatccacactatttgaatctctcaccactctttctcaattcacacctctcttatcccacctagtcccaagacttagtgctcttgataccaaatctgttggggagaaagagagaaaaccaggaaaaggcatatactaaaatgagatgaattgtattatagaattgaattacatagaggctatttatacagctcaagttcagcctcaatcactgtcttatcacactcaactaactaaacaaactaccaaacttacatctaatattttgaattacagctaacagggattacactacaattgcaacatttctccctcgagagcacattttctctatcgcanaatgctacatgttg

SEQ ID NO: 227868 - DNA, 310 bp, Glycine max
  unsure (1)..(310): unsure at all n locations
aattaaacatttattatatatgtcttttattatatgaataaagggtcaagtcataaatttgatcataaaatttattgaaacaaactaaaagaatctttacctatctatctatgtgacgctttaatgtgaatttttttatattaacatgntaataaaaggtgtcaaaacgcagaacaatgaactcaagttcccacttcgcatgcatgtgctaaacgttagtagtttcttttgcagcagtctttgtcgtggtaggagccagttaattccgttctctcgaacaaaatagaataagcataaagcatatcttgaa

SEQ ID NO: 227869 - DNA, 474 bp, Glycine max
tgctctaaatatacattggtgtttgtatttatgggaggatgttatatgccatttttgctttaagagtaatgtcccactggtaaaactaactttccaaatgtttgccttcgcaggaatggccccgaggaagcttgcctcaaagaggtccaggaaggacaaggcggccgaaggaactagttccgccccggagtacgacagtcaccgctttaggagcattgtgcaccagcagcgcttcgaagccatcaagggatggtcgtttctccgggagcgacgcgtccagctcagggacgacgagtatactgatttccaggaggaaatatggcgccggcagtgggcaccactggttactcccatggccaagtttgatccagaaatagtccttgagttttatgccaatgcttggccaacagaggagggcgtgcgtgacatgagatcctgtgtaggggtcagtggatcccgttcgatgccgacgct

SEQ ID NO: 227870 - DNA, 448 bp, Glycine max
  unsure (1)..(448): unsure at all n locations
acctgcggcatgcaagctnncggatncaatgtgcgatcgtctcgatgtattacgttgactcaatcattttcatctgagtaaaactgtattgtcgtttgaatttgctgagagcttcaacattcaatttcgagcatctcgatatattacgggactcaatcagacatccgagtaaaaagttattgtcgttcgaatcttctgagagcttcaacattcaatatcgagcgtctcgatgtattatgggactctatcagacatctgagtaaaaaagttattgtcgtttgaatttgcccagagcttcaacattcaatatccagcgtcttgatgtattacgggattcaatccgacatcaaagaaaaagttattttcgtttgaattagctctgagctttagaattcaatttcgagcgtctcaatagaatacgggactcaatcagacatttgagtaaaaa

SEQ ID NO: 227871 - DNA, 463 bp, Glycine max
  unsure (1)..(463): unsure at all n locations
agcttcaagnatntaattgccatcgcaagtttatcttgtattagtttcttgaagacttgaacccaaatcattatttaccgtaataggtaagcacaaatcaatatacaggtatcgtatgtctcagtatattgactgcatcatatactggtcaatcagcaaatttataatttttttaggaggataattatnttataattaggccaaatttattggataaataatgtcaaatgccagttagctagaagcggataagggggtgaaagccatttgggattggctcttcgttagaagaacaattctgaatacaaaggaacattggagtaggaaaaaaaaaaccatcctcgccttgtgtcatatcaccttgctttggcgtaaaatcaccttgntntctctttaattngtattttcctttcaaaagtttaggcttgaaataatcaacttaagtgaggcaataatggattta

SEQ ID NO: 227872 - DNA, 462 bp, Glycine max
actaagctcttatataattttaatctgcagcatggccttttccatttatggataagttgtgcttgacctgccatccacatcaactctttcatgtgtgctcccggatacttattcttccagttaccatacaaatgtttgacacacaggagatgttctacgttttcaccaagctctttgattaccttaaccaaaccctgcataaaacagtggacgaattaaatgaaagccacagtttataatagttctaattaaatatttaccttctgctggtaagaaatgaaagcccaacatccctcctgaataccatctaggtcaactatcaagagatcaacaaaccactctccagatgaataattttcagattccactatagcatatgcaataagaaacatttgattggttccatctttacctactgcagtcaacaattggccaccacaatctcctttcagaaagcagtca

SEQ ID NO: 227873 - DNA, 314 bp, Glycine max
  unsure (1)..(314): unsure at all n locations
agcttcatgccacactcggcataggcatgtatattactatctatgtnggcatggcaccggcgcggggcggngtcgtggantactcccccgctctctacccccgaatcttaccctacttctcgtccccgctatttgtggtgggggtatcttttagcgccatcttcgtttgccggctccccgcgcagacatttgaaaacaccctccaatttaaaaatgtctaaaattttaaaaaaaattcataacttttttttatctctatttctcaacaataataaatctaagggttaattctaagtttaacacatgactaaaaa

SEQ ID NO: 227874 - DNA, 351 bp, Glycine max
cacaggaggatattacctatatgagtgccaaggggaatcactcgtgcgacaactcggcgatatctctaaaaactcacgaatgtggaaaaaaaaattcgccccactctattacgtatcgggacctaatctattattgaaaaaatgtgtcaaatcttaagacactatggatgtaaactcaggatgctttataactcttgaacacacaacacttaaactactccgaccctcaaaaagctaacaaccacgtttggggatccactctaaccgtcgagtaccagaaacaacgagtctaagcgctggaacccgaccaaaatgggcaagatctgacaagctcataaagcctatatagaa

SEQ ID NO: 227875 - DNA, 444 bp, Glycine max
  unsure (1)..(444): unsure at all n locations
agctngacgccggaaactggagctttaccgttgtgctcaacgntgctacccccacgaaccagagacaatgccgtaggaaaaagtggaaaacaagaagcaaagctctttgaaagtggaggcagaagcttttccggaaaagaaatgacatttctaaggaagaaaggtgataggagcaattttggcatttcaaaagtttgttgggtgcacctagtaacactcatctaccaagtgtgccatttcacctatgaggaccaaacactaactccagcctaatgaaccaaccaaagttgtnacaacttgctcaacttctacccatttttttaacatcaatcctcaaccttggggcatcaccgatacttatgcttgctaatgatttaagaatgaatttagcccccaaaataggtactatcaaataaataaggatccagagttactaaaaaaatc

SEQ ID NO: 227876 - DNA, 435 bp, Glycine max
  unsure (1)..(435): unsure at all n locations
atcaagctctactgctacggagcctaataanagagcctattaacctttattttatntaaagaaacccaatataaaaagaaccaattgaatatttaagctataaatttctattttatttgaaatctatctgttccggtttaacttatcctcaactttttaaaatggcataaaaattatcccaaatgacagactaagttgaagtgggaaccaagaaagtgcttcactaaccaacttcatttagagaaactgaaagacaaaaggtaagatgcagaacctcaatgttcaacaagaaagaaaacaaatatgtttttgttgaatctaacagatatctatagctgtggataagtaaaccattaagattgacatgccaatatcaaaattaaataaaggtgcagagcacttaagtaaggttacacttgcaggagcttacgtcta

SEQ ID NO: 227877 - DNA, 341 bp, Glycine max
ctgcatggatatgttctacgattgtgtttgcatgaatttctaatcgtcataacatatgattcatggaagtgatctgggcattctttctttctttacattttaagccattggccaaacagttgtcccaatgtacattatttttgccatttgtaagccctttgagccaaacacttgatttttatcggaatactaaacctaggatgaaagtttccaaccttaccttaggataggagagcgagagtgtttttaggggagaattctatcatttttgtggctagttgtgggttttgaaggaagttaggtatttttcaaaaatcaaatcacatataaaaaatcaaaat

SEQ ID NO: 227878 - DNA, 471 bp, Glycine max
ttatccgagagtgggaaaattatcttaatgagtatggtgtttatcatattgtactctggataatatctattcgcaacatatatctttactcttttaacaaagacaggattgagaagtaacatatatcttaacatgtaagtacagtcaaattgtgaaacgattcaattttgctaataaaaccaatcattctctatttgttttggatcaatttttgcggcttttattaaaataattatctcattaaaaaaaattctactttcttttcatcttttaaatcaaataatataataaataacttatcaatatcatacatgatattctctagtactaaatcttacatagaactacttaagtaaaattatgtattttaaacattcttattttttggtttactcttataataattataaaagcatacctatataaatatattatgaaatagataataaaaaagaccattgttaacaaaca

SEQ ID NO: 227879 - DNA, 465 bp, Glycine max
  unsure (1)..(465): unsure at all n locations
agcttaagctccttcaactgcacatggctcttattattngaagagtatccttgtggaaccttcacccgacgaagacactgacaaaaacttatcttctcctttntggacaaagtatggcaagctgggggcaagtaaattttcttcccatcagaccttggatgcaactgtgatcgtatccccatattagctagatcttgacaggtattcaagccatccttcgtcttgccttgaatgttaaggagcatcccaatcacattgtcataaacatttttctccacatgcataacatcaatacaatgtctaacatctagatcagaccagtacggaagatcaaagaaaatggacctcttcttccttatgcaactctttttttatccgtcttttgggtctttccaaatacagtattcaggtgttgaacccgctgatatacctgctcaccagtcaacggtatcggtgcaatatcgg

SEQ ID NO: 227880 - DNA, 368 bp, Glycine max
  unsure (1)..(368): unsure at all n locations
tctgaataaatcaaaagacgtaactcttcaaatggttattgactttttcaaactggtctcaagtttttctaaaagttataacttttctaaatagtcctcttgaccagacataaagagcctataaaaataagactctgttttgcattctaaaaattaatcttttctatcaatcaattacaatcctgtataataaaattgcactcataatggaaatccatgtgaattcgatactttctatcacttgatgtttgtacacttacagattatgtaagcaagaaatcagttattggcataatctcactttaaggcataaaggattgacaccacgacttnttttctatatactcccctccacactatatatcgac

SEQ ID NO: 227881 - DNA, 447 bp, Glycine max
  unsure (1)..(447): unsure at all n locations
agcttgagccaaaatcctgactcaccatattccttgacccagggtgagaatgtcaattcttaccctcggaagcaaaaaaaaaggggagagggaaaatttccaatcaaagaggaagcaaaaaaggagagaaggaaaatttccaatcaaaggaaaaaaagagaggaaagggaattcccaatcaaagagtgggagaaagcaaaaagaaaagaaagaaaattcccaatcaaagaatgggagaaagaaaaaagagaagaagaaagggaagaaagttcccgatcaaaaaaaaataatatgcagaaaggtctttggaccggacaatatctgaacaatacagaattgtcccaaatgaataaaaagaaggaaagggaaccatgacctanaatggtcttccccctttagttgccaggcaaaatcttgtgcgctagcaaccttttttcgccccgcact

SEQ ID NO: 227882 - DNA, 463 bp, Glycine max
tgccagtgttgatgcccagggatgaggtgccaaagttcatattcatgccgtgtccgtgccagccttcaagaccagaaaacatcgttgtcaccgtcgaaatggagaagcaggcgcccaagcccccgcaactacctgtccctttctatttgtaattagctattgccaaggttcttctccacaaccgcaattttcggcaatatcaaagatcgcgatgtatcttctgaaaccacaatatcatagatcacgacaaattaaacttctgaaacttaaatttaaaaaatcttggctagttgtgctactgcttctcatcacatgttgtgctagttgccatcatttgttgtaatgtatattcattgttcaccgagtgtaagaaaaaaaaaattcaaaataagaataacggataggtaggcgtgcaggtcaattcgtagatcttgagggccatctcatttgattcaatcgatcc

SEQ ID NO: 227883 - DNA, 454 bp, Glycine max
  unsure (1)..(454): unsure at all n locations
agctggtacgaggaataacaacataaatacatggtcgngcaccaacaaggaataatggactcacacggtttctgtgtatctataccagcagcacaaatacagtttaaccatgaaacccaaccatcatctgctgttgacccttcgtgcgtatatttctaagtgtaaagcaaataagcaagctatacaaaaaagccaacccttaccaactccttcaacattcacgtaagtcctgtatcatcatatcaatcgatctcctttccttcacaaagagatcgaaacaatcataacgttaaacaattcaaacaagccctgtgattcatcntccattcacaataagagaattntcttcctttccctttcgcattaatccatgcccaagctctatgttntgccagatcccatgcggccacacaacacagcttcccaattcccattggcccctctaaaaaaacat

SEQ ID NO: 227884 - DNA, 450 bp, Glycine max
tatagatgctaggagtacttactattgacgattattctatggagaacttcactaaaaattatggattgaagccacaatagcaggagttgatccttttgttcccaaaacagaaactcaggagagacatttccagtatcacgggtttccatagaagcatattcaatttatgagacaaagagacaatgctagtattatcacatagaatgagagaagtagaataagtaacttgaacttcaaaaagaattgactgaatccaagttacttctgttgcaataagagccatacttttttacatagccttagttttggatcttgccacaattgactgctttttatgctaccaagagatgagattatggcccagaagtataacaacactagaagttgaccttttatcatcatggtcagaagctcaatcagcatcacagtatgcatgaagagaaaagggat

SEQ ID NO: 227885 - DNA, 446 bp, Glycine max
agcttggatccaacccgtatgttacctatgttagcaccatagggcaagtcagcatatggctcctctccagtcaagagttcccacatcacaataccaaatgaaaacacatcaacctaaaatgacaaatatcaaaacaaaagcctcaaacttacatagtgacaaaatatcaaggtaccattaacacatcaacaatttagcagttccggagccatccatggtagagttcctctcaccaccagaaatcagcgtctgacattttcctttggacagacccaagtcgccaacctgatatcagatgctaaagtgtaaaaggtaaagaaactactgaaggatcaactaatcaattgctccgtgctacaagtagagttgtgctgactagaaagcaagtattgatgatcaaaaatcatttagcagaaaattatggtacttgatttcgcacaaatgga

SEQ ID NO: 227886 - DNA, 338 bp, Glycine max
tggaattggctaccaaggctatactaacatggaccatctttataaacaattcaaaatgaatcatttatattgaataatctaaaaccacattattatgggacacccttcataatataatttttcttcctcactggcataatcttggtaaataaactacaggctcctaccctctatgttcgaacccatcctttaaattttaattcttttataaatgcaaaacaaaaatatctgacttagaaaaacattattttttttaggtgaatcaagtcttcccttggtgccatcatccaatctaagctgtaaattgagttctttcttttacattgcatcacttgaat

SEQ ID NO: 227887 - DNA, 399 bp, Glycine max
  unsure (1)..(399): unsure at all n locations
agcttataacatatctaaatcacanagtttgtaaccaaagggaggactaaaacctcgcctatcttttcctctttttaaaagaacaagaaaaatacagaggaagggaatccctggaggaaaccaggaagaacaaaaaactcagaattgaaagaacatgcaatggtcctcttgattgccccatatttcaagcgtaatatcgtttaactacatcggagttcacgggcgagggcaattcctcgccatccatgtgggtgagtatcaaagcacccccagaaaaggctcttttcaccatgaaaggtccttcataatntggggcccacttgcctcgtttatctttaacagcgtgggacatcttcttcaacacgaggtccccctcgttgaacttgcgcgggcgtacct

SEQ ID NO: 227888 - DNA, 326 bp, Glycine max
tgaaatttgttacaccgcacaatttatttctctactttatatttcacaatacactaaatttctatttatattttcaaaacaaaaacagattaacgcaatcatatttttgaaaattacatatttcccaaatctattctatttctataatatcggtaagaaccttctatatatatatatatatattacaacacttgcctgtttaaacattgttatggttttgagagatatttcttatagaatatacaacttttataaaatcattatttagggatacggacaataatggacgaaattgaaacaagtgctagcctatttaacatgtccta

SEQ ID NO: 227889 - DNA, 460 bp, Glycine max
  unsure (1)..(460): unsure at all n locations
agcttatagtggcatctgtcgagaaattttctcacatatctggtcatgaaaaagcacttgacatacctggctattgaaatgtttaagcattttctgatatttataaggttagagccttgacgtctttaattcgtttcttcctgttccaaacttttatatgtttcttttattccaattactttccttgaacttgtgttgaataatatacttttatgttattgttgtaaaattttgattctcaatagtttttctctttttactatagttttgaaatccctagtttcaaaatatttctttcatattttttactttcatttttggttttgagatcttcaaatgtcaaagttattttattctcggtctcaaaattgagattcatgtattgctataaaatctctaatctcanaattaggtccatctatacatcaattagttattgatgaatattgaatccctaaca

SEQ ID NO: 227890 - DNA, 376 bp, Glycine max
tattggatgatacactaacatatttttgataatcacaacctatgagatcattgaatgctgtggatgactcaaggcctaagtattgctacttgctgagtacaaaataaatagaggttccctggctgctgctattatcatggcacgaatcgcttagcaatatctcggccatgagtcgaaagaccaataacctgcgcaggctgcacgtataaatggataccagccgaacctgggagcttcttataagtttgcatctaacaacaaatatattactcagtgatcaaaacaatgattggtcaaacttttgaattgtcaaaatgctccctatctgctactgatcaaatgcatactaaagctctacaacaccgcgctgctgtaa

SEQ ID NO: 227891 - DNA, 452 bp, Glycine max
  unsure (1)..(452): unsure at all n locations
tgcaagcttccttggggagcaagtattacaaccctccaatagcttagctcacccccacgggaacacacacccctccccaaaatacatgaaaatacaacaaaagtccctactacaaggactactcaaaatgccctgaaatacaaggctaaaaccttatactactagggtacccttaacttgaagggtatggtgcccttaatttgtagggtatcctacaaacctaaaaatggccaaaataaaaggcccaaaagaaggaaaacctattctaatatttacaaggaaaagtggacacagacttagcccatgggcccaaaatctaccctagggctcataagaaccctagggccttctcttgcatctttggctcaatcttcttgtagtcttttatccaatacccttggngggtaggattgcatcatctactcccccttgaaaaggatttgacctcaaat

SEQ ID NO: 227892 - DNA, 462 bp, Glycine max
cctccactgaatatccaacgcatgagttctagtcaagatattagtcttacatcatcacgatcaggaccgatttctttcaaggggtatttatctctctttgaagtttacacaaaattcagctctcattttttaaatatacttacttaacttaccgctaaaaaacataggtctaaatatattcgagatccctaatatatactcaatttttgttgagtccctcataaatttttgctcattattctgaatcttgatatattcaaagttctgttcgagtccctgtcttgagagttaagttatgacatgagaccatctcaatgactcttccgatatatatcagccattgggatggtgccacatcagcatctaattgatgacagagatctataaaaaaaactttaatatatcagggacctagaataaattttatttatcacggattcaaaacacaaaccggatatatat

SEQ ID NO: 227893 - DNA, 342 bp, Glycine max
tgtggcctgatgaaaatagagggaacctactgtcaagttcaatgcagtactggcttttgggtcatgatatctgctgaccatagattcaaccactttgctaatgctacctctctaatcataaagaacaaaaaccctgctctacctgtagctttattgataggaaccgagaaacctgaaagaaatatatgtttcctatattactaaaaacaggtattggtctcataagaggctttataactcttgttaaaataggttaaatatatcatttattcctaataatacacaactaggttttaggttacataagtaattctcaatccatcaatttgaataattatttaa

SEQ ID NO: 227894 - DNA, 469 bp, Glycine max
  unsure (1)..(469): unsure at all n locations
gtgtaacccaccatcttctcatagtagaacacctattatgtatcgactatcgntgctatcatctccctttccatcattaggggcgctacttgagctgccaaatccctccacctttgggcgtattctttgaaagattcatgctccttcttacacatgttttgtagctgcattctgtctggagccatatcagaattatactgatactgcctaatgaaggcaaccattatgttcttccaagaatggactcgggaaggttccagattagtataccaggtgacggctgccctagtaagactttcctagaagaaatgcatcaacaatttttcatcctccgagtatgcccccattttcctactgtacatctttaggtgactcttgnggcaagtagtccccttgtacttatcaaaatatggccccttgaacttcagagggataacgatgtcaggcactatggcacaacttgccatgt

SEQ ID NO: 227895 - DNA, 456 bp, Glycine max
cgaacatgtaatcgattaccaacaacgaaactcctataattcttttttaagagtcatgacccttcaaattataactgtgtaatcgattacacaaacattgtaatcgatttccagtagagtttttagaaaaacgaccaacaatcacatttttttcattggatttgtgaataaccatcaaaggcctataaataagtgacttgggcacgaatattggtaagagttttactcatcgaaaatgtcttatcctctcaaaaaataatgagagagattccaagagaacttcattgtcaaatgctctctcaaaatgaattttaaatagaaaaaacttaaatatatattttaatataatattaacatattggtagctttataaatatatataaataatttcctcttattttctactttaacaaatttcactatattatggtaagtaaaaattagtagttaatggta

SEQ ID NO: 227896 - DNA, 427 bp, Glycine max
  unsure (1)..(427): unsure at all n locations
catgcaagctntaacctcatcgtctctcacagtctttattattgtgagccaatccaatccttgtgttcggactctcagccacttatgatagctgccgatgatcccattactgcttcccctaagctctctgtcctttcttcacaccgcatcacatgccttgtgaactccttagagtaccctcgcattggggttactgaaaccccgtgcgatgaaaggcgtgatgcttttgtctgatggcactcctctcatggggtagccaagctgtcttatggcgaggacgggattataattaatacaaccccttgttccatcaagggaacatttggacatcctttgcatgaagatagaatcctgattcttccttccttctagcgagggaaaaaattaacagacgcccctccatgctagccaagagttggtcccaatt

SEQ ID NO: 227897 - DNA, 474 bp, Glycine max
gattaatttatagaataaaatgcgatagaaagaagtttgtgtcgttctatttatctaagtaaaaaatataaaattcaaagcaaaatgaaaactttgattgtgacaccttagtagtttattaaaccatatattaatatggtcttttacaatattcaaacaatgactaatttaaataaatatggcaattaatgtttggtagtgattggggtatcaacctagctaagatcattgtctcaattgtgtaatgcctttgtaatttttaaaaaatgaataaatatgataattagtaagtaaaagtcacatccaaccatatcataaaatatataaagtttgtttgtgtaaaagtaccgatagaagtcatatataatattagtcatcatctatattataaccacaaaatatactaaatctccaaagcgaaatagacaacattatcatacatatccaaaaatatttcatcagtatcattacatc

SEQ ID NO: 227898 - DNA, 346 bp, Glycine max
tttactgaacattgcatcacctttgatgataatagagcgagttaccttctgaccatgtgcagaaatcgaaatgcctttcctttcaacctgtgtcgatcaacaaattcaacaatattatcattaactgaacttacagaatggaaaacatgcgttatcttgagacctcaagaatatgtaaacatacaatattgaggctcagtaatcccttaagatatacacataagctgtgaaggagataacttctttagatagtatctgagcctgcacccacgtgatctttaacacctaagtaaaacattaataattacagtgaacaatatacgacccctaatcacaccacacatga

SEQ ID NO: 227899 - DNA, 461 bp, Glycine max
  unsure (1)..(461): unsure at all n locations
actcagcttctanatatctgatgttnntgataatccatctattcttattatccagttntaattgggggaatatttaatccattaaattttaaaaatttggtgctgcatcatgtagagctctgtaaatggttgtgtaccccgaattccattcccatggttagtgtttaatgaaaaggtgaaagtgaattcagtattccttatggattcaactggtatatctgattcagcgcttctcttatttggtgggaatgtatccagaggtggactagtaagttcttaccatatttcctcttcacttttcccctggatctgttgatcttgactgtatgtactangtgtttccttctggctacttattgtgctttggcatgtgattcttttgacaggatggtcacctgaaaatgttgggagggtatttggagcttctcatgaaaccagaattaaccaagacttacttgagc

SEQ ID NO: 227900 - DNA, 419 bp, Glycine max
agctttccttgagcttcaaggtttaaccttatgttgttccatgttgttgcttcccttatctctaacagaactggtgatcgacgctgatgtatggatggaagtagctggactggacatgggtggaatccgtaaattcgaagaaactattgatgggtacaacaagatgtagacctataggggaatgcttcttgacccagtgaggaatttgaggaagcgcctaggtgtaggtggtctgacatcagaagacaaaatgctcatgtacctcattacttacattctcactccaagaggtcaagtaatcacgctcaggtaattgacgatgatctgtagattgtgtatggtcttaaatcttggatcaagatgaattgggtactcttgattgaagacatatgttaaagagtcgccggttgtgggactat

SEQ ID NO: 227901 - DNA, 353 bp, Glycine max
  unsure (1)..(353): unsure at all n locations
agctttgatcatattcagcctttaaaagaaaacccaaaatttttgttgtttaatggcaagaaacttcaagcatttagaaaacatttcaaattgaataataaacacaaaaaacataattaaaactacttatctttaataatatcatctacacaagacccagcccgcaccccacaaaattaanaantgaaaattaggaggtntaatncttcatatttttggtattcccacccaccttctgtcttaaattcacgagaacctaagttgttgcagcttctaactaaaacaacatatacaatagagaaggttaaatataaaacatgttgctatgagtatagagagagaaagagatagta

SEQ ID NO: 227902 - DNA, 469 bp, Glycine max
  unsure (1)..(469): unsure at all n locations
caagcttgaataccgagtgggtccagttaccgtctataaattgacttacatgtgaagcaaacaaatccaagtactgtcgatatcatcgagtcgctagtcacaacacgaaagactgcactgcccttaaggaccaaatataaaaattgacccaaaagggggaacctatagaagttcgtcaaagacccatcacatgatcaagattgtgaaaaagagcaagatagaagccaagaacacaggaggactcgtgaagcaatagaagcacaacaacagggtgacaatccccaacttgaaacttggctttgaggggtaataaacaaaatagctttaggattcgccaagggagtaagttcaaactcagcacaaaagcgctatgtccccaaccttaagtctatcaactcagtggaagcctaaacgaaggtcaccanaagcatgccccctattactttcacattgtgaataccctaattcc

SEQ ID NO: 227903 - DNA, 485 bp, Glycine max
  unsure (1)..(485): unsure at all n locations
ctatanatactcaagcttatcaaggatgaaagtcaaaatgcggattaaagtatcatctgtatctaagaggcctgcctgcatctattccccagtgcttacaaaagggagggctgtgctggtgtgcatttgaagagggtatctgcattttaatcttcaatgcccctgctcttgaaggaaaactgttctaattatttttctgaaaagacctntattatatttacatctttgcattttatattccaacaatttttaggcaaacattattggacatgcattggttgcgtgcatgtttgcacatttgtttgaggcaatggtccatctttatgcaaaaaggtgtacatacatgcatgaagcttacaaattctattgcatcgcaatgggccaacatatatatatatatatatatatatatatatagtacaatgatttttcacactcgcattatgtactcaaatgattaatactattgacaatcatgatcatac

SEQ ID NO: 227904 - DNA, 441 bp, Glycine max
agcttcggcctttaggttgtcctctcagaagatataacaaccaatcaagagcctttgggtttctcggccaaaccaagcaaacggaaaacgaaaatgcaaaagaatagttttgaaaagaacccataaaaaataattttctggtcaacgcaagcaaacaactgccaaaccaagcaaaaaaccttcggccattgggttttgctcacaggagagaaaagaaccaagcatcagcctttgggtttttcggccaaaacaaccaaatgaaaaaataaaacacagaaggataggagacaaaagaatccatatatcatttttcggtccaaccaaccaaagaactgtcaaacccaggagaaaactttgagcctttaggttttccttagtgatggattccctcattcccgtccagcatttggagaacaacaacaccaaagcattgtcttggat

SEQ ID NO: 227905 - DNA, 442 bp, Glycine max
agcttgcactacttaatggaggccgcacaggtgcacgatattatcttttgcttataacgtggaagacacatgaatgatggtcctatcaacgattttccttctcgatataacatgcatatgaaatgtaacccaatacactctggacattttaaaaataaaaatcttggccttacaatcttgcacttcttatacccactaaaagctaatgaagtccctgcagttttttgatggtgtcttccaagacaaccactactctggcatattccacatcttaataaagttttttttggaaggcaaatagtcaattttgttcttgtatgagaaaacgtttacaaatccgctcctgaaaaataacaagtccaattctaattttaaaaataataaagtgcacaattcatcctaactaacttcattggtgcggaatgaaaaaaaaacccctgat

SEQ ID NO: 227906 - DNA, 392 bp, Glycine max
  unsure (1)..(392): unsure at all n locations
agcttaagctccttcaactgcacattgctcttattattngaaatgtatccttgtggaaccttcacccaacgaagacactaacaaaaacttatcttctccttcttggacaaagtatggcaggctgggggcaagaatattttcttcccatcagaccttggatgcaactgtgatcgtatacccatatcagctagatcttggcgggtattcaagccatcattcgtcatgacttgaatgttaagaagcgtcccaatcacactgtcacaaacatttttctcacatgcataacatcaatacaatgtctaacgtcaagatcacaccagtacgaaagatcaaagaaaatggacctcttctaccatatgcaactctgacttttatccttctcttgggtcttc

SEQ ID NO: 227907 - DNA, 406 bp, Glycine max
tctctattgcgctgaagaccgtgacaggtactctttgtttcgtctacatgtgttgatctattgaatagctgagtcttgctgccactgtcggtgttgggttcaaggtaagcttcatgtgttcattgtaactttgtgctttcgcgtacattctctttgtgctcacttctctctgaagcatgtttatgttcccattgtaattttttcttatgaaaaatagttggctataaattgttagttagtttgctaattagttactgctactacggtttggaatgcaactagttgcttatagattagctagattactaattacagtgtcaaagctaaaataaaagatatacgaaccatgttttggggctgaaggcttagatctctggacacccaaagaaacaaggttgcagttagc

SEQ ID NO: 227908 - DNA, 327 bp, Glycine max
caccagcgataggttttgaacaaatcaaaagatgtaactcttcaaataggtattgactttgtcaaatcggttataagtttttctaaaggtcataactcttctaatggttctcttgaccatacttgaagagtctataaaagcaaggctttgttgtgcatttctaatcaatcattatataaaactatcttgtccaattcattctttatacaagtaattcttccacattgatttctaagtctctttgaacttcttcttcttctttttccttgtgccaaaaacttttcatagtttcatggtttttcaaaccctgagaacttgtggtattca

SEQ ID NO: 227909 - DNA, 431 bp, Glycine max
  unsure (1)..(431): unsure at all n locations
ntgagccaaaatcctgactcaccatanaccttgacccagtgtgagaatgccaatccttaccctcggaagcaaaaaagaatagaggggaaatttccaatcaaagaaaaagagaaggaaaatttccaatgaaagcaaaaaagaaatgaaggaaaattccccaatcaaagagtgggagaaagcaaaaaaaggaaaagaaggaaaattccccaatcaaagagtgggagaaagcaaaaagaaaagaaagaaaattcccaaccaaagaatgggagaaagtaaaaaaggaagagaagaaagcttctggtcaaagaaaccagaagaaatgtgcagagaggtctttagaccggacaatatctgaacaatacagaattgtcactaaatgaacaaaaagaaggaaaggaaaccgtgacctcaaatggtcttctccctttaat

SEQ ID NO: 227910 - DNA, 361 bp, Glycine max
  unsure (1)..(361): unsure at all n locations
ctttcaacaaatttcttcacaattaattatcatgaagcataaacctagcaaaactacccatcatatctcccaaaacccaatacccactaaaataaagtgggaaagaagtctacccaaacctgaaattttgaagtcccacacgtagagatgcgcttcacgacaccgaaaatgccttcctttcgcgatttggagcagaaatgggcaccaaaggttggagctttaatggagcttcaatggaggatgaagaagaaaganaaagcaacgtgagggagagggagacagctttctgaatgtgggctgaatgaggagagagagagagttgctttttggttaaaaggctcttctcttctctataatttat

SEQ ID NO: 227911 - DNA, 441 bp, Glycine max
  unsure (1)..(441): unsure at all n locations
ctctttgattgaatgccattgttataaggattaacgaagttgtttcaaattcttatctttctttcctctgtaattccattaaatgcgaatccacttaaggacgatccgtaaaaacattatgattcctatcggggatgataccatgtggtgtcagagcagcccatttactacaattagaacaactcaaaatacttaaataaaatgtaaaaacaaatcagattgcaagcacatagttggcacattgttattccacttagattaaatgcatcttgggctcttctttctcactattggcttgaacttgtaagtgttgatctcctttntaagcaacatctccttttctttcttagttctttcgcttattggtgggcctcctagcccaattagattctttctctcccaagctcttgcttcttccacagggctttcttgatcttcatc

SEQ ID NO: 227912 - DNA, 435 bp, Glycine max
  unsure (1)..(435): unsure at all n locations
agctttatatagactntagagcttcgatctgttgagagatctcangtagtcgttgtctaatagctctggcgcttaagacgaggccgctactatgcagagagagagtgggaaccacaaacactttctacagcatatctttagagaagtacaatctgtcaatgttgtttagtgctcagagttgactntcaacgtacaaatcaaaagaaacgtttacaacataagacaaaaggaattaataatgtcaaggcaagacaatttaaatcttcccttttgtgcgttatgactgaacttatggatgttactttttgatgatcatttttagtactcgaggatcaagtgactatttcattgcttttgtactgggagcctgaaaaaagatgatcgaactcacaaaccaagagggggtgaattggtttctaaatcacatcaaactta

SEQ ID NO: 227913 - DNA, 324 bp, Glycine max
cacatggacagtttaaaagcatacgagcaacatgccactttaccgctttggcaagaacttcgtacgtctgattatctcatcgcaattgaggattcgtaggagcaaatgggctgattttgtcgaccaccccaagagagcatccatggttcaacgccttgacgtttatctccgttcacaaacatagataacgtgtatggatcgacaccttaacgtttctctcctttcataagaatcagaagagtgtttaaatggtgcaacacacttaacgacttatgtgcgactatatacgatcttgccgaaaagatctaaacaacctaaccaacg

SEQ ID NO: 227914 - DNA, 230 bp, Glycine max
cttttaattttatgaggattacacatggaaggattatgtctccatgggactttggattgacctgggagtagattatgaaaatacttcctctacatatgaaaagatgctttttaagatcggagggcaaatatttattatgaaaaactgagaaatgagctggaacatactattgctgaaaaaatcactggaagtgatattttttgaaacatcaactttctttgcattgataa

SEQ ID NO: 227915 - DNA, 432 bp, Glycine max
  unsure (1)..(432): unsure at all n locations
atatagagaataatactgaaatcgaaggctgtttttgtttactgatccattccacgaacccttatttcattcctgttctgatttactcaacacatatcntttcctctggtaaactctgtcctattcttgcagatgaaatctctttactcccaaccttttgctcactacaacacacagccgcttaacatgcacgccacccaacaccagccttacgctcagaactcccaaaatcataaaatccactataacgtccgaggaactttaggagcttaatgcggctttgatgggttatagcctctgcaatcagcaactgcgctccagcctgccccttgtgctgaaacacgcttgcatgtgacatcctaaagattgccttgggatagctatattcacgaattggatatatgaattagttgaggaagttggggcattaca

SEQ ID NO: 227916 - DNA, 381 bp, Glycine max
  unsure (1)..(381): unsure at all n locations
agctntatgcaagtcaattatcaagaggcatcttggagatgatcttcnccatgcatanttacgcaaaatctcttgaactaggaagatgttatccatcatctttctgttcttaatgaagggcagttgagtttccccaataatagtctcaagcactggggctatgcggttggcctgaattttacacacaatcttgtataacaaattacagcaagatatggctctaaaatgtgtaacctgggaggcctgatcatgcttaaaaataagcgcaataataacatggttgatctgctttaaaaattttccaagtgtaaagaaatcattaaccgcctcaaagatatcatcaccaatgatattccaagccttcttaaagaataaagcatt

SEQ ID NO: 227917 - DNA, 479 bp, Glycine max
  unsure (1)..(479): unsure at all n locations
tatgcgcatacttncttacaaatgttctcttgcacaagacattctattaatcgaaaaaatgcacccatatacaatcaaggcagctccgttacctagattatttacacgtacttccaaggtgtatttgttacttacatcccacacatctccttggctaaattcacatacatgcatacccaaagcattttggggtaccaaaaattgcacatgtacacctcttggtatttctaatacctatacatacacaaactctatgatgaatcttgactatctacacaataaggtgctacatttcatgctcttttcaagtttttgctacctaaagccgcatgcaaattccagtatattttcctttgctaactaanattgtattcaaattaaaaggtatacattctttnggtaatgtatctctcttacataacatgcaacatatttatgtgtatttttttgtgagacactttgactaccaacaactatat

SEQ ID NO: 227918 - DNA, 411 bp, Glycine max
  unsure (1)..(411): unsure at all n locations
agcttgctcgctaagctagcgctatccagtatattttctttctaagcgcgaatccctctatgtctttaaaaattatggaattgggctgagcgagcctgctcgctaagcctattctgcagaaaaatgtctttctgtgttcaaccgctaaacgcgtggctatcgcgcttagctcatgagtaaaatttcataaggcacgctaagcgcagtcgtcgtgctaagcgcccagccttaattttagttttattttctgcttttcactttgaataaatcctgtataatcttgtcttatgattcttttgttttgtagatggctttccataagagaaaagtagtagcttcagtgtcccaggataggtatgatagatcaagatttgtatcccaagatgcctgngaccgctatgtagacaatgt

SEQ ID NO: 227919 - DNA, 474 bp, Glycine max
aagcttgccggcgcttccgtgcctggccactttacgactgccaatattgttcaatataaggtgtcaaggggttcagtggatggatcaaataaggaacgggctgtgcttaaaggaaataagtatgtatctgtcattcatatccatgatgcatctatatagtcctttgctataaacagcttttaattctctaatataacattatattacaactttaaaactaatctcattattttttcctaggtttaatgttcgcaacaataattatacaggtggtatccatactttgacaaaaggaaaagcttcaaggccacctcgaactggtgctctgatggctggaaactcatcttctgttccttggtcttctgaaatacttgatgctgatgaacaaccttcacatgtgaacaagcctcattcagtaagcggtactataaatcgtaagcgtgctttgcctgtaggatcatcttcatcttctat

SEQ ID NO: 227920 - DNA, 454 bp, Glycine max
  unsure (1)..(454): unsure at all n locations
agctntatatggtagaaggtgtaggacacctctatgttggctagagcccggagacaacctcaccttaggacctgaagtggtacattaaaccactgagaatgtgaagttgatccaaaaaatgatgaggaccacttagagtagacagaaaagttatcaggataagaggagaaaagatttggaattcgaggttggtgatcatgtattcttgagagtcactccgtggactggggttggtcgagcattgaaatcccgaaaactcacaccttgctttatcggtcctttccaaattcttaagagagttggccctgtggcataccaaattgcattacccccatcactttctaatcttcacaatgtctttcatgtgtctcaactccataagtatatccatgatccatcacatgtggtcgtattggatgaggtacaagtaaaacagaacttgacatatgaaaca

SEQ ID NO: 227921 - DNA, 474 bp, Glycine max
  unsure (1)..(474): unsure at all n locations
ctcaagcttcagctncttcatctgcacaagactcttaatatttgaagagtatccttgttgtaccttcacccgacgaagacactgacaaaaacttatcttctcctttttggacaaagtatggcaagctaggggcaagtaaattttgttgccatcagaccttggatgcaactgtgatcgtatccccatatcagctagatcttgatgggtattcaagccatccttcgtcttgccttgaatgttaagaagcgtcccaatcacactgtcacatacatttttctccacatgcataacatcaatacaatgtctaacgtctagatcagaccagtacggaagatcaaagaaaatggacctcttcttccatatgcaactcttacttttatccttcttttgggtctttccaaatacaatattcaagtgttgaacccgctggtatacctgctcaccagtcaacgatatgggtgcaatatcatgctc

SEQ ID NO: 227922 - DNA, 370 bp, Glycine max
  unsure (1)..(370): unsure at all n locations
agctttaacctcatcgtgcctcacagtctttatgattgggagccaatccaatccttgtgttcggactctcagccacttatgatagccgccgatgatcccattactgcttcccctaagctctctgtcctttcttcacgccgcatcccatgccttgcgaactccttggagtaccctcgcgttgtggtcactaaaaccccgtgcgatgaaaggcgtgacgctntcgtctaatggcgctcctctcatggggtagccaagctgtcttatggcgagaacgggattataattaatacaaccccttgttcccatcaagggaacatttggacatccttcgcatgaagatagaatctcgattctttctgcttctagcgag

SEQ ID NO: 227923 - DNA, 414 bp, Glycine max
  unsure (1)..(414): unsure at all n locations
accacacatggagactatgtgttggtcatgcgacggtgcacaacaaagtcgtccacaatcacaatgcgcgcaaaacccaccatcccctgcagcccacctccaactgagctcacgtgctcccacgaagcccataaccccgatctctcaacaccgggggcgcatcaatcctcccaagcttccacaacatcaaattaatacaacattcagacagcacaaactatcacagnccagaaaacagagcaaaggcagaaaactctgccaaaacaccaaccaaaatcacagcttttctcactaaaagacccgcagaacaattccttcgttccaatccgttaaccgctggagcgactccaaatggttactggaagcctntagcaccaaagcctacattatgaccgctgggatctactagcaaac

SEQ ID NO: 227924 - DNA, 427 bp, Glycine max
  unsure (1)..(427): unsure at all n locations
agcttcaccaacgagcgacaatggtggaatgtttaagatgctgtttgcacgggagaagaaacgtgaactcgaaagagaagaagataagaaatgaaggcagaagaatatcaaatgtccaaaaaagcttttttaatatattttactataaaggcaatatggctaattcatataattgttgggtgcaccagcaatattgctgggtgcacctagcaacacccttactacattcatgcctgaagagttattgccttatcggctntgtagcatggcctacttgggctacccaagactcatatacttcctccattttgaatttccaaaagaattatntatctttcttctataagaaattttttaattntagatgtattaattngttatatatatccttaactattttctctcanacattaaaaaagtattaagt

SEQ ID NO: 227925 - DNA, 480 bp, Glycine max
  unsure (1)..(480): unsure at all n locations
tatagaaaaaaaagcctgnaccagttgcaagcactcagacttcaccacaaacgatgtttatgatatgtcacgagccatctggatcacccatatcttaaaagatagagcatcttataactttttatattttatttcccttccatccttaaaatatgtagggttaaacatgctagtctgcttattcatggacatatgcctaaaaatatagtgtagaacaagttagccaaacctctatcattaatcaagcacaagacatttattatttaacattgaatttatactatagtgaattgtttaaatcaaatgacaaatgagtccaccaaatattgtgtttcacgcaatactagctgtacactctgttatatattatctgaaaatattatgtaatcgagttcttctcaagtattgagaaaacaagctaacaattcttactagtaacanaatgactcatttatcttatcagttagaagcaactctaat

SEQ ID NO: 227926 - DNA, 466 bp, Glycine max
  unsure (1)..(466): unsure at all n locations
agcttaagcctgagaaaccacatattttattttgtctatttgcagttacctctcaaatctcagtcaagacctgaaatattgaccatttgattgtcccatttaccttttctagcattgagcgtgtagggatccaccgcccaatatctaaatcaagcatctcaacatctgaaaagcaatcaactccattgccaccaccaacagcaaatattttgtcattcaaagcagctccagacaagcttcccttcttctggttcaaagaggggcacaaggtccagttgtcatgaactggattgtatgattcgactacacagatagaagataaaagggttgacaaagcttcatgtcattccaaaatataattatttgaaaagcatggctagatctcatacctgtgtcataccaaacataaccatttccaccaccaaaaacatanatntcaccattcaaccacacaacggaagcatat

SEQ ID NO: 227927 - DNA, 377 bp, Glycine max
atatcgagacgatcaaaattgaacaacggaagctctcttgatattaaaatggtcataagttttaactcggatgtccgattcaggagcttcacatatcgagatgcacgaaattgaacaatggaagctctagagaaattctaatggtcataaatattcacacggaggtcctattcaggcgcttaatatatccagacgctcgaaattgaacaacggaagctctcgagatattcaaatggtcataacttttcactcggatgtccgactcacgtgcatcacatattcagacgctcggaattgattaacggaagctctagagaaattcaaatggtcataacttttcacacggaggtcctatataagcgcttaatatattgaga

SEQ ID NO: 227928 - DNA, 432 bp, Glycine max
  unsure (1)..(432): unsure at all n locations
agctntaacctcatcgtctctactatttttattattgggagccaatccaatccttgtgttcggactctcagccacttatgatagccgccgatgatcccattactgcttcccctaagctctctgtcctttcttcacgccgcatcccatgccttgcgaactccttggagtaccctcaggttgtggtcactgaaaccccgtgcgatgaaaggcgtgatgctttcgtctgatggcactcctctcatggggtagccaagctgtcttatggcgaggacgggattataattaatacaaccccttgttcccatcaagagaacatttggacatccttcgcatgaagatagaatcctgattcttccttccttctagcgagggaaccaattaacagacgcccctccatgccagccaagagttgtcccaattcgccttcccttt

SEQ ID NO: 227929 - DNA, 414 bp, Glycine max
agcttagctgaagagaagggacaatatctagtttattttatgttattgaatcatataaaggttagagtatcttagatgatcacttatgagtaggttccatatatcattatatttccttatttaattaggattagaacttacgagcatagaataactataaataatggttagagctttgcattttgtaccacattgtatcccaccaatataagagaaaggtattcttattcatgggctcttctatctctatttatgtcctttctctacctaaatctctagaattttatcgatgaacacataagtgtttgaaaatttaatacataagctcccaggtatgagttaacaaaatacctgtgtctttcctgagcatcaataaaatcattataaactctaagcatggtccatgcgacagat

SEQ ID NO: 227930 - DNA, 449 bp, Glycine max
agcttatactgcaaacatttataatagaccttctcatcagcaaaaccaacaacagcagaataattatgatctttcaagcaacagatacaatccaggttggagaaatcatccaaatctgagatgggcaagtcctccacaacaacaatagcttgtccctcctttccagaatgctgctagtccaagcaagccatatgttcctcctctaatatagcagcagtcacaacaaagacagcaagcaactgaggctcctcctcaaccttccttagaagagttagtgaggaaaatgaccatccagaatatgcaatttcagcaagagacaagagcctccattcagagtctgataaatcagatagggcagatggctactcagttgaaccaagctcaatcccaaaattctgacaaattgccttcacaaactgtgcagaatccaaaaaatgtgagtgtcatca

SEQ ID NO: 227931 - DNA, 393 bp, Glycine max
ttgtaccagctgtccatgaagctaactggatgaatgggatggagatcactatctatgactcgcggtttgatcctgtagtatcctccttgcctggacttattcctgatggttttatctatcttatggcaagtcctgacacttgccataagagaatgatgtttagaaaaagaacagaagaaggtggagtcagccttgactatctctgcgacctccatgaaaagcatgaaagctggttatttccctcccaaagcggtaatcatggagtattatctgtcaatcatctgccccatcatattgacaactctctacaccctgatataagagaccgcgtttcttatctggagggtggtcacatgccttcaagcattcataaggtacaatatttggaaatcc

SEQ ID NO: 227932 - DNA, 270 bp, Glycine max
actctcagccacttatgatagccgccgatgctcccattactgtttcccctaagctctctatcctttcttcacaccgcatcacatgccttgtgaactccttagagtaccctcgcattggggtcactgaaaccccgtgtgatgaaaggcgtgatgctttcgtctgatggcactcctctcatggggtagccaagctgtcttatggcgaggacgggattataattaatacaaccccttggtccatcaagggaacatttggacatccttcgcatg

SEQ ID NO: 227933 - DNA, 469 bp, Glycine max
  unsure (1)..(469): unsure at all n locations
ttgctttgcagatataataaaaatgggaggttatatattttctttctacattgtacataactacatggggttaaagggattttntttttcttttttcaaattggattttcttctgtcatgtcgttatgcagtacaaaaaacaaaaaaccttaaaatagaaaaaaaaaataacatgggtaaatatagagaaaaacacatcccgtcttttcacggcactacgtgaaaaacacattatttgtctggaggaaggataaagaatggtatgtcacactatctctctcttaagaattcttcaagaaaacaacgactaacgcgtagaaatgtctgtagcaactttactaccaactagcaagtattcaacaagggtgaagctaaatattcaaatgttgtgcaagaagattcgtagcatttgtcatggtcgataaccatcagtagctattaatgatttcggtgcaatgaaatatagtca

SEQ ID NO: 227934 - DNA, 432 bp, Glycine max
  unsure (1)..(432): unsure at all n locations
agcttgtaggattatggggtacccatcacatgtggtactaggtggcggtcgagcgatggtgcacaacaagttttccacatccacaaagcgcgcataaacccaccatcccctgttgcccacctccaactgagctcacgtactcccacgtagcccataacctcgtttctctcaacaccgggtccccatcaatcctcccaagcttccccaacatcaaagtaaatcaacattcaaacagcacaaattaccacagccaagataacagggcaaaggcagaaaactctgcccaaaacaccaaccaaaatcacagcttttctcacttaaagaccccagtaacaattccttcgatccaattcgttaaccggtggatcgactccaaaattntactggaagtctatagtacataagcctacattntgaccgttgggatctact

SEQ ID NO: 227935 - DNA, 327 bp, Glycine max
agacggctctggctcatcagagttccaaaacacctgcccatagttatctgaacacacaatatttctggtaacgtacacctcccattaagatttataatagcaccatcttagtacaggacacttcatatagaacgggaatggaatcttcaaagatctaataaagtgataacaaattgtttgtgttacagagaaggcattcaaaaccatatttataatctgctattcaagatcatggcgacaatataagagaaaactctcctctaaaaagagaccctttctacacacctcttttacaccatggtgcaccatagcttgattttattccaa

SEQ ID NO: 227936 - DNA, 494 bp, Glycine max
tatacacaactcaagcttggggctcaatcattcatgaacctatttcaaccaaatgttatcttattctgtatgtatcatattggacggaccatcaagtatcagataatatataatttgaacaactactaaacaaaattaacttacatggtccacaactgtagcatggatatgttcaaacattcgtcacctaaaatgatctcggttacatctgcgtgtgtgaataataaatgctctttgacattaggaaccccaaatatttccacattccatggcaactcaaatggcttttggtaaacatcgaaaaggtccttaaccaattctcccaaaggatcaactacaggcactgtagtgtccattcctgcaaatgtaacccttcttagcataagcatttgtgaaacctacatgtttaatgagaattcaactgtgataccctctcagacaaatgtcgctgcaatgaatattgatagggaagacactatacctcattagctata

SEQ ID NO: 227937 - DNA, 408 bp, Glycine max
tatcatgtctttcccgggaagctacaaaaaaggtattatttctgcaaaataagttcaagcaaacacacaccaattaggtgaaggtttgcacttatttctatatctctaaaacacccttcaaacaacaaccctttgggcttgaagtatggacaatgctcaaacacactctaccttgtgctgaaaacaaactttatttagaaaaaaaggtgtcaaagatcgaatacctgattacttacttggtcaaaaaggctcctgatggcatcatatcaataactatcttaacagcttaagctattagttaaattatttttatatctctacacatgggcacacatactcaagaataagccattggcataagtgtcacacacgaaaaaatatttttgggattgtcaactaaatttcaaa

SEQ ID NO: 227938 - DNA, 336 bp, Glycine max
  unsure (1)..(336): unsure at all n locations
cccccgtcttgaacaggatctatcctatcctatgatcntcttttgttatttgtccacgctcaagactcgacctcgntctattacatgtatacgctgcctgtcgcgcccttgaatcgagtctttgattcaatcttgttcttgtacctgtcacgttcttgttcatgtccttgtatcttgtgtcttcaaactatgtgtaaaaacaaacctattcgagtgttatttaagctcaaaaaaaaagttgcagaaatttgaaacagaataaagagaagacaacatgaacaatgaatagaaaagacaagaaaagaaagtgcggtattcgatccttgaacaccaaat

SEQ ID NO: 227939 - DNA, 373 bp, Glycine max
  unsure (1)..(373): unsure at all n locations
tctgttcaccgtggttgaacatactcccgaacgcgtctgcatctgcgaacatcttgtccacgtctctttcttcgcaccgtagggatatgaccttaattctggtgaagaggcgctaacttccttgccaatttgcggttaaactctgccttgatgacataagcttctttcgctttctngtcctcatgtaaatcgatcggctttgttgttcatttccatttctgtggaggcatttaggtgttatatacatgcttgatcccttcaattcacgttctgagtatgatggcatgtctattattgctatcactgacgctgtcgaatgggaatgtcctttgatactatccaccttcatgctccattttttgtatacttgctg

SEQ ID NO: 227940 - DNA, 399 bp, Glycine max
acttagcaagcaggctcaaaaattagaattctgttaaaactcatgcaacaatattctaataccattgtgcttcaccttaattgtgcctagcccttttttacatgcaacaaatttctaataccattgtgcttcaccttgcagttgaattctgtaaaaatacatgtttattaccactgtgcttcaccttgcagttgaattctgtaaaaataccattgtgcttcaccttacagaacccaaaattcagtttatgggtgatcagcttcctaccaaagccattgaaagccctttaatgcaggtggtttaggagatgcatatactccatactagcctgcgacatggttattctcacttgtttacacagtacttatgtgtatctccttatccaaaaacaaatctgtc

SEQ ID NO: 227941 - DNA, 341 bp, Glycine max
  unsure (1)..(341): unsure at all n locations
gcgcnnctgaacttgaacattgtctgtaccctttgatgatcattgcgacaatactttaaatatataacaaaaatcttctaacaatcataacatttgtcctgcttatggtgaaaatagcaattctggctttgagtatcatctcatcaaccattgcttagataagtttgaatttatgcgttggaatgttcacattgcttgactacaactaaagtgctcctgaaggaacctcaggattcttgcccgaagatgctactcatactactgcgttggctcatgttgagtcttgaaaatttctcacttctaccgcgctttgnggatgtcttgttttctttgtctaactc

SEQ ID NO: 227942 - DNA, 336 bp, Glycine max
gacatgaacaactaactgaagcgctcatattcaaattcctttttgtaaaaacctccctgaccatgctcgtaaagtctagaatagctctcacaactctccgattatcttgagagaaaacactacctcgctaagatagtatatctcgtctgtaagacgactgtaaggcagccaatgtgcaaacaaacaaaccaaagttctgacttgtattatagccaacaatggcttggtaggacaaagaacactaggcggagaaggctcggcgcaacccacaggtggacagccacatgtaacacgcctaaatataatccgttcaataacccactaattctacttaac

SEQ ID NO: 227943 - DNA, 401 bp, Glycine max
tatccggcgcctcaatagggggtgagtgttgtgatgcaatttgtatatccggtgccatctcgtgaggcctgtccaaagtattggttgattgtgacaccaatccccgcgactcgtactcaacctgtatgcttgggtcggccaatagcaatgttcaatatgtcatgacaaccatgcagaacaaatgaaccctacatcatttgttcttctaaagagtcctgtgagcaacaaaacatggatggagggtccatggtcattgatgaattttcagtaaactcaactcgtgtgttccgtgtcaagaagatcataacccccaccagacactaagtgggggcagtaattgtatatttgaatatctagtgtctttttgcgtatccctatgagaaatattaacaattacacaa

SEQ ID NO: 227944 - DNA, 538 bp, Glycine max
  unsure (1)..(538): unsure at all n locations
ccctccccccacaaagcttcttccgccgcccccccccagccgggntttgtgctctgacacgaattaaaaccacccatatcttaatatggattcgaaaaaatatatcttattcatttaactcgcataagcagaccatctcatactcaaccatcacgaaacaattcaataatcaccatcaaacaataactatcaaacatccccatcacgagtccattaataatcttcaccatgtacaccaacgatagaatctactccatggagatttacactacatgagcaattaactcaagtacatcccttaacatagtcacatgcaccttgaccattcatagagactcaaatcaaccttatggagaaagtgtgggtttatccaaaatggataagcatgtgtagtgcctcacctaagtaaggtttgcacagaccttaacctatctaggtattcgcccatccatctatattatataggcccaactcctgtagccaccaccgacaacctacaacactgggttgagagcccaccacacacccttaacttatg

SEQ ID NO: 227945 - DNA, 456 bp, Glycine max
agcttgagtaaagatgacggaattttacccttttactgattgttattcaaaagtatagacggtctgtttggaagcttcaatgatatattaggaattgcaccaatgagataattggaagacatatttaacaatcccatattttgcaagttattccaaaacctgttacagagtcattaatcccgttaacagaaatatcaagctcatacaacgaactttgagtcttgagtcaactaggaaaagtggggcccaacttgcaagatctgattcccaatgattctaattggaatggaggaacccaactcgggacaaatttcagagacaacgagctctctgataagtacaagtatcttaatgtggaaaattacaaagatgggattcagtgacgtcacccttccaaagaatcccaacccagaatagatactcccactctgatagagatccattgctttaggaaca

SEQ ID NO: 227946 - DNA, 356 bp, Glycine max
  unsure (1)..(356): unsure at all n locations
aactttgccaccagcccatttttctactgaaatatgatcacccccactcaatngacattctaaagatatacaactaataagcgaaatcttgtgtttgactgacacaacttggcacatcgaaaaaacgcggggccctcactcaatgttagtcgagtgatataggaatgctccgcgggagaaaacaattttacttgtgaaatttgaacacaagccttggaaatacaccgctcagcgctaggcgctcctatattttaaacatggaatttagtgaagccttgacgcccttagctgttaggtcttcatgcttccttgccaaggttctatctgtggtgtcctttgtacaccatcgaatctac

SEQ ID NO: 227947 - DNA, 464 bp, Glycine max
  unsure (1)..(464): unsure at all n locations
agctnggagaagaataaaaccttattaccagttcagattaatatagcatcaccaataacaaagcatccttacaatccccttgtatctctcctcatctaaccttcttcttgaaaataaaggatgcatagttccattgttaaataccatatcaggcagccaagatcaatgtcacaaccaggaaaaataaccattagttaagaaaaaaacatgcataacaacaaacaaaattataaccttgcaaataaaaacaaatagtaatgaaacaaacatacataacagcaaaaaggaaaaaaacttgcctgttggatgcttcttcattgatagcccgggaaaataaaaaggaaccaaaaaaagagttgaaaaatcagtaagcaaaaataactattattaagaagaaagcatgcataacaacatacaaaattagaaccttgcaaataaaaacatatagtaatgatacaaacatg

SEQ ID NO: 227948 - DNA, 419 bp, Glycine max
ctataaaatcaacctctggagtaaacagggaccaactcattcactcttttataagtcgacctagacaggcccgagagaccatacacagcccctagcgatttctaattatgtgggccattaagtccatcatatgctgacaatagccgagaagcccatgaatctcttcgggggcggagtaggtgtccgccatcgccttggccctggctaacaagcggggaagctcttgactcccgcccaaggtaagagcaaaccgatccatccacatggttgcctcttggtgtaaagagtcgatcacccttcctctagcctctttttccgcgtatacttgagcataactcgtcgcgttcctatgctcgtggaccgtggctagacccaactcttcttgtacatggcaactaactcctctttcacactatgct

SEQ ID NO: 227949 - DNA, 378 bp, Glycine max
agcttctagagagaactacatggatctgactcttgttaaacgctgcccagccttcgttaaccgttggatcgtctcgaagtttggtttgcaacttcacaagacactttaccatgatttaaccgttgggatctttgagaaaatatctggagtgtgctagaagcttccgttcccgagagcatctcttatttaagcatttcagcctttgctttcttgtagcttaggaaaaatgccatttcttcttctttctttcttccaaatccatttctaaagttccaagtactttctccatcacccacagccaccattagccaccacaaaccatcattgttctccattgaaaacccacaccgagaggaacccttcaaccgaagcagaatt

SEQ ID NO: 227950 - DNA, 417 bp, Glycine max
tttagtaatgacccactaacctagatttatattaagttaatgcccttaacccacggaattaaaaaaaactctactggctgagtgtaactgaaattgtggcaaccaaaagtcacccccaacagccaacaagtgagccaccatttggtctcccacaaggatgatgcctacgttgccaattgggcccttattattactcgaactaaacctaactaaagcccttttagttgattaacccaaaacatatatttggtcagccaactttaccaggattgggccattatttatacaaactaaacactctctaattgagacaaagtggtgccatctagtcctcctccatttgggccatgatacaactcacaaccttggacttttctcttgaaacttgggcttgtattcaaatagtatggacaacac

SEQ ID NO: 227951 - DNA, 316 bp, Glycine max
  unsure (1)..(316): unsure at all n locations
agcttgactcgatgttctatcaggccattantatatcgagacgctcaaaattgaataacggaagctctcgagaaattcaaattgccataaatcttcactcggatgtctgattcaggcgcataatatatcgacacgcttgaactttacatggaaacccatgtgaaattccacgggcataaatcctcgatcatgatgggccacttgagccattaattttccatcacattcgatcctactcacgattctgcctctaaatcaataggcaatatatatttcctcagtggccattcaaaggccactagtctacatatccttt

SEQ ID NO: 227952 - DNA, 464 bp, Glycine max
  unsure (1)..(464): unsure at all n locations
tatagaaactcaaccttagataaatatgtgtgcagagatgagtaacantgtataatgttntagacgatgaaataatgactactcatcactgaaaagaaataaaatgcatctttaaaaggtctaggcacttaaagattcaagccagaggagtcataaacaaatacgactatgaaataatctctcttaacatcttctcgttgacataccaagttcttcaaagttcatccactgagtgattcttaaagtgaacaccttttatcttctgtaacccattgtaagcactgtgagtgctagatctgtgtgaaagtcgttagcctaaagaggctttcaaatagcaatcaatactggtgtaataacccagaagagacctagtgataaaagaacactatgcttttggcctgagccctgaagagtctattatgaacaaagagtacagttgtaaccatgcagagactttctacatg

SEQ ID NO: 227953 - DNA, 429 bp, Glycine max
  unsure (1)..(429): unsure at all n locations
accttaagtcacctgcggcatgcaagctgatggtttgggttgctctaaaaannttattgtacgacggctaggtttttcagggcgagctcaaccgagggttcgttccgaccgacactggcatgttgttcttctcatttaggaggataagaaaacgtttgcccaccccggcaaaaacaaaaaaaaaaacattattcacggaaattgatcgaaaaaaatgattgctgatgtcagcatggagagatgaccgatcgaggtctaaaaaagaagcatcaccggatgatgccgatcaaacatttcctaatcgacatcttngcaaatttattcaggaattgaatagaaaacttcatagccgacatcggtcgtgaaatggccncgactaatattcttcagccgacattgcgcaatttataaannaaaaaaacgctcgct

SEQ ID NO: 227954 - DNA, 380 bp, Glycine max
aaacctgtgccttggcaaactattaaccaatttttatgaataagaaaactacaatctgtgcccaagtttgtgggctatgttcttctgcagatcaccatatagaactctgcccttctttgcagccttctggagtcaatgagcaacctgaagcttatgctgcaaacatttataatagaccttctcaacagcagaaccaacagcagcagaataattatgacctttcaagccatagatacaatctgggttggaggaatcattccaatctgagatggacaagtcctatacaacaacaacagactgtccctccttttcagaatattgttggtccaagcaagccatatgtatcctcttcattacaacaacagcaggcgtcacaacaa

SEQ ID NO: 227955 - DNA, 469 bp, Glycine max
  unsure (1)..(469): unsure at all n locations
tgcaagcttgaactngngctctgaggtgtgtangtgattaaatcgaccaggaagtctggagcggcttgcgtagcaatcaccacaaagatcaaagcccatcttctccttacagtcaatgcatctatatctatctccaattattggaaacatctgtacagagaagagaagtcacacattagcacactgcagagaaatagaagaataacagtagcagatgctgcaacttcaagagaagttttaaattaagaaaaagagaagtaaataaattttttcagccaagcatctcaaataaagacagcagtatcattctcttgcctttntaccatggaaagatcgtattaattatcacttttgaacaatagaggctttcagcaaaatgcaattgctaggtgaaaccatgaatagatccacttgaaaaaataatgaaattagttatgacaaataactgtgaaagcatcattaatttagt

SEQ ID NO: 227956 - DNA, 469 bp, Glycine max
acctgcggcatgcaagcttatgcgcatatttccttacgaacgtgcacttgcgctatacattctattaactaagaaaaatgcacccatatacaatcaaggcagcttcgttacctagattatttacatgcacttccaaggtgtatttgttacttacatcacacacatctccttggctgaatttacatacatgcatactcaaagcattttggggtaccaaaaattgcacatgtgctcatcttggtatttctaatacctatacatacacaaactttatgatgaatcttgactacctacacaataaggtgctacatttcatgcccttttcaagtttttgctacctaaagccgcatgcaaattcaagtatattttcctttgctgactaaaattgtattcaaattaaaaggtatatatttttttttaatgtattttctttacataacatgcaacatatttatatatattctttgtg

SEQ ID NO: 227957 - DNA, 436 bp, Glycine max
  unsure (1)..(436): unsure at all n locations
nntgatagtaagacanagaagaaagttcttcagattgtctgttatctgtggaggaagcttaaatctgatttgacaatgaaatgggcacttgcagccgacaaggacggtgtggaggacactgtctgtgaaaaatacagcattagcaagaagaaatgggcctatttttgtcagacccgcatagacccctcgtgagaggtatgttctttgtcattttaattgttctccacaaaacattcacttcttataattcattgtagtaatgattttcattaatgtttgattctctcaggatgttcagaaaatggcatatgccatccagaagcaaaacaccgccccccacatgttgtctcgtggggggtatgaatatttataacatatgctcgcggctaagaaaacaaagaaaagactggaggaagctgctcagtccggaagcact

SEQ ID NO: 227958 - DNA, 368 bp, Glycine max
cggagaacttcactctgaaaatgtggtgcatcactactaaattattatcttttgtattctgatgggtcatttcagtctctttgtcttgattaaccacagaatttaacatttcattactgtttccaatcctcacaagatccccagaactagctctagctctcatctctcagtgaagtgtccctctaaaaatacacaatgacgtgaaagtaaaaatagaactccctatctctaaatcttgcacttttacaattttaaaatagaactgctataatattaagtaaaaaaaataatcaccccgaaataacactggcatcaatgatttttattaaatctctaacattttccatttttcactagagcctctactg

SEQ ID NO: 227959 - DNA, 431 bp, Glycine max
ttttttatttgtataatgtgaaactgtgaagaaggaacctaatcaacaaacatgcgacatgatactgatagaaatgccatctaaagaaaacttgtcctgtaagatgaaaaaagtatcacttataattactatttacgcatctaattattacaattgcttaaaaggagaaaggagtagataaagcaaattcaccaggcatcacacgcaagtctctaacttcaacagttacataatctggattggctaccaccataggaatttctttggcagcacaaagctccaatatcctctccatgtcttcaagcttcattgaacatgaactgccatcggcattccccaaaggcttagtaccatgagccaaaacaaattcagcttcttcaacattctcaacgactcgcaagtctcagccctatacgaagttattcatatgc

SEQ ID NO: 227960 - DNA, 404 bp, Glycine max
  unsure (1)..(404): unsure at all n locations
agctngagggannaactgatgccttggtcagcctagtatctcagctngccatgaatcagaaatctgcacctgttgcaagaatctgtggtctatgttcttctgcagatcaccatacaaatctttgtccttctttatagcaatctagagtcaatgagaaacctaaagcttatgctgcaaacatttataatagaccccctcagcagaanaaccaacaacagcagaataattatgatctttcaagcaacagatacaatccaggttggataaatcatccaaatctgagatgggtaagtcctccacaacaacaacagcctgtccctcccttccagaatggtgctggtccaagcaagccatatgttcctcctccaatatagcagcaacaacaacaaagacaacaagcaact

SEQ ID NO: 227961 - DNA, 420 bp, Glycine max
  unsure (1)..(420): unsure at all n locations
cattccagggacaagntattattatgcagagcctacagatgtgtttttctccaggggccattctatcaggggagcagttccttgagcagatggcctgacctggagcttaacccctgattgtgaaaacttgtggaaggtttgtagctcatgcacctcaatatgagagatccgacaaggctgctgctcctcctgagcctatacctgtgcaggttgaaccaatgccaactagtccatattctctagtggcagatccatcttgtcccaaacttgaagtagctcccccatcttcacctattggtatcatctctgaagactctacagagtcagcatctggagaaggtggtgctctctctgattcctccttttccatctgatagatgaggaggatgctcagactcggaatacccacgacctatctct

SEQ ID NO: 227962 - DNA, 359 bp, Glycine max
agctttgagccaattcaaagaacaatgaactgtttctcgtttgtctgattgagtcccgtaatatattgagacgctcgaaattgaatgttgaatctctgagccaattcaaacgacaataacttttttcacggatgtccgattcagtcccgtaacatatcgagacgctcgaaatttaatgttgaagctctgagccaattcaaacgacaatatactctttctcggatgtctgattgagtcccgtaatatattgagacgctcgaaattcaatgttgaaactctgagccaattcaaacaacaataactttttactcggatgtctgattgagtcccgtaatatattgagacgctcaaaattgaat

SEQ ID NO: 227963 - DNA, 303 bp, Glycine max
  unsure (1)..(303): unsure at all n locations
cccggagcacaagttatggctgatctaagctctgcaaaaaataagctctcaaaatttgttgaaactctcaaatacagccacaccaagtgctcctgtgattctncacacaaaatatgagtcaaaggaacccaccacacaaaaattcagccaaaaataacaaccctcactatcaaaacaaaaatcaccaattaaattggtaacagccgtcgctaattcagccgctaatgtaacggtgtgcgcaacagaacgcagaaacagactctaatgccgccggcaagcactattcacagccaaacaacaaac

SEQ ID NO: 227964 - DNA, 370 bp, Glycine max
ctcttgtgagaccaggcttaacttattttgcattatcatcacagcatattcagaaaactaaaaccgcataagccatgccaagtaatgcagtgatttaagcctgcctctatcaagttctatgggaacaggacatttcccaatgctacctccagagcattatctcacatttcgcgcaacagtatgacgctctgatcttcagaatttgccaccctaattctgacaatacaggcttaaataggctctgaaatcgcgacgtcgcgcttagcgcgagtaagtggatatgggctcggcgctagtcgtgtgctgagcctggcaagagacaaacattgcgcttagcaaggggatcttgcgcttagcgcgcggccttgat

SEQ ID NO: 227965 - DNA, 459 bp, Glycine max
  unsure (1)..(459): unsure at all n locations
agcttatcacctagaccatctctaggcccttattgtcctatgtatcctaaacatcattctctaacctttgaccaggcactaggatctcacttcattattacctagaatggaaaatgtgtataacattttctttttctaactacctaattagggctttcatcacctctctatcaagcatatattctctctacaagtcaattgcataataaccataagttagacccattgatacacataacagaaaattccaaccaaggaaaaaaagaaatagagctaggttttatatacttcaaaaacaaggcatataataataacagtttatgacctaactcacttcataaaaagttatcttatnaatatatgtacatcaatagatacaagccaaccagaatatcatagatcaatcaccaaacatcaccatgtgaattcaacattaactatcaaaagttatcatcatca

SEQ ID NO: 227966 - DNA, 411 bp, Glycine max
  unsure (1)..(411): unsure at all n locations
agcttcaccttataaagtgtgatttcttctattttgggaagaattaaannaaanaaacagagtaacagctacagtagaagtaactatataacctattctgttgaagatgtataactatacgcactatatgctgcaggaaaactactctacatggaaactagaaagcaacataagtcaaaaaaagagatcgataagtgcctcccctttcacctccaacaacaccttataaccaataaagaagcctgccagctcgcagaataaccttgaagtttgcaaaaaatgggttaactgtctattagaacttaatgcatgtaaattcatctgttcaaaggttctaactggacttccattctcgcagagggctgtaactctttatttgcacttgttctggtggcctcaagagatcaactg

SEQ ID NO: 227967 - DNA, 361 bp, Glycine max
  unsure (1)..(361): unsure at all n locations
tgctaagaacaattccatccacagaggagacacttctcttattgtgtatgtctcgctcaagggcaaccttctgtgggaatattcaaaagcttttgcttactcgcgtaatgggatttcatcgcatgctgtaagaatgcattaaagtgcgtgtctaagaggtgaatggtggcctaattatattcatatgcccagccctataaatacctagaagctcctaattctgagaacaagctatgaatgaattaagcttttgctaatactgagagcatagtctcttcttggntcttgattgaaacccaattgattcttatcaaggaagctatctctttgtgatgaaaccttctcttggctaccattcctc

SEQ ID NO: 227968 - DNA, 456 bp, Glycine max
  unsure (1)..(456): unsure at all n locations
agctntgagccaaaatcctgactcaccatatttcttgacccatggtgagaatgtcaatccttaccctcggaagcaaaaaagaatagaggggaaatttccaatcaaagaaaaagagaaggaaaatttccaatgaaagcaaaaaaagaaaagaaggaaaattccccaatctaagagtgcgagaaagcaaaaaaagaaaagaaggaaaattccccaatcaaagagtgggagaaagcaaaaagaaaagaaaggaaaattcccaatcaaagaatgggagaaagtaaaaaaggaagaagaagaaggaaagaaagctcctgatcaaggatcgaaagaaaacagaagaaatgtgcagagaggtctttggaccggacaatatcttgacaatacagaattgcaccaaatgacnaaaaaagaagaaagggaccacgactaaatagcttctccttttttctcgcccgc

SEQ ID NO: 227969 - DNA, 478 bp, Glycine max
  unsure (1)..(478): unsure at all n locations
aaactcagcttaggggtgctgtgcatgtggaaaactctcactttttgtggttatgaggattaaaggggggagttttatatatgctggaaggaaagtgggttgaagaggaccactggattcaaattgttaatatttatgcaccgtgtgatttatctgggaagaggaccttgtggaatgaattgaggcatcttaaggctgccaatcccactggtctgtggtgcttcctatgggattntaattctgtccggagccaggaggagagaataagcctatcccacaggagtgtggtctctgctgacagttcacaattcaatgattggatttctgagctggatcttcatgatattagatgccttggaagcaattntacttggtttatgccgaatggcagtgccaagagtatgttggacagattcttggtgtctgatcagtggttatccttgtggcctgacacttcccaacatgtgcttcacagaga

SEQ ID NO: 227970 - DNA, 431 bp, Glycine max
  unsure (1)..(431): unsure at all n locations
agcttcaacatttaatttctagcgtctcgattattacgggactcaatcagacatctgagtaanaagttattgtcgtttgaattgcctcagaggttcaacattcaatttcgagcgtctcgatatatttcgggactcaatcagacatccgagtaaaaagttattgtcgtttcaattggctcagaggttcaacattcaattttgagcgtcccgatatattacatcactgaatcggacatctgagtaaaacgttattgttgtttgaatttgctcaaagcttaaacattcaatttcgagcgtctcgatatattacgggactcaatcaaacatacgagaaaaaagttatttgtgtttgaatntgctctcagcttcacattcaaattcgagcgtccgatatataccagactcaatcagacatcgagtaaaagtattgt

SEQ ID NO: 227971 - DNA, 444 bp, Glycine max
tactcagcttgtcaagagggaagcaagataaaaactctcttcaaagtataagcgttgtttctacttcaaaaccctttgaactacttcacatagacttatttggcgcctctagaactatgagtttgggtggtaattactatggcttaattatagtagatgattactcaagattcacatggactttgtttttgaaaaccaaagatgaagctcttgatggttcttgcaaacttgccaaggtcattcaaaatgaaaaaaggtcttaacattgtttcacttataagttatcatggaggtgaatttcaaaatgagtctcttgaaatgttttgtgaagaagatggaattcaccacaacttttctaccctaagaacacctcaacagaatggtgtcatggagaggaaaaatacatcccttgaagaatgagctataactcttctaaatgaaaca

SEQ ID NO: 227972 - DNA, 418 bp, Glycine max
  unsure (1)..(418): unsure at all n locations
agcttaaacattcaatgtctgagcctctcgattattacgggactcaatcaaatatccgagaaaaaagttattgtcgtttgaaattgctcagaggttcaacattcaatttcgagcgtctcgatatattacgggactcaatcagacatccgaggaaaacgttattgtccgttgaattggctcagaggttcaacattcaatttcgagcgtctcgatatgttacgggactcaatcagacatccgagtaaaaagctattgtcgtttgaatntgctcagagattcaacattcaatttcgagcgtctcgatatattacgggactcaatcagacatccgagtaaaatagtattgctgtttgaattggctcagaggttcaacattcaatttcgagcgtctcgattgttacgggactcaatcagacat

SEQ ID NO: 227973 - DNA, 394 bp, Glycine max
  unsure (1)..(394): unsure at all n locations
agaagaaaattattatgaattagtctttccataagctaatgagtagaagctttctcatattacttctccaaaagctaatttttaacctatgcataaactagttttagtttatgaactagttttagtttatggagaagcttatttcattcttttcttttattttcttctcttataagtatttatggagagatttatccaaacaaaaataccatgaagaacataatattagtcagcttaacctccaaagtacaaagaaggttaagtcaattcataaactatcattatgttgtaacacttacaacttggaattcatctgatntgcctcctgaacaagaatgggaaatgaaagtagcacacacagtaacgaatatgtcttgctactatagtggagaga

SEQ ID NO: 227974 - DNA, 451 bp, Glycine max
  unsure (1)..(451): unsure at all n locations
ttcaccttcttgctaagccatatctgctggcttattgagcgtccgctaagtgcaacactcattggttaagcgcgaggaagactctggaagaagatgagttgtataggttcgctaagcgcaccgcttcatctcactaagcgcaccgcttcagttcatccgctaagcgagaaaggcacgcgctaagccagaattcactaatgtgcgctaagcggtccataagtgctctaagcgcacgagcatgaacaaggccacctatttaagcctgacatcagattttagagagggagtttggactaggatttggagctttgcatgtctagagtttctagagagagaaaggttcaagttccagagagttntgagagattttgctgtgtgaagatctgcagagaccagagctttgagtaagagctagtttgagagcttgagatgagtttgtgagtgattgtga

SEQ ID NO: 227975 - DNA, 406 bp, Glycine max
  unsure (1)..(406): unsure at all n locations
agcttactgggcagagaagactggcaacggttctatggtttatgcnggngaggaaagaaagttgcaactgagtgagttatatgaaatccgcctagaagcctacgagaatgccaagttctacaaagaaaagactaagaagttccatgatagcatgatagttaaaaaggacttcatggttgggcaaaaagtgttattgtataattctaggcctggactcatgagtggtaagctgagggctaaatggattgggcctttcgtggtactaaaggttttccttatggtacaattgagatcaatagcgactccacaaacaagagcttcaaggtcaacggacatcgacttaagccattcctcacgaacccttctttagtggacgtagtggtggaagagactttcttatttcacc

SEQ ID NO: 227976 - DNA, 413 bp, Glycine max
  unsure (1)..(413): unsure at all n locations
aatcgattatcgcagatacagaaatacttaaacacacctgccaattatgagttttgcagctttttgcaaattccgcccatgtttcttgatcaaggccatacttgactgtaggatcagatatttgctgaccttcattgtcacaaagacaaattttgaagtcaatgaagacttaaattgcctccatcttgctgcaactgttgacatcaccttttttattgcattttcaccttcagggatatcaaatttgcgctgcacaacaaaaggagttatgtaacagtatgtaaatgaatcctttaaaagtaactnaacaacaaaatcatgaatacaagtgtatttagaattacttaccataatatctttccatattaagctctttaaatcgtcgggacaacattccaattcgcgtgtacaat

SEQ ID NO: 227977 - DNA, 464 bp, Glycine max
  unsure (1)..(464): unsure at all n locations
agcttgcttctatagttgtgattgaattgaatttattatatgttncattaagatggacgaagactagtggatgtatgatagtatgatgcttgaagaagtcgatatgaatgttgaaaatgaagaagatgctagcattaaagtagaacacgttgattgctctgatgcctttaatacttctcaggtatttgtgtaatttgttgttgttggtacaatgattatattacatagatgtttactaatgtcaaacctgatttgaattgtgttatagttgtttgctagccatgatgaagttttactatgggctcgatcgttggctcatgacattggatatgttgccgttataatttggtcagacaccaatacaggtgttcgaggaanagcctcattttctgtgatagcttgcgaaaggagtagggagtataggcttaagaaacataatttggtaagaacatgcactggtagta

SEQ ID NO: 227978 - DNA, 464 bp, Glycine max
  unsure (1)..(464): unsure at all n locations
gcacttttctgtacaccaatccttctttgtattattcaatcaaattttataatctctacaggctgatattactaatcaaggaaaaatagacattccttggtttctaatttcattcatttgttagagntttttcccaatatctatgggggtgtttgttccaaggtttctaattacattccttggattcttatttttggtggcattactatgagcaagaactccattctctggtattttaggaaaaaaaaaccatttgcttattgtaccgtccagatatgtcttgactaaccatgatgtggccctttatgaagctccatctgtgttcagagcttcaaggactgtgtaccatggcactccgatataactcaatcaattctgatgtgccaccctatcangctccattgcctctgttgagtgaacaagctgggcctttgcatcatctggatatagaatccaacatgttg

SEQ ID NO: 227979 - DNA, 147 bp, Glycine max
atatccctagggagtagtttgacaagcacagatgggatccctcgcaagaagttgaacctctcaagagtgaatttcaaaagaaggtgcacttgtggatgcctatcacaaaactattgccagcgcatccaactgatcataatctaaccc

SEQ ID NO: 227980 - DNA, 440 bp, Glycine max
  unsure (1)..(440): unsure at all n locations
agcnnatacttatggctagcctctggacttctctccccgngccactccggaagatttaagccaagcccctactattgaggggcaactcccgccttatgacgactatcccgggcaagacgatgaggaaggagatacccatctcggccccctgctccacctcaaagatccgtccgcacatgaactacccgaaccgaacatagtccgccatatcccgacctcacccacacccgtaaaagaatctgttcccttcgcggaagataagggaaagattgaggcgctcgaagagaggttaagagcagttgagggccttggcaattacccattctcggatatagcggatttatgtctcgtgcccaatatcgtcattcctcccaagttcaaagtaccggactttgataatacaaagggacgacatgtccgaaggggcatcttctgatgta

SEQ ID NO: 227981 - DNA, 418 bp, Glycine max
  unsure (1)..(418): unsure at all n locations
agctntacatatattaaaggcattctctggtttatcctgctatagctcctcgcaatgcgattcacagtttcaggaacatattcaagtacaagattcaagtaaacttcttctttgtcagtcgttgaaaagaaacaatgccttagggcaacaatatttggatgatccagcatttgcataatttgtaactctctattcttgtatcgtttgtcctggagaactttcttgatggccacaatttctcctgtttctctacattttgcctaataaaagcattgataaaacgaagaaggtatcatcagtatgtcatacatcaacagcatggtgtttagaagagatatgaatagcatactcacctgtaaaacacaccataagagcctgtcccactacatgctctgcatataactaacattctgcaact

SEQ ID NO: 227982 - DNA, 408 bp, Glycine max
  unsure (1)..(408): unsure at all n locations
agaaactcaagcttgaagcgaggaagngtggacgagtgagtcttcctacttttatttgttgaccaacagagtggtacctcggagatatgttgcggtggtcaggagaccttgcggacgtcacgaggggtgctattgcccacaaccaagcttgatcaatcccgacccaacccaggcatagncagtcagtgagaacctgtgatgtacctaaacaggcgagctcctgccagtcaaccgatgaaagaacatacaccacaatgcacggaggctcgtgtggtggctggccaactatgaatcttgagtgatatttggaatatggcctctggtcatcgattaccaaggatgtgtaatcgattaccaaggatgtgctatcgattacaaagcgtaaaaatgaacacagcatgttgagga

SEQ ID NO: 227983 - DNA, 441 bp, Glycine max
agcttcatgatgatgaatcaagttgattcattattttttgatagtgacaaagatgttgagaaaaagcccaaagaatgatttcaagattaaatcaagaacaaattcaagaatcaagagaagtttgatttcaagattcaagaaaagatgaattcaagtttcaagagaagaaatcaagaagacttcacaagggaagtattgaaaagatttttttaaaaaaacaacatagcacagttttgtttttcaaaacagtttttctcaaaattttctaagttaccagagtttttactctctggtaatcgattaccagtttcctgtaatcgattaccagtggcaaagtttgatttcaaaagcttttagctgaatttacaatgttccaattgatttcaaaatggtgtaattgattacaagatattggtaatcgattactagtgcatctgaaca

SEQ ID NO: 227984 - DNA, 328 bp, Glycine max
  unsure (1)..(328): unsure at all n locations
acactatannaaacncacgctcgaggctaatcccanaactacaaagacacgaccctgttttatgnttaccaacgatgtcatacaacgacgattnactctcgcgaagcatcgttcgaatgggaaacaccacatacacctcatgtctaagccaaaacttagctcctacctccagaacactcgaaatgtgacatgttgatttgttcggcccaaccggaacaacctctgtaagaggaaagagacatggtctggtagtaccggacaactactcaagatggaccatgggttatgtttcttactcacaagaatgactctcttgaggccttcctta

SEQ ID NO: 227985 - DNA, 465 bp, Glycine max
  unsure (1)..(465): unsure at all n locations
agctgggttgtgggcaatagcaccccacctgtctttcccaaggtctcctgacccccgcgacatatctccaggtaccactttgtggtcaacaaacaanagtaggaagactgactcttccacgctttctcacatcaagcttagtggattatcgggtactcgtcatatgtggtactaggtggcgatcgggcgatggtgcaaatcgactctcccactttcacaagtcaaacataaacacaccatccccagttgcccacctttcaactgagctcacgcactcctacgtaacccttatcctcgttcctctcggaaccgggtccccatcaacccctccaagcttccacaatatccaagcaattcaattccaaatatcatgaaactaccctaaaccaagaaaacagggtagagggcagaaactttgtccaaaactcactcanataccacagctttccttactcttatacccca

SEQ ID NO: 227986 - DNA, 203 bp, Glycine max
gctctattgaatagccatgtctatttccggaactcgcggctaagctaccgacctttttcggcttctggtgcaacgaatggtgaactcgaggtcacccgatgtacattccactcgctgcatgccgcccttgcggtcccccccatgtacatttcacctaaagtacactcctcccggcattgccgccgttgggctcgaggcacatt

SEQ ID NO: 227987 - DNA, 408 bp, Glycine max
  unsure (1)..(408): unsure at all n locations
agcttctccaataggcatatgttatttccaatttcttgaaaatgtctaggaatcttgccagatgatggcccttatctttcttggaaggtaccacgggatatggaactttcgtaccctcatctaaagctntttctttcctcttttctctttctttttcactcctactctnttcttcattattatttttttcaaattgatctttttcttctttttctttctcttccaccgttatttgtttttccctcctctgtcttacctccttgttcattttctcaatacggtcctttacaacagtttgttcattcaaggccacagtatcctcatcctcaactaccacacacnttgttgttcttgtcatcacgacattacattcttctcagtattttcccaaagctgttggatgacttc

SEQ ID NO: 227988 - DNA, 410 bp, Glycine max
  unsure (1)..(410): unsure at all n locations
tatcactaanataaatcttaacgggtgatgttgtcatgatttatatctttcaatcggtggatgattacctgcatgatatgtttacaagcattcgattgattgctcatgtttttcaaaaccattatattatataaaattatttttgatatattaaaactttctatgttcatcttggtaagcgctgattttttttttgttttacaagaagtgtctagtaatcgactaccttctcatgtaatcgattacaggcacctaggctaactgtaatccattacaacattcctataatcgattacgtaattgattacaatatttctgtaatcgattacaggtgtctgtgtctataaaatcaaaatatcagaaaccgcgagaacgcgatttctgcccaactcgaacctaaaatccctaaa

SEQ ID NO: 227989 - DNA, 84 bp, Glycine max
aaagccttacaaattacacttatatcgaaccccacctattcagagaactttccaaatgaaggactgagagagattttgcctaaa

SEQ ID NO: 227990 - DNA, 422 bp, Glycine max
  unsure (1)..(422): unsure at all n locations
ttatgaaatantgatgtgtatatcggaggacatatacatgatattgcaagagggagttaagcaagtgcaaagacattttgtggtgaataatcccccaaagaggcatgatgtattccatatgattattcattccatatggctaaggaggttgaatgtgcgtgtgaaataagtcatcaactctattatgttctctctctattcatacttttgctaatggtgttaaagtttaattggttgaccttcaatattttgatacttaaaagataatagattcgagtataattttatcttatatgactaataatttttaatcaagagtcatctcttttgtgacttacaataaatataacaataagagagatgactctacgaaatatgaatattttttttgttgaagtgtcgctgtgtcacacatatttaaa

SEQ ID NO: 227991 - DNA, 425 bp, Glycine max
agcttgttgaaattgtcatgtgtggatgaattatacatacccattctgttttagggtttttgtgatgatgtttgtgatgttaatatgctgaaattgctgatggaaatctgttagagacgaagggtataactaacctagggtttgaaagtgagaatgtgatgttatgagtggaaaaagagtgagactttgagagttggaaggctaagtctgaattctgtggtaaatggaggttaaagtgagttaatactagcttgaaatgtcatttatgacttgggagatagcttggactgtgctagagagaagaacaaatgatcaaaatgaacaaagagctatctctagggcaaaattgggtgatgaggagtcaaatcttgattccgtggattctaggtgaaaatcacgttgagcacgttaattgatgtatggac

SEQ ID NO: 227992 - DNA, 402 bp, Glycine max
ctgtgtaatcgattacacttatttggtaatcgattaccagtgtttgtttctgaaaaatctaaagatgtaactcttcaaaaaggttttgactttttcaaatgggttataagtttttctaaaagttataactcttctgaatggccttcttgaccacacatgaagagtctataaaagcaaggcgttgttttacattttcaaattaatctaatacaatcctttacaagccttgaatctctttgaacttcttcttcttctttgtatcaaaagctctctgaagttttctggttttctaaaccttgaaaacttgtgctattcatccttttcattctcttctccctttgccaaaaagaattcgccaatgactaatcgcctgaattctttttgtgctctcttctccctttt

SEQ ID NO: 227993 - DNA, 468 bp, Glycine max
  unsure (1)..(468): unsure at all n locations
agcttatagnggttttgtttaccatgtagcgttacttaatagactctgtctgaaccatggattaatctttgtcaaggactatgagcacacacgatatatatttccctcttaataagaattattttatatccaaagaccaattaaaatttgaattcgatcatttgatcaaagaacacaaatcgttattatttgtaccaatgttgatgatagcttatagtgtaatataacttaattattttttcctttcattnttttgatatagactacagtattcttcactgaagacaatcatatttaagttgaataataccattttgtgcaacaaaactctccctcaaagtattaagacaattgtatatccaaaactngaactcaaatatcttatttaactntaaataattaattcacattaattgattcacgcgttacgttattatntaatcttattttatctntactgttcccatt

SEQ ID NO: 227994 - DNA, 358 bp, Glycine max
cttctaagttcctggtcttcaaccttgacaaccaacttgtgtctattcatttttcattccctcctccctttgccaacaagaattctccaaggactaaccgcccgaattcttttgcgtctctcttctcccttttccaaaagaacaaaggacaaaccgcccgaattcttttgcgactcccttccccctctgccaagaaatcaaaacgacatagtctgagatttctcttgaatcttccctttccctcaaacaaacagatttcaaggactaaccgcctgagaactctgtcttaacacaagggagggtacatccactatgctgtaatagagaaccagggacggtacatcccttgtggatcttt

SEQ ID NO: 227995 - DNA, 481 bp, Glycine max
  unsure (1)..(481): unsure at all n locations
gtcacctgcggcatgcaagctttgaacaatatacttgcccttcatttaactgtctttgggcttgacggtcacgctcaacaaagtactttcgacacctactgtacgttgatttgaccaatgctgttatgggaatgttgcgacaatccttcaaaaccttattgatacattctgagaggttggttgtcatgtggccatatcgacgtccttctctatcataagccatcgtccatttttcctttgaaatgcgatcaattcatgttgctatggctggacttaagtcacgaaatttttctaaattttgataaaaaaaatgtgcttgcaaggagtgtaggctgcataaaattagttatgaataacaattntaagtatatatgaaagttaaataaacgtgaccatcaaatatgaaatcttacccaatttcttcaacatttctttttgtttggcattattgaatttccgattgaagttcgttgctatgtgt

SEQ ID NO: 227996 - DNA, 409 bp, Glycine max
  unsure (1)..(409): unsure at all n locations
gatggatttatcaacaactattgaataaagccattgttcataaaggtggctttattagacgcatctctacttccatatgatctttatcacattatgactgagatgcatattaaccttccatatttggcgctacaatacatgaattctcatgaaaatgttagacactacatgatccattgttggacaacccacacatctattaaggttttgatgaaaacaaaaatataaatttgtgttaaccaatttgttacatgtaagtcaacacgattgctgactggaaagaataccataaaagacttgttcattagtgaatacctcgtctactggaagcangaagtactcgttcatccaaacattaactaggatatgaaaactcatttggatctatcagattattccactgtatatg

SEQ ID NO: 227997 - DNA, 471 bp, Glycine max
  unsure (1)..(471): unsure at all n locations
taatactcagcttaagttgcncgatcattctccctaaagatgtgttgattattgctatcagaattccattccttggatatagggttgaaccaagctcatgcttttacaaaaaggttcatcaagtcaagttgaaatatggaagtaaccgtcttgcaaaattggggcaaaagatgaatcgagtcacatcactgcttcgtctactgccaaacacatttaggattattgatgtccttgttacttccagtttcaccttgacaaagatgtcatggaccatgttgaaaatctaaattgattcaaccccatatcttgcgtaaaaattcgcaatacttcaactgtacatcattcgcatgcatccatgcttttcattagttgcattgctcgtcgcattctttccttgaaaaacaaaataaaacgaacttaattattggtattaataagaaaaggacacgctttacggcgcccttactcgac

SEQ ID NO: 227998 - DNA, 470 bp, Glycine max
agcttgttcacttggctgtgatcgtctgcgacgcggtgtacagtgatccagtactgattaaaattttttagcaagtgattacgacgtagaggctatgcttcaacgcttttgaagaaaaaaaattagtcaaaacgggaaaatagaaagcgaaattaactagcttgcactgtgtgattcgcgtttagaccattgttttctataaaacttcggaaatgccatggagctttttttagactttgggcgccattgagaaattgttaagatcactcgtagaggatattgagttgtatcaccacccactgcctcaaaagagccacgtgtttgataatttttacccataaaagtttgattttaattgtgttattcattgcttgaaaatacatgtattgatatgattcgctgttttaagaatatagggttaaattggatttcaacattaatttaatataattcgctcattcttattttat

SEQ ID NO: 227999 - DNA, 467 bp, Glycine max
  unsure (1)..(467): unsure at all n locations
ctatgaaactaagcttgaaaaatattctattcaaagctactcgtataaagtgactatcaaactcccccaaatttacaattntgcttgtcctcaagcaaagaaagaatagttcacttgtcctcaagtgacaaaaagagtggccaatcaaaataaaatggtgtttgattcatcaaggatatcaaccatatgaactgaatatcatggaatttttaaatcaatcacttctcacaagcatgcaacttttcaaagataggatcacaagtattagagtcatagatgaaataagctagtaagcatgacagaaatcaaggaaggatgatcaaccaaaacctcatagtcattgtttcactcaaactcaagtgtttaagcttattccctcataaacaaccaacacaagttccaacctttgcatttgatctcctatcatacagtaatgaacacacaaaaatgaatctgaaagactctct

SEQ ID NO: 228000 - DNA, 442 bp, Glycine max
  unsure (1)..(442): unsure at all n locations
agcttgttgagtgtattttttgctataaaattagatgtagggacgtctgcagatgtttgaaggcatcatgcaacaattcaatgaccatgatcattgctttttcaccaactcgcacaagactttaacgtgatataatatcaccaagaatgacaattttgaatactcggtgcattcatcataaagcgattggtctccatttctaagtaaatcaaataattccttagtcactccatgatgcattgccggtatacctccttcaccctcgccactatgttcaagtgatgttggaaatgactcttcattggcacataatccagacaaaccanatgcatcatttagcattatatgcatnggatattcatttagtgtctctatcacatgatcttcatccatcgatatgtcttggattaccaggtaggaaaagaacatgttccctgatacc

SEQ ID NO: 228001 - DNA, 483 bp, Glycine max
  unsure (1)..(483): unsure at all n locations
acactatcnaacactcaagcgtggtgtagagcatgactgtgtgagagccatatttgcattttttaataccttccactngngtgaagtgagtacaacttggtggtttgtcaagaattggatgtagtctaatagtagagacgaaccaaaataaaacttcttatgtttgatctttcttgatcttctttaaagctttaactaaccaaagggtatgaatttgattctagatttaaatacatatcatgtgttttctaaaatgtttgttacaaatttttatcagacgaaaactttgttttaaattaaaaaaaagtttcaaaatttataaaatcacaattctaccccacctctttgcgatatttttccttgacaaaggggtatgaagaaccttttgttcacgttcatatggactaagaggctgtggaatatgtagtgtgtagtcgtcagtttgaagacgattcacaagtatctatggcataatctcactac

SEQ ID NO: 228002 - DNA, 462 bp, Glycine max
  unsure (1)..(462): unsure at all n locations
gcaagctatgcagctgataacccgtttattgttgtttcaacctattgtctccacgtaagatagttntcatgtgtgtttgtttgtagtcagcacacgttttgatgcatgcttagatcaatccaagtatcttgtgacattggattcaactagcatttgagacttgttaatactaaaacaaacacactcttccttatctaattttaggtttgggatgtaatagataagatactaggcagtgagtagctccatcttattgtatatataataattgatttctttaaatctcctaaacacaatggatcactggatccctccaatgcaagaattggtgcgatgtataaaatgatgcacataaatgttgggcaaatgtcacgatccattgtgcatttagcctatgaacaacaaanaggattcactataggattcaaggttatgaatttgtatgataatacttctgaaatt

SEQ ID NO: 228003 - DNA, 474 bp, Glycine max
  unsure (1)..(474): unsure at all n locations
gacactatannaatactcagcttgcttctacaatggataccttgcatctttacatatagtgttgtctcacttggacctttgacgaatctatgctcgacgaggtatttgcctcatttgttgntccatgcttggggagcttgtttgagaccataaagtgcctttttcaagtgatatactttgtcttcttctccttgaactttgcatccttgtggctgctccacgtagacttattcttcaatctctccattcaagagagctgattttacatctagctgatagacttgtagctttaactgtgcaactaaggctagtatagttctaattgtttccatgcgcacaacgggagcaaatgtctcaatgaaattaactcttggcagctgtaaatagcctttaacgaccagtcgtgctttgcgtttctggattggtccatcctcattatatttaattntgtgaacccatttcaggccattgatc

SEQ ID NO: 228004 - DNA, 399 bp, Glycine max
  unsure (1)..(399): unsure at all n locations
agcttggaatcgattacacatatactgtaatcttttaccanagcatattntcagaaaatattctcaacagtcacatctttttatgtggttcttgaatggctatcaaaggcctatatatatgtgacttgagacacgaatttgctaagagtttttcagaacaaaaaaagtcttatcctcttataaagaaanatgttttatcctcttacaaatttcttggccaaattacttgtgattcaataaggaatttttgagtgctcaaattgttcaatctatctctttcaagagagatttcttcttttcttcttcttcattctgaaaagggattaagagaccgagggtctcttgttgtgaaaaaattctaaacacacaggaagggttttccttatgtgtttagaactt

SEQ ID NO: 228005 - DNA, 309 bp, Glycine max
gaaccagctcatcttctccaagctctggagactgccctatccatttaaactcaacccattccaattacacatcgcatgtgccagaaacacatgacaatgttcttttaagcccggcaaagttatatttgtattaatcgagtacagacgtacaagttacaattagggtgccaactcaagttgcatatacacttgaagttctctagacagaacaccgcgtgaaatctatcaaacacacctggcaataccgaacgagaactctctctaacaaacaacactactcaatactgtccaccaacggtattcctgacc

SEQ ID NO: 228006 - DNA, 430 bp, Glycine max
  unsure (1)..(430): unsure at all n locations
agctntatatatatatctatatataaaactcaatacaatcatatntctttcttcttatttttatcttgttcgtaaaaattcaaatactacataaactaaataatgaaaataaaaatttatttgaataaataattaattaaagttcttaaaatatctttatgagaatggggggaaacatgataaagagaagacgtaaaaaattatattcattttaaaaaaatgatttttttaaattataagataattaaagatttttatttcttgtgtacaaactattttgttgagcaattgtgagcctagagcccaccaaggtattatgttgtaatgaagcttattcattgctgaacaatgaatgaccaaaattctaggctcagaaattgactactgctgtgagatttcttctgacactgcattatatgtttcaccatac

SEQ ID NO: 228007 - DNA, 435 bp, Glycine max
  unsure (1)..(435): unsure at all n locations
tgtacttaacttgttaaaataatccgagttcagtttcatatttgagtttgtttatttaattaaatatataaatttgatcgaatattttatatttaacccgattcatttacatcgctattcaattatatgtaaatctatctattagatttttatcacgttaatattaaaagaattattattactagaaaattctaaaaaatattacaagggagtacaattatataaagtgtttatcagatcaaattgattcgataaatctgataattcaaatcaaactaattaaattagtctgggttgattggttaatcggttcgttntactttaattatgaaccaaactgattataattgtgctcagttctcaaataaatattcttttaaattgaactaagctggtgacttgatctattggtttgtaactctagattaatacata

SEQ ID NO: 228008 - DNA, 454 bp, Glycine max
  unsure (1)..(454): unsure at all n locations
agctngatgattacattgctcccctttctcaagcaaattcttcttgacatcatcaaaatcttcatgatttacattctccccctttttgatgatgacaatcacctgtaggttaggagcaacaacaacaaaaaaatctatttgtatatagtttactcccccttggttttgcaatgtttgcttatatgagacagttgaaaatttcatatttttcatatataaaaagttgtttcataaagaatagataatttttcttactattttatcttttatctttctctccccctttgtcaacatcaaaaataaatcatgaatagagaggagaaaaatgttaccacttgttacaatgtatgagaatcaagtgataccaaaagacattaaaacaatcattcaatattaatcaagcanaagcaagtacagtaacacatcataccaaaacacaatcaaacacaatcaa

SEQ ID NO: 228009 - DNA, 411 bp, Glycine max
  unsure (1)..(411): unsure at all n locations
tgcctgggtntattntgcgataattacgaagaatgattttatttatttttattttaaaacttactacactacttataagttataatcatacactaaaaaattactatcaagcttggcattattttcaagaactttattgtttctttggtttgtcattttccatttaccattgtctgttttcaataagtaggcatgttattgaattgaattgaattcttaagaatctaggcattgtaatcgattaccagagacagaatacttagaggtttttcaaaaagaagtttgaaatttgaattttaaatactgtaatcgattaccatttaactgtaatcgattcccagtaacgaaaattttagaaatntgaaatgaaaagtcatgacccctcaatgtataactgtgtaatcgattacc

SEQ ID NO: 228010 - DNA, 426 bp, Glycine max
ctgccgcatgcaagcttgtcaaatacttatttcacacatatacttgttatgtgtaaaaatgatcttgagttggacaataataacactaatagtcaaagaacttactcttcataagttgtctaaagaagtttcacctgtgacacaacaacaatttttctagatattttatatacaaaacttctcaaaaagactaaacacactcgggtacatacaagatataaaatgatcgacacagtttatcttctataaaaaaaaataaaatacaaaacgtcttagacgttgttctttaatatgtaaaatctttattatagaaattattgagctaggtaaaacttctatgatagaataaaaccgaaaacataattcttccatgtaagttaattattagaagagagatagtgattaatattttattacccgtggaga

SEQ ID NO: 228011 - DNA, 431 bp, Glycine max
  unsure (1)..(431): unsure at all n locations
agctnnttcaattggcatctgaagtctgagatctctgggcagataagtctgctaaagctggaagtggggctgaagtagaagatgcagggatgccatctattggtgcaaaggaagagggaacattagttgctctgagcttggtcttccttgcctctggaaaattaactgtttggtcattcgtattccaacagttccttatgatataagctaagtcaatgaccggccttaggttttcataggaggtaagagcatcagatccaactcccctctgtcgcaacctacccttcggcgggagggcgacgcgagactcgcgggatgcgtgttccacgaaaggaatacgcgcggagtcgccaccaacgtttatttgaggaaaatgtcggaaaaaccgganaagacgcgatctatcgaactttaagtgaaaggttcgggag

SEQ ID NO: 228012 - DNA, 456 bp, Glycine max
  unsure (1)..(456): unsure at all n locations
tccatcagattacaacaccaaatngtggtcaagagttcgttctattatgtgatgcaagtgattatgttgtatgcactgttttgggccagagaaaaggcagagtattccatgcaatctactatgctagtaaggttctgaatgatgctcacattaattatgctaccacatagaaggaaatgctagcaattttttatgcattggaaaaattcaggtcatacttagtggggtaaaaagtgataatctacaccgatcatgcagttatcaagtatttgctgaataaagttgattccaagcctagaatgatcagatggattttgttgctccaagaatttgatatagtgatcaaatacaagaaaggatctgaatatttggtggctgaccacttgtcaagactagtcaatgaagaagtcaccctgaaagagctataaataagagatgaattccctcgatgaatca

SEQ ID NO: 228013 - DNA, 428 bp, Glycine max
  unsure (1)..(428): unsure at all n locations
agctttatagtgcgggtctgggagacnaatgtcaagtggtcgcgatatgtaaagatgatgttccaagaactctggatttggtccgaccatgccctcctgatttccagctgggaaattggcgagtggaggaacgccccggcatttacgcaacgagcataatgtaaacctttacggttttaaaagctctatagttgggcctaggctntagagttttcattttgctaaggctttgtgtcttttgtctttgaatttataatacaaggatctttcttcatctgttcctggtctctacccattctcattcatttgcatgtttacttctttttctaaaacggcagattcgatgacgagtcccccgaaggtactaatacctgtgacccgtctatcaacttcgagcangaaatgaaccaactgaagatgaacggatg

SEQ ID NO: 228014 - DNA, 456 bp, Glycine max
  unsure (1)..(456): unsure at all n locations
taatntatataanaataataattaacaatgttctacatcttcttttgtaaatggncataggtataaaataaaatatttttaaaagtgggagataaaatgccttaattaaaaacaagactaaaatcataaattctctaaaagggaggaatgaattaatggggactaaaatcacatgtctatacaaatagagagacaagaattacactttaaccttcttaatatgcaataaatgagtgaaataaataataatcatgtgtgtggggtagtaatttaaataagtagtgttaaatcttatttcgatcaatatttatttggtgaataaatttttattatatttttatcaatctaaatgaaacgttttaattataataaaaaattgattttctttatgaatgacatttttcttatgacataatttgaagagacgcccatattatgacatatatgtttgtaaca

SEQ ID NO: 228015 - DNA, 320 bp, Glycine max
  unsure (1)..(320): unsure at all n locations
gactattcagctaaccatggatcaaatgtttggttactagacaggtcggagtcgcaatttacttacctcaccccactcgcaaaattcaatgggactctagatttaccccttattcctaccttgacatgcttataaaatcctatacaaatataattctttatagaatgaaaaatacaattttaaataacaactacaacatattnttagattgtcattacaacataaaattcaatccaacaataacatgaaatcctatccaataatcttacgttttagcgcgttatatatatatgtacggatagttttcgtaaataattatt

SEQ ID NO: 228016 - DNA, 415 bp, Glycine max
  unsure (1)..(415): unsure at all n locations
ctaagctacccttatggttgcctccggacttactcctcgtgccgttccgttagatntgagccaagcccctacattcaaggggcactccctccttatgccgactatcccctgcaagaagatgatgaaggagatgcccatctaggccctctgcttcccctcaaagatctggccccccatgaattaccccaaccaaacatagtccgctatgtcccgtcttcacccgcacccgtaaaagaatccgtctccttcgcagaagataagggaaagattgattcacttgaagagaggctaacagcggtagagggcctcggcaattacccgttctcggatttagcggacctatgtctggtacctgacatcgtcatcccttccaagttcaaagtaccagattctgattagtacaaagggatgacat

SEQ ID NO: 228017 - DNA, 399 bp, Glycine max
  unsure (1)..(399): unsure at all n locations
tcattgcttctaatccgaggaggagtgaagatcatgtngagtttgttttataggacttgcacccatctagttatgcagggcatctactgactatgagaagctcatcaaattcttgacagaatgggacattctttatcccaacatgcatataaagggaaaaaatgtataaaatataaaatctcatgtaaatcaatattattcaatataatcgcaagtaaatcctcgtgaataaaaggtccacattcatttcattgttaccaaatagaacttatcatatatatttttggctaagaacaagaacgtttaagtttacaaaatatcttagactaagcagcaaaagtaaataatgataacatgttccgtacatcatgcatttaggacagatactcatgctccaat

SEQ ID NO: 228018 - DNA, 339 bp, Glycine max
  unsure (1)..(339): unsure at all n locations
tatatatgaaccatatggtggtggcgtaggtgactctgatattcactctgttgctccgncttgcaataaaacagtacggcattacacccactttcgttcgttgagagagatttgcaagaatcaaaagtagctatagtagtgttgctgtctctatactaaatggtgtctcacacatgtacgtggtgccattcaatactcacgttcatctggtccactgtctacatcacaaataggttatctgagttcaccatcacggtcctggtctttttctattcttttttatttcttcggtcgatggcggcggtggtgtctttactaaccaaacaacaccggaaatag

SEQ ID NO: 228019 - DNA, 290 bp, Glycine max
ccctactagtcttttatataggggaagaaacccatattagagaattaaaaacgggtgctttcattactacctttaaagattaagtgtctatcttaacttcaccaaacggagaagcgtgacttttcccaacatgaagaacctaagaaaaaggtgcaatattgaactgacttgaaaactaattcggatcatctataatgacatgatgaaaattatagagatgaacaaacttaacaactgagaggataataaaaaagatgatgatatatagtaaccacagaagtaaaaggcac

SEQ ID NO: 228020 - DNA, 403 bp, Glycine max
agtattcctttaaacacatgtcctagtggctgacagagaagagaaacatcggagacgcccagaggaagtagcagtgcggagatagttgaaaagatcgagaacaaattatatgtgatgtaactctacatatgtacaatcttgtatatcaaatttaaatatattctttcgaaagcgacattatttttttagatcaattctactcaaaaattaattgtgttatattagaattcattcttaaatttaaatattttacataaattttaaacatctttcttaaaatgttaattctttaatctatattatctgttttagatttctctaatctaacacgcatattttaatcgtaattgattttttaacacttttagctataatcttaatttgacttaacttaacacatata

SEQ ID NO: 228021 - DNA, 440 bp, Glycine max
ttaacacctgagctgcaagcttaacttaaaacttactattcaattctattcttgcctgaccttatacaaagaagaagaattcaggtccttggtcaaacccacactagtttctccgtgtgtgtgtgtgtataccgattgtttgattaacgatagaattgtcatttacaagactacatgacaaaaaatcaactacttaacagttaaacaccacggagacattaattatctgacaggcaccatatgaacaatcgaaatgacaagtatcataaacattctttttagaaattcatgaactcctgtttaaacgacagcaatataaactgtactggggtgaatatgccataaaaacaataaacttctaaagatgcttctattgaaaaataacctttataatgttgttatacgtacaggtttttggcttaaaaatggtttaaccccta

SEQ ID NO: 228022 - DNA, 401 bp, Glycine max
actgaatcttattcccttcggtcttattcataatgtctgctggctgatcattagaattgtgaactcagtggcaatctccttggacaataatttctctcaaatgaagtggcactcaatctctatgtgcttggtcctctcataaaaaactggattggacgcaatgtggagggctgcctgattatcacaaagtaacttcatttgtgcaacttcacaaaacttcaattcttgaagaagtgtctccaaaacaagagaaaggaatatatcatgatgagaggagagagagaaacaatggatgggagagagttatgactacgagagagaggagagcaacagatagagtgagagcaagagagggtccctacctgaccatcgccggaaagaggaacgggcagcaacatggc

SEQ ID NO: 228023 - DNA, 382 bp, Glycine max
  unsure (1)..(382): unsure at all n locations
agcttnctcggtgccattcctgcgatttattttcgttgtatagttaatnttaccagggggacactactcttaaagcaaaaatggcatataacctccccccataaatacaaacatcaatgtaaatttagagcaagcttacgcgcatattatcttacaaacgttctcttgcacaagacattctattaaccgaagaatgcactcatatacaatcaaggcagcttcgttacctagattatttacacgcactctcaaggtgtatttcgttacttacatcacacacatctccttggctaaattcacatacatgcatactcaaaacatttttggggaccaataattccacatgtgcacatctntgtttttcttatacctattcataccc

SEQ ID NO: 228024 - DNA, 396 bp, Glycine max
aatctaagctgccgccaactcgccaggcgagcaggttgctttcttcttttctacagccttctggaggaatcttctggagggccaagtgggcctggatgctatctgcacccccttttttttactaaatgcatccccctcctatctttttggtaattctttttccgtaacgttacgaaactttacgaatttcgtaacgatacttattttccttccgcaaggttacgaattcttacggattatgtatctactctcttttaggtttccaagaagttacggaaacttacggattgtgctaacacctcttttcatttccgcccattacggaattcatggatcgcgcagcctgctctcttagatctctggacgttctggacttcattatcgcgcacataggac

SEQ ID NO: 228025 - DNA, 296 bp, Glycine max
agcttatgctgcaaacatttataatataccttttttcttctaaaccaacaacagcatattaattatgatctttctagcaacagatacaatccaggttggaggaatcatccaaatctgagatggacaagtcctccacaataacaacagcctgtccctccctaccacaatgcttctagtccaagcaagccatatgttcctcctccaatgcagcatcaacaataacaacaactaaggcaactagcaactgaagaacctcctcaacctttcttataaaagttagtgaggcaaatgaccat

SEQ ID NO: 228026 - DNA, 324 bp, Glycine max
gaatcatgctgatgggagatagaagcccgactcacagattacataagttattttctccatccaagttgtattgagaccattaaaaagagcctacaactccacatggatgatgatggtaaaaccgcacgaaccttggaaaacaatcttccatcgaccccaaggatcgtggataactacaccgatacccaagacctcagagtgccaagagagctcccatccgcattcaacttggacgtaccttctggcggaggagttcatctgatctgataagacttctacacatggtgttgactccaaggctctagaaacatcatctaaccacat

SEQ ID NO: 228027 - DNA, 432 bp, Glycine max
  unsure (1)..(432): unsure at all n locations
agcttatagtcattacttggtgataaccattatcttaagctgagtatacccttgagataagcagtggttggagtctccatgtatcgactgatgagtctagtagcatatagaatgtctggtcttatgcacatcaaatatcataaactatgcaccaaactcttgaaatttgtagcatccaccttttttgcttcatcgaaatttgataacttcattttgcacaccatccgtgttccaattggctctcaactatccatcttgaatttcttgagcatctctttatcataattntcgttgtgaaatagaaagtccatctttcttctggcttacctcaaagtcaagataagatgacattagctctgaatttgggttatgttaactctcctgatacctacgtctcttgtactctctataatacttggattacttcccgtg

SEQ ID NO: 228028 - DNA, 481 bp, Glycine max
  unsure (1)..(481): unsure at all n locations
ntaaactagctacaatagtcttctatcctaaggttcatatgttatcataaagtgaagagntgagaacacttattggattgcaaagaagattgagcacgaggaagcacagagaaacagagaatagaagatgagcaaagtgcaaatgatgcgaaaatgccagaaatgctgtgagtgaagtgttttaatttgtacaggataaaactgcctaaggtaattaagccttatttttggcagtctcgactgcctcgcttagtgcgggacactcgctaagcgagcactcaatgaattttgagttttcagaattcaaactcatgcgcttagcgggcaaactcgctctgtccaattcaaaaatatgacattccagagaagatattgggcttagtgcgaagggtccgcttagcgagttctgtagctctgattggtctgaactcttccttaacgggccatgagcccgcttagtgaatagaatgcttcctgatgt

SEQ ID NO: 228029 - DNA, 394 bp, Glycine max
  unsure (1)..(394): unsure at all n locations
ctcaactgcgagccttgactaccgctcttccttcccgcgatgctnttttttatatctgcctgagtggggttatagcctaacccatacttcccacgatttcctttggcatttatcaagctagttatgtcgccattgtctntgcctaaacccattccgggttcgtaaccgttccccaacataacttgggccatcattactgctgcatcggacaggcaaggctgcccagagaaggagtccacggaggaaatgcttaccacctcaaaagactggaaagcggtttctaatgactcctctgcggcctccacataaggcatagaggatgggcagctcaccaagatgtcttcctcgcctgatacaatgaccagatgcccttccactacgaatttcacttttg

SEQ ID NO: 228030 - DNA, 405 bp, Glycine max
  unsure (1)..(405): unsure at all n locations
tagagaggacacttcaatggaggaagataatgagagagagataaagttgcatgggaatgaaggaaagagaaggagagaagtgaactttgaagtgtgtctcacaagactctcattcatcaaagttaccataagtgttatacatgcttctatttatagcctaggtttcttccttgagaagctagtgttacacccctccaatagctaagctcaccccatgccacaatacatgaaggaagaaagtttccttgagaagcttccttcgggagcaagtgttacacccctccaatagctaagctcacccctccaaaatacatgaaaatacaaaaaaaagtccctaccacanagactacttanaatgtcttgaaatacaanggctaanaccctatactactagggtacccctaa

SEQ ID NO: 228031 - DNA, 436 bp, Glycine max
  unsure (1)..(436): unsure at all n locations
agcttggtgaatactttacattaatgtcatgtattataaatattaacantctaagaaaataaaaaaataaacaataatattgtgattattaataaatttaatattgataaaataagtttaaatactgattaaaaatagaataaaaaagaaactaattagattggtaattaaaggaaaatttaatattgcttttatgttatttagtatgaaagtttaaaatacttaatgaattgttaaatattgtgaaagacaactacacaaatcgatgcaaaaactatatggctaatttgtaaggcaaatattacaagaagaagaagagttgaatcgtgttnttaaaaacctattttaaaccaanncaagttttcgtctataaagaaatacttgtaataacaaatcacacactttattacaatagcactttagataatgagaaaat

SEQ ID NO: 228032 - DNA, 394 bp, Glycine max
  unsure (1)..(394): unsure at all n locations
tgagtggtcaagtgatgtttatccccaataggttcaatgaagtctaatttattcaatggtgtttgacccaagcctaatgaacatattggtagagtgatgtttgagttacgaccattaaagcccaatgggatccaaatgatgtagtggtgtttgacacaaacctaattaggctgaagtgagcccgtgatgtttaacctanacctcaatgaagtccaagtgatagaaaaaaaaatgacacacacaatttttagaagaaactaaatatacaccaataaaagaattctccctctagttgattcctttatgcanacaccatgtcaagtcctattcctaacctttagacccatttagtagtcgatatatgactagatataattagggacgattatacgac

SEQ ID NO: 228033 - DNA, 357 bp, Glycine max
cgtgcaagcttcacgcaaataacaaaggcgatactcattttattaacaaacccccctaacatttgttgtaaaatagaccctatttgattaattatccataaaacaacaccctacaataaatttgtgccgtgcgtgctccaatatctgagaataatgactagaatacagtacaaagaccgaaacccaagaataacaaagctcaatggtacgcatcaagggtggatataacccaatatttaatctaagacagccatatttacatatacacttaaatgcttcgggcccatatctcctaatcctgcaacgaccatactagaacacctataaataatttaaactaataaatacatgtcaatc

SEQ ID NO: 228034 - DNA, 326 bp, Glycine max
  unsure (1)..(326): unsure at all n locations
ttcaatctcagcttatattgaaccattggtggggggtgggacttgaatattcttctgttgctccgtcttgcaataaaacagtacggtattagacccactttcgttcgttgagagagatttgcaagaatcaaaagtagctatagtagcggtgctgtctctatactaaatggtgtctcacacatgtacgtggtgccattcaatactcacgttcatctggtccactgtctacatcacaaataggttatctgacgtcaccatcagggtcttgttcttttactttttttttttttttctggtntgatggtggtggcggtgtctttactaac

SEQ ID NO: 228035 - DNA, 353 bp, Glycine max
  unsure (1)..(353): unsure at all n locations
gtggtaatcagagcacaagagcttcaagtaggtgtctttttattctccattaatnctntgctttaccttctctccatcgttttttcttcattctttctccatgtatctcctcaaatgtcttgttctaaatgtttgtaacatgattctttacagttttcacccattaaacttgctatacaagctagattttattttctatggctcaaatttcttgttcttcgtcttgaaccatgaattgtgttgagtttacgttcctttgattttgtcttgtatttctttgcggctgaacctaaccataaattcttaaaaatattaagtataaaaaacctcaaaattacagcgcttgttcacct

SEQ ID NO: 228036 - DNA, 425 bp, Glycine max
catgcaagctttgctaggttgtgacgcttaatcttattttacttgcgcttatgcgagatgacctgcaggggaaaatgggcttctagttttcaagctggaaccaagcttaagtgtgactggaaccaagcttaagggtgaccaagcttaagcgtaggctgaaccacgcttaagcgagatgacctgcaagggaaaatgtgctattggatttcaagcttaaagcgtagagtgagccacgcttaagcatggtcaagccaagcttaagcatgattaagcttaagcatatggcgagccaagcttaagggtgaaaccttgcagaacgtgtatgaatgacttccaaatggatttcaattagaatttccttagtgtataagaattatgagatgcataaatatgtttttaaggttatgttacgattaagtatgaat

SEQ ID NO: 228037 - DNA, 414 bp, Glycine max
  unsure (1)..(414): unsure at all n locations
tagtggtcctcctatgtggatgtcttctggcttatatattgtttgtatcattatgtcggaagaatgggaagcttctacaagaagggtcttgctgagttagattntgttatgtcgactctggttgaagtgaaggggtatttgactcatgttgcgctgggttataaagattttatgagattaaagcattcctttggcgatgctaaccctctggtgctgcttgaggagagaaatgccactttgaagtgttagaattcatcttaaaaccaattggcattaagtgaagttacccaacacatatataagccgcactccaaggattgaggcagccgatgtgggacttgtggtattctcaatacacctccttcacgtccagcacttattgggtttggtgcgtgaaccacaaatggtgggtac

SEQ ID NO: 228038 - DNA, 433 bp, Glycine max
  unsure (1)..(433): unsure at all n locations
ngaacgtgtgtagcccaccacttntccatagcagaacactgtttatgtgtctactatgacagttatcatctacctttcgtcattgagggtgccacctgggctgctaggtctctccacctttgggcgtattctttgaaagaatcatgcccctttatgcacatgttctgtagttgcatcctatccgaagccatatcaaaattatatagacactgtctaacgaaggcaaccattaagtccttccaagaatggactcacgaaggttccagttaatgtaccaagtaacagctagcccagtaagactttctatggagacatgtatcagccgttcctcatcttttgcgtatgccctcatcattcgacaatacatctttatatggctctcggtgcaaggaacctcctctacttgtcaaagccggaacattgacttgggaat

SEQ ID NO: 228039 - DNA, 435 bp, Glycine max
  unsure (1)..(435): unsure at all n locations
agcttataagaacaaaattgccttactcattttttattatgcatgtgaattaggacgcatcaacaagaatcaagccaaggctattgtgcaaacaatcaatggggcaaaacacaccaaatgattataatgatggatggctcanattctcacaaaggtaaaatcatcactttcaaattgagctttcaaaactatcatgacatgtagagaagaatcaaggatttcaagtcataaaatgtcaagaacttttattttcaaaacaattacccatttcttgaacatatcctataattcaaaaaaaaacatgcaaagtcgtacgtgcacatgaaattgacccaaaatattaaactgaaaatccgacgaaactaacaacatctacaaattaacacaactatcagattaacataacctacataactagcaaaactcaagaacact

SEQ ID NO: 228040 - DNA, 475 bp, Glycine max
  unsure (1)..(475): unsure at all n locations
ntatattaaaactcatcanaatttacaaaaataagattattatattttataagttatattattaaattntagatacgccctcacattacgaatntattggattataagtatttttatgataatttatttcacacaacaaaatgaattttattttattaaattaaaaacttaaagttatatatttagtttaaaatataaaacgaattatctaacatgtaagagagacaactagttaaaaattagtaatataatttattttgaagagaaaataggttaattattaacaataaatataaaataattttacgctatcatttcattatgaactatcttatgaataaattattgatttttatattaactacctaaaaattcattctaacacataattttaattatctaatagtgtaaaagttcttatattagaagttagctattaaaaagtgtgtaggttttatattaanaagtcccataa

SEQ ID NO: 228041 - DNA, 413 bp, Glycine max
  unsure (1)..(413): unsure at all n locations
ccatnaaactcagctcgaagccatgaccatatctagctgagagatttttgttttttattggacagcacatcttccataatgcccatgtcgcatgcacataatctgatttgtcacagatccataaaattgctttacaaacgatagctgacagaaacactacactgattaggacatatcactaacaacaaacaaacaaactaaaaagacactctcttagcttttgactttctaacttactaacttgctacgtggtataccagctgctctaaggataaacaggttcttggacgatcctgttaatttgaattaacaacaaaatgctacatggtggtcatcaaacatanaggaagaaatatactccctcctttcctatctataaaactgaattaactaactcacacgattaagaacgt

SEQ ID NO: 228042 - DNA, 407 bp, Glycine max
  unsure (1)..(407): unsure at all n locations
agcttagcttgacaaagctcttttctcttttttcttggncttgagttattcgcttactaatgcagttattcatttttcttaataccaaagtgtccactcacaaattatatttgctttcggggctaagaaaactagaaggaagcaaataagatttcaatagacattttccccaaattttatgaacggagacccttattttcatatttgccattcctaaacactttcatgtaatctatgattctcgtagaagaataatattgacactagcaatctttcataagttaccattagacaaacaaagagaaaattaacacaggttctcacgctgacacaatgggaagacttactaattatcccttctgggtctccctacccccaagacacaaacaccagactttttgtattaa

SEQ ID NO: 228043 - DNA, 439 bp, Glycine max
  unsure (1)..(439): unsure at all n locations
agcttgcttctacaagggtttcccccacttatatattttatctntgcaccatctctaatagttgggggacttaagttctttccaatgaagtcaattgtgatgaaaagtttatcttgctcaaccccgttaattcctctcccctttaaactttttagagctattgctattttcttaagtgcaaaagggagtagtaatatatctttatgaattggaacatttccacaacaaatagactctagtatataaatgagttgatttgagttgtatacttgtgcatgattccaaatgaatgctgcaaaagaccaccacccacattagatatattcacctacacattttcaggtagcaaaagataccttggttccatggatgccatattttaatcaaaaagaccttaatcaaccctttaatatcaaactcattatacctagttcctttt

SEQ ID NO: 228044 - DNA, 297 bp, Glycine max
  unsure (1)..(297): unsure at all n locations
tatatctcacgggataaatcnaacttaaaatgtagtntagacatgacttgattttcatgggttttgccaattgaatttnttttcccattatacttactacttagagtagctctctatttaaaaggaaaaagatgcatcctattcataacaatattcaattgtaaggtgtctcttgatcttattagtggtttgcactcactaaacgtcaagagaaacatgtntagattgatgtttgcaaacttaaatttgaactaaacttagaattgtaacccgaatttacaaaatatattaatagtt

SEQ ID NO: 228045 - DNA, 424 bp, Glycine max
agcttgtagaccacacctttggcgggtgttccgatttttttctcgaataaacgttggtggtgactccgcgcattctcctttcttggaagacacacccgtgagccctcgcgtcgcccttccgccgaagggtaggtttcgacactcatgatagtctagcctaatcctgatcaagtatcgtccgcagattcctcttgtaggactaaactccgccaggaccgcattaagacaaacatacaacaactaggttaccgtaccccagttcctcatgaaaatatgacaaactagccccatcctatcaagttctaagaatcacaccggcttacactgctgaatgatcctaaaaacacatgcatttacatgatcaagccaaagcatggcagaatgaagtattatacgcagcgacacacaaacatcaggaataata

SEQ ID NO: 228046 - DNA, 484 bp, Glycine max
  unsure (1)..(484): unsure at all n locations
ngaagaggatgctntaatgggagaaaagaaagagagaaggtgggagcacgaaattgaaggaataaaagagggaaagaagtgaactttgaagtgtatctcataagactttcattcatcaaagttacaacaagtgttacacatgcttctatttatagactaggtagcttccttgagaagctttcttgagaaaacttccttgagaagcttctttgagaaaactcccttgagaagctagagcttagctacatacacccctctcataactaagctcacctccttgagaagcttccttaagaagattcctaaagaatctagagcttagctacacatacctctctaatagctaagctcacctccttgagatgagaagctaaagcttagctacacaccccctataatagctaagctcaccctcatgacaaanaacatanaaatacaaaaaaaagtctttattacaaagactactcanaatgctccgagatac

SEQ ID NO: 228047 - DNA, 330 bp, Glycine max
gaccgcagcatgcaagcttgcttgttgagcttctatggagggcggtattttgtacttcaatgaggcacctcaatggggactttccaccatggagatgcagcagaagacaaaggataagaggcgagaggaggtgtcatccactggggaacaagccatggaaaaaggagctttcccaccaagagagagccttaaaaaaaaaacatggagagggtgcttcaatggaggaaaagaaagagagagagaaagagagaggggggagcaccaaattgaacgaagaaaagttgaactttgaggtgtgactcacaagactctcattcatcacaagtacca

SEQ ID NO: 228048 - DNA, 424 bp, Glycine max
  unsure (1)..(424): unsure at all n locations
gataacaaaagatgatgacaaaggtgatgacaacagctcaaaaatcaatcaaagaacaactcaagtgaatcaaagatcaatcaagacaaattcaagagctcaagataagaatcaagaagaattcaagactcatgaagaaagtttagagtcaagaatcaagattcaaggttcaagacctcaagaatcaagatcaagattcacgactcaagaatcaagaatcaagagaaggcttaatcaagataagtatgaaaaggtttttctcaaaaattgaatagcacatggtttttctcacaacatgtttaccacagagtctttactctctggtaattgantaccagattgctgtaatcaattaccagtagcacaatggattcgaaaaatttcaaattaatctgcacgtccattaattcacaagctgtatcga

SEQ ID NO: 228049 - DNA, 396 bp, Glycine max
  unsure (1)..(396): unsure at all n locations
catgcaagcttatcaccgttcacgtttttcgcctttttttttttttnnnnancccnaatcactatcaatgaattttgtttttgctgtacataccgactcgatttttatttttgggtgttctggcaaatcgattatctgtgtaacatttttaatgaaaaaaaaacccatcattcaaggcaggtgatacctttcatttcagattattgaatctttctacgggcatttattattatagatacgacataatcaatcatttaataaacatactgtagtcatgcttcttctgttttctctttaattaagggagtgacatactttatacgataatgccacttaaatgcgaacttactttcttatccacaaacccacttgttctaaataacttagcagagaatt

SEQ ID NO: 228050 - DNA, 436 bp, Glycine max
  unsure (1)..(436): unsure at all n locations
tcggttttgacagtgtggaagtgtcttgtgattcatgtagctgacttcacctaataagataagattttgttatttntcttttttacaggagaatcaaacggcatataatttgagtattgtaaagtggacaaatacttttcctttatactttatattttcctttatatatatgacctttcatcaaataattgatgccattgtgcaacttgttttgaatacgtaagtgaaatatcacctattcagtgtctggttntccgtagtttgacctcactaatattgcatatttgcatttatgagaagtagctgtaacttgtatagatgttactattaatcatggtcatgtgtttattgatcttgtagttcaactttgggaaataattgtctaacttggcatttttctttatgaatggcttangcaataatagcttgaacacta

SEQ ID NO: 228051 - DNA, 263 bp, Glycine max
acatatacaaatagcaatgtaggaaaggaaaaccccacaaaaagcccaccaaaaaagtcgggagacctcaaacgagagggagccgaagggatcaacgcacagcatccactacacacactattcaacccgcgatagggaccactatggacactacaacaaacggctcccaaacagcaacccccggagcgggcaaggggcactccgctctactacaccgctagagcgagcaagagagaaccctgcatggaacaaagctcaaacgg

SEQ ID NO: 228052 - DNA, 460 bp, Glycine max
tactcaagcttgcccagagaaggagtccacggaggatatgcttgccacctctagagtctgtatagcggtttctaatgactcctctgcggctccacataaggcatagaggatgggcagctcaccaagatgtcttcctcgtctgatacgatgaccagatgcccttccactacgaatttcaacttttggtggagtgttgagggaacaactcctactgagtggatccacggacgccccaacagactgctgtagggggggttaatatccattatttggaaagtaacttgacaggtgtgagggcctatctgtactgggagatcgatctctcccctaacctctcggcgggtgccgtcgaaggcacgaaccaccattgaactcggctctaagtgggaggcattgaatgataatttctccacagtgctcttacgcatcacgtttaaactggaaccattatccatgagca

SEQ ID NO: 228053 - DNA, 433 bp, Glycine max
  unsure (1)..(433): unsure at all n locations
agctngtagaatggctagacatgattatgttcttggttggntnggntcaaggataaaagggatgccccacattatttccatgacacaaatgcaaaaatgatgatttggaaactttatgcaaaactggtcatgcatgcacctatgcggacactcaagtgtcaaatttttatggtcatgtgacgctagggctcaggattcgtttcctctattttaatcaacccaatgtttccaaaatatgttcttttatcaatttgtgcattcatccgagtccatttcgggcgtccggggaaatttcacagcattcacccttcaggtgtagacacattttccaaanattggttatgatcaattgaacttttcaaagaaaagttggaaatcgtctcttttcataagcatgctgtttttagctagacaactatttttnctttttcta

SEQ ID NO: 228054 - DNA, 463 bp, Glycine max
  unsure (1)..(463): unsure at all n locations
cttaacatcagaccacttncagggtgctggaactacttacatggactcgatggggcctatgcaagttgaaagccttgacgaaagaggtatgcctatgttgttgtggatgatttctccagatttacctgtgtcaactttatcagagagaaatcagacacctttgaagtattcaaggagttgagtctaagacttcaaagagaaaaagactgtgtcatcaagagaatcatgagtgaccatggcagagagtttgaaaacagcaagtttactgaattctgcacatctgaaggcatcactcatgagttctctgcagccattacaccacaacaaaatggcatagttgaaaggataaacaggactttgcaagaagctgctagggtcatgcttcatgccanagaacttccctataatctctgggctgaagccatgaacacagcatgctacatccacaacagagtcacactta

SEQ ID NO: 228055 - DNA, 421 bp, Glycine max
  unsure (1)..(421): unsure at all n locations
agctntcaaactaaatcaacacatcttatatttaattttttctattcagtccttctttctattaagatctgtaccatcttggaaagcatcttgtaaaattttaataggctcgtgtttttcctaccctttatccattcagttttagatctcttaagttttatttccattaagatctgtaccccttttaattattaggatggtgactaaaataataagactagtcagatctcagttaagaattcggacaatagtaatgggacacaggaaaacaattaccatacataattctagttaaattttgctggcaacattggagccatttttaaatattggaaggatgccacataaattaatagacaacttagcacaggaatggtgacggtagccttattttcgaataatgctcccctaacatgcttca

SEQ ID NO: 228056 - DNA, 473 bp, Glycine max
  unsure (1)..(473): unsure at all n locations
cggacttnctatgttctgagaacctctacttactcatgtgtatccaaacncaatcacctggttcaagcacgacttcttctgctattgttggcttgccttgcatagctcgcatttttcttttcaatttgagccttcacttgctcatgcaacttcttcacatactcagctatagcctgtgcgtccttatgcttaaacatagaaatggtaggcatatgcnacaaatcaagaggagtcaaaggattaaatccatgcactatctcaaatggtgaacaattaaatgtgctatggacagtccgattataagcaaactcaacatgaggcanacatgctttctaagaattcagaattttcttgagaacagtcctaagcagtgtacctaaagtcatattgactacctcagtttgtgggtgacaagtagtagaacacaacaatttagtaccaatcttaccccacaaggtcctctcaaagtgact

SEQ ID NO: 228057 - DNA, 160 bp, Glycine max
cctatgaatctgagctgttggcaattatctgaagtgagcatctgcgtattattgtgtgacgacctattacttactcttggtcccactcatgcgatgaagcctgttaggtctgcatgtgattttgaaccctccctaccggcgctatgatgcctttcctatc

SEQ ID NO: 228058 - DNA, 374 bp, Glycine max
  unsure (1)..(374): unsure at all n locations
agctngtaagattatggggtacccattacttttgttctatgtggcggtcgggcgatggcgcacaacaagctttgctcatccacaacgcgcgcataaacccactataccctgtggcccaccttcaactgagctcacgtactaccacgtatcccatattctcgattttctcaaaccgggtccccataaatcctctcaagctttcacaacatgcaagcgaaacaacattcaaacagcacaagctatctcagccaagctaaacagagcaaatggcgataactctgctcaacacatcaaccaaaataccagcttttctatataaagaccacagtagcaaattctttgatcaattcttaacccgtgacaaattcaaattt

SEQ ID NO: 228059 - DNA, 474 bp, Glycine max
  unsure (1)..(474): unsure at all n locations
tcatanatccactacgtttaatattctgtgcacaanttcttttatgatgttacattaacaattatttgctaaaaaacgaaaattagaagagaaaaattacaaattcctttatagtttaacccccaaaatatactcataattagcagctattaaactcccccaaatttaaatctttgcttgtcttcaagcaaaaggaaaaagttcatagtttaccaatcacaattcatgagataactacatacattcccaaaaacttcattggacaattctcaagttcacagttgtcataagttcatggaaggagcagaacaagatgtacttcacatgaaatgtgtagcacgaatgacagatcacaatgaataatcaccaacttcagacctcacaaggctagtgtttctctaatcccacaagtgtcttggaaaagtgtttgaatataataactgaatagtaaaatctcaactatgacatcatctc

SEQ ID NO: 228060 - DNA, 408 bp, Glycine max
  unsure (1)..(408): unsure at all n locations
agctntgaatgctctattcaatggagttgactgattatcttcagactgatcaacacatgtacagtggccaaggatgcttgtgagatcctgaaaacctctcatgaaggaacctccaaagtgaagatgtccacattgcaactattggctacaaaattctaaaatctgaagatgaaggaggaagagtgttttcatgactttcacatgaacattcttgaaattgccaatgctcgcactgccttgggagagaggatgacagatgaaaagctggtgagaaagatcctcacgtccttgcctaagagatttgacatgaaagtcactgccatagaggaggcccaatacatttgcacattgaagagatgaactcttggttccttcaaccttttactatgaccttggttgggctaaaaa

SEQ ID NO: 228061 - DNA, 485 bp, Glycine max
  unsure (1)..(485): unsure at all n locations
actaagctactaaaaggactacggttcattcaaatcatggatataattgtgttgtcgcttattgtctggctcttccgtcgattcccgcatccacaatgtatttcactgctccttactcaaacctcaccagggcccaatggtaccatcaaccaatccgctatagcctagcaccatagataattaccccctgatagaaccattacgtatcttagaaagcaaatagtctacagatacatncactccatcacttttggttttagtttagtggaatgacctcactctagaagacaccatgtgggaaccatgggataaattgcgtgccactatccaccttgaggacaaggtgtctttgccagtggagggtgttgataggacactccaaccatttgaacccaagaggaacatgcgaagctcagtacctgatagattatgtagaagaataagaacaacagtacgtaatagtggttctttatattctatattac

SEQ ID NO: 228062 - DNA, 409 bp, Glycine max
agcttgcatattataagggacccttataatattattctttcgaagacaataaacgtgccatgcataaatttacttggacataattaacgggaaaaaatgtcgtactatattaattaacaatagtaaagaaacaataaacaacaaaaataaacaagagttaaaaagtaaagtacaaactagaaaaaaaaatgaatatcattagtcaactttgtataatatttaattcgatattttggcaaatattcttaacctttccataaaggaatgtaaaaccaatacttttatattttttaataatacatatgtagtacatgggcttgcttgcgcaaatataaagaaaacataccgtttgggcctatttggatttaaattttatcactatgggctattgattcatggaaggctggga

SEQ ID NO: 228063 - DNA, 368 bp, Glycine max
  unsure (1)..(368): unsure at all n locations
nganaggttgaacttgaatgcaacttatctgataatatcgtgttatatctaatatttacgtgtgtatttaggatctgaaccgtctccatgaggaggtacggcttatgagagaggatttgtgactctagattagagttagggtatttttggagggataaagttctaggaattggtggattgaattgaatttcgacaaatgtaaggaagttctgtagggtttaggtgatgttgtataaagaatcaagtaatggctaatattggttattaaggtgctggacatagtatatagcattagtgcattcagtgttaagacgtaataaagggattcttaatttattggcaatttgcattattctgtcttctatgca

SEQ ID NO: 228064 - DNA, 394 bp, Glycine max
  unsure (1)..(394): unsure at all n locations
accttaactagctatattgtgatccattacaaatagcttgcatagttttcttttctctgacaaattctaccctttattntccttaataaagatgattcggaatctactagctcttgattggaaggtatgcttgaagcatatttttcgtgaagttaactcttgtggagattgacttgtaaagaatgagctaatcatgaagatatgtttatgtccttgatgccttgtcctctctttctttaacctcccctattttttctgatgtaacgggagatcgggagttatgcacgttacgtgctacattcctattattatttntctgatgtataaaaaaagcatttgattagcctttgccaaaatacacacacactccacccccctaaaattctaatttaca

SEQ ID NO: 228065 - DNA, 346 bp, Glycine max
agcttagcgccagtcatgcgctgagcctagtttattatttccgctacgcttagcgcactaatctcgcactttgcgcatggccttgatattgatgctatgctagattcttctgttgcactgaagctgcgctaagcaatggatgcatgctgagcccaaatggtgagctgagtgcaactaccactttcagcactttaagatttagcctcatttaacttgaaattgaacagatttcatcattaaatccaatggaaaatattctacagacagctttaacaataaaacaagatttattttcaaattactacgaaaaaccttatttcggaaactatacagttttggaaatgtt

SEQ ID NO: 228066 - DNA, 159 bp, Glycine max
  unsure (1)..(159): unsure at all n locations
catgatggatacatgattagggacttgtccgtatcgatntgtgcaagaatgtgtgatagatgaggtgatttcggaatctgcacttatgcagaaagtatgctgcgaagatgggcatacaaacttagcgcaggcgcataaaaacccttgtgtggctggcct

SEQ ID NO: 228067 - DNA, 376 bp, Glycine max
  unsure (1)..(376): unsure at all n locations
agcttctagattntatttatttttcccagctttatatattttttataaatgaatagtgtattaaaagaggaaatggcgcaaaatagaaggatcaaatcctcaaaatttgtgggaagaaaaaatgcaaaaagaaattatgcctacaagcttactgtacacttacatgtaaataatataaaacaattgtataaacaaattatcattttaaagacaaacagcgctgaagccagtgggcattcatacatatttaattagaattgcaactaaatgagtgtctcacatgatatgtcaggatcctttcaaaaattctcaagctgtgtnttgagtttcccttcactttgaatcaacctatctgcagcctacacagagaatttca

SEQ ID NO: 228068 - DNA, 454 bp, Glycine max
  unsure (1)..(454): unsure at all n locations
tcacattctcaatgtcactatcaatgctatctgccacaccattatattgaattntcattgcaactngcatgccatccttcagacagcttggtgcacctaaattccatgaggaacctaattaagcaatactattatactaaaaagaagtgccccaatatagagttgcatgatattgctgttaggacatatgtaaaaaaattgtcttgctaagaattatcgaacataagaattcatatgtaagggaagaaactatagcaaaatttggcattcttataagaatgactcttatgttaggatgaatccaaagtgaattagacagtccaaagtcacctcagtctggctttatggaaagtatggatagcgggactgagttttaaagcgtcaacatatatttatttgtgactgattgaatgtgactaccacagcatgaagagctataactattataacttat

SEQ ID NO: 228069 - DNA, 373 bp, Glycine max
  unsure (1)..(373): unsure at all n locations
agcttaggaacccanactttttagcttcaatgtattattacatactcatgactaggaaccaaaaatttggttttatgaatagaaaagcatgaaaatagggacttgcttgtaagaatttgggctgccccatgattggtactttgcacctaagtaacgtgggaaatgcttttcaatggtgtgtagatatatgtgtaaatataaggggcataaaattcctcgccaagtatgaataattgttttcctaaatgaatgtatgatagcgtggaatgcccttttgaatgcaaatatgtgcaggatgtaattagctttccaatatgcatataaataaatatgagtgaaacaataaaaatttgtatggtgtacttccaatgta

SEQ ID NO: 228070 - DNA, 466 bp, Glycine max
tctatagaaggttcgtccctaatttctctacaatagcatcatctctcaatgagctagtgaagaagaatgtggcatttacctgggtgaaaaacaagagcaagccttttctttgctcaaagaaaagcttactaaggcacctgttctagctcttcctgacttttctaaaacttttgagctagaatgtgatgcctctggagtgggagttggagcttttttgttacaaggtgggcatcctattgcttattttagtgaaaaacttcatggtgccacccttaactaccccacctatgataaagagatttatgccttaataagagcactccgaacttgggaacattaccttgtttccaagggaattttcattcatagtgatcatcaatcacttaagttcattagagggcacaggcacgttaacaaaatgcatgcacaatgggtagagtacctaaagcaattccatatgttatca

SEQ ID NO: 228071 - DNA, 444 bp, Glycine max
  unsure (1)..(444): unsure at all n locations
agcttgcanaatgaacaaacaccatctatattctattttttctcataaaaaaatgaagatcctttccttctattctttaaagcaaataatgtttataacctcaagtaacatttcaagctcttccacatcattttcatctaaacaaacagttgctaaacttgctctagatatctttgatcctatggtgggggaggcagcaaaccaatttgcagcacctgatccactaaccggtgatgctgaaccagcctttcttgacaggtacaggtcagccatatcatcatcatcatccaacaattgttcaagctcatctctgactagtaccagataacaagaacttgtgatgggagagggaaaatggatatatgttattttctatttaaaactgatcaaggcaggttacattcacattanacttctattaaaagaagaatcatatatttcata

SEQ ID NO: 228072 - DNA, 365 bp, Glycine max
  unsure (1)..(365): unsure at all n locations
ttctgcanggaagctaagtgtgaagtatgcaattctgcatatgattggcgctgcaaactgggtacccaccaatcacactccactgttgccacaggtttgggtaaatttctgtatgctgttggaaccaagtccaaatttaattttggaaactatatttttgatcaaactgttaagcattcagaatcttttgcagtcaaattacccattgccttccctactgtattgtgtggcattatgttgagtcaacatcccaatatcttaaacaacattgactctgtgatgaagagagaatctcctctatccctgcattacaaactgtttgaggggacacatgttccagacattgtctcgacatcanggaaagc

SEQ ID NO: 228073 - DNA, 369 bp, Glycine max
  unsure (1)..(369): unsure at all n locations
tccattactntagttcttaaatagataaaaaaaaaatactttatttcctaactttatataatggcatttacactatcctttctgtacaaaatgatagtagaaaatgaagtgaaaacccactaaaatgaatgattttatgcaacgttatgactaaagcaaggcctttactttctgtacgcccatggctgctccctgtacgccccaatcttgtcaatatcccaacattacccttttgttatatttacctttcctttcttgaacctttatccagaatagctctgtcatccttcacacaacagaatatcatttcaaaccaaggttgtgtcacgtgaatcttttctagctccatcaatattccgcatacaactg

SEQ ID NO: 228074 - DNA, 362 bp, Glycine max
  unsure (1)..(362): unsure at all n locations
agcttgtatcgtcgctcagatcttgacttgttatatttctctgaataaaatgagtttgtcccatgtttttactccaaaagtcagtgcgaatcaaatcactcccgcattntatctctagcatgcattcattattctttacctactcctcacatttggttgtttaggaaaaacaccataactaaacgcgccccatggcatccctatcgcaccagatccaaatcttgaacgatgggtgatcaagaggagacacatgaacagatgaaagccgacatgtctgtcttgaaagaacaaatggcttccatgatgaacgccatcgtaggaatgaggcaactcatggagaaaaatgtggccactgctgccgc

SEQ ID NO: 228075 - DNA, 431 bp, Glycine max
  unsure (1)..(431): unsure at all n locations
tgtaatcgattacacacatactgtaatcgattaccatagggtattttcagaanatattctcaacagtcacatcttctgtgtggttcttgaatggctatcaaaggcctatatatatgtgacttgagacacgaatttgacaagagtttttcaaaacaaaaaggtcttatcctcttataaagcaaaataattttatcctcttaaaaattccttggccaaaactcttgtgattcaataacgaattatttgagtgctcaaattgttcaatctatctctttatagagagatttcttcttctcttcttcttcattctgaaaagggattaagagaccgagggtctcttgttgtgaaaggattctaaacacaaaggaaggattgtccttgtatgcttagaacttgtaaaacgaatttacaagatagtggaactctcaagc

SEQ ID NO: 228076 - DNA, 429 bp, Glycine max
  unsure (1)..(429): unsure at all n locations
cggttntgcgcaatagcactccacctgacgtccgcatagtcttctgacccncgcgacatatctccaggtaccactcgtggtcaacaaataaaagtatgaagactgactcttccatgctttctcacaccaagcttattggattatggggcacccgtcatacgcggtactaggtggcgatcgggcgatggcacaaatcaactatcccatttccacaagtcaggcataagcacaccatccccagttgcccacctttaaatttagctcacgtgcacgcacgtagccttttcctcgtttatctagcccgggtcctcgcaaccccgccaagctttcacaatatccaacaattcaattccatttgtcatgaaactaccctaaaccaagaaaacagagtggaggcagataactttgcacaagattattcgaattcac

SEQ ID NO: 228077 - DNA, 297 bp, Glycine max
  unsure (1)..(297): unsure at all n locations
ctcaagcttacaaagcacaaaaataatgatgtaggaaacctatattagttttttacgcggcatacacaggcccaaagttgcagggatcaaaactggtagaaataaacactcgcggctgcataccattaaagcctatgactntgttctcagaggaataaagcctataatctacacgctactatatcacctaccgctactccgcatgnagcagcaaaaaaaacaaaagccatcgctataaagtcacagactctaaacacaaacagtcacgtcttgaaaataacgaccaaacatcccata

SEQ ID NO: 228078 - DNA, 382 bp, Glycine max
ccggaccttaagcaccgcagctgcagcttgcatgatgacctttacttttttacttataattatttacaagcttatcctagtcagttgatcagattcatagaacttattgtgtgttcttctgatttaagaattattgcaacatattggtttcaagattcagattctttccttatttaactaagctgtttatttcctgtaattagtgtatatcctgatttctagggaccagatttagatccttaaattgtgggtgaagatacccaaaacgaaaacacctgtacatattatagcttccttttaccaacaaggtctaacacaattggtagatagttgatatacagagtatgttgacacggattcaattttctttgcatgtatatgg

SEQ ID NO: 228079 - DNA, 460 bp, Glycine max
  unsure (1)..(460): unsure at all n locations
ctatacaagggagcaaaagatacaagtatcattcaatgtattctatttggtcaaaatagcttgtgtctatacaattatggccttcatcatgttctgagttatacaaatcattctagaattcagagatttatgcaaagatcattattcacagttagtcattcactcacagagtaaggtcacactctcaccggtttttggttcaagcttttctttcacaatcagtctatctagtgactaaccattctattataagttcacactcttgttctttctttgttcaacatgcacatttgctcaaattcatgaaaggaaacacacatctcatcttaagcatgcattcaatttanaacaaggcatacaaccatnttcacaaaataaataaactacttcactgccataccatcaaaagttcggttaaactgttcacgatgcttcaagatgagcaactatactactcatg

SEQ ID NO: 228080 - DNA, 421 bp, Glycine max
  unsure (1)..(421): unsure at all n locations
agctnggaggggttgatggcgatcctttgtttttaggaacgatgataacggctacaatggaatacgtgagctcagttgaaggtgggcaactggggatggtgggttcatgtttgattcgtggatgtgggagagttgatttgcaccatcgcccgatcgccacctagtaccacatatgacgggtaccccataatccaacaagcttgatgtgagaaagtgtggaagagtcagtcttcctacttttgtttgttgaccatagagcggacctgaagatatgtctcgggggtcacgagaccttggggatgttctgtggggtgctattggcccaaaccaagcttgaccaatcccgacttaccccggcttgtcagtcgtgagacctttacgacctaacagggagctttgccgtaaccatataaaacaaaac

SEQ ID NO: 228081 - DNA, 411 bp, Glycine max
tcggaagaaagtgatgaggtacaagccctataggcttagcttgaaagagcctgcgtagtcgaagagaagtcaagtccatagccatcaaagtctgaaaagagtatgatgaactaagggatgtcaatatggccaccgatgaagccttggaatgagaaaccaagaaggcacaaaaggaagaacacgaccaaagcaaagttttgaggggctttatagggcagcaatagtgagctcaagcttcgaagaggtgaaaggaatcatcacgggtcaaaggcatgatcttgaaggacgagctaaaggtttgccttatgtcgaaaagacatttgtcccaacagttaagcgagactgaagggaatatgtgggccatcatcgataagtgcaaagagaagctaaatctagccgcgactcacgagc

SEQ ID NO: 228082 - DNA, 376 bp, Glycine max
agcttcttccacacaaatatatactgtttcgttgtacacaagaagcaagatgtgatacatacaatgataatagtgggaggcaaattgatgttgatcctacgttggagagttcacatcgatataagcaattatgtccaatgcttatgagattggccgatgaggcatttgactatccataagcatattttttagtttatcaagggatgttagagcttaacaagaaagtggctgaaattcgattgaaccaaccaccacatggtccttgtgattccacgtgtgaagccacaaggtatgctatggagccttcgacatccaaaggaattgtatttaataagagagattgttaaaggatgaaaaaaataaccatttgagttta

SEQ ID NO: 228083 - DNA, 456 bp, Glycine max
tgcactggtaacaagggaagcagagaaatctccacctagtatttttggagtacttgtcagtaagctctttacatctcgcacaagagcctccaacttatctatctcctctgtggagctatccaggttcctgttcaactgtttaatcttttgtactcgagaagataaagagtcgaaggtttctctgcttctttcgagggtgggtcggaactcgtaaccgctgcgaatgatttcaagagcccctttcaacaactctcccgcagcagctccagcgaacggctctgccatcactactcacacacacccgtggaatgaaatgaaagcacacgaataatatgtactactcacaagacacaccaaacccgccgtttttccgtgacgatgactacgctattttcttttaactcgcataatcaaaacataaaaagcttattttattctcttctatatacactaata

SEQ ID NO: 228084 - DNA, 350 bp, Glycine max
  unsure (1)..(350): unsure at all n locations
cgcagcttgtacaaatgtgataacccgcggattcttatttctgtggtnaacacatctgccaatcgatcacaagaatgaacacatcttatgatgatgtcacctgactcaattgtctgtctaatataatgacagtccacttcaatgtgtttggctctttcataaaacacatgatttgatgcaatactatatggcatcataggaactaactgattttccaaggaaaacgttatgaaccttgtaaagccatggactatgctatctatctaactccggcttggataaaggctaacgataaagatttagttctagtttcaccctcgggccttataatattcactttcttgctaatg

SEQ ID NO: 228085 - DNA, 434 bp, Glycine max
  unsure (1)..(434): unsure at all n locations
tgtagtgcgcacttnnctttgttgttcgaagactatcacagtcgactttatcatccacagacaagcnagtccgatggtatcgagacgatgatggtcgtccgtttctaatcatttggagattttccagcctctattgtcatccagagacagtcaagtcttttgctatttggaacacaatcaagtctgatggcatgcagagacaaatacatttgtctacttccctggtcgagagactcaatgtctgttgaccaaggctactggagtctcccctgctatcccaagacaagcgagtttgatagcatgcggaggtcatcacggctatgcatttctgtaatcgctatcaaggcaccaacgcttttgctgatgcacctgatgtcttttatgctctattctttgacaagttccgttgattgagctatggtccgacaggtgga

SEQ ID NO: 228086 - DNA, 448 bp, Glycine max
  unsure (1)..(448): unsure at all n locations
ctcagctctattaagctgaccatttatcaataaccaagttgtttttattatanaattagagcttatctcttttatcttatgagagtgattctcctaaattcttgagtgattcaagaacaccctgtctgtatcaaaggactttcacaacctttgtgtgttgccctcgctagaaagagtgattctttccttcctttcatcttcacccttgttctttcaaaccacacattcagaaaattcacctctgcccagaattatctcgtggccataactcccattttacgcactcaaattaagtgattcttgagcctacaatgaatttcaaaacgagacctttcancctcgtttggaatcacctcatttggagccctgtagctttagctatttccatttctatatttctgtccagcccccactaacctacattttaccatcccattcatcccattta

SEQ ID NO: 228087 - DNA, 449 bp, Glycine max
  unsure (1)..(449): unsure at all n locations
ctccccccccgcctggccatgaatcatcattacgtgacctatcatactcaactntacagaaaaatactaactntcgcctcttgagtctcgtcttctatctttctattatatgtaatctgctttcatttcaccttgcttactaccacgttattcttataactttaatcttcccctcccttctgctgtttctaataataacggatatgtcatcagattattttccacagccgaattccttgcatagtatcactttgaaatttcgctagcaactacaacggcgcttataaaggatggaaaaatctatttgactactgttgcgcatccccttctaaagaatcgcctgtacccctacctgtctttctgccaattgcacccttgtaagctggacccagtgacgaatattctgaattaatgatctacttcccaagtccttacctgactctctactt

SEQ ID NO: 228088 - DNA, 307 bp, Glycine max
tgaacctatccaaaccaagagaacagggcagaagcagaaaactctggccaaaacacataccaataccacagctgtccttactcaaaaaccctagaaacattctctttgtgccaattgcgtcaccgagggaaagacacaaaaattttactggaggtccctaagacataagcctacattttgaccattgggatctgctagaaaacgttcaaaacccaataagacaacgctagccacaacacagcatgcaaaagcattttctgcaccagcacaaaaagctcgcacacattacaacagccaaattctgcaa

SEQ ID NO: 228089 - DNA, 279 bp, Glycine max
actcaagctgtaagaactacaaaaatcagaacaagctcgccgatttcttttgcggatgaatccactccacaaggttgattgaggagaccttcatcctatacgcaacgtggcggacaaatgtgggctgttaacttgaatggtcattattgtcaatgcggaagggattctgcgcttcactaatcatgttcacacattattgcagcttgcggttacgtgagcatgaactaatacaaatatatagatggtgtttacaccaatgaacacttttaaaagcttact

SEQ ID NO: 228090 - DNA, 305 bp, Glycine max
acgagcggaagccagaaaacgaaggcacagcgcgcacaacccaaaaaaaaaagaaatcctcaccgaccgcccgaaacggacgatccgcaaccaggcaaaaggaaaacaaccgcgcggacgggcccaaaccacgggggaaaaaaaaaacaagagggaaacaagacgaccaaaaaaaaaacaaccccgtggcaaaacaaagcgaaaaaccaacccgacgcccgcgcgcgggaatcccacccaaagtggacgacaaaaaaccaagtgaaataaggccaaacgaacccccacgcaacccgccacaaaaa

SEQ ID NO: 228091 - DNA, 404 bp, Glycine max
  unsure (1)..(404): unsure at all n locations
ntcaacanatgtcttcacaaataatcatcacacagcaganactctagtctgactacccatcatatctccccaaaccccataccacgaaaattaaaggagaaagaagtccacccaaacttgaattttcgaagtcccactcgtagccacgcacttcacgaccccgaaaatgccctcctttcgcgatttgnggcagaaatgatggccaaaggttgaagctttgctcggagcttcaatggagaatgaagaagaagaaaatggcaacgtgagggagagagagagctgtctgaaaagtgtgggggctgagtgaagagagagaanagctctttttgcgtttaaataaaagggttctctctttttctaattatttatttgagcaatgccacatgtctccatttgagtggagc

SEQ ID NO: 228092 - DNA, 378 bp, Glycine max
  unsure (1)..(378): unsure at all n locations
agcttcagctctcagcccanaactattttcataatttttgattgcaggcctcaataggcggccttgttcgtgctcgtgcgcttatcgcaattctgaaccacgtagcgcacattaatgaatctcggcttaccgcgtgcttttgtcgcccaacagatggacttgaatccgatgctgcttactcgagataaaagcggtgtgcttagcaaacctgtacagctcatctttttccagactctttctcgcgcttagacaatgagtgttgcgcttagcggacgctcgctaagccagcagattggtctaacgagatagtgaaaaatatcacttttttcagtcgctaattaccttatattgagagaagatgatattcatccccacaat

SEQ ID NO: 228093 - DNA, 490 bp, Glycine max
  unsure (1)..(490): unsure at all n locations
acctataaaactaagctgaattttgcttcttctctctgatacctgcacattttttatatcattcatttcagccatacatatataaccacagcagcttccacaattgagtgaaaggcacaaagaagcactagttaaaaataaacactagttaaaaatttgagtgaaaggcacaaagaagccacagcagcttccactaaagttagacaatgaaatacctcaagctttcttgacctggcctctgctttagcatnttcgaggtttacccaagcttggattcttgcttcttctctctgatacctgcaacaactcacaataaacactagttaaaaatttgagtgaaaggcacaaagaagccacaacagctttcactaaagttagacaaaaactacaaaaccaatgttaagcaaggaaggatagaagactngaatctatccagaanataatttgttgtataaaccanatcaagccagcttaatgattctattagcac

SEQ ID NO: 228094 - DNA, 390 bp, Glycine max
  unsure (1)..(390): unsure at all n locations
atcaaactctgcctacaaacagctcccttcctgcacattgcacctttcctgccactgccatatgctaaagataccataccataatttcttaaacacactttntatttcttttcttttttcacatttgcttcttattgcgagaatcttcaccatatatacaactcttaacactcacactaagatgatgatgcacacatatagttgtcctttctaacatgatgatcctacaatttaaactcttaatattataaatatagttggtcagctcgcctcttacatactgatgataaacatatagtcttacactattaataacgtatattctttacataaaactagaccaccaacacattttattattagcctacttctttaccccacatattacga

SEQ ID NO: 228095 - DNA, 362 bp, Glycine max
  unsure (1)..(362): unsure at all n locations
taggaacccaaactcgtagcttcaatgcaaggaaatatgcttattgttaggaatccanacatctggtttagagttaaacaacctgacaatcaggatttgcttcgagagttttgctcgaatttgggctgccccatgtttgatacttcacatagaagcagcgtggaaaataccttgcaatagcgtgtatacatacgtcaatataaggagtatgaaattcctagcacagtgtgaatgaatgtatgataccatggaatgcccttctgaatgaaaatgtgtgcacgatgtaattagctctccgatatgcatataaataaatatgagagaaacaataaaaatttgtatggcgtacttcaaatgtatgt

SEQ ID NO: 228096 - DNA, 376 bp, Glycine max
  unsure (1)..(376): unsure at all n locations
ctcaaatatngccacccaccatacttacaaatgactttttattattcatcaacaccattcatcatcctccatttccgttagatacaagtgccttattagacaatgaaatgtcttttatccctagtccctctttgtcctttgggagcccatttgagaaatcttcctatctccatgataaaatatttgattttgtatttgctcttaataaattcttgctttgagatgagtcttcaataaaataataattttatttatggtccttaacacttaattatagtccctaataaattactaaactctgtatttgctccatgataaatattttccatttcgtattaatacaacttaaatatattttcgatccctaataaatatt

SEQ ID NO: 228097 - DNA, 326 bp, Glycine max
  unsure (1)..(326): unsure at all n locations
agctagcacaatgctgcgtgagagaatatatattttttcgtcgaccatggtacttcgacacccagcggttcgcagagtataaggagtatccacacggggcttctgacaatgacaagaggacattgcgaagggtggcaactaatttctttttaagcggaggtgtcctatacaaacgaaatcatgatacggttgtgctccgatgggtacacaccaataaagcccagcgaatgctcatggagggacatgaaaagggcctttggaagcaagcctaatgtgccttgtcatggcgtaggaagattntaatggcggactatcactggctcacc

SEQ ID NO: 228098 - DNA, 471 bp, Glycine max
  unsure (1)..(471): unsure at all n locations
ntcgtaggtgaaatcaggtgcagccatttcccttatattcttcttacggcgtggaggttgtgtcatgttctcagatgtgcaaaatcagaatgctcagaatcagaatgctcaaaattataatgctcaagatcaggatgttcaaaatcaccaataacagaatgcacagattcaccagtaatggaatgctcagaatgatcaaaaggtataaaatgatgcctaactaatctatgaaatgtcctatctatctcacgatcaaagggttgtaagtcagatggattgcctctagtcatacactacattcagcatgcacacaactagttgccttgtcatgtaaataaaggtgtaggtttgaactacagctactctcaaatgatatccaaatgacttgaaattttgtgagcaaccttactaaatgatgagaagatagcacacaaaaattcagaccaaaattcacagtctaactatgaaagc

SEQ ID NO: 228099 - DNA, 338 bp, Glycine max
  unsure (1)..(338): unsure at all n locations
agcttccttggggccatatcctaaatagactttatttntgggaaggttagttctccaagaaatgctaccttcaaaacaaagacggcatgcaacctccttcaataaacacaaacatcaatgtaaatttaaagcaactcatgcacatatttccttacgcacaagatattctgctaactaaaaattgcactcatgcacaatcaaggcatctttgttacctagatcacgtatctgcacttccaaggagtatttactacctaaatcacatgcatttcctttgctaaatttacatacatgcatactcaaggtatttgggtccaaaaattgcacacatgcacatt

SEQ ID NO: 228100 - DNA, 145 bp, Glycine max
gggagaggttggtaggaggggttataaaagaaattagatagatagtatacatgataaagtatatcgtaacaaaatgttgaataaaaagaagaatgaaaaaaaatttataaaatttgataggaatatatggtaaaattaggagaag

SEQ ID NO: 228101 - DNA, 350 bp, Glycine max
  unsure (1)..(350): unsure at all n locations
agcttgccacctagctggcccaggctatcnatggtgcttcctccagaagcaaccgncttgtggaggaatattctggaaggcccaagtgggcctggttgctatttgcacccccatttttactaagtacaccccctacctctttttggagattctttttctgtaacgttactaaactttatgaatttcgtaacgacgcttgttttctttccgtattgttacgaaaccttacggactacgtaatcaacccctatttggtttccgggatgtcacgaaactttacggattgcgcactaacacttccttttaatatctggcatgtcatataactatacggaatgtgctacaatgct

SEQ ID NO: 228102 - DNA, 429 bp, Glycine max
  unsure (1)..(429): unsure at all n locations
tgccacccagctcacccaagcgagcaagggntgcttctctctataagcaacaaccttctggaggaatcttctggcggcccaagtgggcctgcgtgctatttgcacccccatttttactaaatacaccccctgcccttttttggtgattctattttcgtacagttacggaaacttacgaatttcgtaacgatacttgttttctttctgcaatgttatggaaccttgcggattacataatcatcccctttttgacttaccgaatgttacggaacttcactaattgtgcaacgatgcttccttttgatttccggtgtgtcacggaaccttacggattgtgcatcaatatnttctcttgaatttttgcacgtcacggaatttcacaaatcgcctaatgatcggtgcaagcacctcacaatgaccaaaaacaag

SEQ ID NO: 228103 - DNA, 310 bp, Glycine max
tgatcatgcatgaggatcttcttttattatttttgatcttgcacagactcatatccctctttcatttccacctagagaaattcccacacaaaaagatggatgaagtggataacgaaatcttggagactctcaggaaagtagaggtgaacattcctctgctagatgccatccagcaaattccatgttggcagaagtcatatacttccgactggcttatgaggacaggttgaggaaccctcctcttctttcctaccctagttctcccactgttcacccccacccacattatgttgaagccttacctgcaaac

SEQ ID NO: 228104 - DNA, 454 bp, Glycine max
  unsure (1)..(454): unsure at all n locations
ataagctcnttgctttgaataccttattaaattctttaacatttcaaggatgcaattctttatggaaagatcaagacattaccctagaataagtccagacctcaataaggaccaaggagatgcaaaaacagcaagactccaaatctgaggataatggtgaaagcctgaatatttcaaggggaacgagtgaaaagaagggaacaagacgaaagacgtccatatcaaggtcaatggattcaaagaatggccagaaaacaaagttcacatgctntaattgtcacaaaactggtcacttcaagaaagactgcccagacaagatcaagaaaggatctttgagctctactgacatagttgaaccctctgaacggtatgagagtagaagtgttntcgtagcctcctataccatagcacacacaacatggattatggattctggatgctcatatcacaacag

SEQ ID NO: 228105 - DNA, 247 bp, Glycine max
aaagactccgcccaaagccatccggcccaacgagcccaaggcacacaccgccaggggggagcggcggcagcaggaaacaccagcaaccactcgaaacccgaaaacccccaaaagaaaggacccatcatcacagggcgccccacccacagaacaaggacaaaaagcccccccaacaagatcaggacaaccaaacggaacccatcccacaaaagggacctccaccaacaaacaggcgcctgcaacccca

SEQ ID NO: 228106 - DNA, 438 bp, Glycine max
  unsure (1)..(438): unsure at all n locations
ctttcataaacatganaatggctctgtgcatgataagttggatctaactttntgagtactagctttctgagcacaacatnttagtattgtcgtcagcacaataactctctaaatgttgaatcatcattatgtaatttgtgttttcataacaactaagagatgcatttatctatgtaatgatcttctaaacatgagcaaatgcacattgacattaggttctcataatcatatcaaatgtttaataatgagtgttgtgattaaccacgtagaaagtcgaactctctaagtgtttgaacctttgtatcaagacttttcgaacaccaaggtaatcttgagtaaaagttcagaaaggctaaagtttcaagaaaagttgacacagtcacaatttcatacccctctcttgtgacattctgatcacttcaacatagatgatatata

SEQ ID NO: 228107 - DNA, 432 bp, Glycine max
  unsure (1)..(432): unsure at all n locations
cgaagtgagagagtgtggaagagtcagtcttcctactttnattctgtgaccacacagtggtacctgtagatatgtcaggaggtcaggagaccttgtggacgtgaggtggggtgctattgtccataaccaagcttgaccaatcccgacccaactcgagcatagtcagtcagtgagaacctgtgacgtacctaaacaggcaagcacctgtcagtctaccgattaaagaacaaagaccacaaagcatggacgcttgtgtggaggctggtcagctatggatcttgagtgataattgcaatatggcctttggtaatcgattacaaaagggtgtgtaatctattacaatgcttaagaatggtgtcaggaagttgagatggtctcttgtaatagataccatggagtgtaatcgagtaccaggcttataatagagacagt

SEQ ID NO: 228108 - DNA, 70 bp, Glycine max
cgagcgcagccaaaaaaaacccaatattccgcacgagagacaacccacacacaaaggcgcaaccggacaa

SEQ ID NO: 228109 - DNA, 448 bp, Glycine max
  unsure (1)..(448): unsure at all n locations
gctcgattcatttatttaagaattanatatgttgctgattcatttttattattgtgnaactttgttcattagatagagaatttctgcttctgtcgatatacagttacgctgttcaatctaaaagtttggttttggattatctactgtcattttccatattaaaaatttaaaatcagaaaagaattagaatggtaaaatttaattcaatttcatgtagaggaacaatgctttaaagctttaccagcaatacataaaatcagcaagtgagaacattcggaaaattatctcttgtgaatggtcacaagaactgcgattaaaggttctgagttttgccggccgctaaatgagtctttgccagtctgctataagtctgtaacagatgtactggccattcatgtgacccatatagagagaaaaatgtgcgctacaatgagctttggtgtctata

SEQ ID NO: 228110 - DNA, 353 bp, Glycine max
agcttgtgcatacatataatgtccaattgctttttatctttaactatatacaaattaaatcattctaatataatataagaaataaaaaaatctttacttttagtatagacatgctgtaaaaatatttgctttagtatgataatatactttaaacttgcttggttttaaataaatataaattttgttcttggttgttatagtatgaatatccttagaaacatatacccgcataccaacatatatatatatatataatataatactataagaatttataagatgtaacctaaaatccatgtaaaacacgcgtgattatattaaaacataaatatcaacggcttgcattatgattt

SEQ ID NO: 228111 - DNA, 264 bp, Glycine max
  unsure (1)..(264): unsure at all n locations
aaattgagaaaanaatttaaaataanntttaatagataatntgatataaaanatattaaatttatttttattaaagataatataaaaaagaaaaaaagttaaagagtataaggttaaaaatggattatttattattgattaaattaatttttttatggaaaatagaagttgtttgnaatgagtgattgaaagnagataaaagaaaagaaaaaagaaagttgagggaagtatttggtatgggatgggtaagtggaaaaaaataat

SEQ ID NO: 228112 - DNA, 401 bp, Glycine max
agctttttctggaattttcactcgtaatcttttatatgtttctggtaatcgattacacagttatatttttaagggtcatgacttttgaatttgaatttcaagagttttattgctggtaatcgattacaaacatctggtaatcgattacaggttcaaaaattcaaattcaaaaccctttttaacagctatttttcaaaattgtcttctggtaatcgattacactgcctggtaatcgattaccagagccttggatgtcttggaaacactttgttttgaggcaaggcttgatcttgagttaatcttgaagcaaggctctcgtttgtgatacaaccttgcattaatcctgaagcaatgcttatcctttgaagccaccttgtgtgattttcttttgcatcatcaaa

SEQ ID NO: 228113 - DNA, 447 bp, Glycine max
  unsure (1)..(447): unsure at all n locations
tctcaaggaagttntctcaagagagcttctcaggatgctttctagtctataaatagaaatatgtgtaacacttgtttaactctgatgaatgagagtcttgtgagacatacttcanagttccacttctctccctcttttattccttcaatttcgtgcttccccctctctctntctctccctctttcttttcctccattgaagcatccttccaagcttcttatccaaggctcatcttggtggtgaagctccttcttccatggcttattccctagtggatggcgcctcctctcacctcttctcctttgtcttccgctacatctccatggtggaaaatcaccattaaaggacctcattgaagctcanagatccagcctncatagaagccccacaagcaagcttccattcacctcggtttctttaacagcgtgggacaccctctttagcaca

SEQ ID NO: 228114 - DNA, 353 bp, Glycine max
  unsure (1)..(353): unsure at all n locations
agctntataagtgtgggtctgggagactttatgtctttggtcgcgatatacgaagatgatgttccgagtacattagatttggtacgaccatgccctcctgatttccagctgggaaattggcgagtggaggaacgccccggcatttacgcaacgagcataatgtaaacctttacggttttaaaagctctatagttgggcctaggctttaaagtttttccttttgtaaggctttgtgtcttttgttgttgaatctataatacaaggatctttcttcatctgttcctacgtctctacccattctcattcatttgcatggttacttctttttttgaaatggcagatacgatgacgag

SEQ ID NO: 228115 - DNA, 310 bp, Glycine max
  unsure (1)..(310): unsure at all n locations
ttacggacacttgatactcagctgaaggagnagtgtgaagagcagtcttctctcntatctgtgaccacagagggtcctgtagaattcacgagagtaagagaccttgtggacgtcaggtggggtgctattgcccaaaaccaagctcgaccaatccctacccaactcgagcatagtcagtcagtgagaacctgtgacgtacctaaacaggcaagcacctggcactctaccgactaaagaacaaagaccacacagcatggaggcttgtgtggaggctggccatctatggatcttgagagataattggaatatg

SEQ ID NO: 228116 - DNA, 447 bp, Glycine max
  unsure (1)..(447): unsure at all n locations
agctntgatcctcataaatatgaaaggtatatatttctcatatccggcgaattttgatatagtgaagaagatttatgcttgagaaaaaagctcgctagattgaaaacccaaaagggctatttatgcaaaagttagagcttaaaaaattatgttgaaaacccgagagggcgatctatgaaaagttggagtaacctgccaagttgataggagcatcttgagaaggaagacgtggaaaaagacattatggcaaatgtgtgttaaaaatcatttttctcttaagtctattgtcgaccaatcaaaggtactaacatgtgtactaacattaatattcggaaagcgtcacttcatcaacaanagcatccacttatgttgtcattctctaaaactattggacataataattatttttcttttctttggtgagatatccttaaactatttcaccta

SEQ ID NO: 228117 - DNA, 387 bp, Glycine max
  unsure (1)..(387): unsure at all n locations
tgatagcacgcagagactaatgtcgtcttctgcgctctttgtattcgcggccgacaagcccgttgacacgtggaatttacgtcttcttccacgctcacaagatctgtcatactgacttttgagtcacgctgacgggcggaaatacccgagtggttatccgtataaacgttttgctgtctgtaagacgaatagcctgatagcacgcagagactaacgtcgtcttctgtgccctttgtcaatcgcggccgacaagcccgttgacacgcggagatntacgtcatcttccgcgctcacaagatctttcatactgacttttgagtcacgctgacgggcggaaatacccgagtggttattgtggcgttcctaaattaatgactgtgttaatag

SEQ ID NO: 228118 - DNA, 294 bp, Glycine max
ttatgggaggagcgcatacgccactttcgctttaagagtaaagtcccaccggtaaaactaactctccaaatgctcgccttcgcaggaatggcccccacgaagcttgcctcaaagaggtccaggaacgacaaagcggccgaaggaacaagttcccgccccggagcacgacagtcaccgctttaagagcattgtgcaccagcagcgcttccaagccactaagggatggtcgtttctccgggagcgacgcgtccagctcaaggacgaccagtatactgatttccaggaagaaaaggg

SEQ ID NO: 228119 - DNA, 438 bp, Glycine max
  unsure (1)..(438): unsure at all n locations
ntaaggactcattctntaactgccaacagagtgaaattcatttttgctaagcccagcttagagtatcttggcacatcattcctgattctggggtggcagcagataaatccaaggtggcagcaatgagttcctggccagttcctaaagattctgaagagtttgaagggggttttacgactgacaggctactatagaagatttgtccaaggctatggtaaaatagcacagcctttgattgaattactgaaaaaggatagctttgtatggacaccagaagctactctagctcttgaaactttaaaatctgccatggtcagtttgcctttattagcaacaacaacaacaacaacaacgccttatcccactaggtggcgtcggctacatggatcaacttccgccataatgttctatcaagtaccatacttctatcctaatcat

SEQ ID NO: 228120 - DNA, 351 bp, Glycine max
agcttctagcacacgccagatattttctttttatcccaacggttaaatcatggtaaagtgtcttgtgaagttgcaaaccaaatttcgagaagatccaacggttaacgaaggctgggcaacgtttctaccgaggcagcttcatgtagttttctctagaagcttccctccagaagcttcattaagaggcttctagcacactccagacatctttcaaagatcccaacggtcagatcctggaaaggtgttttttgaagttgcagaccaaatttcgagaagatccaacggttaatgaaggctgggcagcgtttttaccgaggcagcttcatgtagctttctctaaaagcttcatta

SEQ ID NO: 228121 - DNA, 381 bp, Glycine max
  unsure (1)..(381): unsure at all n locations
tagacctagaggggatggaccttttcaggttttggatatgtataataacaatgcctataggttggacctcccaaagagtatggagtcagcaccacttttaacatttctgatttaactccttttgctggtggagctgatattgaggatgaggaactaatagatttgaggtcaaatcctcttcaaggggaaggggatgatgcaatcctccctatgaagggaccaatcactataaccatgagaaagaggctccaagaagattgggctagagctgctgaagaaagccctaaggttctcatgaaccttanggtagatttctgagcccatgggccaagggtgggtcccattatctttgtacatattagactacgattgcattatatt

SEQ ID NO: 228122 - DNA, 290 bp, Glycine max
atcactaacaaccacaccaagcaggtgcacacggataattcacataacactctcaacttaatccaaaataatcaagtaatgaaaaaatacaagaaatacctcagacatctaatttcaatcacaaaaaattagggcattacaagcaacatctcaccgaaactagggtgatttgaagacatcaattattatctggggatggaagtgcctcacgattcccaagaataacaaccgaccctagtgagggccgatgcaagagaaaatgcgctaagctggagaatcaagtcaaacat

SEQ ID NO: 228123 - DNA, 375 bp, Glycine max
  unsure (1)..(375): unsure at all n locations
gcaaacatgaaaacaaatggtatgcaatntgcagatcaaaaagttggttgaacgcatatgcatgatgatgccatgactcatgcaaaatgtgaggctggaatatgataacggacaaatgcaggatatgtccattatgatgttatgaagagatgcttatgcgatgcatgatatgaatgcattntacggacacgagagcccggaaaattatctcttcttacttgcgcatttgggggcgcagtgccccatgtgtacaattaagaaggtgatatggaccttccggcttcccgtgacaaaggacgagaccaacatacaatgcatgctagagataaaatgcgggagtgacttgattcgcacttgattttggagtaaaaacgt

SEQ ID NO: 228124 - DNA, 416 bp, Glycine max
  unsure (1)..(416): unsure at all n locations
ntaagcgcgaagtataaggaattctagaatctgctatcgggcttgcatctcccctggtccttatacgaactcactgaggtcttgggcctgtgtgtgttgcgttttgatctgttattgcctctgctatttgaagtcatgatttcctcttggttggaattattgtctgatgctgttatctgtgtgatatctggtattgctgttagtgtgttgctatcatctgcatggttnttttttatcggcgaanatatataaatatttcattatgtaaatagcgatgaagtaccagaggtactttgtacatagataggatcccatacatatggttccttagaaaaaactaatatagtttaattatgaaccatattatggctaatacatctgcataagcctcaataaaaatctaccctctagtgata

SEQ ID NO: 228125 - DNA, 298 bp, Glycine max
  unsure (1)..(298): unsure at all n locations
actatacanactcaagcttgtctcagcgtntatgcgagacagagaccaacatgttagccttcgttagcttgtaccacgaagaactaaatctagccacggccacaagcacagagtggcacaccagtatgcccgagtgtacgcagaatatgaggctagaggaatggtgatcgactctttacatcaagaggcatcaatgtggatggactgatttgctcttactttgaactggagtctacaacttcacgcgatgctagccaaggccaaagcaatggcgaacacctactccgtgctcaaggag

SEQ ID NO: 228126 - DNA, 291 bp, Glycine max
tctacttatgtggcagggcgggctctcttcactttcttgattatatttctagctttgaccactgctcttgcttctcgtgatctacttttcatatccgcctgagtgggcttatagcctaaaccatactctccacgatttcctttggcatttatcaggctagttatgccgcccgtgtctttgcctaaacccattccgggttcgtaaccgttccccaacataactcgggccatcattactgctgcatcggacaggcaacgctgcccagagaaagagtcacggaggaaatgctga

SEQ ID NO: 228127 - DNA, 454 bp, Glycine max
  unsure (1)..(454): unsure at all n locations
tggcactacagcagttaactgaacaaatgaagtgtccacagtcattttatggttgcctggtagacgtacatgttataaacaataagatttcctacgtgttaggtataattattaagaagaggcactatatatatagacttttatatataaagcttattagagttttaacacactctccactgttggtcctcaatttattgagaattataaaatcagaataatgactcatcatatgagtagttggacctgtaaaatttgtgattnttaagaaatttgagccaacaaaaaagagtgttcaagagaatgtgttagagacagtgttgctaccatttctctgtttacgaatggtgtttgtagttattagtgaaaatagaaatagaanatactttccttatgtcaaacaggcttctgattactattttagttttacaacattatgatagatcattatata

SEQ ID NO: 228128 - DNA, 278 bp, Glycine max
gcagcatgcaactgcccccactcgccagcgactttttgcttcccagaagccacgccttctggggaaccttctggaagccccaagggcctggttctaattgccccccattacaaaacaccccttactctttgcggatctcttcgaacgcacggaacttacgaaaacgaacgaacccggttcctccgaacgccgaccccacggacaccaaacaccctccttagctccgaaagggatgaaaccttacagcatgcgcataacacttccttttgactgccgac

SEQ ID NO: 228129 - DNA, 431 bp, Glycine max
  unsure (1)..(431): unsure at all n locations
tccacaacatacaagcaattcanaatccaaacatcatgaactatccaaaaccaagaaaatacggcagaggcagaaactctgcccaaaacacataccaataccacaactgtccttactcatataccccagtaacattgtcttcgttccaatttgttcaccgttggatcgactcgaaaattctactggaggtccctagtacataagtctacattttgaccgttgggatctgctacaaaacgtccataacccaatatgtacaaccctttccacaaccagcaatgcataagcattntctgcacaagcacaaaattatgctgcacattttaacagcaaaattctgcataatagtgcagaatttcgaaatcactcttgccttcttccaactttgcccanattggaccctacaagtcctaaatcaagtatagatcata

SEQ ID NO: 228130 - DNA, 513 bp, Glycine max
  unsure (1)..(513): unsure at all n locations
ttacggacctataaaactaagcttgatgcagtcttaattgatctttccattgcccagctttactaacatgctgctctattgcaatagaggacaagtttgaagggtcgagcctcaaaccctccccatatgccgagcatgcctcagtgaacctttctgatttaaaaagatcattaccacgcaatcgagctctagcaaccatcctcacattgttgagcaaaacagcaacttcaacgtttcgggggtcaatctgactagctttctcagcagttgtaactgcgttctcaaacctgcaacatatccatcatccattctcactgcaacggatacctcttccagattagatttctgacaaagcttacagtatatgaactcaccttccaaaagccatctcaatctgagctctaacgaagaagcaataagcctcacaaaacatcccagaaatcttgcctgtgatancgaaccacgatgtggcttgcttttggaatccatgatatacatgattcagcatcatta

SEQ ID NO: 228131 - DNA, 362 bp, Glycine max
  unsure (1)..(362): unsure at all n locations
agctccnacttatgaggcaaggcgggcttttttctctttcttgactccaacgcgagcctagaccaccgctcttccttcacacgatgctactctacatatccgcctgagggggcttatagcctacaccatacttcccacaatatccgttggcatttatcaagctagttatgccgccgtggacattgcctaaacccattccgggatcgaaccgcgccccaacataactcgggccatcattactgcggcatccgacaggcaacgctcgccacagaaggagcccacggaggaaatgccgaccacctcaaaagactggagagcgggtcctaacgactcttctggaggctccacataaggcataaaag

SEQ ID NO: 228132 - DNA, 374 bp, Glycine max
ttgacgaaacttcgctcaaaatcctcattgcaaacctctattcatacctttcaaagttagtgagaacgctaaaagaaaaattagggaacttagaaaaactaaatccttaattgaaggcgtaggtgacaaccatagtgaattactaaacaagattggtagtctacttaaagtcattccagataccccccaagcctcggaaaatactttcaaaatggtaacaagaagtacctccaaattaatcaatgttattaatgaagatagtgaccaaaacttatataacacaactgagatatgatcactgccacaaagaatataaatcaattatcttcaacactggaagaacgctctaattatatatcaacgtccactgccct

SEQ ID NO: 228133 - DNA, 239 bp, Glycine max
  unsure (1)..(239): unsure at all n locations
catgatanatgatctataaccatatggcctgcatagcttcgctttcctcactcaaacgctaggatccattgcatattataaccaatagcattcgggcgggagaacggctactccttgtaagaatgatgcccttctgacgcatggactctgctagagtaccactatctattgcttaggaaatagatgtactgaacacgactaacattgatgggtacagagctatgtagtaagtggactgc

SEQ ID NO: 228134 - DNA, 450 bp, Glycine max
  unsure (1)..(450): unsure at all n locations
tgccttggccctngatatatatgagggactcttggtttcttttattgacaaattccttgggataaaggtaggttgccatgttctcaaagcccgtactaaggcatacaactgcttatcataagttgaatagttaagagtaggaccacttaacttttcgctaaaataagcaattggatggccttcttgcatcaacacagccccaatcccaacatttgaagcatcacactcaatttcaaaagatatttgaaagtttggcaacgcatgtatgggatcattagttagctcttgcttaagaacattgaaagctacttcttgtttctctccccatttgaaaccaacatttttcttgagcacttcattgagaggtgctgccaatgtgctaacaatcttcacaaatcgtctataaaaactcgcttagccatgataacttctcaccttggtcacagactt

SEQ ID NO: 228135 - DNA, 326 bp, Glycine max
ggaccctaagcaccgagcagcaccactggggcttactaaataattatttggaaggagttctcagagagtccttaaacaaacgggtgcacctctccataaacaacataaggaataaagcaactatgcctattcctaacacaaatatctgtacaaaaatgcctcagccaacaagcatcttgtaccagaacacgactgcctccaagagattactaccaaacacatgcattcttgtaaatacaacagcatctcaggatttgctccaaaatgaccagcacatcggtttcaaaccaacatccaatttgcagaacttgcacccacatagggca

SEQ ID NO: 228136 - DNA, 433 bp, Glycine max
  unsure (1)..(433): unsure at all n locations
cgttggattatggggtacccgtcatatgtggtactatgtggttatcgggcgatggtgcaaatcaactctccacatccataaatcagacatgaacccaccatccctagttgcccaccttcaactgagctcacgtactcatacatagcccttatcctcgtcattctcagcaccaggtccccatcaacccctccaagcttgcacaatatccaaacaattcaattccagctatcatgaactaccctaaaccaagaaaacagggcagaggcagaaaactctgcccaaaacacattcacatattacacctttccttactcaaataccccaggaacattctcttcgttcggattcgttaaccgttggagcgacttgaanattttactggagggtactagtacacaaatctacattttgaccgctggtgattgctagaaaa

SEQ ID NO: 228137 - DNA, 440 bp, Glycine max
  unsure (1)..(440): unsure at all n locations
tatggggtaaacactctctgagtgattagaatacacttttctatcatacactcactggttgggaaagccagggtgacttagtgacaaatagtacatgggtcttaatctcacggagagattaaaagtaatgtaaggagtgacctcaagagtactcattgtatccacaagtgacatagagaatacttggttgtaatgaaagaattgattagcaaaacctttcaagtttctaagggaaactagacgtagtccaagatttgggacaaaccagtataaaatctctgtatctttttgctgcttatgtataacataacgctacataaacacaagactgcattctaacaccaaacccaacatccacctacaccaataattcccaaatgcacaanacaaagaatggggagatagagaacacaattatatgaacacaaacctgctataac

SEQ ID NO: 228138 - DNA, 406 bp, Glycine max
  unsure (1)..(406): unsure at all n locations
ctcagcttctntgtagacctcgatcggtcatctttccaggccgaggtttaccgtcanttttttcgatccatttcggtgaataatattctttgccgagatgggctaatgttttcctggccgaataaatgggaaaatgccagtttcggccgaaacgaatagtcggttgagctcgcacaaaaaaacctagccgacctacattttaaattttttatgcaacaccaaaacaagaaaacttcctgtgccgtaaaaaaaaaaaaaacattacatgacagcgagcgttttgaaaaacaaaattgcgcaacgtcggctgaaaaatatcagtcggggctttttcacgaccgatgtcggctattgagttttcaatcaatccgcgaaccgaaattgcatgatgtcggttacgaaatgt

SEQ ID NO: 228139 - DNA, 374 bp, Glycine max
ttaagacgactgcaggcatgcgagcttaaagtacgcccgagtcattcatccctatgattatgttgttgaagtattggccatcacgaatggcattccatggattatagggctgaaccaaactcatgcttttataaaaaggttcatcaaggctagtaggaatatggaagtaaccgtcttgcaaaatgggggcaaagatgaatcgagtacatcactggtctgctactgcaaacaaaataggattatcgaggccttggacttccaggtcactctgcaaagatgtcatgggacccgttgaaaaacaaacttgatccgcccatggaggggataaattgggaactttacagttatcatccgacgcatcttgcattaaaggt

SEQ ID NO: 228140 - DNA, 485 bp, Glycine max
ctgatactagatgatgtgatctttactaggagtggattgctttatacttgttacagagctctggatgattccacttccagtacggaagataagtcagggtagatgccacaaggattaccttgataagtctgagattggtttagtgaggaacccagagagaagttctcacaaaattatatcaaatgccaaaagtccttctattgaaaatgaaatcaatacatatagtgtatctgaacaaaaagatagaaatagacatgggccttcaacaacaactaatattcttagtagtgcctctacctttgggccttcatccttcctcacttgggccttgttaagtatgcctgataccacttgttggagggtatccactgactgttcggtctactcccggcataggtcccatatttaggcagtttaggattctatcagaaaatcttaccgactacatatggatagaaccatgatcccatacagttatggaccat

SEQ ID NO: 228141 - DNA, 403 bp, Glycine max
tcgtggcttctttgagaagctagattcttatctacccacacttctctatgatctaaattaacttccttgaaaataattcggataaaataacacaacaaaataatcaaacatcaaatataattactaatatatatatatatatatatatatatatatatatatatatatatatatcacggtgttacaatattgctggccatgttgaaatccaaaatatccacctgcattaaagtttggtcttggttggttctccatgtagttcacttcatgtgttgtatcttctgtgggaatgcaacacccagaatcatatgctcgaccacatataacacaacctgcaacctgccaaacagaagagagagaaagttgttcaatatgcaattgagttggcacactacttagtgtt

SEQ ID NO: 228142 - DNA, 399 bp, Glycine max
  unsure (1)..(399): unsure at all n locations
tcatacaattaatatagaacttatatcctaatgtctcatcttatcagagcgntgcgttcccgtgtcctctacatgaggttcttcatagtcatccacctattcatctgctcccccgaacacaagttcaagatcatcacaggatccaaacacaacaacacacagggagtgagttatcacattcctagctaatagagaaacaagacaattaaatatgcatattatataaatgagataccacttgcttaaacatagctcacgtaacttcaccacttcgtcattcaaaattcacttttcaattatcaatcacattacacaagaatcccacacttcgatcaagatataataacacatcaattagcacgcatatgcaatagttatgctaagactcaatcctatatg

SEQ ID NO: 228143 - DNA, 362 bp, Glycine max
  unsure (1)..(362): unsure at all n locations
ctgatgagtttatatntaaatatatctcggggttttatataatatttgagaggaaagatntcacaatgtaattgtggttcttatgtagtactgggctactggcaaggaaatgggtgcagtggatttgtataaagtgagatatacttgtatagatgatggtcacggtgaagttagactcgttgagtgaattggttgagtcatgtatatactctattagcttgaagcatacacaaagcacaagctcaccctcttataatgtggttctgggcctaactcaacctcaaaagctatctcttggggtgagggtccccctcactatatataactatcttggcttatctctaaccgatgggacttggttt

SEQ ID NO: 228144 - DNA, 407 bp, Glycine max
tcagtcacaatatagagttagaacaaagaaatattgagaaatttatcaatttttcacaagtgataattacttctttgtttgaccaagaaaacaactgtaatgactctgtttggctaaataataatttctttttataaaaaaatgcattctaagatggttctctgaaaaaccgtcttaaaatgtagaatcatctttaaaaccttctttaacagtgtcatagaaccgatgtagaatcatctctttgatgcagtgcatactctcttttttgccgctttctatagttcttgatcccttttcttgtttaagaaagaacttgtgcactcatttcttcttttaccagagaagaccctgttatattaattgtaagtggaaagtgccgaatcttattaagtttcaatgaaaatgtg

SEQ ID NO: 228145 - DNA, 502 bp, Glycine max
  unsure (1)..(502): unsure at all n locations
actaagctgtaacctgatggacaaaaccatcaaacttttattgtcttttaacactcaatacactngttgtacaaaaagtaaaaaaatggcacaataatgcttgccaaaggaaattttattgttcatttgggcatttgatcaaacacattacaatggcaacaaattcataaatgaatattcatgttgtcattttgtctctgttggtggtataaaacaactttttgctactaatcattaatataaaacaacaaaaaaagattttaaaaaaagctaagccaaaagcttcctgtttagttccattaaaaccctaacattaacaaatntcaccaaacaattatcaacaaatgagaatctaaaagagaccacaacttataatataacccaacccaattcctaataactcattataccctaacatgaaaatagaaagggagggaaataaaaaggggtttaccaaagctccaaatacctctgattgttcttccagagagcaacatccatt

SEQ ID NO: 228146 - DNA, 500 bp, Glycine max
  unsure (1)..(500): unsure at all n locations
gacctataaaactcagcttaacattcaatttcgagcgtctcgatatatgacgggactctatcagacatccgagtaaaaagttattgtcgttgaatttgctcagagcatcaacattcaatttcgagcgtctcgatatattacgggactcaatcaaacatccgagtaaaaagttattgtcgtttgaatttgcatagagggtcaacattcaatttcgagcgtctcgttatattacgggactcaatcagacatccgagtaaaaagttattgtcgtttgaattggctgagagctccaacattaaatttcgagcgtctcgatatatgacgggactcaatcagacatccgagtaaaaagttattgtcgtttgaattggctgagagctccaacattaaatttcgagcgtctcgatatatgacgggactcaatgagacatccgagtaanaagttattgtcgttggaataggctgagagatcaacattcaatttgagcgtctcgtatata

SEQ ID NO: 228147 - DNA, 389 bp, Glycine max
  unsure (1)..(389): unsure at all n locations
agcttctaagaccaaataatatattctacattctcttataaggaagcgtccactcataagtggtaaatcatgcttaaccatttttattaagccaatagccaacatgctattatagaactcgcatccactatttttgaaaactagtgtgtttacactgagtttctttggttacttatccaacctatctgacactttttgcacacaagcttttcattatttgttttcacataaaacctattttattaagcagcggacgacaatttcatttggctaagtaaaacatgtatctgtcagtggacaaaaggtgcaaaacctggttaaacttacataacaacatctngtgaaaaatggtttatttgaactaacactctattcaaccctcttctaat

SEQ ID NO: 228148 - DNA, 415 bp, Glycine max
  unsure (1)..(415): unsure at all n locations
ggtaatntctctgacaaaagtgtccacatttctattataattgattatgngctttattgcaacattcagatatctgtcattgtacccttatagaccttacctaaaattgaaatccattaataagatttccttatacatagagattcaatcaagcttggacaatttaaataaataagtggatgtcttcaattggttaggcaaggcaaagaaccaagattntaagtttttaactctaggaacacttatccaattcatgtagctcttatttcatagtaatatgtatctgtattatgcctaggcatctaggaaatttagatctaactggcttattggattctgcgattttgtctagactcattcatgattaggttaaataattttttgcaccaccagcttttcaacaaggtgagaaaaa

SEQ ID NO: 228149 - DNA, 192 bp, Glycine max
  unsure (1)..(192): unsure at all n locations
agaaaagaagggaaggaaaaaaaggagaggaagagaagaaaggaaagaaaggagggaaggnaagaagggaaggaaagaagagaaggaagaaaggagggaaggaaaggaagaagagaggaagggaggaagagggaaaggaaggaagaaaaagagagagaggaggggaggaagaagggaggaggaaggagggag

SEQ ID NO: 228150 - DNA, 108 bp, Glycine max
aaaaaaaaaaaaagaaagaagaggaggaggaagaaaagaaaagaaggaaggaaggagagaaaaaagaaagaaaaaaggaagggaaagaaaaaagggggagaagaaaaa

SEQ ID NO: 228151 - DNA, 156 bp, Glycine max
gaaaaaaaggaaagaagggaagaggagggggggaagggagaggaaaaaagaagagggagaaaggagagaaggaaaaagaagagaaaagaaagaagggagagaaggaaggaaagagagggagagaggaagagagaaaaaaagaaggaaaaaagaagg

SEQ ID NO: 228152 - DNA, 162 bp, Glycine max
  unsure (1)..(162): unsure at all n locations
aaaaaaaagagaggatgtatccgaacaaaangaaagagggggaaaagagaggaaggaggaggagggaagaagaaaagaaaaggaggggaaaggaggaaaggggaaaaaagagaaaagagagaaaaaggagagaaaagaaagaaggagagggagaaagaaaga

SEQ ID NO: 228153 - DNA, 414 bp, Glycine max
  unsure (1)..(414): unsure at all n locations
ngtctaccacacttccaatgatgaacaccagctttagcacaatctataacaccaaccaagaaatgaatcttgcagcgaataaacctgtagaattcaccctaaattccggtgtcatatgctaactcgctcccttatatacttgataatgcaatgatagccataacctctaccagggttccttaacctccatatttctgaggatacgactcgaacgcaacatgtgcatatcatggaagagttccaggacatttcattgagcactgtatgacctcgaagcgtaaggtgcaaagtgtaattgatgtggctggttgaaatatagtagatcgcttgtaattcttaacattgacaagcgaccccacatggcgtattttgaaagctgtgtagatgctttaatgactatcaagatttcaatta

SEQ ID NO: 228154 - DNA, 289 bp, Glycine max
caattgcttgacggggatattgtatccctgagggaacatgccaaaatatagaaagcaaggctgtcaccgtgaatgcaaggtgtcgaaccttagactcaatatatccattagtatgttgtcattgtcactaccaagatgccaatccatgatggccttgatatcacaccactccttgagcaataccttgaggcagagatcccgcatgaaatgatggcagtggaagccatccatattgggtatggatttccagtccactatattggggaacatttttgccgttaacacttct

SEQ ID NO: 228155 - DNA, 340 bp, Glycine max
  unsure (1)..(340): unsure at all n locations
ttaagtcgatcaacananaantatttgttcataggtgttattattataaaagataaatgcattatatcttggcaaacaggctacatatgttgacaaaacatatgtaggagtacaagtgtgaggggaagcctcattctgtgtaagaatgataaagttgagcaccatatgagtgaggataagattcataaacttgagttttaaggttttaggttaaagtgtgacgtcaatatttcttatgtggctgttcatagcttataggtaaaatcttccctgtgatttatccccttcatatgcataataattagtataagagtagatgatttaacttggtgatcgactc

SEQ ID NO: 228156 - DNA, 475 bp, Glycine max
  unsure (1)..(475): unsure at all n locations
tctttactggaaaattccttcccggattggcgctcgtgctatgattggagtngctggcggggcgagaatgtacgggagtctggttntgagtatgaggccctcgtggttgagcgggcactctntgctggacgggtgccagattaaaagggtttccaacatgggccgaaaagcttggttggtgtagggaatattggtaattgttgtgaagggtttgttgggatttaggccaagtatgagctgaagtcacagcgtgggtatctccttccttcttcttagccccacttgctctgaatctactattactcgtgctggcaagagcggcataatcgaactttccccttttcaagcctacctcgatcctctcgcccgcaataccaaatatgcgaagctagatggcttgttatccaccatcttctatagaaaacactgcagcgtgtcactatatagttatattctctttcctcatggggtgcac

SEQ ID NO: 228157 - DNA, 342 bp, Glycine max
  unsure (1)..(342): unsure at all n locations
tgtgactctnggcaacttctataagactagtcacttataaaagttgtgacttttgaaaaaatcttcagaaacaagtcacttaaagaattgtgactctcggaaatgtatttttcgaaatcagtcactggtaatcaattacactaatcgattacacatcaacagatgtgactcttcattttgaattttgaaaattaaaacgtttagaagctctggtaatcgattacaagtattgtgtaatcgattacacaagtttaaaatactttacaactggttaaacataagttgtaactcttgaaatctgaaatcttaacattttaaaatactggtaatcgattactacct

SEQ ID NO: 228158 - DNA, 392 bp, Glycine max
acacttaaaactaagctgtcagtctaaacatgcaaacatgcaaggaggttgatacaaaaacttctataatgctgggccttggagaatctgatgatgaggtgaaggaagcaatggctgatttaaaggccatcgacgttgatattctgacacttggtcaatattcgcaggttttgtaatgtcacaaatactttaatggtttccagacctgcttctcgtacatcagaaaccaaatctcaaaatcccatccatcatgcttacagatggcgctaatctctcatttgatctcataatttagagttgtgataacatcgtttattgaatctatacgaggttacagtatggtctgctcagctgataatagtcataatagaccctgcatgtctttattattg

SEQ ID NO: 228159 - DNA, 460 bp, Glycine max
  unsure (1)..(460): unsure at all n locations
tctaaactntatacaagaatgaagctctgataccacttgttggacaagtggcctcaaatatcttaagaagggggggttgaattaagatatcacaaactatttccccaattaaaattttatttcactttctattcaagttataaattctcttaataatgaacttcttaaatattaattcaaatagagaaatttgaatatgaatataaaacaataataaattaaggagtttaagggaagaaaaagtgcaaactcagatttatactggttcggccacacccttgtgcctacgtccagtccccaagcaacccgcttgagagttccactatcttggaaattccttttacaagttctaaacacacaaggacaatccttcctttgtgtttagaattcttttacaacaagagaccctcgatctcttaatccctttttcagaataaagaagaagagaagaagtaatttc

SEQ ID NO: 228160 - DNA, 433 bp, Glycine max
  unsure (1)..(433): unsure at all n locations
cggatgacgcattcgatggagatctgcgcagaaagacttatgatatattgcccaagcatattgaagaactcctcaaattacaacttagacccaaactcgggtagtgcacgtaactcaacagggacctcaccaaccaagagcatagacacatagctgatgtcctacatagaaacgtggacctattcacttggcagtcatttgacatgtcaggaatcaaccccagcattatctcccataagcttgccatctatccctaggccaaaccaatatcacagagaataggaaaatgggagaagaacgacacaaagagatcacagaggaagtggacaagctcctcaaagcacatntcatcagagaagtcaagtactctacctagctcgccaatgtcgtcatggtcagaaaggtcaacgacaaatggcaaatatgcaccgac

SEQ ID NO: 228161 - DNA, 394 bp, Glycine max
tgaaactgcctgctatactgttgaccacagagtgtgacctggagatatgtcgcggtgagtacgagaccttgcggacgtcaggaggtgtgctattgtccaataccaagcttgaccaataccgacccttcccggtcataatcagtcagtgataacctgtgatgtacctaagcatgcgagcttctggccctctgcagagaaaaggagaactggacctcaaagcaaggaggcttgcggtggctgagcaattgtgaactttgtgtacatatgtgagatatggactatggcaatcgattactctgggtgggtaatcgattacaacgcttaaaaatgaccacaggacgctcagatggtctctggtaatcgagtactatgggatgacatcgattaccctgct

SEQ ID NO: 228162 - DNA, 441 bp, Glycine max
  unsure (1)..(441): unsure at all n locations
tgcatgaatacaggctgagacaacatgggctctaacagttcttggttacttggcaaaatatgttatgggaatnttacggtaagctataatgtatgatgcataatgaataatgatgctttgaactgttgcacatatgtttacaaagattgcttactttaacaggtgttatgtttcttatctaacctaacatttgaaaattgtaacaggttgattgtttcagtggcgcgggtcactcatataattatctacctattaattgatcctccactttctcctttcttgaatgaagttntcatcaagctagatgatgtctggggtatgttggaaagctcaagctcattttctttccttcagttatgtataataattgatacattatatgtaatattcattcacgtaatctagatgatatatgtaatttgttcttcatcacgtcttctt

SEQ ID NO: 228163 - DNA, 436 bp, Glycine max
  unsure (1)..(436): unsure at all n locations
cgctctanattacatggatgttggtatctatgagaggaggttatatgctcattttgctntaagagtagtgtcccactggtaaaattaactttccaaatgtttgccttcgcaggaatggccccgaggaagcttgcctcaaagaggtccaggaaggacaaggcggccgaaggaactagttccgctccggagtacgacagtcaccgctttaggagcgctgtacaccagcagcgcttcgaagccatcaagggatggtcgtttctccgggagcgacgcgtccagctcagggacgacgagtatactgattntcaggaggaaatacggcgccggcggtgggcaccactgggtactcctatggccaagttngatccagaaatagtccttggagtttatgccaatgcttggccaacagaggagggcgtgcgtgacatgagatcct

SEQ ID NO: 228164 - DNA, 369 bp, Glycine max
  unsure (1)..(369): unsure at all n locations
cgcttgtggngcttctatggaggctggatctttgagcttcaatgaggtcctttaatggngattatccaccgcggagatgcagcggaagacaaaggagaacaggtgagaggaggcgccatccactacggaataagccatggaagaaggagcttcaccaccaagataagccttacataagaagcttggaaggatgcttcaatgggggaaaagaaagagggagagaaagagagaggcggggagcacgatatcgatgtgaataaagagggagagaagtagaactttgagttgtgtctcacaagactatcattcatcaaagctacaacaagtgctacacatgcttctattcatagactatgtagcttccttgag

SEQ ID NO: 228165 - DNA, 443 bp, Glycine max
  unsure (1)..(443): unsure at all n locations
tagctacacatacctctctaatagctgagctcacctncttgagatgagaagctagagcttagctacacatcccctataatagctaagctcacccctatgccaaaaaacatgaaaatacaaaaaaattccttactacaaagactactcaaaatgactcgaaatacaaggctaaagccctatactactagaatgaccaaaatacaaggcccaaacgaaggaaaaacctattctaatatttacaaagataagtgggctcatactaagcccatgggctcgaaatctaccctaaggctcatgagaaccctagggccttcccttggatctctagcccaatctacttggagtcttttatccaatgcccttgcggngtaggattgcatcaagacacctattcaatgaatatgttcgatactcggttcttacccgtttatactacttgcgcg

SEQ ID NO: 228166 - DNA, 397 bp, Glycine max
  unsure (1)..(397): unsure at all n locations
tgcganaggcttgtcgctggagctgacccaccaactgttctatctctntcagaccggcgactcctaggctcttgatcttgacttgatataacctctttntaagcgaaggggtctgactcgatcccatgttttaataaagtggaataaaaaccagtgcgaatcaagactctgacatctatcataggtgaaatggatgaatgcatgaagaaaatgcgtatgacccagatgcattttatggatacgagaacccgggagatttatctctttcttaaatacaacattcgggcagcatagcgcccgatgcatgcatttaagaaggtgacacggaccttccgtcttctcgtgacaaaatgaagggatcaagacgcaacccgtgcatgatgacatgatcccgatg

SEQ ID NO: 228167 - DNA, 258 bp, Glycine max
gtcaatcaacataaaagaaatggtgaagatgtcgatgaggcgaacgtcatggacaatatactccgaactctatatccaagtactgacttcattgctaccaacatcgaagacaacagggatttaaagaccatgactatcgagtaactcatggggtccttacaagcatacgaagaacaacaaaagagaaaaaccaaacacgaggaggctacggagcatctactaggactcatcgtagaggaagcaaactatgcaaatcac

SEQ ID NO: 228168 - DNA, 338 bp, Glycine max
  unsure (1)..(338): unsure at all n locations
accttggggcgcttaggagtacataacaagacacaccacacaatgggtttggcaggtcactctcactaagtaagatcatagggagaccagtcagggtcacgatgttntgcgagaatgctccaaccatatgggatcaacataggcttaaaggagcactcaaacccggtgacccccaaggcctacactccgaagagtccgtcagggcctctcccttctgattcaggtccaacccctaaaatcattttagcacacagacactgctagtgaattatacaatacccacaacctcacactcgtgtctaanacacgtacaacatatggcgctacaatttaacact

SEQ ID NO: 228169 - DNA, 454 bp, Glycine max
  unsure (1)..(454): unsure at all n locations
ggacgagattaatatacaacaggctcatatcttgtatattgttcatttatatgcctttntatttagttagaaaatgatcgagtactatttttattgacaaatcagcatgttatgatacagctaaaaaatagcatgttcgtttatctctagtctttttataagaaacaagcactttgtaaatataattgataaataaaatgtccatttatttttggtctttcttaccggaaagcgcgttggtaagtgaatttcaactntataagagattagactctaattcttaattagactctagaaccagccagttccataaatttcatgttcttcatactttcttagacatatacatgtgtcatgctcatgctcatgctgtcaacgtgagtggcatgcatctacagcctatgagctgctttactagcagctcctaactacttacttatatagaaacaaacta

SEQ ID NO: 228170 - DNA, 344 bp, Glycine max
  unsure (1)..(344): unsure at all n locations
tgcctanagaggtctaggaaggataaggcggccgaaggaactagtttcgctcccgagtatgacagtcaccgctttaggagcgtcgtacatcagcagcgcttcgaagccatcaagggatggtcatttctccgggagcgacgcgtccagctcagggacgacgagtatactgatttccaggaggagatatgtcgccggcggtgggcatcactagttacccccatggccaaatttgatccagacatagtccctcgaatttatgccaatgcttggccaacagaggagggcgtgcgtgacatgaggtcctgngtgaggggttagtggatctcgtttgatgcagatgctat

SEQ ID NO: 228171 - DNA, 442 bp, Glycine max
  unsure (1)..(442): unsure at all n locations
acacataaatactaagcttcacctctggcctactcatagatgggcatgagagacatgtctttattttatcncccactccaagtaggcctccggaacattctttcctctacatggaggaatgatgagtctaataccatctataccgcctatgtctaagaacaccatcattccctgttctcctactgtcttcttcactatgatccatattctccatctgaaccaacctctcatggagcgcatcatctcgtcggatcattaacctctccatatgttgcatcataagctagcatttgccattgctaaagcctcactcatcattacgattagacctgacattcaaacaacacacatacgaacaagacatttagcagccgtccatacctatccactcaaggacacacaatatggctttgactatgaaaactctccctttaacactcta

SEQ ID NO: 228172 - DNA, 430 bp, Glycine max
  unsure (1)..(430): unsure at all n locations
tcatcctcagatccctcttgtggactaggcttgagttagactgtcctcgttggtntagactaacttaaactaagcttcgtccgcagatccctcatttaagactaggctcagcttaaatagcttacgaaagtttagactaatttaacctaagctgtgtgcgtagattcctcatttacgactaggcttagatcaaacaacattattgtcacaacatatttgaaaccaaaacttaatacacagatccctcatttaagactaagtttcaatcctgcttcaatcaagttctaaggcaacagtacattgtccaatgctaaagtcacctaactatgcacacaatatgggtgatcagacaaagagcatacaaaatttaagcactgacagatgcatctgaccatctatacacaacaaattagatattgatgtgaataca

SEQ ID NO: 228173 - DNA, 408 bp, Glycine max
  unsure (1)..(408): unsure at all n locations
acccagagaagaatgaatcctatgatgaaggagtgaagtagttgtagaagcgcncaagcnatcagaggcaggctttatctatccaattgcagacagctcatgcggttagtcactgtgcaagtttgttccaaaaaaaggagggatgacagtaataagaaactattgtaatgaactaatttctaccagaacagtcatacgatggagaatgtgcatcgattatagaaatgctaatgaagccacatgagtatatcactacccacttcccttaatggatcaaatgcttgagagacttgcagggcaatcgttatactgctttgtggatcgatactcgggttacaacttgattgttttgatcctcatgaccaaaaaagacacatgtatatgtccctcggtgtcttgcttatcacc

SEQ ID NO: 228174 - DNA, 196 bp, Glycine max
  unsure (1)..(196): unsure at all n locations
gcttggcggccacgctcaacanagtactttcgacacctactgtacgtcgatttcccaatgctgatatatgaatgttgtacaattctttaaaccttattgtacattctagatgttcggtgtcgtgggccatatttcatccttctctatagtagccatcgtctattttcctttgagatcgatcaatccatgttgctat

SEQ ID NO: 228175 - DNA, 360 bp, Glycine max
taaaccaacttcagcaatctgcacgccactagcagaatttttctgagccccaccaggattaacaacttatgctgatgaactgaaatgtggcaccaaaagtccccaccaagccaacatgcagccaccatttggcccccaaaagctgatgccaaggtgcaattggccccataacacttgactaaaccctttagatgataaccaaacatatttttggcagccaactcacacgatttgccattattaacaactaacacttaaattgaaaaaaggggcattaaacctcattgggccagatacaactacacctggactttctctgaaactaggctgcatcaaaaaacggacagcactgagagagct

SEQ ID NO: 228176 - DNA, 426 bp, Glycine max
tcgatccttcctgctagacaaacagaattgtgacagagagtactcttgcatataaacgtataaagaagaagagaggggttaatactgcggatatatttcagattcgtaacttagattttgcacactttgaacttgttacagcaagagcttaaatagagaaacttacatgttcctaattggctgaaataaacattaacttatagctaatctaaaatagacatcattagctaacaactacaaattgcttcttctgaacacaagaaactcttaaacgaacttactaacaaccactaaatctgtagaaaaatctcaattgccaacactccttgagatttttcttcatcacttcaagctgatcttaacctttctcacattcatagaggatcacctttaagtagacaaacatttgcatcctcaccctataca

SEQ ID NO: 228177 - DNA, 394 bp, Glycine max
  unsure (1)..(394): unsure at all n locations
tgatcacaacacaatccatacattccaatgcactctacttatacattngctcattcaagtcattcacagacacctctatcataagataaatcacacctctgaatatgataatcaatcagttcactgtacgaacatgctgttgtacaagtattaacactcacaatattggaattgacatgaccgatacataatgaaaactgaatcaccaataaactaaattgtccatgatttgcagaaattaaaacacaacaaaattcaaacatcctgctcatactgtggttgatcttcacttaatccagcactggagcagctggtacatcctgaagaatgggctgttctggcctcatggccggcgccgactgaatcgtgtcctcacataatgtgcaccctcaca

SEQ ID NO: 228178 - DNA, 467 bp, Glycine max
  unsure (1)..(467): unsure at all n locations
acctataaaactcagcttacaagatgatgctgatcgaactnttcctcaccaacatcatgcttatttcgttcacggattggaatgaaaacccaacagccgacatcggtcgtgaagtaggcccaactgatattcttcagcagacattgaacaattttttttgaaaaactctcgctggcagataatggtttttttacggtagaggaagtttccttgttttggtgttgcataaaaaatttacaatttacgtcggataggtttttttgtgcgagcttaaccgacctttagtttggcccgaaactggcatgttcccatttattcggccaggaaaacattagccaatcacagaaaataaaatattattcaccgatattgatcgaaaaacatgacagtcgacattggtcaggatacattacagatcgaggtctataacagacgcttcacaagatgatgctgatcgaacttttcta

SEQ ID NO: 228179 - DNA, 518 bp, Glycine max
  unsure (1)..(518): unsure at all n locations
tatatatactaagcttcgtaagagatctggaacattgatagaattctctataatgtctatgcaggatcctatagattntcccattgataaggcctcagcaaccttccctcgagctgcttcatgcctccacaagaccaagaccgtgtttagcaaaggccatctaacatgagaatctgccttcttctgtgtgaagcctacgcccttgagcaataaatccaactgtctacaattaagaaaatcacaattagtaatggcaatgccatgtgagctttccaaatgtnttcactaagtaagtaagtaaaaagttgcataaacctttcttatgtcatctagacctccttcagaaaatccatatataagatactcagtggacaccccagccaatgctatacatgaaaattngttcaacgtctaataacaaaacaaaaaagggtggcacataactaaaatttcatgtgtagaatggtgattanagcanacttatatgcagtgtanacttataagcaaacttataagct

SEQ ID NO: 228180 - DNA, 487 bp, Glycine max
  unsure (1)..(487): unsure at all n locations
tctacttatgtggcaaggcgggcatccttcaccttcttgtctcaaccgcgagctttgactaccactcttccttcccgcgatgcttctctntgtatctacctgaatgggcttatagcctaaaccatacttcccacaatttcctttggcatttatcaagctagatatgccgcctgtgtctttgcctaaacccattccgggttcgtaaccgttccccaacataactcgggccatcattactgctgcatcggacaggcaaggctgcccagagaacgagtccatggaggaaatgcttaccacctcaaaagactgganagcagtttctaatgactcctcttaggcttccacataaggcatagaggatgggcagctcaccaagatgtcttcctcgcctgatacgatgaccagatgccctctcactacgaatttcaacttttggtggagtgtagagggaacaactcccactgagtggatccacggacgccccaac

SEQ ID NO: 228181 - DNA, 418 bp, Glycine max
  unsure (1)..(418): unsure at all n locations
atgacaatctttctacagaggagaactttattaatgaaggtggcgcagctattgttgatgcttataatcaagacatatccaatgaagcccaagctaacactgagcaagaaatggagaggaagtttaggcggcatgtatatgttatattaacatgcaggcataattaatatacacatatcaagaaaaattaaaattaggggcatgatcatttatgtatatttttttaaaacaattgtctttaaatattttgtgatttcaatattaataatgaaaattaattntcgtcagtaaatttagtctctaatcgtttgtttgtctggagttacaactatgaaatatattgcatgtgtgtgtatctaatataaatgatgcggttttgtaccatattctgtggtggctagaaccatatcaaactgat

SEQ ID NO: 228182 - DNA, 480 bp, Glycine max
  unsure (1)..(480): unsure at all n locations
ttacccgttgaagatcgaagaacgatgaataacgaatgaagaacgtcgaagaacggttcaaacctttgcgagattcctcacggaaaatgttaccgaaacgtttcggaagcgcctcggcttagattttcttcacggaaacaatttttccaagcaaattcgaaagagagagaagtgcctaaggggctgggatcttttccttcttcatttcctcccctatttatagcanaataggggaggtggttgccgcccagctcgcccaggcgagcagggttgcttcctccagaagcaaccgccttctggaggaatcttctggagggcccaaatgggcctgggtgctatntgcacccncatttttaccaagttcaccccctctgctggtttttggtgattcttttttcgtaaaggtacggaaacttacgaatttcgtaacgatacttgttntctttccgtcatgtacggaaccttgcgaatacataatca

SEQ ID NO: 228183 - DNA, 307 bp, Glycine max
aaccgcataccaagaggaacccttcgatcgaaacggactcttctatactcgtctccgactttccgccgataacgaaaaccaatctgaccttcacagctttctttgaggtaaccatgattctacgctttttccttattagaatcagcttatctgtgcatcctttctcactttggaatcaccattgcatgttccacgtgacccttgaataaccctagagaaagagactatgcgcatgacctctttttatgaaatgggtgttattttcatgaccttcattgaacccccctcacagtggtctgatcggaat

SEQ ID NO: 228184 - DNA, 382 bp, Glycine max
  unsure (1)..(382): unsure at all n locations
gaccganggcaatcatattttggactctatggaagtaaaacatattgttgtctcaaataccacttatggggaacaaactcaaagtcacgatagagggtgcanaaacaaatctgatgtttggaatcactacatgtgagatcctacttcagataataataaggttatatgcaactattgccatcactcgctcaattccaaaatggagtatccaacttggttcatcaagcagatttgtattccatttaaggagaaagatttgctaacaaaattaaatgattgttacaattatttttgaagaagttatgggtggggcggcggagggttctctatgagactttcaaccaactgaatctgttggacatagtattcgatctgcattttt

SEQ ID NO: 228185 - DNA, 461 bp, Glycine max
  unsure (1)..(461): unsure at all n locations
ntattggggtcctgngtgttagttntaacaagagatccttttgtgacccatatcattttaatattggtactatctttcttaaagtagcatgtagaagtacgatgccctttttttccacaataaaaacaagttaaggaaggagaactatatttttgtgtggatgcaaagaaatttttataaaatttttgttgtttattaggcttatatcctaatcaggccttatcaaagacacatctttgctttcttaatatgacgtctaagttacttttaccaatggaaaattttgcgagagtttttcaaatctttaatttcttctatgtacttgatacaacaattacatgaattagatatttctatattatcatgcatggtagaagaatgaattggatcatttgatcttagagttataacttcagttntgagatttcctagtctttagttaattctaaacttagttttct

SEQ ID NO: 228186 - DNA, 469 bp, Glycine max
  unsure (1)..(469): unsure at all n locations
ngttccacagtctcaccatagggctacctctagtaggtctgctccaactggctttcaccatatcattatacccttccatctcaattagacaattactgaatctgaagtttttattgttcttgataatgggatcttttctactaacacagagcagggcatggtccgaaacactggttggcagcactgtcaacacagtatccaagttgtcttgaaaccagttcaagttacccagaaccctatcaattctagagtagatggttcctatcacctgcttgttagtccaggtataaaactcacctgtggtatccatctcagccaagcatgtagtctccatcatgttcagcaaatcaatgtactcactttctgtcacagcttttccttcaattctatcttgagccttagtaacattgtngaagtcaccaatcacacaccaaggaccctgtngatgtnntatggatagcctcaaatc

SEQ ID NO: 228187 - DNA, 472 bp, Glycine max
  unsure (1)..(472): unsure at all n locations
tctcgccactgctgatggcggtacacatttctcgctcagtactattggcggcatctatgataatgacagaacccctccataaatatttaaaaaacagaccctntaagtaaatagtttgtaaagaagatcttctaaagtaaatttacccctcccgcaactcttgagatgtagcaaagacatttctttccataggatcctcccgcagttccgctgagtattctaataatagcatcattctgcaattaaaacactcaattaaattaatgatctagagagaagatacatagcatattaatctgtgaacaactgaacatcatagaatgaagagactcttttcagttttctccagacccaagaaaaaaacganagaatatcagtgggatgggttggagggatgtaacgttgtacgtgtccattattataaagatctgcgtcttggtgagatcagtggctnggaattaannatactaat

SEQ ID NO: 228188 - DNA, 473 bp, Glycine max
  unsure (1)..(473): unsure at all n locations
ntgaataatgaatagcataacagaatagaatgccctgcacgaatcccaaggaagctatntaaaaagagtcactcaaagtcactgggccctattacaatactctggcccaaaacgaaataaacactgaacaacataaaataaaattgcgaaatttcctaattagaaattaactaaggtaagcgctgctttatttgccctcttcaagtccacaaccaaaatccggattaagcccaatgtttcattaattcctgaaattagattanaaacatcaaattagctaaatgagcccaaattataaaactgcctaattaattgacaattaaaaccaatcaataattcaaatggtgcaaaaagggtttagaaaatagaagaanatgatggcacatcatatggttcgttagagggagggtgacaatggtaagggtaaaggaaggacgttggtgtaccanatcagtgaccattcataatctaac

SEQ ID NO: 228189 - DNA, 415 bp, Glycine max
  unsure (1)..(415): unsure at all n locations
gacctatgatactaagcttgaaagtgttggtntcaccttctcgctaagccgatctgctgtcttatcgagcatccactaagcgcaacactcatgggctaagcacgaggaagactctataagaagatgagttgtacaggttcgctaagcgaaatgcttcatcttactaagcgcaccgcttcagttcatccgctaagcgggaaaggcacgcgctaagccgaaattcactaatgtgccctaagcagtccataagtgcactaagcgcacgagcacgaacaaggccacctatttaagcctgaaaacagattttagagaatgagtttggactgcgattcagagctttgcatgtctagggtttctagagagagaaaggtccaagttccagagactcttgagtgatcttgctgtgtgaagatct

SEQ ID NO: 228190 - DNA, 409 bp, Glycine max
  unsure (1)..(409): unsure at all n locations
tcttgcgtagccgctctgggtgctcagaatatcccaaaaacatatccctcttattactagnctatttgaattctntagttcctgaatgtacaaccttcaaattgttgctcgttcccctctttcttttctgcaaaaaagaaaatcaaatgctgtcaaaacatggatgaagtcctaagaaaatcaatatcaaagaaaacatggatgaaatcacaattaaaaagcacaactacctatctttcagagtcctttggttaatatggcttgtctccttatgtggtggggttttgtttaataatcttatacttttgccttccaaaaaaaacttatcactaatcctcttttcattaatccaattgtgtatggtactggataaaagatcatgggttctccacctggctncactactcct

SEQ ID NO: 228191 - DNA, 366 bp, Glycine max
  unsure (1)..(366): unsure at all n locations
gctagaaggtgcgcaccncaccattctttcatagtagaacactggtattgtgtctactattattgcgatcatctatctctccgtcattggaggtgccacttgagctgccaggactcttcacctttgggcatattctttgagagattcttgccccgtttgcacatgtggtataaatgcatgctattcaaagccgttatactgacactgcctaacgaagacaaccattaagtccttccaagaatgctcttgataaagttccaagttagtgtaccacgtaacaactaccctaggaagattggaaggaatgtatcagcaattcctcatcctttgcgtatgctcccatgttccgacaatacatgtttagat

SEQ ID NO: 228192 - DNA, 350 bp, Glycine max
  unsure (1)..(350): unsure at all n locations
gcttaagagtaacgtcccactggtaaaactaactttccaaatgtttgccttcttacgaatggccccgatgaagcttgcctcatagaggtccatgaaggacaaggcggccgaaggaactagttcctgcccggagtacgacacgtaccgctttatgagcgttgtacaccagcagcgctttcaagccatccaaggatggtcgnttctccgggagcgacgcgtccagctcacggactactagtatactgatttccaggaggaaatagggcgccggcggtgggcaccactgcgtactcccatggtcaagtttgatccagagatagctcttgagtttatgccaatgcttggccaac

SEQ ID NO: 228193 - DNA, 443 bp, Glycine max
ctcagcttgccacagaattcctggctgcacttaaaaccttctggttgtgtcttatagatgtcttcctctaaatccccatgcaagaatgcagttttaacatctagctgctccaagtaaagattctctgcagcaacaatactcaaaataactctgatggtagtcatctttacaactggaaaggagtctctgtgatatcaattccctgtttctactgaaaccctttcaccacaagtctcgccttgtatcttcttctaccgtcagattcttcctttagcctacagacccacctattttgtaacgctttctttccttctggcaatttagttaaagaccacgtcttattcttctgaagggatgtcatcttatctttcatcgctagcttccactcaatagttgcattcccatgcatagcctcaactgaacaattctgctcaccaacatca

SEQ ID NO: 228194 - DNA, 494 bp, Glycine max
  unsure (1)..(494): unsure at all n locations
atgataccaggcgattccattctttggacgcttgttatatatacaccaatagaattctcggccgaaatatccttcttgagagaaatgtgcagatttatcatactgagtttgacgagtttaaagtggaattggagaggcataatctacacaaatgcctcgccaatctccaagatggaagcatagatgtagctgtggcgaaggagttttatgctaatttatacaccacagaggagcaagcacccaagcaagccagagtacgagggcacctgatcaaaatagatgcaggcagcctgaatgagtgccttcatacgccagtggtattggaagagggggaatctttacccacttactctagattttgtaggttgaggacaaatcctcatgagatngaagctaggctctgtattccccgcaaggggtttgttntgaatgctgaaggtcagccatggaagcttcttagacaagatctgaagacactggccaagacatggagt

SEQ ID NO: 228195 - DNA, 360 bp, Glycine max
  unsure (1)..(360): unsure at all n locations
ggattagtggcacaatggcgaacttggacattttaaaagttatgagatactaataggagactctgatgatgagncactggaggctaatgtgaggaaagcacattacaatatgaattcatcctctgaaagtggaggctaatgtgaggaaagcacatcacaatcgagaggcccacgatagagatacgagtacggatatagatgtggatagagacttgccacataaaagaaacaagaggataggcctctgcgttatgaggatggtaatgacaacggagatagatatagaaaacattcatggatgaagaaaatgaataccattgcgaaagaaacagaaattctgataatcatcgtaagggttat

SEQ ID NO: 228196 - DNA, 508 bp, Glycine max
  unsure (1)..(508): unsure at all n locations
tattaactactggtttgactgtaatttcttaagtaagaaaagtttaagagtttaaaatgtaaaattaanagtggagaacataatttatttttgtattaagcaaattaaattatgattcctcaatgcagcccacatgtgtgtcggtgcatgattaagtatgatcagcacagttacacatgacgcaataataatatgataatcgaaccatttaagaaggtggtcaaattatttgttgcagcactaatcaagcacaagtttaatgaccatctcttaaacatgtaatagcttcattggtttaattgtgttcatgattcctttaaaaaaatgattgagtcctggaaaggtcaataattatggngaaagttggtgaattaaaatattgcatgaatacataaacaattacggggaaggaagaaacaatcgcaacaagaaagatataattgcctatttctttgtcatttcattcctagatctagtcagatgacaagtccctttttttaattttttt

SEQ ID NO: 228197 - DNA, 392 bp, Glycine max
tctctcagggttcctgtcgaaccaaattctgacttatcaaggttgattccttgtggcttcactgtgacttatcttccatctctggaagtggcatccctctccgtcaacaattttgtgtcaaacgttccgtcccgtaagattcacgtcatctggtatcagagcttcggctcttgatataggttatgttgtcgttttcattgctgtcaatttcgtctattttccttgatcgttcaagtttgccttgacgatgctactctgttcgcatttcgtgtgactctgttcattttgttctgttctcgccgttttcattttgtcttctgttcatcgctgtcgttatcgcattgtatctctgttagtgcctgtcaaattcgtttcagcctattccaattcta

SEQ ID NO: 228198 - DNA, 423 bp, Glycine max
  unsure (1)..(423): unsure at all n locations
gaaganatcacatgtctgtcatcatcacaaatgtttatattgtgaacgnatgtatacatgacggtgatgtaatatgtgagtaatcatttatgaatggccatgtatggtcctatatctcttgtatgattcttgcatatatcttgttaatatgacatgagaattacttgcttaacattcattcataaagtttttcacaatccattatgttatatttatttatttttataagaatcttcatatataaaatattctttttattctgaaaaatgtgttatcaagcatgaacctgatcaagatattgagcatgctggtttcagacaaaataatgattacatgattgactgagttctttgaactttctaagttcttacactatctctaacanatctgaatgctcgataatgcctgtgatctatatccttc

SEQ ID NO: 228199 - DNA, 501 bp, Glycine max
  unsure (1)..(501): unsure at all n locations
tgtgcanatcanatcactcctacattntatctctagcatgcattgtatgttagtctcgtcctttgtcacgggaagccggaaggtccatatcaccttcttaattgtacacatggggcactgcgcccccaaatgcgcgagtaagaagagataattttccgggctctcgtgtccgtaaaatgcattcatatcatgcatcgcataagcatctcttcataacatcataatggacatatcctgcatttgtccgttatcatattccagcctcaccttttgcatgagtcatggcatcatcatgcatatgcgtccaacaaactttntgatctgcaaaattgcataccatttgttttcatgtttgctcatccttgcgttttcctctacanaacacaaacaaagaagggggaagcgtgaaacttcacactacattcttagtttcatgtgttaggagccaaccatgttgngatcataaacccgtttcacttatnaaacanaataattgaacat

SEQ ID NO: 228200 - DNA, 425 bp, Glycine max
caagaaatgaattgaaagtcttagattcgaaaacttacccgttgaagaacgaagaacggatgaagaacggtgaacaacgacggaaaaccttcacggatttgctcacggaaacgtcttggaagcgttacgaaagcacctcggcttggtatttcttcacggaaacaattttatttcacccatatagctgaaatgcataaccaaggggggggggggttagggatatttggaacacccacccttcgcctattcataggaaaatggtggaggaggttaccgtccagcttgccctagcgacctgtgttgcttccaaggaagcacccttgtactaaaaattctggaaggacagatcaaatttgtaaattctatttgcaccctcttttgatagttactccattctctgtatttacaaaagtattgagcctatg

SEQ ID NO: 228201 - DNA, 436 bp, Glycine max
  unsure (1)..(436): unsure at all n locations
tgtaagatacatcttcttcaacctttgnggttctttactccattncatngaagcgcatatccacttgcaattccaaagtgtcaaacctctcaccaacaaaggtttgaagaccatcaaacctgtccataatcgtcgaaagaagagatgaatcctctccttcatgtccttcttcaccaacatttctagcacccttcttcacccaagagccatcatgctcctttatataaccaaaggatgctatgactgaagcgcctataaggaatgatctcttgattggaacataaggttcagaatcaagagggatgttgaagtgttgaaggacaagggtaacaagatgaggataagggcatggggcattcaatcacaatgccttatgcatgcgatatctaacaaggtgtgcccaatcaatctgtaacctttatgaaaggcccacatg

SEQ ID NO: 228202 - DNA, 337 bp, Glycine max
tgcatagaaaacagaaaccacaacagtaagttcaataaaactgagtcctgaaaaaacagaagcttaaacagataacagatttctcaaattgaaacaacaacaattaaaattataacaattatgcaagaatccaagaatagctacttgaaagcacaatgtttctaccaaatttataatcatctaccgaaacaagagtgattgcgtgacgcctagcagataaaattgcaaaataaataaataaacgaacaaactacatatgcattttccgaggaaacaaacagagaaaattggaagtgtaacagaaataacataagatagaacaatcggcatcagaagt

SEQ ID NO: 228203 - DNA, 443 bp, Glycine max
  unsure (1)..(443): unsure at all n locations
tcanaagagnngttatagatatatttaanaattattcattatcatagattttatctcaataacagaaattgaatctatattcttttagagtgaactatattttcttggcatatatgatttaggaaatattcattgtcccaccaattcaaatatgaaactgagttttattaatatatatatatatatatatatatatatattagcctgggttaacaaaggttaataataccctaatgtcttcatatacccaacttgacaatcatggaggtatatctgctcagtgttatccattgacattcattccataacactcacttttgataattagtcttgcaattacctatcataacaatggaaatggatgctagcgatactntgttactacatatcgcgacattgcataaatatataatgcataatgtgttttagaactgtatatacat

SEQ ID NO: 228204 - DNA, 419 bp, Glycine max
  unsure (1)..(419): unsure at all n locations
tcatacaattaatatagaacctatatcctaatgtcacatcctaccagagcgttgtgttcccgtgtcctctagcatgaggttcttcatagtcattcacctattcatctgctcccccgaacacaagttcaagatcatcacaggatccaaacacaacaactcatagggagtgagttatcacattcctagctaatagagaaacaagacaattaaatatacatatcatataaatgaaataccacttgcttaaacatagctcacgtaacttcaccactttgtcattcaaaattcacttttcaatcatcaatcacattacacaagaatcccacacttcgatcaagatataataacacatcaattagcaagcatatgcaacagntatgctaagactcaatcctatatgcaatgtggtaccatgtcag

SEQ ID NO: 228205 - DNA, 305 bp, Glycine max
  unsure (1)..(305): unsure at all n locations
aatgaacttcncaagttaaaaatcatgttatgacgtttttagagagcttctacaaattcgcctatacatgagctaattgtaactcatggagaagctcatttcatctaaacttgctaattcatttgcctagaagtgtttcacgaaagattatccaagcattgcccttaatcaaactaaatcatgaatagtttgatttgcactaaatttcatcgtataggttaccctttagtcgcattgaattactctatcatgaagacctgttagcattgcaggaatctagtatttttatacatgacacagacaga

SEQ ID NO: 228206 - DNA, 455 bp, Glycine max
  unsure (1)..(455): unsure at all n locations
ctaagcttaagaaaaatggcctcagcanacttcttatttccagaaggatattctatcaatatacctctaatctttaatggagagggttaccactactggaaaacccgaatgcaaatttttattgaggcaatagacttaagtatttgggaagccatagaaatagggccttatatacccaccacagtagaaagaattacaatagatggtagcacatcaagtgaaagcataacaatagaaaaacctagagatagatggtctgaagaggatagaagacgagtacaatacaatttanaagccaaaaacataataacatctgccctaggtatggatgaatatttcagggtttcaaattgtaagagtgctaaggaaatgtgggacactctacaattaacacatgaaggaactatcagatgttaaagatctangatanacacgcttacccatgagtatgaact

SEQ ID NO: 228207 - DNA, 483 bp, Glycine max
  unsure (1)..(483): unsure at all n locations
taagctncacctaaaataggggtaaccacaataagactcgatgcatatgagtanttttatnatcnccttcaaacaaattaaaatatatatagcaatccttcgacctactcaaagagtgaaatctgccaaacttgtaaactgatttaattataaaatattctgttaatttaatcctttaaaagttggtccctttccaaatttattcctccttgactcactcacacaaccacaaccaaccagtagccaaaagagacttctataatttgggcatgcacgacgttgtaaagaatgggatctagagttgaaatctagaccattgttcttataattgcttttgataaagaaaaaatctagacaattttttcttgacacaaaatctagaccaattntattaccactgaacttaatgcctaagaaaaataaaatgccagtgctgctatttgtttcactggtgcacagtgcaactgtgcaagttatatatat

SEQ ID NO: 228208 - DNA, 490 bp, Glycine max
  unsure (1)..(490): unsure at all n locations
gaagaagaagttagagagattcaggcttgttattattgtataagaatgattggaaaagtatattgaaaagcaaatcaaagccttgcttttatagactcttgatgtctggccaagaggaccattaagaagagttataacttttagaaaaacttataaccaatttgaaaatgtcaaaaaccttttgaagagttacatcttttgatttattcagaaacaatcactggtaatcgattaccaaatcagtgtaatcgattacacaagccttntatgtgaaaggatatgactcttcacatttgaatttgaatttcagcgtgcaaaggcactggtaatcgattaccaaaacattgtaatcaattacatcttnttgaatntaattggaacgttgtaaattcagtttgcaagctntntcaaatccattntgctactggtaatcgattacaantaattggtaaccgattaccagagagtanaaactctttggtaaacatgt

SEQ ID NO: 228209 - DNA, 406 bp, Glycine max
  unsure (1)..(406): unsure at all n locations
ngngcatncnatacncngatgaggatgagcgataagttcttattactgtactganncatntgcttccaaagtttcatggtcttgcaggtgaagaccctcacaaacattctaaagaatctcacattgtttgctccaccatgaaacctccagatgtccaagaggatcacatatatctgaatgctctttctcattcattacatggagtggccaatgactggctgtcttaccttgctccaaaggccatcactagctgcgatgaccttaagagagttttcttagaaaaatattcccctgcttccaggaccatagccatcaggaaagatatcttacgtcttagacaactcactgtagagagcctgtatgagtactgtgagagatttacgaactatgtgccatggccccacca

SEQ ID NO: 228210 - DNA, 369 bp, Glycine max
  unsure (1)..(369): unsure at all n locations
tgcttccatnttaagncatcagagtcagctgcgctatgccaactatctngcttgggacaaggttgcccgtcttcactgtaccaaaatcccctttttgatatgacgagaaaaatccttcataagtagtaacatggaaggatgctctagattcaattatccatgtaaaataattagatgcaatatttaaataatattcattaccaataagaaaaacattctcatcgcctgatgtcacaacagtagtggatctaccttcattcttcttctgttggtcaatctgattagcatggacagctctagtcttctaacctctcttcaagaatctgcactcaaacgttttatggctagagatctcacagtagtagcaac

SEQ ID NO: 228211 - DNA, 498 bp, Glycine max
  unsure (1)..(498): unsure at all n locations
tactaagcttacaagagggtatgttntctaattagtggagctgtttctcacatttttatctcccattggtacttttaattaatggaaccttttatcatgtttatgagttntttgccttctctttcactcctttcaatgatttcacagtttttgaatgactgcaatggtgcctctgtaccatggaagctacgtacaggtgcgtgcctttcaaattccaaatctacgtgtttaaatgttgttacgcataatatgcatgtcataccctaaattcgtctggggactgtcattcattgatgtntttgattctcactagccaaattgcatggtttgacactagttaccacacaaaatgaaggatcattcaatgttntgatcaagaatgcganagataccaaaaggaggggcaaaagggtattttcattgagtatcctggcccctagctcgcccaagctagcctctggcttgcctgngccacaaaagacttccatgttaagtaac

SEQ ID NO: 228212 - DNA, 424 bp, Glycine max
  unsure (1)..(424): unsure at all n locations
gatatggtattgtaagtgagatccttggccagattgagtntgattgngatgacactaagcacatgatcacaattgagaatgaaaatgcttggaatgaatattgcattgtaagtattctttaatatattgctatntgttattcaaagcagattgcaattgactctttttattctagtcgcataaatcagctaaaccgttctgattcaaggtgcttcacaactggggtgatatagtggatttgtgtgctaaagatagagccattggtcatggagctgaaactactatggatgttgatgaagcgatgagtatagaaacacatgaagtggaattcatgggtttaggtgctactgctactatatacttagaagaaacacagcttaatacataatgaataagacataggtcaacttctctcggcacacat

SEQ ID NO: 228213 - DNA, 368 bp, Glycine max
  unsure (1)..(368): unsure at all n locations
ntacagcagattntagtaatgacccactaacctagaattaaaattacttaatgccattaacctagggaattaaaacaaacttaatggctgagtgtaactgaaattgttggcaaccaaaagtcacccccaacagccaacaagtcagccaccatttggtctcccaaaaggctgatgcctaagttgccaattgggcccttattacaacttgaactaaagcccttttagttgattaacccaaaacatatntttggtcagccaactttacaaggattgggccattatttagacaaactaaacactctaaaattgaaataaagtggtgtcatttagtccttcatttgggccatgatacaactcacaaccttgga

SEQ ID NO: 228214 - DNA, 388 bp, Glycine max
  unsure (1)..(388): unsure at all n locations
ggtagcanattcaaacgacaataactctgtactcggatttcctatcgagtcccataatatatcgaggtgctcctaattgaaaacggaagctcatagcaaatttaaatgacaataactctttacttggatgtccgattgagtcccgtaatatatcgaggcacactaaattgaaaatggaagttcgtagcaaattcaaacaacaataaccttttactcggatgttctattgagtctcgtgatatatctacacgctcaatattcagatcagaagctcttgacattatcaatcgagaataactttatacacggatgttctattgagtcccataatatatcgagacgtctcatattgaaaatggatgctcgtaccaaatacagaggacaataa

SEQ ID NO: 228215 - DNA, 463 bp, Glycine max
  unsure (1)..(463): unsure at all n locations
tcatggtgatgaatcaagaatgattcaggggagtttgatgatatcaaagatgatgacaaaaagcccaagagaatgagttcaagattgagtcaagaacacttcaagaatcaagagaaatttgatttcaagattcaagtttcaagaatcaagaatcaagaataatcaagttgaagattcaagaatcaagaaaagactcaatcaatataagtactaaaaagttttttcaaaacattgagtagcacatgaaattttcacaaaagctnttactaaagagtttttactctctggtaatcgattaccagtttattgtaatcgattacgagtagcaaagattattntcaataagctctcaactgaatttaccacgttccaattgatttcaaaatggtgttatcgattacaattatttggtaatcgattaccagtatgtttgaacgttgaaattcanatttcattatgaaga

SEQ ID NO: 228216 - DNA, 475 bp, Glycine max
  unsure (1)..(475): unsure at all n locations
cgcatttggagaggttccatcaaccgccctaattccttgatgctggtggtatctaagcttttaaccttgacttggtagaacctcttgccagtttgttttgttcccatgcttactaaagtgagacaaanagctagtgcaaatcaaaactccgatatctcatgggtgggatggatgaatgcatgatggaatgcatatgacacagatgcaatctagacaagcgggggtccggngaatctgtccccatcttagacacaacgtctaggggtagcaaaatgccccaacgtacgtttttaagaaggcgacacgaaccctccgttgttatgtttacaaaagggatcaagacagaacccatatgtgatgcctatgcaaaagacacaatgcgggaatgtacacagtatgacaatattcactgaacataagcanaagggtatatgatacttatgcatggcagtgtatataaaatggcacgcagcgt

SEQ ID NO: 228217 - DNA, 451 bp, Glycine max
  unsure (1)..(451): unsure at all n locations
tggattgattcagcctaactagggatcgaggtttagtaatttatgttacaacatanaacataaaagcatgattgaatataaaaacatctttatatacatcaacttgtttgatagaaagacccaacacttttacctactgctgtcaatcttacttgcattttttattgttttgagcctagacttagtttaactttgttctaaaccatcaattatcaatgtctctttcaacaatgtcttatttctgaatttaaccctgtctaatactagttccctgagttcgatactcggattcatccgttttaatantaaatacttgacgatctgatgtgctttctggcaaatcagatntgccttgaacatatctgaataaagaaaaanattggaccaaaaagtgtagaagcaagcttcatgatgaatcaagattgattcacagagttctgatgataacaaa

SEQ ID NO: 228218 - DNA, 390 bp, Glycine max
tatggcatacatatgatgtgaagggatgtgcgcacaccagtgcgacccatttgactcagtgatattcaaggcatcgattacgaagggaacatgtcctcgtaatcctatcgtgcgagaactgttacacacacatacacatagtctcgatatattgtacgcattaatcagatattcgtgtcaaaagttatagcccgttaacattgttagtgcttatgtgtcaaattttcgtgtgtcttgatatacagacacaatcttgatatattataggcatcaatcggacatctgtgtccaaagttataatcgtttgaattcgtaacgtttccggttaaatttcgtgtgtgatatttatgtggacaatcaacatctactcaaaagttatgacatttcagc

SEQ ID NO: 228219 - DNA, 405 bp, Glycine max
  unsure (1)..(405): unsure at all n locations
tccatggttggggctntcaaccgtcaccactatgcctagtgatatcgttagnttcagagttgggaagacttcaagtttgaaaccgtcaagcttaactgactgcagaacaatgtcggtgtctttaggcttgaagatagtgaagaacaagaccaccagtactactattaatataattagaagaagggcagtgacaccacagcagattttaagccctttggaacacctcatactgcaacatgccaccatgatcaatgatgatncaatttcacatatggctaatatatatataaatccaatttgcacaatcatctaattaataatgcgtatggtatagggactatacatataatatatcccaactgcattactcgcgaatagctgcaatatttgttttagagagaaatg

SEQ ID NO: 228220 - DNA, 427 bp, Glycine max
  unsure (1)..(427): unsure at all n locations
ctaatcaggccttgacttagattgattcgatagtccacgatatatgcattccatgtgatcatgaacccaccttttaattcaataattgttgattgataatgattgtcaagataaatatgacaaaattaaaatgcttgaatttgaatatgcgattcctgtttataacaccgcactctactttgttttccctacaatattgttttttttttcttttaggttgaaacgcacatgatgatcctcatttcttttagacttccatatggattattacgtttcanaacgtacagttccagcattattggttttccttcgcttgtgtttttgttaaatagtagaagtaccgttcttttttaaaaaaaaaattgttagatcattataatgttcttaaacagaagcactttatatatattcccggagggttcccatg

SEQ ID NO: 228221 - DNA, 265 bp, Glycine max
caagttgtccataccataaatatacatcctgcaacacgctaaggatggggaaaatatatagtaaccaccctgtccaccgattcaatttataaaaatcttcccacttcctaacactataacacaaagaacgcagttcacagtatatacccccaccaacgacacctggtaaaatccgactctctcacaaaggcacccttaaagatcgaggtacaaactccatctaaactaaaaaaaaacttaaacctcccctaattagtcaaacaaa

SEQ ID NO: 228222 - DNA, 468 bp, Glycine max
attcgtgaacttaatactaactttagaagaatcaggatggtacgaagcctatttttatccaagaatagagagcgtttacgattcagaaggatatatctgcattccatctacaggatgaaaagaatagcataatacgcgaagagacaaagaaaagaattcatttatgggaggagcattgggagatatctgagaagttggaatctcttctacaccacagatcatgatgcgcatatggctacaagagggtgaatctaacaccatttcttttcactcaaccatgaagtgtacgacaagaacaaatggcatataaggggtttggaagaatgggtcttggctatatgatccgaataagttaaagaagaaataaagactctcctccaacataattacaaagaataagccgatgtggctatcaagctggatggagtgttcttcaatcccttggcgtgaggataacgtatctttact

SEQ ID NO: 228223 - DNA, 427 bp, Glycine max
agcttgagtctttaaatagattcatctttgttttattatcaactagctataatatcaagccatgttaatatatcaacttctattcatattaagttacattaaccttgcaatcaaactgatggagctttagttttcattattgcattaacaatttccttatatctatatttagaaaaagttccaagagaagccaaaaccttcaatgtttatgtttccgctaaggaaagcaataacacaacagttaccttacgcaaaaagcgattagctaccagctcaacgcacataacatttgtttcttctccatgatcctaaaaatgtcacaagtgaaatcacacataaatatagcttttctctcaataaacaaagtacacattaaatctaaggagtcagtgaaatcatagctagaagtgattgaattacacttgac

SEQ ID NO: 228224 - DNA, 479 bp, Glycine max
  unsure (1)..(479): unsure at all n locations
ntatacatacaaaaaatatgctcgaaagagaagactatactctatatttacttacattcatttctcataacaaaagtattaaatgctttgtgctaataacataattaactaaaaattaattctaggaatataaaaagtaaaaactctacattattactatatacactatttatttataaagcttttaacgtaatatctattagttgtgaaagtgtgaggcgatgtgagattaatcccaaaatgatggaaaattaaaatttagttgtagaatgtaaaacaagcgcgacaacttaattctactattaagtttcacttgtttatggaaaagaacatcacgtgtattatttgctgtgtgagactaatttgccagcatattatcaagaactaatctatccaatatgaaatcggtgattttgatcttctttcatgtattgaattgtctatacaaatcaataagttcttctttgattttgggttga

SEQ ID NO: 228225 - DNA, 446 bp, Glycine max
cagcttttctacaaccttttctgcgcctttgttattattcaaaagccaaagaactcggaaatcaacacagatataacaatggatatagatatggatatcagagtataaaacacaataagccaaactcacaaagaagaagtaatcaaaccagaatccaaataacttataaatgtcaacaaccacaaaacattcaagactgaatattaaaaaccacaagataaataagcaaagtacttatcataataatgtaaattctaagaaactaatagccaaaatacacggcttataaaagacatataatcaaaaactaaaatctaagaagatggaggtggtggtggaagatcgaaactctgacgaatgtatccgacatcctcttcaagctgttgtaggcgaatgtccataccggaaaagcgtgaatctaatgaggtgaagcggtcaccaacata

SEQ ID NO: 228226 - DNA, 413 bp, Glycine max
tatactctgcttacacttttctttaacatttgcttcttgctctttctggaaactcttcgaattttttgaagcttcaaatgctttagcagtcgacttgtcaaacacgacgttacaacaaagacaaagcataacctctttctcaactttctgtttcttcaatagaaattccaccaatgattcctctgcaagtggaaactcttcttcctttttgaactcttccaaggcttggttgacctcctctctatataaaagagcactcactcttggtgttcatatcgaagctcccatcatcatgatttgcatgggtttgatatagttagcctgaatatggaatggatcaatatccaccttcattggtttctcttcaaatttcaatcttacttcatcaattgccgtttggaacatatctctta

SEQ ID NO: 228227 - DNA, 286 bp, Glycine max
caataatcgtataccgctacattgttcccactataacaaaaatcattacacaagggagacatgttggaagttacatgattaaccaccaggacagtccaagcataccacgaattatcatttcaagtccaacgataataatcaatcttcagcaaataatgccaaagaaaccctatcagcacatgtttagccccttctgaatggattgactgaattacaattacaacatattctgtctattatgcagggcactggagcatctcaatcatctggtcccaaggaaaataat

SEQ ID NO: 228228 - DNA, 340 bp, Glycine max
  unsure (1)..(340): unsure at all n locations
gcttgtgtatgcttgtaatccttaactagtattcttttggtttaatctttcctatttaaccttcattcgccaatgtttgtttctattacttctatatatattacatccatgcaaacaatgctaaaaggatagggggaaaaatcataataatcagatgtagttttgttccgaactgatttccaatttttcagaaaagaatctttgcatgctatccataaacatttgcatgaaaagcaaatcgatctgctagtttcatctgttatagtaaccacaccacataanaagaagacaaaagttgaaaagaaataggctttctttgtcatcagaagtgtgatcatca

SEQ ID NO: 228229 - DNA, 476 bp, Glycine max
  unsure (1)..(476): unsure at all n locations
agcttaccctcaatgacattccttgtctatttagttcctaactcagtcactttcaaagttctgctgagtgagtacaaagtcacttgcggcaatttggtgagtaattaaacactcctttgtatgtcaaattttaaaatgatatacatatctaatataaatttaatgttaatttcaggatgtgtcgagtaccatgttctcctttatgaaagctgcaggattcaccaatctgaacttagaagggattacaaagtataggatagtttatatttgagttcccagatacaacttctaactttattttattttggatttatttgtaattaaagtacattatactatagtattatcgatctgtaattttctgtttataacgattagtggtatatattgtgagggaattcgaacatcctanacacattcgtggaaaatttctgtttataactactcttggtcacgacatattttggtcaaaactc

SEQ ID NO: 228230 - DNA, 428 bp, Glycine max
tctatagaagttcgttcctaattgctctacaactgcatcacctctcaacgagctagcgaacaacaatgtgacatttacctgtggcgaaaaacaagaacaagcctttcctttgctcacaaaacagcttactaacgcacctgtactagctcttcctgacttttataaaacttttgaactacaacgtgatgcttctggagcgtgaatcggacctgctttgttgctatgtgggcaccctattgcttattttaatgaaaaacctcatggtgcgacccttatctaccccacctatgataaacagctttatgccttaataagagcactccgaacttgggaacattaccttggttccaaagaatttgcattcatagcgatcatcaaccacttaagttcattagatggcagagcacgctaacacaaagcatgcaaat

SEQ ID NO: 228231 - DNA, 390 bp, Glycine max
ctgatgttcgggttgaatgcatgacaggtaaactctttcatattcaagaaactaggtgcatatagagctacgacttcttggaattgatacatacagacatttgtgggccatttcatacacctccatggaatgggcaacagtatgttatatcactcatagacaattactctacatatgcatacctgtgtcttatacatgaaaagccacaatctcctggatgtgtctaaaacatctaaagcggaagctgaaaatcaactcaacgaaagaataaagtgtgtcagatctgaccatggtggtgaatactatggcagatatgacggatcaagcgaacaacatctggtgccctttgccacatacctatacgaatgtggaatcgcgccataatacacc

SEQ ID NO: 228232 - DNA, 313 bp, Glycine max
agcatctcttatattaccggactcaatcggacatccaagtaaaaatttatgtggcggtggaattttctaagaccctctggctgaatttcgagcgcctcgatatactctaagactcaaccgaacatccgagaaaaaggtatatggttgaatctcaacgagctttcgtttcaattacgagcgcctcgatatattatgggactcacacggacatcctaagaaaaaattatcgtcgttttgatatgctacgagcctccgttttcaattacgagcgcttagatattctacgcgacacaatcatacatccgagttaaaa

SEQ ID NO: 228233 - DNA, 357 bp, Glycine max
  unsure (1)..(357): unsure at all n locations
ctaagctggcttggttatacatgttngatacatgatttgggacttgtangatttgatttgagcaagattggatgaagggaagtgtgattttcgaaatctgcacttatgcagaattttgctgtcaaaataggtgcagcaagattttagcttggtgcagaaaatgcttgtgtgtggttagctgtggaaagagtagtgcagaatgagttctggatgtttgctagtagatcccaacggtcacaatgtaggcttatgtactatagacttccagtaaaattttggagtcgatccaacggttaacgagttggatcgaaggaattgttactggggtctttaagtgagaaaagctgtgatttggtt

SEQ ID NO: 228234 - DNA, 367 bp, Glycine max
aatgatcaatttcttctggtaatcgattaccatatatgtgtaatcgattacacagtgcaaattttgaattcaaattttaatagctgttgtaaatcatttttggccactggtaatcgattacatcctatggtaatcgattaccagagagtaaatctcttgaaaaagaatttttaacttaaatttcttggccaaaccttttgctacttcaattaggaattcccttcttatttaatatacccttcctaagactctagagactgtcttgatcatccatcttgaatatctttgtcttgaataaagctttgagaaacatgtgatcctttggcatcatcaaaacattcagcttgatccttttgctacactaaca

SEQ ID NO: 228235 - DNA, 265 bp, Glycine max
gattcatgattttgtacttgtacgattggactcgagcatgattggatgaatggaagtgtgactatccaaatctgcacttatgcagaattttgctgccaaaataggtgcaacatgatcttaactcggcgcataaaatgcttgtgtgtgggtacctgtggaaagagtagtgcacaatgagttctggatgtttgctaatatatcacaacggtcacaatgtaggcttatgtaccatagactcccagtaaaatcttggagtccatccaac

SEQ ID NO: 228236 - DNA, 471 bp, Glycine max
tcacctgccgcatgcaagctcggaaggttaaagtctcacgattgtcatgtgttcatgcaacaatagatagccgtggctatacgagacatcttgccaaacaaagtcaggttaacgataactcgcctgtgcttcttcttccatgctatatgtagcacagtcattgatccagtcatgtctgatgagttggaaaatgaggccgcaattaaactgtgccagttggagatgtattttccctctgctttctttgacatcatgattcacttgattgtgcatctggtcagagaaatcaaatgttgtggtcctgtttatctacggtggatgtacccggttgagcgatacatgaagatcttaaagcggatacaaagaatcttatcatccagaagcatctattgttgagaggtacattgcagaagaagccattgaattctgttagaatacttacagaatgtaaacctgttgggctcctgagct

SEQ ID NO: 228237 - DNA, 469 bp, Glycine max
tcttaagtcacctgcggcatgcaagctttatatagacttcagagccgtaatcctttgttagatataagctagttggtcgtctaatagcctgtgcgctatacacatggcacactactgtgcaaagagagtgtggggatcacaaacatcttttatagcatatcttcatagaagtacatcttgtcagtgtcgccttgtgcttagagctgacttttagtgtatgattcaaatacaatgttaatagcaaaggacaaaaggaattaagaatgtaagacaagacaatttaagagtttccctcttgtgtgctatgacatgtataacttattgaaccatggacgttactttctggtgataaatccttagctcttgaggatctaataaccagtccattggcttctctggactagatagtgaggcagcatcgcccaatgactgatacttccgctatcatggagagtctttcttctcattc

SEQ ID NO: 228238 - DNA, 455 bp, Glycine max
tctctgggaaaagagttttcaaacctcttaatgttggacgacttagtcttcaatcttttaaagcacttaataaagtttccatcttgtctcttggaaatttgcattttcgtcaaatcattgggttgtgatgcttcgagctagagtttttaaagagggagtgcattttcaaaattacataaagtcatctttgtggtcaagtatgaaacacttatggggcattgtgaattctaacattgtgtgtgtgattggaaatcgggcaaaatattaattttggtcccataggtgggctttgcaaactttggtttcagtggtgcaaattcctactaatgttcaagtgaacctaaaggctaagggtgtagactctattcatctatgccagtggaggctccttgattgtgtttccaagctaatcccaacatcgctaatgagattgagaacatgttcattcctttggt

SEQ ID NO: 228239 - DNA, 498 bp, Glycine max
  unsure (1)..(498): unsure at all n locations
agcttagcagcatccaacttcgcatgagcacctgttatcaccccanaatcgatagacagatggagttcctcaacagtacgttggaacaatatctccatgcctttgtgcattccaacccgtcgagatggggaaaattcctcacgttacagaatggtcttataacaccgctgttcattctgccacaggactgtcaccttatcaaacagtttatggtaaacctcgtccatccattccccattatttgcttgggtcctctactattgaggctgttgaccaattgctttcagagtgacaagctatgttgcaagctctccataagaagcttttcaaagctcanactgctgtgaaggtgcatgctgacaaanaacgcatggaagtgtcctatagtagtggtgattgggtttatattcgttntntcccctaccatcaaacgtcagtttccaggatgacatataccaaactcgcgaaacgattcatggccatatcaaatgattgaat

SEQ ID NO: 228240 - DNA, 479 bp, Glycine max
ttagtagtttagtcttagaaaacaattcaccgatttatgcttaatgtgattagttaggcctttgttcaacgggaaaaaaaattcatgtaacgcgcacgtctaatttaaagactaatttcatgacagtttgaatgattaattgaataaattaatgtcaaaaactttggaagaccatggtaacacttttcattattgacgaacagaatctagaaccaaagtaatgacattagtatgggtcttactttggtacattgtacatatatgtcgacgtgtacttcagtatatttggtacatgttcttttctttgtagcatcgtcatttgtaatgaatatctcttgcactatggtaacaatttttcgccttgtttcacgtgatgtatcaaggtgcccttctgatacattggtgtttgaagacgaatcgaaaaaggcaagcaatgcgcttcttgctcgagcatggtcacccgggtggagcaatgctga

SEQ ID NO: 228241 - DNA, 247 bp, Glycine max
tgtccaactcaacttcacgaatgctaccccctcctacactagccgttttggggattcccatcactccttcacctctggccactcctccaccaccatctttactcattcctcaacaacaccatttttcgcttctcccctgtgcttgccaaacagtcatcattttagtctcttactccttggtcattgccaccgttgttatgatctttcccgcaactgtgaggcccgcttcgtctctgtattccccaca

SEQ ID NO: 228242 - DNA, 455 bp, Glycine max
tctattgacagccactcatgacacatgtgcgcaagcgttcctcctttgtgagttattgtcgcaatggcatgtcgacatggcatccctacatcaaagctgtaaaatcagcacacatgtaggttaggaatgaaaaaaaaactataaagaacacaccctgtgagttgccatactccacaagtgcatgtacattcacctaaattgacctcaaccttattccctcacatgtggacctcatatctcatgcccatgttatcaccacaccaaatgggagtgcattgactagcaaaatgaaaatctttgtctaatctcttatactgcactggacataattgtccacgtttttcagaaagattaaccctgcgggcagccatggctctcatgatataacctctaatttcttcaagcctgagataatggcgtgcatcatactgcagattctggaatgaatactacaa

SEQ ID NO: 228243 - DNA, 480 bp, Glycine max
  unsure (1)..(480): unsure at all n locations
ngattgacatctgaattactttcctcttcaatttgactcttcattgctagcaaatgttacagggcattttagggatgtgtttaatggcaaaatgttactaacaagtgggtagttttggagatggatggttatcataatttggatagttttctgaccataagatttggaatacttggcctacttgtttgccagtatttttggacaatagttatgaggtgaaataaaagagccacttaagtgacctgattggttgggcattgcataaaatgttgcagatttgtcctccactgacaaaccaattatatttttccagattaagatattttanggaattattctcttcatgcagggctaaaattttcaaaaggaattgccaacatgtgctctaagttcctattgatggttgatttcatacaccttcgttcatttgtcttgtgtattgtggtattcatatgaagatcatattagaaaataatctct

SEQ ID NO: 228244 - DNA, 289 bp, Glycine max
tatgccttccttcataatagtcacgaagttcttcacttatgctcttgcaagagttatgactactataggaggcatgtttttctcttttcatttccttcattatttgtcttctttcttcctctcttattttctctctttcatcttgacttatttcttccactctttgtttaccttattcttttctctcttgtctattcttccacaacttaagggatctcaactcatctaatatcttatacaaggcgtccttaggagtagaaccctcaccattaacactagatgaagaatg

SEQ ID NO: 228245 - DNA, 459 bp, Glycine max
  unsure (1)..(459): unsure at all n locations
tatacatnactaaacaaacggtttaacatcttgaaagagttcatgatgatcttanaaaactcattaagcttatttatttgattttgtcatggaaaccacttcacctagtgatgtacaacacacctttgattatgaggaggtaaaggcattattggacgaaaaggtatccggtggatggaagattcttctaaagatttagaagaaaagttcaaggaaacgcttaaacaaaatgttttactgcaaaaagaatgcacccttgctaataatgagctcgaaaagttgaacaagaagaacttagatctctagacgaaatgtcaacgccataaaaatgtctcttctgatttaaactataagcttataggatgtgaggtcttgaatgaactactgcctaagattgtaagactctatgcagagatagaaaccttgagagataacctatgcaaatctgtcggtattcat

SEQ ID NO: 228246 - DNA, 535 bp, Glycine max
  unsure (1)..(535): unsure at all n locations
ggatctntaagtcacctgaggcatgcaagcttgcccaagtgagtctggtagcttaatgtttaaagtatcatctcacccatgcaagctagttgcttaaggctgaagaaatttcatggcccaggcgaacgagatgctagcctgtgcgagtttaggtctagaaaattctaggatatgaccattctacccctttccttatggctntttgtttttggatctgacaatcaactaccaaaccctgagtgaccctttggacttgtgctgcaactggtgccaaacacctaaattcaattagcaatgatcaaaacatcatatctgaatgataaaagtattatacccagatgaaattagggtctgacaatgccaaatcaaacnaacattatacatctctcggcttttcttctctctccttaagggtgttcagggtacaagtcaccacanacccgaattgaccataaccaatccgaacatgttaagttgagttatttatgtatntgtgtcaaaaccgaaccgaaccgatcataactgggtcatgtca

SEQ ID NO: 228247 - DNA, 457 bp, Glycine max
tattgccatgagtgcctcatcaaggaatgtcttgttctccttttctttcttggagacttcttcattgactagtctcgataaaagatcaactactatgttgtcacacccatttttatcttaaatctctaaactaaactcttgtagtagcaggacccatctaattaatcttggcttcgaatccgctttagcgagtagatattctatagctaaatggttagcttgcacaatgatctttgatcctacaagatatgatcaaaaattttcaagggcataaacactgctagcatcttcttctccagtgttgtgtagttggtttgggctacatttatcacttcgttggcataatagatagcatgaaatcttccatttctcttttgtccaatactactctaccggatagtgactaacatcacacattaattcaaattcttgctcctaattgggagccactataact

SEQ ID NO: 228248 - DNA, 487 bp, Glycine max
  unsure (1)..(487): unsure at all n locations
ngctngaaagaatagacgagccaggccatttttacatctgaggaacaccatattnggcacgaatgttaggattcgactactttatccaatatcgaataggaaaaccaaatgtggttacgaacgtgttgtcgcggtgctcagagttacccagtgcttcatgtttcatcctctcaatgccacattttgtgtttcttgaagatctctataaggagttgcagtcgcataacgacttcatcactttaagggagaagatccaggcgaaccccgcagattaccctgatcacgtgttaacacccaattttgttttgcatcgagggcgcatctggctaccttcagactgcaccttcatcaaggctctgctcacgaaatttcatcaaacaccaacagggggtcatatgggttctcgaacaacctcgaatcgaatagcggaccaccccacatggcagatgatgagtaatgacattcgcaagtttatgcgccaatacgt

SEQ ID NO: 228249 - DNA, 488 bp, Glycine max
agcttagtagtcctccgaaagatgttaggcgcttggtgaattggtatgttggaaggtccaccctaatccttggtgaattgattgtcagggtgtgatctccattgtcgatgttggttataaagaccttgctggaagcctaaaaatcctccttgagtatatccttgtctttgttgatttcccatatagtgcacttcttgagtgttttcttcaatgggaatacatcggcctatttcatgagcctcatcacagacggtacaaccagtaacctgcaatacagaagaatgtgtaggttgaccaatacacagtctatttggcaacttaccaagcgtttctattaaaatctcaattatcctagaaagcaacttattctgtgccaataaagcatcatgtgatgatagttctaacaagctcttacttgtgggttaatgaactctgtcgcgcagaatggcatgatcattggctaacatattctcaatatactctgtcgc

SEQ ID NO: 228250 - DNA, 474 bp, Glycine max
  unsure (1)..(474): unsure at all n locations
agctngacaattgttacaacatatntattgtgttatcccaaatcgagatcttataccacttattggtggatctcccaacaccatgtaagattgaagatatctcacattttttttctttagtggtagatctcattttgagatcttagatgagtcccacatggactctaattttaaatattctatttaaaattctaataaattaaaggcttaattacaaaaagagttcttttatttttttcatttcactaaattgatcttatttgtttaatttattatcaaagttttcatatttttcagaatttattatattagaccagaggaaaaattgacattcactggtcacttgctaagagtttattactccccttctcagggtcaatgattagctggtctacgttgttgcatacttgcatgggtttggttctgcgccatgatattgcaactccttctttattctttattcttggttatatc

SEQ ID NO: 228251 - DNA, 378 bp, Glycine max
  unsure (1)..(378): unsure at all n locations
tagagagaaagcttcaatggaggaagagaataatttagattgtggcatggaaattgaaggagaagagggtgaaatgnttgaactttgtagtgcatctcacaagtttctcattcatcaaagttatgacaagagttacacatgtttctatttatagtctaacacatgggaagcttccttgataagcaaggaaggtagcttccttgggaagctagaggaagaaatcttccttgggaagctaaaggaagaaagcttccttgagaaactagaacggggctactcacacccctgtaatagctaagctcaccccttgccacaatacatgataatataatgggaagcttccttgagaagcatagaatgtagctctcatgaaaagct

SEQ ID NO: 228252 - DNA, 431 bp, Glycine max
  unsure (1)..(431): unsure at all n locations
gcttggagtttcaagtgtcttttcgtcttcttcnttagtccagacatgttctggcttcaattcatcagtgggctttccttctgtgtccagcatcttgggatgttcccagcctttgatgacagctttccaggttctgctatccagtgatttgaggaaggccaccattcttgctttccagaattcatagttgcttccatcaagaattggcgagctgttcactggacctccttctttctccatgtccatcagaagttatctcaccagatctcactctgtgatttcgagtgctggctctgataccatctgacattctgataccacgggacaaatgtcatacaggatgttccgacatcacccttcataacatgcagtgtatgtgtgtccgtatgaacagattaaacaagctatatcacacgagaattgttacccag

SEQ ID NO: 228253 - DNA, 345 bp, Glycine max
ctaagtgtgagaattgaaaatatagagtggagatttgatgtcatatcatctaattcttctcatggagaagatgaggggcttgaagaggatgagggaggaatgaggaactatgtataacgagaaaagaaatcatataagctctggatgtaggccaagagaggaacggatctatggagtgaagatgaagatctatacttttaaagagacttatgatccacaagtgtaccttgagtgggagataaaggtcaagcaagtgtttgcttgctacaactacaatgaagagaagaagatcaaattgacctccctggagttcgacgcatatgcctaattgtggtggaaccaatg

SEQ ID NO: 228254 - DNA, 493 bp, Glycine max
  unsure (1)..(493): unsure at all n locations
agctatgagaagagctattcttcatcttctttctaagctaatctggtggcttagtgagcttccgctaagcgcaacactcatgggctaagtgtgaggaagactctggaagaagatgagctatataggttcactaagcgcaccgcttcatctcatccactaagcgagaaaggcacgcgctaagccgaaattcactaatgtgcgctaagcggtccataattgcactaagcgcacgaactcgaacaaggccacctatttatgcctgaaatcagattttagagaaggagtttggactgggattcagatctttgcatgtctagagtttctacagagagaaaggtccaagctccaaagagttttgagagaatttgctgtgtgaagatctgcagagaccagagcttgaacacaagccagtttgagagctngagatgagctngtgagtgattgtgagatcctagaggtgaatgagacatcctaccacttgtattttgcaatc

SEQ ID NO: 228255 - DNA, 332 bp, Glycine max
tcttgaatgtaacaaggcatgaatattaagacatgtttgagacgttcttattacaattcaaatatggctgccctatgaggaataccttgcacctacggagcatggataatacctttttacggtatgtatatatgtgaatatatatagcatggaaatgccttgcatagtgcgcgaatatatagcataaaaataccttgcaaagtgcgaatgtataacaaataatgcattccaaaaatctgtgttgtatgatacgcagcgctaaaatgcaattccaaatattgtatatttgtggatgaggagcataatgagacttctataaaatcgtacccatg

SEQ ID NO: 228256 - DNA, 487 bp, Glycine max
  unsure (1)..(487): unsure at all n locations
agcttgttcagaaacgtgcatttgtgtgcaatacacaattcccagtacaccacaacaaaatggtgtatcagaaaggcgtaatagaactttaatggatatggttaagagtatgttaatcaattaaactttacccatatctttgtggatgtatgccttgaaaactatcatgtatttgttgaacagagttcctagtaaggcagttccaaagacaccttntgaactatggacaaataggatacctagtataaggcacctgcatgtttggggttgccaggcagaaataaggatttataatccgcaagaaagaaaattggatgcaagaacaatcagttgatatttcattggttatccaaaaaagttaaaagggtatatgtnttattgttctaatcatagtatgagaaatgcaaaattagaaatgaaggttcattgaaatgatgaaatagtgggagtcagttcacgagaatggaataaagaagtagagtgtagt

SEQ ID NO: 228257 - DNA, 470 bp, Glycine max
  unsure (1)..(470): unsure at all n locations
gtcattactctatattngacagggtgcatggaagtcacgatgactatttctaatatgtctgatacatcctcatagaagataattcctttgcaaatgctagaggcagatcataccttcaaagctatcttgtgaccgctgatgattctaattacaaaagcatctaaagcttatactttatggtcagattgcagagttacaattcttcaactcttaagacagatgatgcttcactatttagctactctgttggctgtgaatgaatataaattgccctgtcagctgtgttaactacattctttttaacattcttcagatttctatcagaaaccaaataaaagtggattgtatttcatgagttacttccatgtctccttgaattacttacaaaatcgtttgataagttagcaccctttgtaaagacatatgataaactactatatttacactcaccagctggttgcanacatgta

SEQ ID NO: 228258 - DNA, 500 bp, Glycine max
  unsure (1)..(500): unsure at all n locations
tctaagtcacctgaggcatgcaagctcggtanaatacagggcatccttaccttatatatgcagaggacaaaacagacaaataacagattaaactgccatatggattttagtcacaacccaataatccaccaccttgaactaacatccatataagacacaaactattccctccaagcatacatgaacttaaccccaacaatcaacattgagcaagcttaaacagtgatcaaacttgctctttggaactggctttgtgaacatatcaacatgattgtgcagaatgttgatcttatgaaccttaattcttctttctgaccgaatgaagtgatatctaacatctatatgctgctctatcatgatgaacttaatccttggccaagcgtataacactaaggctatcacagtagatggtagcatattcttgattaatgtcgagatcattagtcagacctcccagccaaattccttcctttgcagcttcacgaaaagccatgtattca

SEQ ID NO: 228259 - DNA, 487 bp, Glycine max
ctaagcttgatagtagtaaccctagtccaccttaagcataactcccattgtttaacctaccatttgaagaaaatcatcattaattgaatggatcaattggaatttctgacatctgaatccacacataatgcagctaatcttctaccaacattataatgatttaccatgtttgcactaaaatataatgattcgccaccatctatggtccctccgaaaaggccaaattatagtgttcatcaaaagtaaaaaaaacttgataataatcccttgatacattaatattttttatatagccctttttggtcactccttaatgagtttggcttccaaaagccgaaaagccactttcttccccaaaacgataactacaagagaactcttctatgtcttacaccaattctaaaattcttcatctgatatatgaatctctctatatcgtttcaaaaccaccttataaatatgagcatgatattcttctttatggact

SEQ ID NO: 228260 - DNA, 465 bp, Glycine max
  unsure (1)..(465): unsure at all n locations
agctttgccnctgcaatgcacaccgaggtgtgactttattctatggctccattaattttttcctaaactatgattaaatttatttcaaagtgcttaataatattaataacttgtgaaatattcctattagatatttgagtaaattatactcacatccctacattcttcttaaatagcattggatactcttttcttctttttacattacttttatcccattttgttaacttcattaactaacatcaattgaaatatgtgggtagacaaaattgtcctatcatctttgttacactagcatcccttgtgtttattctcaaattgcataagatgtctctccctatttctacattacttttatcctccttctcttaatgtccgtagttaacgtcaattgaaatatttgagcaaacgagattgctctaacatccttattanatattcactaacagattaacaattgatctc

SEQ ID NO: 228261 - DNA, 411 bp, Glycine max
tgccaactttctatttcaattggctttggctcaagccttcgagattctgttgcctagagactagagtgattatatttctttagtaaaatgaaggatcctggcaccaatgattctagctgagttagttgagtaatatccgtgacttattataaactttttggtaaatgaattggattgttagggattaaaaatgaaagatcctattaatgaatgttgttaaatattctcaattacttacaatatatattcttggtataatgaatacttttttgtttacatatacatctatattttatatatctagcagatgtcctaacgctctattttgattgacagaaaaacgctatattgaacataatacgatagaattaacgctgtcaattgtgatcatggcttcgattgtggttttat

SEQ ID NO: 228262 - DNA, 534 bp, Glycine max
  unsure (1)..(534): unsure at all n locations
cttgagtcacctgctgcatgcaagcttggcgacgacgaatgcatcagtggagtttgttcccaggccgaggaccatgccgctcttgacggactccacggccttgtcggcggcgagtctcttgaggtcgtcctgngtgagggtgatggcgcggatggcggggagggagtggggtggagtgcgcattttaagggagttaggggtgcgtataataatgcgcgtggaggcgttgtggtgtgcggaatatagagatgggggagaggagagggataaggaagccattgatgattatggtaagagaaaacagtagagccacaccccacccaggtttgatgctttatgattggcccttctttattactctatctctttgctatcaacacanagttgggtggatattccttttccatcctgctgattcattcacctacttatttgtcttcttttctcctcttatccttacataggaacaaatctaactcttcttctttatataanagaaactcctccattaattgttcattcttcgtattaata

SEQ ID NO: 228263 - DNA, 454 bp, Glycine max
  unsure (1)..(454): unsure at all n locations
tactaagcttgtttagggaaagggcagctctgcgtctggtgcaggcatgctatctctgaaaactntcccattattagtaggatatatgattaacatttctaaaactatactaggttatccttgttgcagaaatttgatgaagctgcaaatgctttttatgatggagtaaagcttgatcctgagaataaggagcttgtaaatgcgttcaggtctgcatactattctcattattaacacttcttggcttatagacattaaactatgcaaaaggaatcaatatgatcaccaagatttaggatgattcctatgaaggaggcaaacataatttacagaaacatgcatcatacacatggagctctgcataagagaatgctagtgtgtgatgccttatgacagtcaagataaaaattataatcactggatgaggatgaagatcctgttaatgcctgtccgt

SEQ ID NO: 228264 - DNA, 424 bp, Glycine max
  unsure (1)..(424): unsure at all n locations
agcctataatatatcgatacgctcgagatttatcttctgatattcncgcgaaattcaaatgggcataactgttcacccggatgtcctattcgggcgcataatatgtcatgagtctctatatcgaacaacggaagctcttgtaaaatacaaatggatataacttttcacacggatgtgcgattcaggcatattacatatcgagacgctcataattgaacaatggaggctcttgagaaatgtaatgggtcttaacatcttactcgtatgtccgacttacgcgcataacatatggtgttattccaatttgaaccgcggaagctctctgcaatccaatggcataactttttacactgaggccgatcacggtataaaatattgaacgctcgaattacaccggaactcctaaaattcaatgatcttattt

SEQ ID NO: 228265 - DNA, 290 bp, Glycine max
  unsure (1)..(290): unsure at all n locations
tatgaaactnaacctgtccacataggggcgagtagagagcactttacttgtttaaattcagacacccccatatatatacacgtggggacatagggcaaaaatccgacggattttgaagcgaagatttgcctacatcagtgcatattttgactcgggtcgtacctaacactccaaataagatgggttatattagacaactggtgaatgcaaagaatataaatggacccgtcctgtgaatgaacacactttcctccctctatatgatgcatggacacttatacctgacccaa

SEQ ID NO: 228266 - DNA, 492 bp, Glycine max
  unsure (1)..(492): unsure at all n locations
agcttttacctttcatatgtaacccttatatcttttccggccaaaattgtcatagataaagcaatgttgatgttcaaaggacactctaaatccctttttaatcaactgacctacgcttagcaagttttggtcaatgttaggtacataaagaacatctgatattaatttgatacctgaacacgttgaaattgcaacagttccttttccttttataggaatatagccaccattcccaattctgacctttgagacattagttggcttcaaatccttgaataaagtcttatcatatgtcatgtggttcgtacaaccactatcaatcaaccaactttcacttgattcactactcaaggttgataatttttctttttatccttaccttngntntggttgtttgcactatnttcgctgcttgctggctggttcttctagaaaaaatcctttttgtttcatcaacttcatgatgtttggtgggcaaagcatgtgacaccc

SEQ ID NO: 228267 - DNA, 438 bp, Glycine max
cctattcaaatttcaatcgaggaagcttcgccgagtgtccccattgaataacctttattcaaacctttcaaagttagtgataaggctaaacgaaaaattagggaacttagaaaaactaaatccttaattgaaggcgtaggtgacaatcatagcgaattactaaacaagattagtagtttgcttaaggtcattccatatactccccaagcttcggaaaatacttccaaaatggtaacaagaagtacctccaaattaattaatgctattaatgaagatagtgaccaaaacttatataacacaactgagataggatcagtgtcagaaaagaatatatatccattaaactccaaacactggataaccccctccaaatatattataacgtccaatgcccctgacttctttagatatagaaggatacaatttaaagttagtgca

SEQ ID NO: 228268 - DNA, 408 bp, Glycine max
  unsure (1)..(408): unsure at all n locations
agctntgagcaaatagaaatgacaatatctttatactttgatngtccggtgagtcccgtaatacatcgagacgctccaaattgaaaacggaaactcttagaaaattcaaacaacaataactttttactcggatgcccgacagattgtcgtaatttatcgagagatgctccaaattgaaaacagaagctcgtatcatattcaaacgacaataactntttactagtatgtctgattgagtcccgtaatatatcgagacgctcaaaatcttgatccgaagttctgagataattgaattgacaataactttatacatggatgtccggctgagtcctgtaatatatcgagacgctgcaaactgaanatggaagctctgaggaaattcaaacgacaataactctttacttggat

SEQ ID NO: 228269 - DNA, 466 bp, Glycine max
  unsure (1)..(466): unsure at all n locations
ttgtgcattntcgaatgacaataactgtatacactgatgttttattgagttccgtaatatatcgacacgctcaaaattaagaacagaagctctgagaaatttcaaacgacaataactntatactcggatgtcctattgatgtgcaatcattttcttctattttatataccctgtttgcaccatcttaattactgattgtgcttaattgccaattaatcaagcagccttattattcgggcccatttagctaacttgatgttttaatctaatttcaggaattaatgaaacactgggcttaatccgaactttggttatggacttgaagacggcatattaatcagcgcttaccttcattaatttccaattatgatatttcgcactttattctatgttggtcaaagcttatttcggtgttgcgccacagtattggaatatggcccactgactctgagtgactctctttaaa

SEQ ID NO: 228270 - DNA, 474 bp, Glycine max
  unsure (1)..(474): unsure at all n locations
agctntgatggtgtcgagaagaaatcacatgtttgtcatcatcaaaaagggggagaatgtgaatgtatgtatacatgattttgatgatgccaaagaagaatcaaactaagttgcttcaaaggataagcatggctttaagattaatacaagattgattcaacaaacatagccttgcttcaagattaactcaagatcaagcctggccttaaaacaaagtgctttcaagacatgcaaggctctggtaatcgattaccaagcagtgtaatcgattaccagaagacagggttgagaaatagctgttgaaaagggttttgaatttgaattttcaacatgtaatcgattaccatatgtntgtaatcgattaccagtggagagttttcaaaaaagtcatgacacttcaaattataactgtgtaatcgattacacaaacattggtatcacataccagtggagagttntcaaaaatatgctaac

SEQ ID NO: 228271 - DNA, 330 bp, Glycine max
  unsure (1)..(330): unsure at all n locations
ctaatgttcagaactatgataagtagacaagaatctcaacttgcgaaaacgcanaacattctgcatgtatgttggtcttaaggcatgcatcactccattacctaataatggatatggatgatatgttacagagtggcctttgccggtttcatcaaccaccagacaggcttcatagcatccaattggatgccattatatccaaagatgaactcttgagggctgacacaaaataattggtctgaaataatataaagctatgttcgcgctttccgttggcaggactaccacctgaaaaatgtaatggacatgatgcgaggatctggagggtat

SEQ ID NO: 228272 - DNA, 379 bp, Glycine max
tctatataatactcaacccttgacgagtaacagagcaaactattctgtttgtgaatgtgtttttaatcaaacgccgaacccggatggaattctatcttacttcaaaccttttggcgaatgacaaacgatgactctttgacggccatttccaaatcccgtgctcatggaatgctctcctatacgaaccaatgtcttctttcatcgctcttgcgccccaatgtacatgactcacaaagtttgcgtgaactcttacccatattcttggcgcggtacatgtataaaatcctcgccaaattacttaccacaagaatgaacacagtgtcggatggtatcataaatgatagacaaagcgtcgtgcttggagaatgatccatcttca

SEQ ID NO: 228273 - DNA, 339 bp, Glycine max
gacactatgaaactcaacctcgtcaatacgatagagacaatataatcattgtttacagttttatccagttctatcctacgtgaggtagcagtcatgtcatttacgacctagggtctgctcgactggaataacgggctactagtgcaaacgcggagggcctgcaatgaatatcactacactatcgggcgaataaaaaaggcaatacgcatcataaaataaaatgcacccaattacaccttcgcgctgttccttattccaactgctcaagcacgccgactgtatgtcaatgaacttcaaactaaatggctgcctactggtataaactacctctcagttggc

SEQ ID NO: 228274 - DNA, 443 bp, Glycine max
  unsure (1)..(443): unsure at all n locations
atccttaagtgactgagatgcaactatgctganatattacaatagtccttctcaacctcatcaggaaaatcaaccacagcagagcaattatgacctttccagcaacagatacaaccctggatggaggaatcaccctaacctcagatggtccagccctcagcaacaacaacagcagcctgctccttccttccaaaatgctgctggcccaagcagaccatacattcctccaccaatccaacaacagcaacaaccccagatacagccaacagttgaggcccttccacaaccttccctcgaagaacttgtgaggcaaatgactatgcagaacatgcagtctcagcaagagaccacagcctntattcagagcttaaccaatcagatgggacaattatgtacccaattgagtcaacaacagttccagaattctgacaagcctgcttctc

SEQ ID NO: 228275 - DNA, 424 bp, Glycine max
actcaagcttaaacttgaattaaaacgttcaataactgctggtaatctattaccatatatgtgttattgattacacaatgaaaattttgaattcaaattttaatagctgctgtaaatcatttttggtcactggtaatcgattacatcctctggtaattgattaccacagagtaaatctcttgaaaagactttttaacttaaatctcttggccaaacctgttgctacttcaattatgaattcccttcctatataatataccttctctaagactctagagactgtcttgatcatccatcttgaatatctttaatttctttgtcttgacaaatctctaacaaacatgcgatcctttggcatttatataacactccacttgaactttgtctatatcttcctctctctgcgatgacaatccctgaaatc

SEQ ID NO: 228276 - DNA, 61 bp, Glycine max
tgcagctgatagtaaggtaggaagaaatcctgtatttagcgcgaaacactcactgttgtat

SEQ ID NO: 228277 - DNA, 500 bp, Glycine max
  unsure (1)..(500): unsure at all n locations
gtcacctgangcatgcaagctntcatccaatatatgcattaaatattattgatatttaattatgtgtatgagttatgtaaatgaatcttgcaaaatcaaatatataaatagaaaattacattagacgatgttaattaattctccttcatcatgatcattacgattagcatgaacgtcatcagcttcttcttctccgacaacattacgagtgatttgtgcggtcaaaggactaacataggtgtccatgtatgaatcatcatcttctacattgacaccaattgttttgccctggagaaccacgcaccacctttcatcacaaaatacttgtctagcttgttctgccatgatgaaagggtcattttggtaaccaagtttctttagtctaccaacataaatcctatatcatcggtgcgcacaccggtgttggtgtcaacccatttacatgtgaaaacacatacagtagatgtcacatagttaagctcccatattcatcaatgaac

SEQ ID NO: 228278 - DNA, 484 bp, Glycine max
taagccaccagctcgcctgggtgagttaggtagcaagctcctcctccattcttcctataaaagggcattagaggctgaggggaaggggttcaacacctttggtatttagattttacttaaaattagtgagaagaagaaaaaagaaggagaaaatcaaggtcgaggcacttctgtaatgcttccgtgatcaaatccgtgaatgttcttcacagttcttcgccgttcttcatcgttcgtcgaccttcaaccggttagttttcgattcaaagctttgaattcattgtatgcacccttaggggtccattcttgctttgtatgttttcatcttcatctcgtctaccttcggtattcttttcttcgttttaagcgagtttcgaccgattgtttaagccgtaatctcacttaatcaatgttaaaatgaatttcaaccgatttgtttgattgtatctcattaatcgccttaaataaaatcaaccgacatttt

SEQ ID NO: 228279 - DNA, 481 bp, Glycine max
  unsure (1)..(481): unsure at all n locations
agcttatacgatataagctaggacctaatatttgaaagctatctcaaaacttgtaaactagttgatttaattaaaattattttgtaagactgactttaagttaattaataaatgtcaaatgatatatttaattgtgtgtaggctttagttaacaaaaaggaaattttttgcttttaatagataaaataaaaatcatgcagggaaacaaatttggtcatatacttattgcaaaaatagagaatgattcaacaaataatcataaagttgatatgattcaaaaaacttataactttaagacataatgtagtgatgataattgtcgaattgactatcgtgtatgtataaggacatacaatcacatataagattctcttaatcacggaaaanaaaatataaaaggattcttaatcgaataacagataaacataattatattataaaatttttaaaaaactaataactataaattaactatttcata

SEQ ID NO: 228280 - DNA, 320 bp, Glycine max
tcctgactcaccataaaccttgacccattgttagaatgtcaatccttaccttcggaagcgaaaagaatagaagggaaatttccaatcaaagaaaaggaaagaatgaagatttcctatcaaagagaaagccaaaaaagaaaagaaggataattcccaatcaaagagtgggagaaagcaaatagaaaagaaagaatattcccaatcaaagaatgggagaaagaaataagagaaaaggaggaaagaaagctcctgatcaacgatcgaataaaaacagaagaaatgtgcagagaagtctttggaccggacaatatctgaacaat

SEQ ID NO: 228281 - DNA, 405 bp, Glycine max
cgtacccaccattttttatattaaacactggtaatgtgcctactattattgtgatcatctctctctccgtcattggaggtgccacttgagctgccaggtctctccatctttgggcatattctttgaaagattcgtgcccctttctgcacatgttctatagttgcatcctatccggagccatatcagaattgtactgatgatgtaagctccattggagcttgtaggcctaggatcttcttcatcaatggattcctttgcttcttggaagatgaatggcaacagaatggagaaggaagagagagaggagacgccacttcaaggagaagatgagtctagaagaagctcaccaccatataagggcatggataagagcttggaggaagaatgagatgaatgaatggagag

SEQ ID NO: 228282 - DNA, 418 bp, Glycine max
  unsure (1)..(418): unsure at all n locations
tgaggganaacttgatgccttggtcaacctagtatcttatctngccatgaatcaganatctgcacatgttgcaagagtctgtggtctatgttcttctgcagatcaccatacagaactttgtccttctttgcagtaatctggagtcaatgagcaacctgaagcttatgctacaaacatttataatagaccccctcaacaacataaccaacaacaacagaataattatgatctttcaagcaatagatacaatccaggttggagaaatcatccaaatctgagatgggcaagtcctccacaactacaacatcctgcccctcctttccaaaatgttgttggtccaagcaagccatatgttcctccttcaatacagcaacaacaacaacagtagcagcagtcacaacaaagacaacaagcaacg

SEQ ID NO: 228283 - DNA, 492 bp, Glycine max
  unsure (1)..(492): unsure at all n locations
gatccttgagtcacctgcggcatgcagcttttatcaatggagtcctatttagtttcttgaatacagagaatatcaactttgttggccagagttaacttccgaatggctgacctcttgactccactacccaaacctctcgagttaatagacaagatattcatgcgtcatggtgatgctttcccatctctactgctactacagatgtgttacaactgctatccacttccctcttcttcttgaccatatttgtagtgttctccgcaaaggataatcctaagtctctagctatctcccagtgagcatcatcctccactccataataatcattgttgaagctacttggcgagatggggctatgagaaggccgctcctgagtaggggtcaatggggctgtatctaaagcccgagacatgcctccttcgttgttatgtttggtattactaactgtacccagcttctctgattcaccacttctccagtcttataanaact

SEQ ID NO: 228284 - DNA, 412 bp, Glycine max
tcttgcgtagccgctcttggtgctcagaaaatcctctattctaatccctcatattactagctattctgaattctttagttcctgaatgtacaaccttcaaattgttgcttgttcctctctttcttttctgcaaaaaagaaaatcaaatgctatcaaaacatggatgaagtcctaagaaaatcaatatcaaagaaaacatggatgaaatcacaattaaaaagcacaactacctatctttcagagtcctttggttaatttgtcttgtctccttatgtggtggggttttgtttaataatcttatactttcgccttccataaaaaacttatcactaatcctcttttcattaatccaattgtgtatgttattgtataaaagatcatgggttctccacctgcctccactcctcctcct

SEQ ID NO: 228285 - DNA, 368 bp, Glycine max
tgaggcaaaatactatctcgacgtgacataacattaaagttgccaaaagaacatcatactattataaaacaaaatggaattaatgcgttgtggatatcgatattaatattaaaattttatatgaccataatacatacaaatattattgtatgtctcttaacatttatttagatcttttgactcttttatacctacaacaaaaataggtctccggtttgagattaatcatgagcaaaacaacagagtatttgtttatcttaattacaaacaattcttaacaaaatattttcatacaaaattttattaattatagtggatggacataacttattaacatgcttatcgtaatattgaatgttcggatatac

SEQ ID NO: 228286 - DNA, 403 bp, Glycine max
agcttacgagaaggtggattcgccactggatattgtgtatcagctggcactgattcaacccgtgcaggagtgggctcatgaggagcacgctcattgggtctcaccattgaaggtatagctccagggcatactacttgctcaaggaattgctccatagtgaaaattggcctttggtgagtcaattctcacaagctgtgcatgataataacctgtcattggaataagctttggagcatatggactaaagtttgggagctctggacatccggtcctattgttgctgacggaggagctggagtggactgatgaaaggatgtcatctgccgacgccctggctctccttttactcgatgccatctataaataaaaagaactcacaattcaccttacaccataattattt

SEQ ID NO: 228287 - DNA, 449 bp, Glycine max
  unsure (1)..(449): unsure at all n locations
nggtgcatatgatttatatgctccagcttgaggtggagtgtttaatatccttgcattttatctatatgtggtagcttagttggtaagcttgctcaaaagggcaacagtgagttgtcactgtcattgcccttctctctctatcttgtattctatatatatgtaactttttgaaattaataatgctaagagagaaaggagggtgtttctccttcagtttcaagtattgtcactggaaacaatcccacattcatcaagtccttagttaccaaactcaactctgagttctcacttaaagacctaaggaatcttgactatttcctgngaattgaagtangatctcaactcaatggtgcactcattcagacccagtcaaagtacattaaggatctattcggaaaacaaaaattgataaggccaatactatttcttctccaatggttggaggctgc

SEQ ID NO: 228288 - DNA, 388 bp, Glycine max
  unsure (1)..(388): unsure at all n locations
tgttgggtgtatttatatcccatctgtttaaggttttgtgatgatgttggatgttatatgctgaaattgtgtggaaatctgtacagacgaagggtataactaacccaggttagaaagtgagaattgatgtttgagtgaaaaaaaagagtgagactctgagagtgcaaggctagtctgaatttgtggtaatggggttgagtgagttatactacttgaaatgtcattanaacatgtgaaaagttggctgactataagaaaacaatgaccaagtgaacaagagccttgtaggcaattggtgtgaagcaatttgattgggatttagtgaatcattggcaattaatgtgttggactgggaggaattgttaatactattaattacttcacctaa

SEQ ID NO: 228289 - DNA, 424 bp, Glycine max
tcatgatgatgaatcaagtagttgggatgatgactatatgcccaatagaatgatgtcaagattgagtcaacaagttcaagatctagatttaagaacaaacatctagaagaatctagattcaagagaagatgaattcaagattcaagagaagaaaccaaaaagcaacaagtcaagacttcacaagggatgtattgaaaaaaaataattcagaaaccaaacatagcacaattgtgtgttacaagaaacgttgttccaaatttttctaagttaccagagtattcactctctggtaatcgattaccaattacctgtaatcgattaccagtggtaaagtttgatttcataagcttctaactgaatgtgcaacattccatatgttgtgtatatggtgtaatcgattacaatatattggtaatcgattact

SEQ ID NO: 228290 - DNA, 466 bp, Glycine max
  unsure (1)..(466): unsure at all n locations
atcttaagtcacctgcggcatgcaagctntgtaatgttagcagatgaatatgaatctgtggccacctcatggaatcctctaaggacaatagcatcatttcttgcacttaattgttgggagttggaagccatcttctcaatcaaattcctagcctcagcaggagtcatatcaccaagggctccaccactggcagcatcaatcatactcctctccatgttgctaagtccctcatagaaatattgaagaaggagttgctcagaaatctggtggtgagggcagcttgcacacaatttctttaatctttcccagtactcatacaagctctctctactaagttgcctgatgcctgaaatgtcttttctgatggcagtggtcctagatgcaaggaagaatntctccaagaacaccctcttaaggtcattccagctgaaaatggacctaggagcaaggtagtacagctaatctt

SEQ ID NO: 228291 - DNA, 465 bp, Glycine max
tctatccaaatggacttaccttgtattaattccttcgatatcccttttgagccttgtttacctttccttgttttgaagctcactacaagccttaagtgaaaaaccatgatatcaccatatccttaaggaattttggagctttggaattgttttgggaataagtgtggggggtttttgtttcattggataacatgttttgttggctatgtttcatgatgtattttggtccatacttgatgtacattgtatattggttaaatgtcggacatgctgaatgagatgctgtttctcaaaggctacagagcaacatataaaaaacgaaaaagaacaagaaaagcgataaagttgagtgaataagatcttaaatggcacaagaatgatgagactcttggttctactctttatgtctaaaatctatctttatttccgtttatctttactttgtttcatttctttcttaatatg

SEQ ID NO: 228292 - DNA, 455 bp, Glycine max
  unsure (1)..(455): unsure at all n locations
agcttatatcttatttattgtaatttttaacacatgatnttattattatttaactcttatgtttacacatatatttaattcaggttcaagtcttgaaaaaaatgagataaaaaaaaagacttcactaaaagtatttaataagatattttgacgggtaatgatattttgcatcaataacataattaagaaaagttaatatatgttaacaataattntccaaataagttaacatttaaattagtattagtatacgttttaattttttttaagaccattagataaatcatattgtatagcggttcgatttatataaatcttgtgtttgataaacgccattagtaatcctctaaataactaanaataaaataaaataattgcaacagctcgtagtggggcaactcanatacaaggccctcaatttccttcggagatggataggctggaaatctcgaatc

SEQ ID NO: 228293 - DNA, 442 bp, Glycine max
acttgagtgtctgctggttaagtacttgagctccatatgaaatccgttgctttacagatctatttgctagagtattatatatgggtacattagtatatgataacattcatgcagatgctactcaaactactttaatctgattatatgccaaattctgtgcagattcgaccattgtggagacactacttccagaatacacaaggtcttatctttgtggtagatagttacgatagggaaagaattttagaagccagggatgagttacatagaatgttgagtgaggttagtaatttttcatatttagtaattgttttatatccatatactctgaatcatggttaaatgtttatccactgtgcactccaaattgaaaaaaaataaagccttggctctcgacataaaggtgaaataatgttgcaatcatcttgatatcatgagcatt

SEQ ID NO: 228294 - DNA, 458 bp, Glycine max
  unsure (1)..(458): unsure at all n locations
ttgtnatgctagcattcactaatatatggagcttgccactgcttattctgatgatgacaattgctacgccataacaacgctacaggcggtaaacgacaaccgacctttaaataaacctgttgtacatgcaaaataaaataaacttattcgtccaccactgattgcatatatataataaaaacactgtatatctataatgtacctgcacaaaatgatggtcatacacgttaccgatacaaattatacaatgcactgacaaatctgctggtggatgacttctacaaggaaaaatagaacgctttgtcgtgagacacggatccaatcaatacattatcacttgatgcagtgacctatcccatgtctgggatatacatcctcttatgcataggaactcgaacgaaacagactccaccttaatctaattcgaagttaacctataaaaaaacataattactacc

SEQ ID NO: 228295 - DNA, 400 bp, Glycine max
aaaccaactaaattaggaccttcaccgcacgagactctttttgataaacacacgtgaatacttttcgagacactaaccctggaaacttgattttttttctttgaagaatcattagcctttggtaattctgatctaaaccgatcaaaatggaacacattgaaaagatgacacaaattcttatagataatttgagatatttatgacacagattttgagacccgctctcctaattagattttccaatcccaaggaccttcatctggttaccctatatactactctatggcacaatatttgatggtgcgatttcccaaggcatgccccttgattgattcctacctgccccctggcggacataacgaggtggactgtccaaggtatctccttttaatctttacct

SEQ ID NO: 228296 - DNA, 297 bp, Glycine max
  unsure (1)..(297): unsure at all n locations
gaactaanacataaacactaanatttaaatgaatgaacatcaatcataaaataaatgaaaataactaaaatgttcataatgcacaaatntaaatgtcctgctcctgtggttgctcatgtgcatgctcattgagatccaacacctgagtagctggtgaatcctgagggataggctgctctatctcagatgctagtgcaaatggtatgacatcatcaggtatgggtactggggatggctctgggatctggtctctggaagtctcctcctcttgagccacatgtacacctgcatcaaaat

SEQ ID NO: 228297 - DNA, 284 bp, Glycine max
  unsure (1)..(284): unsure at all n locations
actatnaatactcaaactcgtgcagatgtgtgacagactcaaggatctagaggattacttcttgtccatcaacaatgaaacaatattgatacaacaatatgcgtatctcaagtacatacccttcatcactaggtatgatcaatcagcagttgtagcctgcaagagtacagaaaaaataccgataagctacagcgcctaacgttggaagcgtattgctgaacataaccattacacatgaaatctttggtgtgtgatagtaaaccgtacccaatgaatcgagactt

SEQ ID NO: 228298 - DNA, 449 bp, Glycine max
  unsure (1)..(449): unsure at all n locations
ngcttgcccaggcgagctgattacttctctcttgaagtaatatggtggcccaagcgagccagaggctatcttgggtgagctaggggtcacacaaagtgagcatatgacccttttgccctctcttttgagtattttccgcattcttttgtgagacatcaaaaaacctgttgaattgcatgacaactggtgtcaagcaattcaattcggctaacaagaatcaaaacgttagcaaatgaaggtccccaaacgaaattagggtatgacatatgctttaatcaattacacaattggtttcaagtttacaaagttatgtctcgtgtcggcttaatcaattacagcatcatcataatcgatcaaatacttgtttttgagacgatgattgatttattgcagagtctctattttaatcgattaccatgtgatataattgattacttctctttctataa

SEQ ID NO: 228299 - DNA, 437 bp, Glycine max
tcgtgcattcttttaaatgatcaacaaggtattttatctttctcatcatagattttcaacagtcactcttcatgaagcattgtccttttctccacttttcaacaaataagcctgcatcacaagatgagcttaattttggtatccaattgactagtgtccttaaattaaaggtcactataccttccttttttgggatagatattcctataataacaatatgagtctcacaacttcgctcgttgttatatcatgaacatttatccctagtcttttgagcaaaaatggaaaactctagctattgcttctgagatgtctttataaaactcttggtacgtagaaacacaaagaacttattgagaattttgaagacacaatatttgctgtcttaatctcccatcttagttgacaaactttcattcgtatatcagagtcttttc

SEQ ID NO: 228300 - DNA, 91 bp, Glycine max
catgagtaagataacttaaaaaaaaaaagcggatatgaaatgtaaaccttatcaatacctataacccaagacggggagggtttgtttaaaa

SEQ ID NO: 228301 - DNA, 416 bp, Glycine max
  unsure (1)..(416): unsure at all n locations
atcattaaccttctcggcgtagctccaatgggcatcccaagatacgctataggacactgccgaggtccacaattgaagagctcagctgcagatcgactccattgctgagattggccattagccccaaattggctcttggctaagttaattctaatgccatataccatctcgtagctactgagcatagctcttatgacagagacatcttccatagacggttcccacaataatatagcgtcgccagcatattgcatcatatttaccggcaccttattcttccgcaccagataactgtgataaaggttttntgatacagcttctctcatcattcctgacaattcttcagctactatattgaatataaagcgggcaaagggtcccctcggcgcaaccctctgtgggggttgaactcttct

SEQ ID NO: 228302 - DNA, 410 bp, Glycine max
  unsure (1)..(410): unsure at all n locations
gtatgccttaataagagcactgcacactggngatcattctcttgtctccaaggaatttgtcattcatagtgatcatcaatcacttaagtacattcaagggcatatgcaagttaaacaaaaggcatgcaaaatgggtagagtacctatagcaatctacatatgttatcaaatacaacaagggaaaaacaaatgtggtagctgatgccctctctacgagacacacattgttttgctccctacgagctcaaattctacgacttgataacattacggacttgcatgcttcacatgaatattcctctcccatttacaagagttgtgggataaaggcccaagaaggattctatttggctgaaggcgatttgtccaagaggcgaaaacttggatacaccaaggatccattagaaaat

SEQ ID NO: 228303 - DNA, 387 bp, Glycine max
tgagatatctcaggatggaccattgtgtcaagcacatctcttcatatggtgatatttatttgatagtatgatgaacaattgccagaatctatcatcccgaacatcaaaaatataaattgctacttgtcccttttttcttggctaggtttgaatctgtcctcaacaacttggaagatgcggttaatgatgcccccaaagcaccaaaatctcttggccgctattttgccaaagctataacaaaccacgtagtctctttgaaagagatagggcggttaatacatgacggtggagaggaaccggggaacctcttagaaactggacttgcagctgatgatcttggaaacaccttggaagtcatataaatggagaacggtgatgctgttttga

SEQ ID NO: 228304 - DNA, 317 bp, Glycine max
aggagcctcacagagcagaatcttcttctgctactatctttaatgaagcgggtaggaagctaagaagattctgttctacaagttgaaatgaactcatgttactttggttggaaagccaggcgctcaaatgccaattactatatggtcgtacgagcggtttgaaatttttttatgtcgattgatcggatcacgtctaatttacttgattccttgtgggtctcacaccaacaagatgtcgctcattttgtttataggaaatccgttaagaagcatttctacttttgcgcggcttttaattttgcgagtgcgcgcgtgtg

SEQ ID NO: 228305 - DNA, 402 bp, Glycine max
cgacactatatactactcacacgtagcttaaaaaactccacggaggcaggagcttcgttgcttctatataggaacttcaatggtgatcgtaaccatgtgattgtaccggaggataaacgagaagacgcgatatgaggcgccatccactacagaataagccctgaaaggagaagcttcctcaccaagagctccctggataataagtttagaaaggaagctcctctggaggaagagaatgacagagagagaaaacgtggggcgtggtattgaaggagaacaggagaaaattgatctctgagaggtctacaagttctcatccccaagtattgcagtgttccatgttctattatacctccacatggaaactcttgaaatcacgaagtacctcctggaactacgtac

SEQ ID NO: 228306 - DNA, 329 bp, Glycine max
acctttagaaatgactatcacggacatatagtatcaagggaaagagaacttaacagcatatgcatatggactgacagcgagcaaaagcagggtcaccacacttacacgattgttgcttgattcatgtttttaagattgattaaaaagaaatggctaagtttatactactaacaactatattatgttgaaaaacattgaaatcttttgaaaggaaaataaagtcactacaataagtaagtttaaattgagtacaaataaattagactaattttacggtaataaatcaaagagatagttcattacttaattagacaatcgacctatatgaa

SEQ ID NO: 228307 - DNA, 309 bp, Glycine max
tgcaactggaaggaaaatttttcaattttaaacatactaaaaaagagtcttggacaactaatggttaacctatcaaaaaagtacttttcataaaatgggttggttaccctaacaaatttgcaaactttttgttggactcttggaaatgaaggaaactaaggattttgggcaacaagacaatgcttatttgcaataagctatcaggtgttttccttatttgagtctttagggacttccaaaaggggttaagttattactagaaaaaagagttaaccagttataaaatatacgaggtatttccactttaag

SEQ ID NO: 228308 - DNA, 404 bp, Glycine max
tcacagcgaggaggttgtgccatgttcttataatgcgcaaaatcagaatgctcaatactatattgctgcaaatcaggatgttcaaaatcaccaataacagaactcacatattcacccataatggaatgctcataatgatcataacgtataaaatgatgcctaactaatatatgaaatgtcctatctatctcaggatcaaagggttgtaagtcagatggattgcctctagtcatacactacatctagcatgcacacaacgtagttgccttatcatgtaaatacaagtgtaggtctgaactacaagctaccctcatatgatatccaaatgacttgcaatgttgggagcaaccttataaaatgatgggaaatagcacaaaaatgtctacaaaattcaagcttctatg

SEQ ID NO: 228309 - DNA, 390 bp, Glycine max
  unsure (1)..(390): unsure at all n locations
agcttcagaattcaatttcgagcgtctcaatatattacgggactcaatcagacattcgagcaaaaaattattgtcgtttcaattagctcanagcttaagaattcaatttcgatcgtcccggtatattacgggtctcaatcagatatccgagtaaaacgttattgtcgtttgaattagctctgaggttcaaaattcaatttcgagcgtctcaatagattacgggacgcaatcatacatccgagcaaaatgttattgtcgtttgaattagctcagagcttcagaattcaatttcgatcgtttcgatatattaccggactcaatcagacatttgagtaaaaaagttatggccgttggaattggctgagagcttcaacattcaatttcgagcgt

SEQ ID NO: 228310 - DNA, 428 bp, Glycine max
tagagctaattcaaacgacaataactgtgtactcggatgtctgattgatccccgtaatacatcgagacgctcgaaattgaatgttgaagctctcagcaaattcaaacgacaataactttttactcggatgtctgattgagtcccgtaaaatatcgagacgctcgaaattgaatgttgaagctctcagcaaattcaaacaacaataacttttaactcggatgtctgattaagtcccgcaatacatcgagacgctcaaaattgaatgctgaagctcttatcaaaatcaaacgacaatatactttttcctcagatgtctgaatgagacccgttatatatcgagacgatcgaaattgaattttgaagctctgagctaattcaacgacaatatgatttgctcggatgtctgattgagtcccgtaatacatcga

SEQ ID NO: 228311 - DNA, 473 bp, Glycine max
  unsure (1)..(473): unsure at all n locations
agctggcctcanagaggtccaggaaggatatttgctttcgaaggaactagnnccgctcctgagtatgacagtcaccgctttaggaacgccgtacaccagcagcgcttcgaggccatcaagggatggtcatttctccgggagcgacgcgtccagctcagggacaacgagtatacggatntgcaggaggagataggtcgccggcggtgggcatcactagttacccccatggccaagttcgatccagaaatatgcctcgaattttatgccaatgcttggccaacggaggagggcgtgcgtgacatgaggtcctgngtaaggagtcagtggatcccgtttgatgccgatgctatcgtgcagctcctgtgatatccgttattgctggaagagggccatgagtgcgaatatggccagaggaggaactggtctgatggttcaatgaagaagcttcgctcanttgtatgataccgggcaga

SEQ ID NO: 228312 - DNA, 485 bp, Glycine max
ggtcaattggctcggatatacaatcatggacttcattatgtctctattcatacatttcattctaaaatttagagattgatgcatagactattactcaatgctagtcgttcactcacagctcgagatcacactctcaccggttatggttcaagcttctctttctcaatcaacctgtctactgactaacaattctaattgcaagctcacattcttgttctttctttgcctaacatacacactacctcaaacttatgaaaataagcatagtcttcatcataaccatgcattcaatcaaaaagcagtctataacacctatttcaaaaacagataaacatatgtcactgcataatcatcatgatcaagtaaaactgttttgtatgcttcaaaacatgcatattaactattcacaacaaacacatgcatatataaacgttaatcacaatcactaatataaacaatgtactgaaactactatagctacaata

SEQ ID NO: 228313 - DNA, 369 bp, Glycine max
  unsure (1)..(369): unsure at all n locations
tntattagttggacaaagaagaaaattcttctgactgtctgttagctctgtaggcagtttatatctgacttgactaagaaatgggcactcgcagccgacaaggacggtgtggacaacattgtctgtgaaatatatggcattatcaaggagaaatgggcccacttttgtcagacccgtagagacccctcatgggaggtatgtactttgtcattttatctgttttacacaacacaatcacttcttataatttattgtaataatcatgttcattaatgttaaacttttgtatgatgcgcggaaaaaggcacatgccttccaaaagcaaatcactgcaccccacgtattgtctcgtggggggtatgaatattt

SEQ ID NO: 228314 - DNA, 331 bp, Glycine max
cgcatgaaagaagctaatcgggcaagttgcatttcctataataattaacatcccataatgtcacgggaaatcgaacgcctattattaagattaggtggagtacctaatatctccttgtatatgaacaccgttgacgaagtatagaattccgcatcaggtaaatggacacttgcttttcgaactagatagtgaggtctcaatttgtagaaattgcggtgggggcttaattgataggctaattcatagtttggtactcatattcttctgggagttcaatgatgacgaaaagataacctgttctgttggtttggaattctctgcggcacaacat

SEQ ID NO: 228315 - DNA, 409 bp, Glycine max
  unsure (1)..(409): unsure at all n locations
atatagatactntactcaaagagctggtggtttgaattattgcaaatatattcggcatggatagcagaaacgcagttgctgaatgttgaacatggatggttacaagcagttgatattacatgtaaagtagaagtatctaataattttgattccggatactaacttttactgggataataggaatctgagtgcatttctatttctcaattccgatcactttatttgcaaattcctgcaactcgactctaatgtataaagtactgagtcacatttctataactttcttatttatctccctactattgattatgccaagaaatggggattttgcttttaaggcttggggcaatatgaaaacacttttttgattatatataataacttaatatggcttcattgaaatattttc

SEQ ID NO: 228316 - DNA, 433 bp, Glycine max
  unsure (1)..(433): unsure at all n locations
agcnngcgcaacgatatatggaggatttgttaaaagttcacatnnncctnaccttacgagcaaatatatggctttggtcatcaacacaacaaagaacactatcggaaaaaggagaaataatgatattaaacaaagcccttttgatattcacctccctctgtagagccttgtcaagttcctgcttatcatcaggagtgatgtctntggcatacaactgagttaacatatttcttatcctgtacggaagaggaccacatgagaacttagtttccttcactcctctgcaaatctatccataaagcaacagataagaggggggaaaaaacatgatacaaaccttacatggtttcgaagcaaagacctacggacagatcgagtaggatgagcagtaagaaccagatcaacatgctggtatttaagtgcatcaaaaact

SEQ ID NO: 228317 - DNA, 457 bp, Glycine max
  unsure (1)..(457): unsure at all n locations
tcaaagggccaaaagagatgagttgagagcggaatgtatgttcttacangacaagtcgaaggctcgccatagctcaaagaggagcttgaccaaacagcggagtaggacggaagagaacatgtgggcaatcattgaccattataaagagaagctaaatctagctgctggccatgagtaaagactaaacgacgactatgcaaaagtatcacctatgcacgtggaaagggaagcaacggagagactgatacattcattacacagacaagatatgatttggatggataggtccactctcaactcgaatgggagtcatgagcttccaagaatgttagccaaagcacaggcaatggcacacgtgcactcatctcccgacgaatgtcatgggctcttcgattatagtcagcatatgatcaagttgatgtctcacataattatgaactgctgaggccgttgattt

SEQ ID NO: 228318 - DNA, 412 bp, Glycine max
  unsure (1)..(412): unsure at all n locations
agcnngngcaaatcaagagactcctacttctttttntctagcatgcatantctttcattacccactcctcacggttggtttcttaaggataacactataactaaacgcgcctgaagggatccctatcgtaccagatccaaatctagaacgatgggtgatcaagaggagacacaggaacagatgacagccgacatgtcggctctgaaagaacaaatggcctccatgatggaggccatgttaggtatgaagcagctcatatagaagaacgcggccaccgccgtcgctgttagttcggctgccgaagcagacccgactcccttggcaactacgcaccatcctccctcatacatattatgacggtgaacggacgcactgggacacgatggtagccctcacctgtgatacaaacgag

SEQ ID NO: 228319 - DNA, 430 bp, Glycine max
cattacgtgaactatatatactcaacttgtaatcgaatatccattagatagaaatgagataactttttcatgagagaatcccttctgaggtgaagatctacaatctgtgctgtaaaaaacatagataccttttaccgtttgaagtccaacagtggttgccaaagctgatatccaatgttataactgcgctagttctggttaggttggaagtccaatgttataactggtctagttctggacgtatcccaacgttggggtaaaccactccatactttgattctgaatagatctatcaaatgcttgcttaaacactacatgtcataccctaatctcgtccggagattattatttgatgatatacaacctttgattggccgcttcgagacactttggcgtctttgttgcacaatgaatgaatgcccgagacgtg

SEQ ID NO: 228320 - DNA, 374 bp, Glycine max
  unsure (1)..(374): unsure at all n locations
agctngntganattgccatgtccggattagtttatcatacccattctgtattagggtattgcgatgatgtttgagatgttgtatgctgataaactgctcatggaaaactgctatatatgaaatgtagagttaacctatggttgtaaagtgataatgtgatgttatgagcgcaaaaagagtgacgctttgatagtcggaaggatanatctgaattctgcggtaaatggaggttaaagtgagctaatcctaggttgaaaggtgatgtacgacttatgagattacttggactgtgctagagagaaaaataaatgaccaatgttaacaaagagccatttctaaggcatatttgtgtgttgaagagtcaaattctgatt

SEQ ID NO: 228321 - DNA, 310 bp, Glycine max
  unsure (1)..(310): unsure at all n locations
tacttgaaccaaagnctcacatatcgacactgcggtcataatgtctatatatctacttcaactataaaatatatcacacataataccatcgctttgctgatgtaactcattgattatgcctatggttcatcttaaccacgtctatgattntggattggataactataccaacgatacttatacacatgtctctaactctgtcatggtaacattctgataattctccaccccatggcttaatacctacgtggacactatatatacattgacaaaattgggaattaataatgtaacattgcatgctagaaca

SEQ ID NO: 228322 - DNA, 389 bp, Glycine max
atcttaagtcacctgaggcatgcaagcttctagccaaatggacttaccttgaatttattcctttgatagcccttttgagccttgtttccctttccttgttttgaagctcactacaagccttaagtgaaaaaccatgatattaccatatccttaaggaattttggagctttggaattgttttgggaataagtgtggggggtttttgtttcattggacaacttgtgatgcaatcctactccgcaagggcattggatagaaaaactccaagtagattgggccagagatgcaagagaaggccctagggttcttatgagccttagggtagatttcgggcccatgggctaagtacgagcccgcttatctttgtaaatattagaataaggtttcat

SEQ ID NO: 228323 - DNA, 444 bp, Glycine max
  unsure (1)..(444): unsure at all n locations
ttcataggtgaaatcacgtgcagacagtttccttatagtcctctcacaatgtggaggctgtgccatgttctcataatgtgcaaaatcagaatgctcagaatcagaatgctcaaaattataatgctcaagatcaggatgttcaaaatcaccaataacagaatgcacagattcaccagttatggaatgctcagaatgatcaaaaggtataaaatgatgcctaactaatctatgaaatgtcctatctatctcangatcaaagggttgtaagtcagatggattgcctctagtcatacactacattcagcatgcacacaactagttgccttgcatgtaataaaggtgaagtttgaacacactaccctcccatgacttgaaatttggagcacctttaaatgatgagaaatagacaaaattcaaccaattcaagctactataaactaaatg

SEQ ID NO: 228324 - DNA, 449 bp, Glycine max
  unsure (1)..(449): unsure at all n locations
agcttatagatacagttttctattacctttgtgtgntcttgctttctattgggaatgatttcgggatgcactctaactatgataaacctctacaggtttattatagaaggaagaaagggttcaatatatgatataaaggggcaaatacttgtaactgactgggctctttttttgtaactgattaggagtttgttatttagcttttgataggaattagttacagtttgttattatgtttgttaggaagaatgctattcctttatagtccctctattgtagatgggaggggatcttcttggacaatcattttaattgggagttccagtaagaaaataagagtgcttcttttggcgaaacttgttaccttggtctattgtgtattggtctttgtcaataagatgaagttcagattctatgctgtggacggaagtttctttgtaagatttcat

SEQ ID NO: 228325 - DNA, 389 bp, Glycine max
actggcaattaaggtataatctgttcttgcatctttatgaactattacactcgcctggattactataagcccagaagcatctcataatattgactgtgggcattgtgaaattgaatgatcctccacgaggttgcatgacatgtcaagctgactctacatacttgccattaccatatgctagtgaaatcgatgtatatatattattctatataccacacttctatcaattcttatgtgagcatcaactatgcttcattcaatattgcacctgtgactaaaaaaacgatgttctactgagaactttaaattgcatttgcactctgataattttgaatctgtcgacgtcctactccaatatgtagatactgagacctctgaatgttattgct

SEQ ID NO: 228326 - DNA, 475 bp, Glycine max
  unsure (1)..(475): unsure at all n locations
agcatttaaggagagatctcatattgcgcctttctgcaaaatacaaaagaccatcaggaagtgccatcttagatggagcctcctcctacctacatggaaagagacacccttgcaagtaaatagtttttttcctacacttgtctattttctaaataatgcttgttttgttaaaaagccaaaacattttattgtgttgtccaatggataattatatttgggagctctatattgaaagccactattacttaatttcaatgaaaatcaatgcgctttcagagacacatggtgggcataaacgaagatatagtcaagtatgaacttagactgatgtctagatataanacaagaaggcatgtaatcaggattcgagagctcttcatcaaattcattagggtcttggtcgcagctaacaataaaactaaatactagatgttagaaattcctctgcaaaatgtggaaattgtaactcattggc

SEQ ID NO: 228327 - DNA, 443 bp, Glycine max
actatagatactcaactggcctttcacgtgtgaattgaatgtttctatatatccatagaccctcaagcgctgtgctgatggcatcttcacattccaaacatcaattggatgcctgtcttttacagacttacttggacatctcgttgagtatgttaacagcagcgtatactgcctcatcccataatgtgctaggtacaccctcctccttgaacatctatctacccatctccatagctgtgcgattctttctcgtcgacactccatgtcgttgaagtgaatatgcgaatgtaatttgtctcttaatgcccttattctacacaatctttcaacttccgagaagtgtctctttgccgcatcacttttatacttctattcgtctccactttgatttcacaatgtgcttgaacttttgaatctcacacgactctttaattttctgtata

SEQ ID NO: 228328 - DNA, 287 bp, Glycine max
  unsure (1)..(287): unsure at all n locations
tatatntgcacattcaccccatctagaattgcctcttatgtttatggatctttattacaaatattatctgttagatctctgtttcaccgacactcaaacccataatgtatgggttgcttacctttataacacttacatcaaccctatatgttttactcgtggttaactaatgtcacatnttataaagtcatgacatgtatcaagtctcattatatactataactatgaagctattaccaagcattcaaaaattatatcgcttgattgcgcaaatgaatacatataac

SEQ ID NO: 228329 - DNA, 274 bp, Glycine max
atactactctcgtcccttgggccaaaagcaaatcattcttatacagcatttgaatcttattgtgactgacacctccactgtgtcgtccccctttttgtcgcaaaaaaaagaatgcttcaaactggtgaacccttaaaacattcctggacgactggtgaatacattatagcgcactccatcttagagccatgcaaatgtctgtccccagtggggggtgtgttaaaactatctctgcctcaaaaacaatgacaggcggttatactcaatgttattt

SEQ ID NO: 228330 - DNA, 518 bp, Glycine max
  unsure (1)..(518): unsure at all n locations
gtcacccgaggcatgcaagcttgtctcagcgtctatgcgagacttaatcctcatgttagctatcatcgccaagtaccaagaagagttgggtctagccacggcccacgagcatagaatcgcggatgagtatgcccaagtatatgcggaaaaagaggctagaggaagggtgatcgactctttacaccaagaggcaaccatgtggatggatcggtttgctcttaccttgaacgggagtcaagaacttccccgattgttagccaaggccaaggcgatggcagacacctactccgcccccgaagagattcatgggcttctcggctattgtcagcatatgatagacttaatggcccgcataattagaaattcgtaggaaacttgtatgggctctcagaccttgactagatatgatttcttctctcttttttgaaataaaatgagtgggtcccatgtgtctactccaaaaagcttgtgcaaatcanatcactcctacatctcatttctagcatgcattttctttc

SEQ ID NO: 228331 - DNA, 374 bp, Glycine max
cgttctgaaattgcaagtaagcatgctgagatctcatataacatgcaccttcaattctgctcgagaacttttttccctacggaattaatttctcttaatctaccaggaaaaatacaagtgacacagacagttattactacaataaccacttcatcgttgctcatgatcttctaagagagccttgcatttatcaaagcgcccatgaacaacttgaagggagcaaaagactgattattgacccaaaacacaataaaaatgaatggtggcttggcgataatgcacaaggtctgataagccgaatattgtcaaattgtctatatatcgtgctaaacagaaacccccacatgatcatgctcccacattgtccatatcca

SEQ ID NO: 228332 - DNA, 361 bp, Glycine max
  unsure (1)..(361): unsure at all n locations
agcttcttgttaggagtgcaaatatatgtcaatgtangnnggctaggttnntttgagcgagctcagccgactgtttgttttggccgaaattggcatgttcccatttattcggccacgaaaacattagcatatcatggcaaaaaaatatttttcaccgatattgattgaaaaaattgacagtcaacgtccgccaaaaatgatgaccgatcgaggtctaaaaaagaagcatcaccgaatgacgccgatcgaacatttccttaccgacatcatgcatatttcatgatgagaatcatgaaactggccaaatacaggctaaaggcccaagtggagaaggacgaaagcctaagtggagaaggacaaa

SEQ ID NO: 228333 - DNA, 458 bp, Glycine max
  unsure (1)..(458): unsure at all n locations
ntgccgganatcttgacccaagattgtgtgtctgccgacattgtgcaanttttttaattctcaccaacgccgggcaataattgttttagtacgatcaagcaaattctccttgttgatttcgctcaataataggtttaccatcgagctcgcctgtggtatttcgcgggaactcaaccgccgttgtgtttcggtcgacattgtcctgcgttgataaaagaggcatataaaaatatagccgaccttggcagcaaaaaaaaatcctcgtcaaacatggataaaaaacaattctagccgacatcggccaagatagattactggtcgctgtatcccgaataatatcactggatgaagccgatcgaacattttcttatcgacatcatccaaaattattaagggattgaacagaaaagcaatagcccatatcggtcgcatactacacccgacggatatttatggac

SEQ ID NO: 228334 - DNA, 484 bp, Glycine max
  unsure (1)..(484): unsure at all n locations
ttaagtcacctgcggcatgcaagcttcttgaagatggaatgatatatgctactttctgacagtncatgggtaagcctaatccaagtagtcccccaaaaaggtggaataatattgataaagaatgacaagaatgagttgattcccacaaggactgtgatcgattggagaatgtgtatcgatcatcaccttctcaacaaggcaacaaggaaacaccattttccttttcccttcatggatcaaatgctagagaagttagccgatcaatctattgcttgataggttagccgatcaatctattgctttctgcatggatactcggggtgtaatcaaattcttattaatccgaagggtgatgaaggtgcaaccagcccgtctaatgatcctttacaagggattggaggtcatatcacaaggtccaagactataagaatgaagcaagcattgcaaggcctgattctaaagatcaaaaagaataaagaacaat

SEQ ID NO: 228335 - DNA, 404 bp, Glycine max
  unsure (1)..(404): unsure at all n locations
ttggagtgttcaagtgccaacatcgtgactgtactttagtccttgtcttcttctaggcttcaaattcatcaatgggctcttccttctgtgtccaaacatcttgggatgttcccagcctttgatgacagctctccagattctgctatccagtgatttgaggaaggccaccattcctgctttccaatattcatagctgcttccatcaacaattggtggtctgttcactggtcctccttctttctccatgttcatcagaacttatctgcacagatctcactctgtgatttcgagtgttggctctgattccaattgaaattctgataccatgggacagatgtcgtacacgatgtcacgacatcacgcttcagaacatgcactntatgtgtgtccgtctgaacagatta

SEQ ID NO: 228336 - DNA, 415 bp, Glycine max
  unsure (1)..(415): unsure at all n locations
agctngctagttgtgtgggctccactctagtgtgtcttattggatctttaagaggtgattcaagagcatcatgaagagtagttgaagcattctagtaagagcaactcaagctatatctctatgtaagaaatatgcatttctgcttcaacccttctattgagagtgacccacctttgcaaaagcttgtaattggtactagatgagaaattgtgacttccttcaaaaagatgatgaaactcacaaaccaagaggggggtgggggtgaattggtttctaaatcaaaatagactnttaaaaaccagagtaaacaaaacttcttttccaaggatcgtatcacaaaatcttgataaaccaatatttaatcaatcaccctttacacaanatcctntgttaaagtgtgtcataccctaatttc

SEQ ID NO: 228337 - DNA, 459 bp, Glycine max
  unsure (1)..(459): unsure at all n locations
tgacccttatgagttagcttagtcaaaggtagagctaacttggagaaaccatctatgaatctccgataatatcccgctaaacgtagcaaactcctaatctaaaaaatagacttaggagtctcccactcaaggacaacttctatcgtagaagggtctacaactatacccccttgagatatcacatgccctatgaaactaactttctccaaccaaaactcacacttggacaacttaacataaagctattggtccctaagggtatgcaacacaatgctcaagtgctcctcatgttccactctagtcttggagtagaccaaaatatcatctatatatgaatactaccaganaactgtcaaggtaggggtgaaaaactctattcatgttatccataaacacatcaagggcattaatcacgttgaagggcatgactagatactcgtagtgaccataacgagtcct

SEQ ID NO: 228338 - DNA, 358 bp, Glycine max
  unsure (1)..(358): unsure at all n locations
agctatctgaagaggtcgggtgttctanactcttgaaacctgtgttatgcatccttttgattctcttctcactttgccaaaaagaattcgccaaggactaatcgtctgaattcttatggtgtctctcttctcccttttccaaaagaacaaaggattaaccgcctgaattcttttgagtctcccttctcccttgtgaaagaattcaaaacgacacagtctgagaatgcttttgattcttnccattccctaatacaaatagcgttcaaaggttaaactgactgataattcttttgtatccacattcacataagatcaaagggttaacagcctgagatctttgcttaacacattggaggga

SEQ ID NO: 228339 - DNA, 347 bp, Glycine max
  unsure (1)..(347): unsure at all n locations
ggtaaaatggctagacataatacatggcggngtttggttttgttcaacgataaaagggatgccccacattatttccatgacacacatgcaaatatgatgatttggatattttatgcaaaactggtcatgcatgcacctatgcggacactcaagtgtcaaattatgatggtcatgtgatgctagggctcaagattcattttctctattgtaaatcaacccaacggttccaaaatatgctctgttatcaattagtgcattcatcctaatacattgtgggtactccggaaaatttcacagcattcacccttcaagtgtacacacattttctctaaaactagctatgatca

SEQ ID NO: 228340 - DNA, 484 bp, Glycine max
  unsure (1)..(484): unsure at all n locations
agctgggagtttcatcccctgctatantctttaatngagaattntatttggaaaatcctactttgaatatgtacaaacgcatcggtgagattgtagatttaagcataactagacatccgaagtgatcttatgggaatggaatggactcaatcgcataagtagagaatttacaatgaattttgatggggatggatttttcaagttatttggtttttaagctgacaagtatgtcaacttttggggcattaatttgtagttggtgtaaaaacactagaaaaatcaatgaggtgtcttaagacattgagaacatttctttaaattctttgtccctaattctaagttttctatttatgggattcatcctacccaaacaaccaaatttgaattttatacaatttatatttctaanaatgtgtcttagtaatggttttggtttcgttaagagtaatcgaactgaaattagtattacttaactaattatata

SEQ ID NO: 228341 - DNA, 363 bp, Glycine max
tttctttctttgctaacaagacaccttatatttgttgactaaaattctgcatacacctcctctcaagcgaagagtgtagcctctctcgatcatttgaccaatgcttacaagattttcttttaggatgggaactagtacgacatcatggatgagcccgcacctttatctgtctccactatgacagtgcctttgccttttgattcaaccacacttccatttcccattcaaactttgactttgaccgactcttcacagcttttgaaaatagtctcatccttggccttgtgagtgctacatccactatccagagaccagtctccctcccttttactttattgagtctcgagtggcatataacacaca

SEQ ID NO: 228342 - DNA, 294 bp, Glycine max
tgcttcgagcaacttactcctcactgaataacttgatgatcttattaaccgcggtcacaaaccttgagaacacagctaaccctaccccctcaccatcatcttcctcagccacacctataccacaaattcagtcagtcaccccacacagattgaaactcgatgttcctagatctgatggctctaacccttcggggcgggtattcaaaattacacagttctttgtataccacgcaacccctgaggccgagaggctcacgatcacactcttcatcatggatggtccaaccctcgcgt

SEQ ID NO: 228343 - DNA, 179 bp, Glycine max
  unsure (1)..(179): unsure at all n locations
acattgcatggggnatctgggagatgatgaaataagattggacgcttccaaccatcgtggcacatctagacggaaacccatcaagaagaccacaatatctgccaaggctctccgtgacttcccattgagaccaacattgcatgattgctcccctgtctacgactacccatgatatgaga

SEQ ID NO: 228344 - DNA, 263 bp, Glycine max
  unsure (1)..(263): unsure at all n locations
aatactcaactaaagtacacggctacggatgtccccttgattgagatagataaacactgnttaagaacgagccgctctctttgatatctacttcttcgttgcaacaatgacacttccttcttaacaactgatcttggatgaatacttttcctcctttgccttacccttggcctttgaatacaaagactcactatccttcctcttctcttattttacaatctttcttcctcactcctcttatctttaatcaactgatgaccttt

SEQ ID NO: 228345 - DNA, 406 bp, Glycine max
  unsure (1)..(406): unsure at all n locations
catggagatgtagcgaaagacacaggagaagaggtgagaggaggcgccctccactatggaataagccatggaagaagngcttcaccaccaagatgagccttgggatagaagcttggagaggatgcttcattggaggaaaagaaagagggagagaaagagagaggggggagcacaaaattgaatgaagaaaaagggagagaagtcgaactttgagttgtgtctcacaagactctcattcattcaaagtacaacaagcgttacacatgcttctatttatagactaggtaggcttcttgagaagctttcttcagaaatacttcttgagaagcttcttgagaaaacttcttgnaagctagagcttactancacanccctctataactagctcccttcttgaaagcttctt

SEQ ID NO: 228346 - DNA, 424 bp, Glycine max
  unsure (1)..(424): unsure at all n locations
tgtctaaggtggagaaaggtgaaataaggcagctctggtggctatagctaaggtattacaggacccctagaggtatcacatgtcaagctagtgacattaaagaaacgcttacggtgaggcaacccaacttttcttattttctcaatcatttttatcttgtttaatgcatgtagttagattttgttcacttgcgactgctagagtagagtgctgaagcatgtatttaatgaaaaaaaggttggccaaaagcttctctaaagctaaggatgggaataacttagaataattttcagtcatccacctcacttatcgtgacctctacgctaagctagccatatcacatgtgctgagcgagtaacactcctcgctaaacacatcaacccncatctattggttgttggggtcccgctaagtgagacatttg

SEQ ID NO: 228347 - DNA, 79 bp, Glycine max
agctagctctatatatacattgtatgtttgtatttatagggagagaggttatactagccattcttgtctctaagagtaa

SEQ ID NO: 228348 - DNA, 531 bp, Glycine max
  unsure (1)..(531): unsure at all n locations
atcttaagtcacctgcggcatgcaagcttcccacgaagtttccaaggtttgtattatattaattngtttataatactagctntatgaattgtctacttcccatgcataattgggtaccattccatcatcttcctctttaaaatttgtgagttagctagcttaacgaaaatcaccttactgcccttatcaaatacagctaaagttcataattagaggttgtnttggtcttttccgtccgtatttgcaatcaatcaagtccttctttctctctttccacaaatttttacgattttaattctaatataccgacatgaaaataaattttacactatcnattttttagaaattattgtataaccaatatgctgttggttagaatgaaattggattcacatctttagcaagatattatatttgaattctgagaataataaaatacgcgattaaaagaaaaaatctcactaaccaatatataatttaattttaacagagaataataattaaactcttgcaccaataatataatgaccc

SEQ ID NO: 228349 - DNA, 507 bp, Glycine max
  unsure (1)..(507): unsure at all n locations
agcttatggcattagtagtattagagtatatggaaatgatgctcttgttgtttatagtgcactacacactactagagaaatcgctataagagaaaaaaggccagttttaatgaggtgcattgagctactgtaaaatcacaataatgtgtgactgtgatgtaagtgtggtgtagagggaaaaagggagcaaaacagatttggagggaaaagaagagaagaggagatgctggtggcgaggcaagagacgtgcgatggaagagtgattgctcatgtagacatggattgcttctacgttcaaggtaacataacccttccattctgctntaatttgagaagtgaatttagtgatatattattatacgatgttgtttgtgtttgtgtagtggaatagagaaagcaaccaaatttaagaggcttgccctctgcagtcatacaatacaaatcctacaaatgtaattcatttcatctaagtccctataattaatagcttaatattatcacttaagt

SEQ ID NO: 228350 - DNA, 466 bp, Glycine max
tgcttgtggggattctatggaggctggatctttgtgtcttaatgaggtcctttaatggtgattttccaccatggagattcagcggaagacaaagaagaagaggtgagaggaggcgccatccactatggaataagccatggaagaaggagcttcaccaccaagatgagccttggataagaagcttgaaaggatgcttcaatggaggaaaagaaagagggagagaaagagagaggggggagcacgaaattgaaggaataaaagagggagagaagtggaactttgaagtatgtctcacaagactctcattcatcaaagttacaacaagtgttacacatgcttatatttatagactaggtagcttccttgagaagctctcttgagaaaacttccttgagaagcttctttgagaaaacttccttgagaagctagagcttatctacacacacccctctaataactaaactca

SEQ ID NO: 228351 - DNA, 177 bp, Glycine max
tagccataaggtatttggacctgacttgttaaacctcgcggactaccacaggcttaactccacatgttcatgggctaacccacaaaacctgcataacacatgtgtgtctgtaatgctcgtatattttattagcaaatgttggtatattcctgtctaactgactctagcttaaaaatt

SEQ ID NO: 228352 - DNA, 481 bp, Glycine max
  unsure (1)..(481): unsure at all n locations
agncttgactactaagggtgtatcatgcattctctaggggagaaacactctgagtacaaaagagagtgaggagtatgaagaagaagatgaagatgattcgaagtgtttgaatgctggatgggtttatgagagagtagttgattcctcttttccatctataacccctttgtttttatattcccatccttcatttacatgttntcgtgctagcttaaaccttgggcaaaaattaccgcaacctagtaacacttatataaagctaacatcaagaaattattcaattaactagcacttcaattaatataatgacacagttaaatccctatcttgcaatataaaataaattaaacaattaatcacaattaataaaatcatgacattacaaaataactctagctacataacaaaacaacctatttattgaattcgatataaatatcatgaatctaaantaatatcctctacaatattatcaagccat

SEQ ID NO: 228353 - DNA, 422 bp, Glycine max
  unsure (1)..(422): unsure at all n locations
tctttgagaggaagagcacaatctatagaagaaagacgtcggaatagtgctagaggattgacaccacagagcgattaatctaagagatatgaggaaccttagcagaaaaatcaatatagaaagatcacatctagacaatatagaggaagcttcaagaggaagaacacaaaactagaatagattactttcgaccgagtaattatcttatttttgttatgattattttgaaattatggatgttgcaactacatttccaagttgatttacctcaaagattgtaattatgttatttcttatacttgaattttagttatcttgaacatagctcacaattttctaatttaactcagagctgatttactcacctgtactattgagtcngatcatttgttttccttgtgcttttagcattcatttattta

SEQ ID NO: 228354 - DNA, 483 bp, Glycine max
  unsure (1)..(483): unsure at all n locations
ctgcaagcttgaaggtgcgtagcccacctatttctatagtagaatactggtaatgtgtctactatcattgtcatcgttttttcgtcattgaggtgccactttgagctgccaggttctccacctttgggcgtattctttgaaagatttgtgccccctttttgcacatgttctgtagttgcatcctattcgaaaccatatcaaaattgtactgatactgcctaacaaaggcaaccattaggtccttccaagtatggactcgggaaggttccaagttagtgtgccaggtaacaactaccccagtaagactttcttggaagaaatgtattagcagttcctcatctttgcgtatgcccttatcttccaacaatacatctttggatgggtcttgaggcnaagtagtccctcgtacttgtcaaagtccacgaccttgaacttgggaggggtgatgatattgggttctaagaacaactcttttatggtagc

SEQ ID NO: 228355 - DNA, 447 bp, Glycine max
  unsure (1)..(447): unsure at all n locations
agcttctatataagctgaaccattttatcatttaacacaagttgagtnttattcacaaaattagagtttatctctcttatcttagcgagagcgattctcctaaattcttgagtgattcaagaacaccctggctgtatcaaaggactttcacaacctttgtgtgttgccctcgctggaaagagtgattcttttcatcctttcatcttcacccttgttctttcaaaccacaatttcagaaaatccacctctgcccagaattatctcgtgagcataactcccattttacgcactcaaattaagtgattcttgagcctatatngactttcaaaacgagacctttcacctcgntttggaatcacctcatgtggagccctgtagcttcagttattgccatttctatatntctgtccagccaccacttaacctacattttaccatcccattcat

SEQ ID NO: 228356 - DNA, 314 bp, Glycine max
gcagacttggatgtatatattagaaagctttgagtctcggtgtgtttttctcctttgcttcctactccttctataggcctaaggtagccttaaattcatgtgaccttgcgctaagcgggccttctaagcacaacgggtatggcggtgaccatgcacttagcatgagattccggctaactgcgccttgtggcttattcgtgtgccttcttcatgctaagattgcactggccactgaatgacgcgatgacgtgtgcctgtcttgagcgctaagcaagctgtctcattcttcaactgtttttcgagtttttgaatct

SEQ ID NO: 228357 - DNA, 71 bp, Glycine max
ggggggggcgaaaaagaggaagaagaaaaaagaggaacgagaaggaggaaagagggggaagaagagggaag

SEQ ID NO: 228358 - DNA, 102 bp, Glycine max
taatttaaaaaaatggaatgtgtgtaagggggtatgaactgtaaggataattatgatatataaatatatatgttaggtggtttaaataaatattttgataaa

SEQ ID NO: 228359 - DNA, 110 bp, Glycine max
aggaagaaagagagagaggaagagaagaaggagaagaaagaggggaaaaagaggaaggaagaagaaggaggaagagaaaaagggggaagagaagaggaagaaaggagggg

SEQ ID NO: 228360 - DNA, 89 bp, Glycine max
  unsure (1)..(89): unsure at all n locations
gaaaagaggngagaaggagaagggaaaaagagaagaggaggagaagagagaagaaaaaaggggaaagaaagggggagaagagggaagag

SEQ ID NO: 228361 - DNA, 130 bp, Glycine max
  unsure (1)..(130): unsure at all n locations
gagaaaaangggagaagaaggaggagaggagggggagnaagaagagaaggaggaagaaaagaaaggggggaagaaggaggaaaagaaggaggaagaagaaaagaagaaaaagaaggggggaaggaagaag

SEQ ID NO: 228362 - DNA, 71 bp, Glycine max
  unsure (1)..(71): unsure at all n locations
ccggcgcacccagccccgaccctccccccagagaggtaccgaacccccccnccccgcnccgccaccccccg

SEQ ID NO: 228363 - DNA, 340 bp, Glycine max
  unsure (1)..(340): unsure at all n locations
agcttggaactagcttagtcacttattgcaatgtttcaagtctttntcttctgctatgaacctgtttcatacttgctgcaattcaattagctcataggtcaaggatgtgcacgtttctttagttgtacacatcatttagcttatttggtataataggaaccaagctaggtgtgaaagaggcccttttcagtatgagcacattgtccacaaagttatctcaaaagggatggattaagtgcaacattgatggtgcaacaaataattggttggggccttgagctaacaagggaagttttcgaattctaggggtgcttttttgggttggtnctcgcactctttg

SEQ ID NO: 228364 - DNA, 453 bp, Glycine max
  unsure (1)..(453): unsure at all n locations
tgactaggcgagttgactttagccttagtgtcactctatttattattcaattcaattaagaatgagagatcccaatgagaaaacgtccgattgattnttcgctttattttactaaaaggtattttttattattatattattattttacctcttttttgatttccaacgtagttacggcacgaccgaacggtcggaattcattttaaccgatattaacggatgatacaattcatatgatcggtggaaatttattttatttttagattaggcgagaaatgacttaaataaatgactgaagcacgtcaaaaggggatatagaaagcgaatgaaaatgagaataaaaatacatgaaataaaatgtggaccaccacgggtacatagaatgaattgaatagctcggtttgaggtacttacccgcttgagactgaagaacacgaagaacgaacgatgaat

SEQ ID NO: 228365 - DNA, 354 bp, Glycine max
  unsure (1)..(354): unsure at all n locations
agcttatcatgtgttatgggtaaaacttttaaattttcttaccacttngcaccaacgaatttaaagtcccaagtaattaaaaatattatatgaacttaatattcaattggttcaaaagaaaacatataatatcccattataaatagaaaataaaagctaaaatagaaacatagtcggttttttcttttcgagctttccctctcttctttttctcataaattccatttgccatcacaggaaacaattccgacatattttgtcatttgaatactagatcagagcgatgttggatcttcttcttcttggtgtggactctcgataaanagtttagtgaactcacggagaagatcacat

SEQ ID NO: 228366 - DNA, 459 bp, Glycine max
  unsure (1)..(459): unsure at all n locations
tgacaggttcaggtgcaggtgctgctactggtggagacacttgtanttggttgccacacctcaaggtgatggcactcatatttttcgaattctgcatagtttgtgaaggcaatttgtcagaattttgggacttagcttggatcaactgagtagccatctaccccatttgatttgtcagactctgaatggaggcttttgtctcttgctgaaattgcatattttggatggtcatttgcctcactaactcttttaagaaaggttgagggggagcctcagttgcttgttgtctttgttgtgactgatgttgtattggaggaggaacatatggcttgcttggaccaccaacattctggaaaggagggacaagctgttgttgttgttgaaaggacttgccatctcagattggagatttctcaacctggtttgatctatgcttgaaagtataattatctgctgtgt

SEQ ID NO: 228367 - DNA, 421 bp, Glycine max
  unsure (1)..(421): unsure at all n locations
agctngaaattttatgtagcatattagcacttcccctgcttgggcatttaaaatttaagacaacttccttatactgtatagatagtaagtacttgatgtaaaattcatgtgaatccaacttgattttattttggacttttttcttgtatacatgtaggtggcaaacttcttttggagctgaatagaagtttgcgacctggtggtttctttgtatggtctgctactccaatttatcagaagcttcctgaagatgttgaaatatggaatggtagataataatatactattgtctgcctctattaagcagtttaacgttgctgcattagttctgacattgtctgacttaatttgcagaaatgaaggcactaacaaaagcaatgtgctgggaaagtgtgtccatcagcaacgataaactcaatgg

SEQ ID NO: 228368 - DNA, 469 bp, Glycine max
ttgcttcaccacctctcagccatctttactttatttgtctatgaatggtttcttgatgtattatcatttctgcaagcttgcttttagaaaaggccttgagataaaatactcagcaaagttgtttgcgtatcttaactgcaacagcaattagtaagtaccaatacaggttataatgatttgtacaagtgaattatgttgaaatacacgagcactgaaagtgaaaacttcacaatggacccttgtggctgcttactcaagtctatgaaactggttaatttgtgtgttgattgttatgcatactacaattgagagattaaaaataattaataccagatcaattgtgtttttcatggtatatgttctccattcacggataagtaaaattgcttttcttgtaatctccaaattcttatgaagtcagaaatctgaccattggatatatatcttatataatatgcttaagtatgct

SEQ ID NO: 228369 - DNA, 427 bp, Glycine max
agcttattcaaattcaccattgattagtaatacttataataaactaatagaagtagagacattctaggtcaaagaaattgaatgctaactaggagaggttcaaatgggattctcctccattaaatcttcattgcctcaattggcagatgctctgaacctgttttttttttaacaggaattaactcttgtctttgttctttccttacaggtgtaccctaaaaaacaagtaaaatgctaactaatactcttaaaacatgattctcaatgattttattagaaagaataatcatatactttcccatttttttaatgtaatccttaaaaaaataactttctatttaaagatttcttagccaatactcttaaaacacttgttatatgaataaaaaccaaaagagaagcttttagtccatcgagttaccaacct

SEQ ID NO: 228370 - DNA, 460 bp, Glycine max
  unsure (1)..(460): unsure at all n locations
tccaattagccatatgtgcccttaactaattaattccatgtgttgattattaagtgcatatttgaaaaattctagttgtataatgattccatgtactgattagcttaatgaaagtcgtttctagatttgatgtaagtacgaatgtcaatgtttcactgtgctaatttacacatcggattttatttcatcaacgtgcctttgaacctgcatttatcaatgctgtttgtgtttggtgtatctagagaataacaaaatagttagctgtatcgtcgcagaattttcacttgaatatagtttctctttgaagcgtgaaaccaacgggataaaacatgatcaactgattctaaagtaaattacacatacatcttttntaatgtttaggaaaaatataaatgtcttttctctcttttttaagatatgattatattttctctgacattaagaaaattatatctttcta

SEQ ID NO: 228371 - DNA, 418 bp, Glycine max
agcttcatgatgaaccaagagtgattcaatgatgttttgatgataacaaagatgatgacacaggtgatgacaaaaagctcaaaggtcaatcaaagaatgagttcaatatgttcaagatagaatcaagaacacttcaagattcaagaggaaagttgaagaacacttcaagattcaagaggaaagttgaattcaagaatcaagaatcaagattcaaggatcaagtttcaagaatcaagatcaagaatcaagactcacgattcaagaatccaaagaagacttaatcaagataagtatgagtaggttttttcaaaaactgagtagcacatggatttttctcataacatgtctaccaaagagtttttactctctgataatcgattaccagattgttgtaatcgattaccagtagcaaaatgaa

SEQ ID NO: 228372 - DNA, 288 bp, Glycine max
  unsure (1)..(288): unsure at all n locations
agcttgngcaaatcaaatcactcctacatctcatctctagcatgcattttctttctttacccactcctcacgtttggtgttttagggaaaaacaccataactaaacgcgccgcaagggatccctatcgcaccttatccaaatctaaaacgatgggtgatcaagaggagacgcatgaacagatgaaagccgacatgtcggctctgatagaacaaatggcctccatgatggaggccatgttatgtatgaagcacctcatggagaagaacgcggccactgccgtcgctgtc

SEQ ID NO: 228373 - DNA, 286 bp, Glycine max
tggtggaccactcagcacgtcactaacagatgctgatcctgcactgccggagaggcgtgactgtggccctccgcactgtactacttatgcatcacagaatgctctgtcacaattagaacgaaaagaatttcattacaacagcatctgtgaatacttctgagcaaccaataggtcaatgcactaagtcggtggagcggaaggacgcacatggcgaccgagatatcgtgcctctgtcttaagaggagcttgcgggatccaatgctacaattgccctggaactctgagg

SEQ ID NO: 228374 - DNA, 422 bp, Glycine max
agcttgttgacacgtggagatatatgttatcttccacgctcacaagatctgtcatactgacttttgcttcacgctgacggccggaaatacccgagtggttatccgtataaactttttgcattctgtaagacgaatagcctgataacacgcagagactaacatcgtcttctgcgaccttcttcaatcgcggccgacaagcccgttgacacgtggagatttacgtcatctttcgcgctcacaagatctgtcatactgacttttgagtcacgctgacggccggaaatacccgagtggttatccgtataaactttttgttgtctgtaagacgaaaagcctgatagcacgcagagactaacgtcgtcttctgcgcccttcgtcaatcgcggccgacaagcccgttgacacgcggagatttacgttat

SEQ ID NO: 228375 - DNA, 464 bp, Glycine max
ttttgtcttacagatcgcgaatagattatacggtgtacctctccggtatttccgcccgtcagcgtgactcagaagtcagtatgacacgatcttgtgagcgcggaagatgacgtatatctccgtgtgtcaacgggtttgtcagtcgtgatcgacgaacggcgaagaagacgacattagcctttgcgtgttatcaggcttttcctcttacagacaacacatagtttatacggataaccactcgggtattttcgcccgccagcgtgactcaaaagtcagtatgacagatcttgtgagcgcggaagatgacgtaaatctacgcgcgtcaacgggcttgtcggccgccattgacgaatggtgcacaagacgacgttagtctctgcgtgctatcaagcttttcgtcttacagacagcaaacaggttatactgataaccactcgtgtatctccgtccgtcagcgtgactca

SEQ ID NO: 228376 - DNA, 474 bp, Glycine max
actaagcttacactactcctcatgcttctgaccatgactatttatgttcgatttcttcgttctgccacaccattctgatccgaagaaccaagcatagtgtattggacaacaatcccatgttcttgaagaaatatcgcacatgaacctactgcttgtccatcctctgtgtatctaccatagaactccccacctctatctgatctcacgatcttaatttgctttccacattgtttctcaacttcaaccttaaaaactataaaggcatctaacgcttcattcttggaatgaagtacgcaagagatacatatattgcgaataatcatctatgaaggttatgaagtatttcgaactatttgcatccatgtctggacaacatatgtctgtatgtatgatttctaataaattagaactcctccttgcacacttttaaacttgttagtttgcttacccttactgcatctacacaagtctcat

SEQ ID NO: 228377 - DNA, 428 bp, Glycine max
  unsure (1)..(428): unsure at all n locations
agcttgaatatttcgcctaccctttacaatgatctcttcgctgagacagcctgttgtagggatcagtggttctgatcttcttttgaggcaaagacatgcaactccaattaaagcaaggtcgtttctaccctctctgtcaagagaaaagggtcaaggatctcttgtttcagttcaaaagccactccacattggtgcttctcttggtgttggaaattttgtgtcactgaagagtgatgctaaaaggcgtgatttggtgaagtgtgaggcctatgaggcacacagatcagaggttgatggtgcagcacaccgtcagaggctgcanagaggtaaaaattgggaatatatttgcaaccctgtgcgctctgaatgtggggtcaatattataacaagaaagtctgaatgctaccttacccttgcttacttaactc

SEQ ID NO: 228378 - DNA, 330 bp, Glycine max
ggatcttaagtcactgagctgcagctttgtaaggaatttttttaatgtccaaatgggtgtgaaaacatacaagactctctaaattggttaagatataatttcgtaccatatgcatctgaatgtaggaattagcatatgggcctataaaaatgtatacttgcaggatacatataacaagtttcttttaacaaatccagacaatagagtcatgcaaacatgggtagttctggtcaaggtaggggtaaaacatatcggtggaccagatttgattacttggagatatagaactcgtatcaaagagctttatatgtgacagctaacagttttatg

SEQ ID NO: 228379 - DNA, 463 bp, Glycine max
  unsure (1)..(463): unsure at all n locations
ntacggggccctcactgaacctgtgctagagctatagatatgggtgaagnagaggaggtacaatagaagatgaatgccgacatggaggccatgacagagcaaatagccaccatgatggaggccatgatgatcatgaagaagataatggaagccagtgcggttgcagctgtcgctaccagcactggtgctaatgtgaacccgatgcccccatctggcctcaaccaaatgaatcatccaacctcagctatggtaggcaaagatttgggaagtacgggcggcccccatgatgtgcaaattcaaaacaagcacgccttcctgccatatggcttgcctctcaactatatgccacccaatgtggtgacactcccaataagaatgtcaataactccacttctatacccattgagagccaacaaccccaaataatcacacacatgtctcttaaaccgtgatgggacacatg

SEQ ID NO: 228380 - DNA, 345 bp, Glycine max
agcttcaggctgttcaattgcttcagattgttgctcacaggtgcaaaggtctgtgtggtggttggcaaaggatcataaaccatagagtctggcggcaggtgcacattttttattcatggtcagttgggttaccacattaaccaaggcatctagtttaccttcaagcttcttagtctcgcctgatgaggatgaatttgtggctacttcatgcactcctctaatgacaataacatcacttctggcactaaatttctgggagttggaagccatcttctcaattaaatttctagcttcagtaggggtcatgtctccaagggcttcaccactggcagcatctatcatact

SEQ ID NO: 228381 - DNA, 475 bp, Glycine max
  unsure (1)..(475): unsure at all n locations
tgaagaggatgctntaatggaggataagatagagagaaggtggtatcactaaattgaaggaataaaagagggaaagaagtggagctttgaagtgtatctcataagactttcattcatcaaagttacaacaagtgttacacatgcttctatttatagactaggtagcttccttgagaagctntcttaagaaaacttccttgagaagcttctttgagaaaacttccttgagaagctagagtttagctacacacacccatctaaaaactaagctcacctccttgagaagctagagcttagctacacacccctataatagctaagctcaccccatgacaaaaaaaacatgagaatacaaaaaaaatcctactacaaagactactcagaatgccctgaaatacaaggctaaacccctatactactagaatggccaaatacaatgcccaaagaaaaaacaacctatttactattacaaaga

SEQ ID NO: 228382 - DNA, 350 bp, Glycine max
  unsure (1)..(350): unsure at all n locations
agcttctacttatgtggcagggcgggtttccttcactttcttgtttccaacgcgagctctgaccactgttcttccttcccgcgatgcttcttttcatgtccgcctgagtgggcttatatcctaaaccatacttcccacgattcccttgggtttttatcagactaattatgccgccattgtctntgcctaaacccatcccgggtcataaccgttccccaacataactcgggccatcattaccgccgcctcggacagacaaggttgcccanagagggagtccacgaaggaaatgctgaccacctcnaaagactggaaagcgcgttctaacgattcttctgcggctttcacat

SEQ ID NO: 228383 - DNA, 481 bp, Glycine max
tcaagaattcatggcctcatcaaactacttgtttgccgtaggcatttcaattaataggcctcccatttttaatggagtgggttaccactattggaaaacccgcatgcaaatcttcatagaggctatagatttaaatatttgggaagccatagagataaggccttatattcccaccatgtgttagacaagtggcctcaaatatcttaagaaggggggttgaattaagatattacaaactatttccccaattaaaattctatttcactctctattcaagttacaaattcccttaataatgaactcttaaataatgattcaaatagaaaaatctgaatataaatataaaacaataataaataaaagagtttaagggaagagaaagtgcaaactcggatttatactggttcgaccacacccttgtgcctacgtccagtccccaagcaacccgcttgagagttcactatcttgaaaatcctttaca

SEQ ID NO: 228384 - DNA, 432 bp, Glycine max
  unsure (1)..(432): unsure at all n locations
agcttataacactagagaagtggagacctatattgtgtcacctttgaagnaacgcaacgatgccaaaaacagttgtataatgtgcggaacgaggagtaaacataaatggactaaccaagtgtactgtgaggtaaatgagactcccattaatctacttgtgataaagtatcaaatcattatccaaggtggagtactaattaataacggtggaagagacaacatgcaaaattaagcatatatttggtggagtactgcttctggtactcgtgaataaattaaatttctttaattttttcatagaaaaattatcattaattatggctttatctagtgagataatgaatcaaaatttagttcacataggaataaacttagtccttattataggaaacaccaattcatggtgatatgatatttcatctgtcacgtcat

SEQ ID NO: 228385 - DNA, 454 bp, Glycine max
tgttgggaggtgatcaatggggatattgtgaaagctgtttatgagttccattctatggcgtcttgccaaagttgtggatggccaatgaaattatacaggacgccaaatagagaaaaagatcatgttttgtcttcaaaactgactttgagaaaacatacaattctatcatatggtccttttagtattatatgcttcatcgttttggtttttgctctaagtggattcactggattcggggttgtttagaatcctcaactacgtcagtgttatgaaagagttaaagaatatcagagacttgagactggacgatcccttggcgtcgttcctctttctcatgggtgacagggatttatctatctccttacaattcgctgatggggaggccttaatccagaatgtccttctctcaaagagtcctcgcaaagctttgagaaatattgggttgaggccattt

SEQ ID NO: 228386 - DNA, 414 bp, Glycine max
agcttaagagggaagtagaaagactcgatttatactggttcactcaattagagctatgtccaattctcctttactcagttgtaaagggttccactaattaaacaatgattacaaacaagtattttatcctgccactcctagctacacttactattctctaggccactattggcacacccttaaactccccctaaatctaataacacccaagtattatttatcactaagtcactcctggaattcataaatagaagtttgattgaatacaatgattcagcaacactcaaagagtgactaaacaattaagctcgaaaacaagataactttgatgagcatagaatgaataaaataagcacaattgtatcgtcctcttgaatgacaacgttcacttcaagttcttttttaaaatttctt

SEQ ID NO: 228387 - DNA, 475 bp, Glycine max
  unsure (1)..(475): unsure at all n locations
ngcatcaagtggtaatcagagcacaagagcttcaagtaggtgctccttaaacctcctttaattntcagctttaccttttcctccattgttgtttcttcatttttcactatgtatctcctcacatttcttgtgctaaatattgttaacatgattatttagaatttgcaccgattaaatttgctatagaagctagatttgattttatatggttcaaatttcttgttcttgttcttgaaccatgaattgtgttgagtttaggttcctttgagttttgtctttctatttttagtggctgaaacctaaaccataaaattcttacaaaaacattatagcagaagaaaacctcaaaaatctagagtgacttgttcacctattgtagttntgtcatagaagtcatgtctagtcatgaaacttgtcacataagaattcttatgttgngcctgaatttaattttcttgttctttgtgaactcttt

SEQ ID NO: 228388 - DNA, 419 bp, Glycine max
  unsure (1)..(419): unsure at all n locations
agcttctcgaacgtgatcaatacattcattgttatatattgaagaangaagttgtggtgcgtgatctgttttggtgtcacccagatgcagtaaagttatgcaatgcatgccatctggtgtttttttatagacagtacctacaaaacaaacaggtacagactctcactacttgactttgttggggtgacaccaacggcgatgacgttctctgctgggtttgcatatctggaggctaagcgtgttaataatattgtatggngcttggaacgatttcgaggcctatttttaagaaacaatcgcctccctattgttattgtcactgacagggacctaatacttatgaccaccatagtaccccatctcagctgaccctggaatgatgaaatcagctcaaagggccctaacccccgatgctcagt

SEQ ID NO: 228389 - DNA, 393 bp, Glycine max
  unsure (1)..(393): unsure at all n locations
tcatgctatgctcataccagtgnaggtccagaagagtggactagatgtattgttatttatatggaactctagactcattatatgagaaaggtcgaaggcaacatcacctgataaaaggatacatttatttattctacacttgaccaccttattcataacatgaacacacatattcatcatatggtgtaaataaatttgataccataggatgagttaacatgtgcactatacacttatcagatcgttacgaatatatatatgacttgctataagaggatagatgtaagtgcaaatctctcacgtgtaaacactccagttactaatgtgactataactttgcgcataacaaactattaaaacgtctgtgcatgatattctatgaataaagtaaaa

SEQ ID NO: 228390 - DNA, 474 bp, Glycine max
  unsure (1)..(474): unsure at all n locations
tctatggaggctagatctttgagctacaatgatgtccttctatggtgattttacaccatggagatgcagcggaagataacggagaagaggtgagaggaggcgccttctcctacggaataacgcctggtggaaggagattcaccaccaagagagttccttggataagaagcttagagaggaagcttcaatggaggaaaagagagagagaaagagggagcacgaaataaaaggaggaaaagagggagagaagctgaactttgaagtgtgtctcacaagactctcattcatcaaagttacaacacgtgttacacatgcttctatttatagctaaggtagcttccttgagaagctagagcttagctacacacaccactttaataactaagctcacctncttgagaagcttccttgggaagcttcctaacaagatttctagacaagctagagcttagctacacacacccctctaatagc

SEQ ID NO: 228391 - DNA, 398 bp, Glycine max
  unsure (1)..(398): unsure at all n locations
agcttagtttaagttagtctaaacctaggagggctgtctatattgagcctagtccaacaatagggatctgatgaagaagcttggattgattcattccaattggggatcgaggtttagtaatttaggctacaacatagaacacaaaagcatgattgattagagaaacatccttatatgcatcagctggtctgctagaaagacccaacacttctacctattgctatcaattttacttacttacattnttactgtttttatcctagacatagtttaattctactttaaaccatcaattatcaatgtttctttcaacaatgccttatttctgaatttaacccagtcttagactagtttcattgagttcgatactcagattcatccatttttaattttaaata

SEQ ID NO: 228392 - DNA, 414 bp, Glycine max
  unsure (1)..(414): unsure at all n locations
ttgatgatatggtcttcaccgacgaaaggatcaaagtgagtctaataagaggcaaattcgatcatcatactgtgataaatgccaaaaaaaactacggcaagtgaagaggatgagaaggagggagaaacctatgctgttactgccattcttatacgaccaagtttcacaccaacccaacaatgtcattactcagccaataacgacccttctcattacctaccacccagtcatccacaaaggccatccctaaaatcaaccacaaagcctacctaccgcactttcaatgacaaacaccacctttagcataaaccaaaacaccaaccaagatatgaantttgcagtgaacaagcctgtagaattcaccccaattccagtgacctattctaacttgcttccatatctactagataattc

SEQ ID NO: 228393 - DNA, 431 bp, Glycine max
agcttgcttagccacgaacacgaatgtctttttaatctttctaagatcctgaaacacattactcacttagtgcacaaccgcgcttagcgagttcataaacattcaatcattcctcaaaaaagatgaacttgcttagcaggacagggccgacttagcggattcatctggaaacccagatattcatcaaaaagtgatgaactcacttagcacagccaggcatgcttagcgcgttcatcgccatttccagaaaaattggggctttttcagccccctcaacttaggcctctattaggccatcaaatcctaaccaaaacatgtcaaaatgagatacattgtaggcgaattataacccctaacattattctaactagaaactaacctaacatcatgcaatcaaaatgaagaacagagctttaaagcgataaactaag

SEQ ID NO: 228394 - DNA, 475 bp, Glycine max
  unsure (1)..(475): unsure at all n locations
tgtagaagcaaaaggccagctatggttgtcaatgtggattttgaaaaggcctatgactcagtctcatgggctttcttggattatatgctgcaaagaatgggtttttgtcccaaatggagacactggatttctgcctgtcttaattcagcaagcatttctaaaagatgtccaggtttaattctctgatttgatgctagtcaagaaattgtttctgacaagtcatcaagctaacaagcttgtaaggattctaccgaaatcattgtgattgaaaggaaaagataatagaaagtaaatatgatgctaggacaacaaatggctgtcattttgagatgattaatacactgtcttagtacttcaatctattctttagaaccaataaggagactgagtatnttaaagtataaatacacgaggacttccatactttggaaacttgaatgttgaacaccgtggacatagcatggtcatgatgaat

SEQ ID NO: 228395 - DNA, 356 bp, Glycine max
  unsure (1)..(356): unsure at all n locations
agcttcccagttatggagagctaatcctctgttggttcttccttgnaggtacttgatgtaaatacttgtatatctatttaatgatgttttatgtgttctcagtgctatcagtacgtcatttcagtgtgattttgccttgatcacgtagatgcatgctttgttaggatcattcaacagtggaaacttgatgcaatcctaccccgcaagggcattggatagaagactccaagtagattgggccagagatgcaagagaaggccctagggttctcatgagccttagggtagatttcgggcccatgggctaagtatgagcccacttatccttgtacatattagattaaggtttcattattt

SEQ ID NO: 228396 - DNA, 483 bp, Glycine max
  unsure (1)..(483): unsure at all n locations
tctttgagaaaacttccttgagaagctagagcttatctacacacacccatctaaaaactaagctcacctccttgagaagcttccttgagaagctagagcttagctacacacacccatctaaaaactaagatcacctccttgacaaaatacaggaaaatacaaacaaaaagtccttactacgaagactactcaaaatgccctgaaatacaaggataaaaccctttactactagaatggccaaaatacaaggcccaaaagaaggaaaaagctattctaatatttacaaagaagagtggatccaaccttgactcatgggctcaaaaaatctaccctaaggttcatgagaaccctagggccttctttagtagctctagcccaagcctcttggagtcttccatccaatacccttggggggtaggattgcatcatcccctccaccttggaaaggaattgacctcannatccgaggttcttcatactctg

SEQ ID NO: 228397 - DNA, 379 bp, Glycine max
  unsure (1)..(379): unsure at all n locations
agcttgcagagaactttcttgttattggttttntggcatggaaatatggaagacactaggacttatatgcaagtgggacaaagtttgttcgtgcgagttgacaagcttcagttaggtactctccttatttcttactttaatatgaaaatccatcattattttttggtaacaataaatagtccatgattgttattactcggttgagtttctaatttcttttaatcaaaattttaaaaatcaaataaagtatagtataataattttttttctctgttattcggatagcataatcaaactataatcacgttttattttctaatcaaatatacaacaacaacaacgccttattccactaggtgggggcggctacatggatcaa

SEQ ID NO: 228398 - DNA, 450 bp, Glycine max
  unsure (1)..(450): unsure at all n locations
ctctctggatgctctgttaaggtttccaagtgttatatagaacgagaagggattggagcctcaatcactgtctgcgagcgatgggaatttctccctcaacaaacattatttctctaatcccaacggtggagttgtgtgaaaatgagtttttaatctgctgttcaaattttgaagaagatccaacgattagcaagtctgggatcgtacttngacggggacaagtctggatgtatgcgggagaaagagagagttttgggagaggaagagaaagcatagagacgtattgcaaatgcaaaagttgacctaatatgtctctgtttatagntagggtactctcaccctattagctactctattttactttatcttattatcttataaagacgaatcgtattttactccctttcaaatgaataaataaaacatcttgtttattttctacaacatata

SEQ ID NO: 228399 - DNA, 376 bp, Glycine max
  unsure (1)..(376): unsure at all n locations
agctggtctgcctttgcaatatcaagaactcttgcttccactacagagccactctccaaaatagttgcagccactaaggaatcatatcacaatgagaattggtacttgcacttgataagaaccatccaaatttattatttaataactaaataccatgtgggaaggacaaaacttacactgatgattggcaataaaaccaaaaacatcattatgcttttcaaaacttatagcaagtccaacatcctcgacatccttaactttcccttttgcaaccataccaatgttaaatccttcatcccactttgaatcagatgcaccagatccccagtattgcatactttcaatctaattcanaaatgcccacaagattataagt

SEQ ID NO: 228400 - DNA, 367 bp, Glycine max
atatatgggtagaagcaatcccgtcggcatgttttggtagatacactaaggtcatgacagccctatgataaatgcacagccaaggtgaccacactttattcatcatacactgaacctcagggcgagggagctgcttgatagtatatgaggacagatatcattgctactggtgatgattgaacgaacacaactcttaccttacatctagaaaacgactttgatatgaaaactcttgtgatgctgaaatattttttggatatcgacatgacccactccgacaaacgcattctcgtatcccaacagaaatatgtcacaaattttgctgatgagacaggtatgacagcttgaaacctctaagtttcccatg

SEQ ID NO: 228401 - DNA, 403 bp, Glycine max
  unsure (1)..(403): unsure at all n locations
agcttgcttctacagggataagctagcagttggcttccatttactttngaactgagcaccaattagactagtcctgctattgtgaaataaaatttcaagaaagataacaaacagtgaaaaactagtcatgatgtaagcctttcatcccatgaaaagaatgggaagaattacataagccaacagtaactgtgcaaaaatatgttttatgctcaaataatagcaactgacactggaggttatcattctttgaaacttgaataaaaactaaagtatttagcattaattactaaattagatacttttgcagcaagcaattattatttctaacattctagcacaactttaaaactnttaaaaaggaaatcaaacgagaaaaaatttggatatgtcactcaagagacaa

SEQ ID NO: 228402 - DNA, 478 bp, Glycine max
  unsure (1)..(478): unsure at all n locations
tcagaccaaagcaactcanaatctaggtatctcaaacccctcaatttaatggattntcaaggtttgagaagtgaaattgagaatggagtaaatttggagcaaactctcacttcacacaagtctatatcatcaatctaaacttgctcaaactggttttacgacgaaaattctaccgaatcaaaatttgacttctcaacacccaattntaccctagaaatggctcttgccctcactttggtcatttgtttttctctctagcacagtccaagctttctcataagtcctaaatgacatttcaagctaggattaactcactttaaccaccaaataccactaaatccagatttggccttccaactctcaaagactcactctttntccactcataataccatgttctcaccttctaaccctaggttaactctacccttcatcttaacagtttccataagcaatttatcacaccacatcaaagcat

SEQ ID NO: 228403 - DNA, 371 bp, Glycine max
  unsure (1)..(371): unsure at all n locations
aactaaatgagctaagttatatttttatataaccatatccgtgtagttcatgataaacaattaattctactcacaatatttgtgtgttacacgtacatattaaaggtggggcaggagaggagaggatacttacaaaagaataaattaccatatgtgtataaacaataattaacttatctcaaggtttctataatttataacgacaatttaatcttattcggctttttaaatatagaaatgatttatataaaaacatgtatatatgataaacattaagtggttaattaaactatttatctaagcacataaacatcaagattaaanattaattaacctttataatcaaccgattaccagactaagttttcatt

SEQ ID NO: 228404 - DNA, 472 bp, Glycine max
tcaagcaaatatcattggatcatgtgataatgagatatctgttcttcatgcgacaataagatgccactgcatgccaattcattctccttatcaagcagaggctgatgatgattaagtcactgctagtctactctgctccatcaattattgcttctgtgcaaacaattcttttgttggcttcactctattaactgttctattagtgcctatatctatatttctcacttgattacctgttgacttactatgtttttaactttattgctcaaaataatatccttattaattggcttggacttttcaggtgggtgtgcctcggattatccttcgatgcctagatcatatggatttgaatgacttgggcaggcctgttgcttttctggctaaaatggtatgccaccgacctttacaatccaactgctagtaaggtctttggatccaataagatgagaaagtgttgactgtccgccca

SEQ ID NO: 228405 - DNA, 418 bp, Glycine max
  unsure (1)..(418): unsure at all n locations
agcttaataagtccatcaatggatggaaactttcctcccgccagtggtatttaaaatttcgtgaggtcatttcttcatttagctttaaagagaatgtcatggatcactgtatatatcagaaggtcagtgggagtaatatttgtttccttgtattatacatagatgatattctgcttgcgactaatgataagggtatgctatatgaggtgaaacaatttctctcaaagaactttgatatgaaggatatgggagaggcatcttatgtcataggcataaagatccatagagaaagatctcaaggcattntatgcttttctcaagaaacctatatcaacaaagttttagagagatttaaaatgaaagattgttcaccaaatgtagctcccattgtgatgggtaacaaactcgctttgagtca

SEQ ID NO: 228406 - DNA, 470 bp, Glycine max
ccttcactctaagcttcacactccttagtgattgaatcgtgtgtgctagaattttgtttaaattgccacgcatagcaacactgaatggtgccatccccatgtgcgattgatagacaaacactcgtttgctcttgtgagtgagtgaaacacttgtatactgaggagtgagtactctttgctcattgatgagatgccatgcttgttgttgtgcttgaattctgagcttgaggatgcttgctatggtgttctacagaggacatccctgtgaataaatgagtccttgtcccattcatttattttcatataaaatacatgtgctggatatgttaggatggaatcgatctccactcatgtcaatgtttatatcttagcacttgtagttttacttgcacatgtgtttacttttgcttgacgacaataaaagttctaatattgagggagtagactatttgctaatatacttatctgag

SEQ ID NO: 228407 - DNA, 428 bp, Glycine max
  unsure (1)..(428): unsure at all n locations
agcttaaatgtaaacatatgagaagcaagagatgatatattgcacttattttttttatactgatgtactccttaaccctaaactacatctagtcgtagtaggattttcacttaaaagcacaccaaccacacaaatattctttccccccaagcatctataagtttttacactagtattcttttcaagcctctataggttgcacaactagtatatttctcaaacctttgcaagttgcacaatcaatattgttgtcaagactatgtaggatactcataatcattattatttttatgttaaattaacctatgggtatccatcctattacaaattnttttaattaaatccttatatttttttttattgagttcctatattaattnntaaattataattaaattcccatggttaatttttatgagaacagaata

SEQ ID NO: 228408 - DNA, 437 bp, Glycine max
ttgattttcctcagttctttaacgagctgtgaataatatacttggccttcatttaactgtctttgggcttggcggccatgctcaacaaagtactttcgacacctactgtacgttgatttcaccaatgctgttatgggaatgttgcgacaatcctttaaaaccttattgatacattctgagaggttcgttgtcatgtggccatatcgacgtccttctctatcgtaagccatcgtccatttttcttttgagatgcgatcaatccatgttgctatggctggactcagttcacgaaatttttctaaattttgataaaaaatgtgcttgcaaggagtgtacgctgcataaaattagttatgaataacaatttacagtataaatgaaagtaaaataaacgtggccatcaaatatgaaattttacccaacttcttcaacatttc

SEQ ID NO: 228409 - DNA, 365 bp, Glycine max
agctcagtcaagcttacctattgcattattgtttgaagaatgtgagagccaactctattttgctccttgtacacttagttgctagtctgccattccatagttttgtattctttgagaccacgatatattctggtgtgaagatagggatgcacaataatgtctgtgtgcttcttaacaggagaacttgatggtaagatccactatatcactcgttggtcttctggccccattagtattttatcaagcctattaaaaagggcgcactgtgataggctcttctggtaacaccatcattttgcttttatctagacgctctatcatgacctctatggagacagatgttgggctccatatatttgcttaag

SEQ ID NO: 228410 - DNA, 394 bp, Glycine max
tactcatcttatgaccattttatgcaaacttggcgttggatattgtcaagcctactacggccactgccactggcataccgcctaccaaacattgtgctgcaacctacattgcgttcaccataaccatggccactacctacgccagagttataaaactgagtgtcactgtttgagtcttaggaattattatgatctcctcgagtaaaatgagcttgggcataaaaaactgagtattcgaactaacattacaggaatttggcaaaattttcacagtattaggagctggaaccattagtgaatcatcgcattctagctggatggatgaaatggagaaaagcatcgggggtgttatgtgatgctaaggttccgatcaagcttgacggaaagctttatc

SEQ ID NO: 228411 - DNA, 396 bp, Glycine max
  unsure (1)..(396): unsure at all n locations
agctntgcttactaatgaatcaagtattattttgggccctacccgggttgagttcgtgtactctttgtcaggaggcaaatgtgtctactattcatattctccgcgaatgtatctttgcgcaacaagattggaataagcttttgactaagttagcaggatctcagttttttgggagtgatctatgaccttgatgttgcattaaaatatcactttgcctttgttctttgcagaaagggtttgagatgtactgtttggtgtgacctcattttctgtggaggaatataattgaagaacgtttctatttctcttcttcatttgtaacaactcgctctgtcgcattacaaggatgggtatgaatattaanaacatgtggaagaagcaattttcttgcatgga

SEQ ID NO: 228412 - DNA, 435 bp, Glycine max
atggagtttcaaggtgtgagaggtgaaatggagaatggaggaattttgcatcgaactctcacttcacacatatcattatcatcgatctaatatagctgagactgcctatacgacgaaaaactaaatacccaatctgaggcatacttaattctgaatagaccgaagataactggattaagcggttaatagaacagaccaatatatgattaagttgcttacctaaatatcaagatcaacactaaacctagagatgcggctcatattcaacagctaataaaagttggctaaaaacgcgaaagtgatcgtattactgagtaatacctacattagaatcagagaatgaacaaggaacttaaaccaaattcaccacttataaaaaaaggcattgatcacacactcttcacacacacacacacacacacacgcacacatatc

SEQ ID NO: 228413 - DNA, 400 bp, Glycine max
  unsure (1)..(400): unsure at all n locations
tgcagcttagttgttggacacaacttttttgcccaacaggcctcttgtgatgaaagctccataaactcttttggtagaatatgaactctatcatgcaaaattgcctcgtcactggcagccatattttcaattaagtctatggcttcttcaggtatcttcaacttaatttttcctcctgtagaagtgtcgagtaactactctgattgtggcccgaacccatcaatgaagatgttcagctgtataggctctgaaaaaccatgagtaggagttttccccacaaagctatgaaatctttctaatgcctcactcaaagattcatcgggaaactgatggaatgaagaaactgancttttccctctgcagttttagactctgggaaatattttttagagacttctca

SEQ ID NO: 228414 - DNA, 473 bp, Glycine max
  unsure (1)..(473): unsure at all n locations
tcacgatgttgaaccaagattgagtcgagctgttttgattataacaaagatgacgacacacagcccacgagaatgatntcaagatcgagtccagaacaattcaagaatcaagagaaatttgatntccagattcacgacaagatgaattcaagattcaagagaagaaatccagaagacttcacaagggaagtattgaaaagatgttttaaaaaacatacatagcacaattctgttcttcaaaagaagttttcaccatattttctaagttaccagagtttttactctctggtaatcgattcccagattcttgtaatcgattaccagtggcaaagtctgttttcaaaagctttcaattgaatctacaacgctcccattaattccaaaatggtgtgatcgattacaacatattggtaatccattacttatgtggtcgaacgttgcaattacattcaattgtgaagagcacatccttc

SEQ ID NO: 228415 - DNA, 397 bp, Glycine max
  unsure (1)..(397): unsure at all n locations
agctgccttactctgcaaccataaatgtttttattttctcctccttataatgggaaggccctactcttgtatccctttcttctagatcatccttcaggtctacctggttatttaacacctaatcctcttgccacccgttattcaaattctccatgttttcaatcattcatgttttatgtatatgcttcattgggtcatccaccaaagactttacgcattccccaaccttcatattgtctttgactaccttggcaatgtccctatttgcattaaatagctcttgtattgnagtagaaggcatgggtgagctattctgatagcggttgtctaggtcacaaccttgcaaacctacttacaattcccataggagaatcccactgtcttttcaccatctgca

SEQ ID NO: 228416 - DNA, 379 bp, Glycine max
gccgacttcggctctatgatctgtgtggctgctacctttactattcattgggaccctggggcaacaaagcagagcctgagtagctccgatgcttgttctgagtcttaattcgagggtgtaatatggatgctcatagggcccattgctccttcacatactgcttgactgtatgtaggcaccactattattgtatgcatgcatagtccagttaattatcacattatcactacgttatctgtgtaagtaagagtgaaatactacataagctgtagatcttcggtaaatgtaaggtgacgtgacccttaaatgttcgaacctaaaaatcgctacatcttaaactagaaccatatacttaaaatacattagtagcacatttgcg

SEQ ID NO: 228417 - DNA, 302 bp, Glycine max
  unsure (1)..(302): unsure at all n locations
agctngangaccatggtgtgttgtggtacttctcgataagggagatctataatatttggccattaaccaaccagttgtggtctttgaattggtcctctatctctatagctctataacacttaacgtctttgacggtaaagggaccactccatcttaantttaattttcaagaaacaactttaatcttgagttgtagagtaatactttgtgtccaagccctgattctctgtggaggatctctttgtcatggaacctcttgtttctttctttgtagagcttaaatgattcatatgccgtacagc

SEQ ID NO: 228418 - DNA, 389 bp, Glycine max
  unsure (1)..(389): unsure at all n locations
tgtctcatcgnctatgcgagacagagaccaacatgttatctatcatcgccaagtaccaagaagagtggggtctagccacggcccacgagcatagaatcgcggatgagtatgcccaagtatatgcggaaaaagaggctagaggaagggtgatcgactctctacaccaagaggcaaccatgtggatggatcggttagctcttaccttgaacgggagtcaagaacttgcccgattgttagccaaggccaaggcgatggcagacacctactccgcccccgaagagattcatgggcttctcggctattgtcagcatatgataaacttaatggcccacataaatagaaatcgctacgaaacttgtatggtctctcagaccttgactagatacgac

SEQ ID NO: 228419 - DNA, 381 bp, Glycine max
gtttaatatagataccacgttactaatgtatatatactgcggattattgtattaatatgaatacgttagcaagttatacctagatattgtcttaaaatacaccaattatatacctagattttgtaattaatatataattagagggatagtagtatgatcattattatgattggtatgattataaccaaatactccaatatttctatgataaaagcgaatgcactctgacaataaaaaagttacctttcttataaaatatgattattctatgagtctagcatattctgagtaatatatacgaaaaaataaaaaaattttattcttttcaattgaaactgatgacaacataattttatattttgaaaacactgaattgtcatg

SEQ ID NO: 228420 - DNA, 423 bp, Glycine max
cgaatgcattcgaacctaagtgacatgtttgtatttaattctaaatgccagcttttcagattgagggcccaattggtggctagaaccacggtgttgctagcagagctctatgtcatcacagacaacaccatcatcgtcacccaacgcatcatcaagaagcttccaatagaggccaacttcaggctcacaaattgcaagtccaccctcgcaaaggctccgccctacaccctcgcaaatatggttgtcgatgtagaggcatccatcggaggaagagacagtggtgcacagtgtcagggttgagccaatataggaggtggaaggaccgacttgatgacgaggaagtcattgtcggagtcctagacttggagggagagagaaagacgggaaggccacaacttgtcatctacgtttcatggaggtgag

SEQ ID NO: 228421 - DNA, 359 bp, Glycine max
agctttgacttgagtcatcaagagattatatttatgtgaccatggcatgagtttcaaaaaatgatcaatcatcataatcatcaattaacaatcattcatcatcaatcatctctgaatcgtatatctttcaatatctttctacagaaatttctgattcatttctcttcatctttctaaaaaattttgttctgcactttctcttccaagaaaagatctttgataaaaaacttatgctattcatctttttcattctcttctcccttttccaaaagaacgaagttctaaccgcctgaattcttttgtgtctctcttctcccttacaaaagattcaaaggactaaccgcctgagaattttttga

SEQ ID NO: 228422 - DNA, 276 bp, Glycine max
ttatgctccgtcgaacggtgctttcggaggacctactcaccagaaggacatggactgtcaatgagccttcattcaaacattacttaagtggtgacattgaaaagctcaccactgttgtccattataagaagtctgaccactacaggatgctctcatatacacgttcagaagccttcttgaagcaactagatttctgacctttctttcattgagtgataaaacttatgcctaattattgtctgtccacggtgttcgatcttcttaatctgtgacatt

SEQ ID NO: 228423 - DNA, 359 bp, Glycine max
gcttgaacaaaataaaagattaactcttctaatggttttcagggtttgtaaaggttataactcttccaatggtttccattgactagacatgaagagtctataaaagcaagaccttgacttgcatttcgataactttttgacttaactttttaacaattctttagaacaacttttgagaaacctttgctaacttattattcttcttcttctttctttgcaaaaagctttcttaagttttttggttttccaaaccttgaaaacaaaagtgtgttattcatctttttctttctcttctccctttaccaaaaagaattcgccaaggactaaccgcctgaattctttttatgtctctcttctcc

SEQ ID NO: 228424 - DNA, 470 bp, Glycine max
  unsure (1)..(470): unsure at all n locations
ctttatgtganaagatgtgactcttcacatttgaatntgtatttcaacgttcaaaggtactggtaatcgattaccaaaacattgtaattgattacagccttttgaaaataattggacgttgtaaattcaatttgaaaactttttcaaaacaattttactactggtaatcgattacaacaatctggtaatcgattaccagagagtaaaaactctttggtaaaaggttttgtcaaaaactcatgtgctattcaaagttttgaaaaactttttaatacttatcttgattgagtcttctcttcatccttgaatcttgagtcttgaatcttgatcttgattcttgagatcttgaaccttgaatcttgattcttgtctctagactttcttcttgagtcttgaattcttcttgattcttatcttgaactcttgaattgttcttgatngatctttgattctcttgagttgttctttga

SEQ ID NO: 228425 - DNA, 414 bp, Glycine max
  unsure (1)..(414): unsure at all n locations
agcttagggatggaatacttacttgttggtgatgaacaaaagcgcaaaacggaatcaaaaaatgcgaaaaaggatgaccctagggctgcaaattcgtcaatcccgtgggtatggcttttgaaaggggggaaaagaagtttttgaatgtaaaaacgccccccctttcgtcatttttataatttggtgcaggggtggctcgcccaggcgagctaacctgcactttttttttttttttttttttttttttgaggggaatattaaccatgtcccctcccttctcatggattagcattttgcctaacttgaacttacttaggttagaattaggccgtgattacttattntattattactcttttcctttttaaaacaaacaaatagtaaaagaaagctgcaaaatacaaaggatacggg

SEQ ID NO: 228426 - DNA, 485 bp, Glycine max
  unsure (1)..(485): unsure at all n locations
ntatatagaatatagagcttcgatctattgagagatccttactgatgttgtctaatagctntggcgcttaacatgaggttgctactgtgcaaagagagagagtggggaccaaaaacactttttgcagcaaatcttcagagaagtacaatctgctagtgtcgtctactgctcaaagctgacttttagtgtacaaatcaaaagagaagttaacaacataagacaaaaggatttaagaatgtcgagacaagacaatttaaatcttctttcttgtgcgctatggcacgagtttcttactgaacttatggacattacttcctaatgattgtttttagtacttgaggatcatgtaattgttccattgcttttgaattgtgagccaagtgctaaagcacttgtcttcttaagactggaggatgaagtagtatcgtccaatgattgatactttgactattggctagagctgttccattcatgcttttcttctt

SEQ ID NO: 228427 - DNA, 343 bp, Glycine max
gcaagcttgacttaagttatcaagagtttatttatatgtgaccatggcatgaatttcataatcaagaaatcaataatctatctttcaatcttctctcaacaacattcaatatctttcaactctttctatagaattttcttattctttttctcttcatctttctaaaagtttttgttcaagcactttctcttccaagaaaagttcttttttcaaaaacttgtgctattcatctttttcattcacttctccctttgccaaaagaacgaaggactaaccgcttgaattcttttgtgtctcttttctcccttacaaaagattcaaaggactaaccgcctgagaattc

SEQ ID NO: 228428 - DNA, 476 bp, Glycine max
ctcaagcttgttgttaaaaggaggaatgactatgctattgatatgctttggtccttgttgataagtgtcataccctaatttcgtccggggacgattgtttgtcaacatgtggattttcgccagccgagttgagctgcttaacaccaattgttgtgcaatccgcaggattttgtgatgtttcagaaggaaatgagcaaaatactcaaaatgggggcaaaatggtcaatttgggggcattcctcagcccctgggcccattataaagctttaagatgaagcaaccagctcacctgagcgagctgtgttgcaaccttctccccccattctgctataaataggtgtggagggctaaggggaaggggcttagcatctctagcaagcatatttcactgatattagtgagaaggagaaaaaagaagaaatatcaaggccgaagcacttctatcatgctcccgaacatctccatgatcaatctat

SEQ ID NO: 228429 - DNA, 412 bp, Glycine max
  unsure (1)..(412): unsure at all n locations
agcttctcaaggaggtgagcttggttatgataggggtgtgtgtagctaaactctagcttctcaaggaagttttctcaaagaagcttctcaaggaagttttctcaagaaagcttctcatggaagctacctagtctataaatagaagcatgtgtaacacttgttgtaactttgatgaatgagagtcttgtgagacacaactcaaagttcaacttctctccctttttcttccttcaatttggtgctccccactctctctttctctccctctttcttttcctccattgaagcatcctctccaagcttcttatccaaggctcatcttggtggtgaagctccttcttccatggcttattccctagtggatggcgccgcctcttaactcttctcctttgtcttccgatgcatctncatg

SEQ ID NO: 228430 - DNA, 467 bp, Glycine max
tgtcgaaattgccatgtttgggtgagttagacatacccattctgttttagggtttttgtgatgatgtttgtgatgtttatatgctgaaattgctgatggaaatctgttagagatgaagggtagaactaacccacggttagaaagtgacaatgtgatgttatgagtggaaaaagagtgagactttgatagttggaaggctaagtctgaattctgtggtaaatggaggtttgagtgagttaatactaccttgaaatgtcatttagaacatgtgagaaaggttaggctgagctatagagaaaaacaaatgaccaaagtgaacaaagagccattgctatggccaatttgggtgttgaagagtcaaattttgattcggtgagattttacgtgtgaatcccagttgaacaagtctaaatggatgttatggactggtgtgaggtgagacgtttgctccaattacctgattctaa

SEQ ID NO: 228431 - DNA, 387 bp, Glycine max
agcttaataaaaaccctaatcgttacctgttcactattttattccacaaccttctcagtcatgtgacacacaattttcttttgctccactcccaaaacaaacccacctcctcctcctcggtaaccaaatcactctaaccttaattcaatcttcaaaacagtaatcactcacacaggtaaaaagtagataaacaaacaaagtagatcttacaaaaattacactaccaatttaggccctcccacataggaaatatattctctattactacgctaccttacacactcaatgccttttaaaataacaagtctacttgcttaaaccaggccaacgtaatgatcttatttatgcaaaaaaaagacatgaaatggtttgctactcaacctttaa

SEQ ID NO: 228432 - DNA, 471 bp, Glycine max
tactctatctagtggtgtgagctaacctcctttaagatggatttgcggtgcaattatgggatgatttaagtacgaaggacctgacaaataaggggaagataatatttgatgtggatatcccatggatagtgttttcagattatagcttatacagcatgttagcacaaatatagttcaaatggctgaaatatattactccttagaattcactcattatattattactaatgtaaggatactggcgacaaatatgcaatttgtcatggaaccatcattccttcccttattattgatatattttaaagagattggaacaaaaaaaattgaaatcgtgctatgttatcttgttattactttgacaatgtgcatgctcttttgataaaatgcccaagtaaagtgaagaatctgatttacagttcacaggacaagattgaaacatatatttgatgctctactaacataagagtattt

SEQ ID NO: 228433 - DNA, 310 bp, Glycine max
  unsure (1)..(310): unsure at all n locations
gaaanaaagaggagagcaggagaaaaagagagttatacaacgccacgaggggaagcagacgcaagcaggagcgaaaaaaacaaagaagcagccgggaggggagaaaacgagaacgaaacgccaccaagcgcgcaaaagggagacagggggacacaaagaagacccgcacacaaacctggaacggcggagggaagaccaaaaaagcgggacagggaccacgcagccaccccacaagcagaaagggggaccgagacaaagaccccccttaagagaaaagaaaagggacaaggaggaaggggacaggacaaag

SEQ ID NO: 228434 - DNA, 358 bp, Glycine max
tgcgacgcgataaccaaagcattgtactgtgctcacagccatgtggaaataattggacgctgtatgcccaactcgtaaactttatcaaaacaatcttactactggtactccacacaacgatctggaaagtcattaccagagaagaagaactctctggcaaaacgtttggtcaaacactgatgtgctatgacaaggcaagaataacttcttaatacgtatctagaagagtcttctgtactccttgacatctcgagctagaactggatctcgactcttgagatctgaacctggcactcgattcttgattatagactttctccttggagcttgaattcttcttgcatcttaactatgactc

SEQ ID NO: 228435 - DNA, 437 bp, Glycine max
  unsure (1)..(437): unsure at all n locations
agctttcaagaggtgaagaggcggtttgtaacnactccagcgntaattttgcctgaccctaagagaccatttgaagtgtattaccatgcgagcgggcaaggcttggggtgcgtattgatgcangagggaagagtaatggcttatgcgtcacgccaattgcgtcctcatgaagttaactatccgacccatgatttggaactagcagtggtggtctttgctttaaagatttggaggcactatttatatggtactcattacgaagttttcaatgatcacaagagcctcaaatatttgtttgatcagaaagaactcaatatgaggcaacgaagatggatggagttcctcgacgatatgattttggtctttccacctctangaaagctaatgtatagctgatccctgagccagagtcctacatgttgnaccatgatgagtct

SEQ ID NO: 228436 - DNA, 459 bp, Glycine max
ggccacccagctctgccaggcgagcagggatgctttttgtagaagcaacagacttctggaggaatcttatggagggcccaatggggcctgagtgatattggcacccccatttatactatgtacaccccctgcttattttggcgattctttattcgtaaagttaccaaaacttacaaatttcgtaactatacttgatgtctttccgtaatgttacggaaccttgcggatcacataatcatcccctttttgacttacggaatgttacggaacctcactaattgtgcaacgatgcttccattggatctccgacgtgtcacggaaccttacagattgtgcatcaatattttcttttgattttcggcatgtcccacaacttcacaaatcgcctaatgatgggtgccaagacgctcacaaggaccaaaccaaagatgcatgtcatcaagctaaggtccccgaatg

SEQ ID NO: 228437 - DNA, 416 bp, Glycine max
agcttcaatatcctttgagtacctattactttaaccaaagcgtgctaaacttggtgcattcatgaaccttgaaagaaaactagtagaaaacatcacatctagtctagttgcattcaactaaagaaagtacaaaaccaaacttttatactgaggaacatcagccttttcatcgccatcattcttggagagtatttcatttacaacaagaggagttgtaacaagattacaactctcaaacctgaattttttttaacaaatcattggcataatttctgtgagagaaagataccatcatcaagctgatccacttccattccaaaaaatacccatcactccaagattatcatttcgaaacttgcgcatgctctttaaatttgcaattcattagctcatttctatacaagcaatcataacat

SEQ ID NO: 228438 - DNA, 435 bp, Glycine max
tgtatagacgacagagcatgctgtagttaagattttgttttaggcgactaattaagtacggtatatggtttacaaacacaattgattaacgtttgaggaccaattaccacacgaaagacacttatgattgacttttgcactgactggaacacggaataagaggtgatagagattacatttatcacaaaactcaaaaatgcatatatatcggatgatatgaagtacaatttaagtgcatgcaacaaccatgagccaatactaacttttggccttcttaacagagaaagatgagaacaaaacaacagtacacattgtgtgatcatcgtatgcatatcttgcacatgcctgctatgcagctctactcgtaaaataattctattttaaataaaagaggtgaaataaactagtatacacgaaaggagaactattgtcgag

SEQ ID NO: 228439 - DNA, 414 bp, Glycine max
agcttccaaattagtgtactagactatcattgctcctgccaagctatcttgaaaaaagtgtattaatagcttttcatccctagagtgtgcgcccatcttgcgacagtacatcttgagatggtttttgggacaagtcgtccctttatatttgtcgaagtccggcactttgaacttcgggggaataacaacatcgggtactaagcaaagatccttcatgtctgcgaacggatagtccccaaatccttccacggctctcaatctttcctcgaggagatcaagcttcctcttttcttcagatgccgggggcgggccttccgtggacaaaactattggttgtgacgtgatgtcgggttgaggcaacgtgctaggtgccggcccttctgggatcgggggatagaactcgacatcctttca

SEQ ID NO: 228440 - DNA, 96 bp, Glycine max
tgccacccagctcgcccaggcgagctcagctcgctcatgttagcagggttgcgtgatcaagaaggaactgccttatggatgaaactgctgatggcc

SEQ ID NO: 228441 - DNA, 372 bp, Glycine max
  unsure (1)..(372): unsure at all n locations
agctgggacactctgttcaaaacctccatcattacacccaaaaccttgtgcttaaattaagcttgcacttcttctgctttcccatcatcaacttccatttttctcatcatctgttccaccatcaattaccatgcctagatcttcaacaaaatcacagatcagagaaatgcatttgtgtctgcttccttcaggggaccttatgaaagttctagtgcccgctcagtctagtagtcttttttttttcaaagcaaatataggacattntttttacctataagctgaaccaagggtcttgttttatctgttgaaacaagatggtaaggaaatccatccttatccttccgcgtagctttaatacaacacctctacttg

SEQ ID NO: 228442 - DNA, 436 bp, Glycine max
  unsure (1)..(436): unsure at all n locations
tatgtttgaattgcagaatatactgactgtttcatgcatccagggaggcggtttctgactcagtttcttaatcatttaatgttgtttaaaaaatacactaaaaaaaataaaaggacaggaaatgcaatatcgatccagactaattgatgaaacttgaacaagatcacacaggttcttcaaagaaaattacatgacaaaatagttaagccaggcctaagaagataccatataagatttaaaaaaaaaaaaaaaagatggggggcacatgcatacatcaatacataccttcatcaacatcaacagcaacaacaagtttctggggcaattgttgatcagagaaacaaaatggtttggtgggacttccacccanagatctatcttcaacatcaatacccttctctaaaccacctaacaagggagggtgaggaacacatgc

SEQ ID NO: 228443 - DNA, 421 bp, Glycine max
  unsure (1)..(421): unsure at all n locations
agcttgtagaatggctagacatgatacatgttatggttnggnttggttcaaggataaaagggatgccccacattatttccatgacacaaatgcaaaaatgatgatttggaaactttatgcaaaactggtcatgcatgcacctatgcggacactcaagtgtcaaatttttatggtcatgtgatgctagggctcaggatccatttcctctattttaatcaacccaatgtttccaacatatgttcttttatcaatttgtgcattcatccgagtccatttcgggcgtccggngaaatttcacagcattcacccttcaggtgtagacacattttccaaaaattggttatgatcaatgaactttttcaaagaaaagttggaaatcgtctcttttcaaaagcatgcctgtttttagctagacaaccta

SEQ ID NO: 228444 - DNA, 470 bp, Glycine max
  unsure (1)..(470): unsure at all n locations
tagacgtatggcggaaggcactagatctaaagctctattatcagaaanaaatggaagaaatgtttgcgaaatttgcagcaatagtcgaggcgaagatggggaccttatcagagaggttagcacatctcgaagctaacagatataatccacaacaagcacaaccagaagcgacttcattttcggcatcaggatcacacacagcgtcgcatcggatgaagcttgatgtgccgagattcaatggctctgacgccacaggctggatcttcaagataacgcagttcttcgagtatcacacaacaccagatcatgagagactcacgatcgcatcattctatatggaaggttaggcattagcatggtttcaatggatgcaccggaatggtcaattatcgtcttgcccggcatttcttcatgctctccattcgcgaatcgcatcaaccacatacgaggaatccactggactgctatgt

SEQ ID NO: 228445 - DNA, 388 bp, Glycine max
  unsure (1)..(388): unsure at all n locations
gcttgtnggttaaagtctcacgattgtcacgtgctcatgcaacaaatgttagtcgtggctatacgagacatcttgccaaacaaagttgggttaacgaaaactcgcctgtgctctttcttccatgctatatgtagcaaagacattgatccagtcatgtttgatgagttggaaaatgaggccacaattatactgtgctagttggagatgtatcttccccctgctttctttgacatcatgattcacttgattgtgcatctggtcagagaaatcaaatgatgtggtcctgtgtatctacggtggatgtacccggttgagcgatacatgaagatcttaanagggtatacaaagaatctatatcatgcagaaacatttattgttgagaggtaca

SEQ ID NO: 228446 - DNA, 487 bp, Glycine max
  unsure (1)..(487): unsure at all n locations
nttatattcaatgatatcaactaagtgttaatagcacattatgaatgttctcaggcatgttttgggcacattttgcagtccaaaatattgaacatgttaactaaacaaagtaatgttattaagcttattgaacaattcatagaattagaaaaagcaaaataatatattcaagttgggataagatgacaatagtcaaatagttatcattataaatttaaggaccagaacttaacacaatgtcaaaacatttgacagaacacctacctcagcaaacctaaatcaaaatgatttcagaaaatgcacaatggtggatttgatagaatatttaattgtgattatgcagtcaagagacntgatttaaaatttaaatgttgggtacatgtcttaacatgttgcagcacacaaataatgtggaattgctcaacggattaacataacccaagcacgccatntttcataatataatntcatgccaccaaataatcag

SEQ ID NO: 228447 - DNA, 344 bp, Glycine max
tgaggcatgcaagcttaactttaagtgaagcgtgttgtttatttcaggactcaaacagacatccgggtaaaaagttattgtgggttgaatttggtcagagctttaacattcaatttaaagcgtctcgatatattacgggactcaatcagacatctgagtaaaaaggtattgtcgttttaattagctcagaacttcaacattcaatttcgagcgtctcgatgtattacggggctcaataaaacatccgagtaaaaattcatcgtgcggtgaatttggtcagagcttccacattccatttagagcgtctcgatatattacgggactcaatcatacatctgagtaaa

SEQ ID NO: 228448 - DNA, 440 bp, Glycine max
  unsure (1)..(440): unsure at all n locations
ntacagcanattttagtaatgacccactaacctagaattattattacttaatgccattaaccttgggaattaaaaaaaacttaatggctgtgtataactgaaattgtggcaaccaaaagtcactcccaatagccaactagtcagccaccatttggtctcccaaaaggctgatgcctaggttgccaattgggcccttattacaacttgaactaaacctactaaagcccttttagttgattaacccaaaacatatttttggtcagccaactttacaaggattgggcccttatttagacaaactaaacactctaaaattaatacaaagaggtgtcatttagancttctccatttgggccatgatacaactcacaaccttggacttttctccttgaaacttgagcttgtattcaaatagtatggacagcatttgctgaagagct

SEQ ID NO: 228449 - DNA, 283 bp, Glycine max
  unsure (1)..(283): unsure at all n locations
agcttagtattaggcgaggggccagntnttatatatatttatagagaaaggnnggatcgggggattaaagggagccctgaagattaacacatttcaaatgcaaatatgaagttcattaatatatcagcagaaaagcaaatgcctgaacacatgcagtcactttaagatcattatcacaatcatcatcaccctcatgatgggggtggaggcactgatcatgattctggcgatagcagtggacatgagggtgattacagtggtgacgacaataacaatcatattg

SEQ ID NO: 228450 - DNA, 317 bp, Glycine max
aaaatggtcaaaaacactgggaatttccttcttttgaaccctgctggatagagaccataatgataatgaaatcctcattattacatcaaagacaacaatcacgtcaaggacatctagacatacttagtcaaaagggaccatgacttacaccgcagcttcacagatataacataccccagacaaatattgagtaacatctctcacatgtctcaataaccaaagttgaaaaaaaaaatctcccttgtcctgatcgatcataataagagactgaatctgatacaactattcttgatagatgtagtattatattgatttca

SEQ ID NO: 228451 - DNA, 416 bp, Glycine max
  unsure (1)..(416): unsure at all n locations
agcttccccacttctcaacagggctaacatgtgattacaatgccatagcaagacatggaattcatggattgtataggttgtatactatagctgtaggcagcaatcatttggtgaaaggaaaaaacaccatctatttgacacagtcaaaaggcataggtcctttcatgggacttatgtatgattatgtccgcttagaaagtccaccaattaaaagtacttgattgagccgagaacatgtacgtagtggaggaagataaataagcgtgactctgtctctgtgcattatgaatctctcatcttgcaatttgcatagaagcatgcatgcatagcagaatttttgctagaaagtagaaattatgatgaaagtataaagccagtattttctatttatcgattgattntaagtttgtactact

SEQ ID NO: 228452 - DNA, 459 bp, Glycine max
ggctacatggcctgcgctggacaggggttgattccacgtgggtatcagttgtttcttccgccttcatctttgctcttgtcgcgtcttctttttgtgctttgctcatatatgcttcataaataatgggcatcattggttagaaaagaatgacaccccgaaagaaaatgatctacaaaatggggatgactttgaatattgctgattaggaaccaaagattcaaataagttgctacctcgccggccatatgatgtttcacggatcacaagttccatatatatatatatatcatcttaaatatcaataactttaatgacacctattcttatctacaaacattatctataacatatttttcatttagaatgacgtggctcgagtgaaattcttacagctaatcttgttatctctactacggacgtatagtgttgacttgcgttactactcatgctaatcactta

SEQ ID NO: 228453 - DNA, 466 bp, Glycine max
  unsure (1)..(466): unsure at all n locations
aatcactgcagcatgcagcttgnncaccacacgtgatgattaattcttatgtcaaaacttanatatgggattcgatcatacgctgtgaatacaaagagaataggtgcataagaatatatctaactacatgtctgaaattatttacaggaatcctactgttgattatatcttggataagtactaataacatctatccaaacttctcttctatacattccttcccaacaatggtaaggtcatcctcctgcacactatcaatagattgctttggctggtgtgaacatccaaaatattaaatcctccctatcttgggagaaacatgaaacattagatttattatgggaccaccactttgtaatgaaccacgaatgatccaaataaaatacgcccaacttgacagatttaagactaaccatttctatgttcaagatctcagatataccgatgagttattctatgctaaatg

SEQ ID NO: 228454 - DNA, 337 bp, Glycine max
actaactgcctagaacaagagcggggagaagagaggattgtttttaaacgaactaccgtctaaaaagcatagaacgattacgactacctcatttatgaaatgacacccaggaaatgaagcatgccagaattaacatatgggcgctgccagatgatcacatcaaaatggataacctcgataagaacagatgttgcggcgagggacggctaactggtctatgaccagttccaactgcaccaaacacaacctaccggacaaagtgctagtgatgatacacggcgacagaaagcgagatattgatttctaccaaaactggcggacactgcaaaagagaccc

SEQ ID NO: 228455 - DNA, 423 bp, Glycine max
  unsure (1)..(423): unsure at all n locations
agctngaacgggaaactaagggtcattcttcttcancaaaatttaataattgacatatttgaaaaaatgtaatatccccataagtgggatgttgacatacatacctaaaaagatatgtgtaacaataactatgactgcggtgatggcagggaaaattgtatgacatttggttagtcaaccaagaatgatagataagtgccttaacttcctatggaagtgaaatattagtacctacaaccaatcccaaagactataattaggtgacatactaaagcagggatatataaaatgttcatgcatgttattaacaaaaaaaacatgggtggcaggaaagtcaattatggactattggcaccacatggcaactaactaatgttgaccatgtcaccatttattaacaattcccatcaacctatgtatgtg

SEQ ID NO: 228456 - DNA, 232 bp, Glycine max
taacctcatgacaatcacaaggatattatttgaaatatattaagagcgatagagactgggctaatataagtttgtgaatcggcacaaacttaaaagagtaaaactgttaacatacgtgcactaaaattgaatctacggttaaacatgcaagcagactgattaagacttagtggactaagcgcaaaattgtttgaattaaagcggtctgtctaatgtgagaccaataagggat

SEQ ID NO: 228457 - DNA, 323 bp, Glycine max
ttggaattcagtgtttgttgattggcttgaattgatcaattgtttgaattcagtgaattgaaatgcatagatcatatgcctagaatgagcatgctattattagaagagaaagaacatagaattaggatcatgattgaaaatgttagttggtttgtcaggttgattgtgaaggaacgcattatccgcaaccggtgagagtgtgatctttaattgtgagagaacgactaacattgtggtattgtgtcctaaacatggtttctcacgtttacttgtaagcaagcagttatagcttacagattttgtagcataattgatgtgaattc

SEQ ID NO: 228458 - DNA, 439 bp, Glycine max
  unsure (1)..(439): unsure at all n locations
ggttttcgcatgtactgatacacatcaaaactccacggagaagagtttaagaaatacctagatccatggagtttcgatcaaacaaacacagttgttttccttcacaactttgcatgaaaggttctttatgcgagaccaacacccgttctaaagatttctttggtatttcaatccgatcagattatggaagtttaatataacttaagttcccatgtctcttcatttcattgatattctgactttaccaaatagatcctttgagtgttaaatatatcattgtgattcattctagaacagttcttcgatatatcattgctattgcattgccatgaccttactctnttctatgaatgaattttgtttacaaataaaacagagcagggcaacaacatacttaaacatatttctcatgtctaaacatgcctaatcaattcacatc

SEQ ID NO: 228459 - DNA, 391 bp, Glycine max
  unsure (1)..(391): unsure at all n locations
agcttacaataactgggttggggttttcttttgtcataannggntaaaaaaacctgaacatgcacatttatgcgcaattatataatattttatttgatttacttataaggtatgctctaaaagatgttggcagagtggatgaagtaatccaatgctataatgtatgttctttccttacactggttggtaatgtagtgcttttaccctcaagtcttgatttttgtatatgattttattgcaatttctataggaattagtttttgaaaatattggcttgttatttttaggtaatgttaaagtattggtcataaaattaaattctttctagaacactatggattangaaagttctataagaaattttacttgccgatgaagcttttatatgcat

SEQ ID NO: 228460 - DNA, 480 bp, Glycine max
  unsure (1)..(480): unsure at all n locations
ttcttaagaaaacttccttgagaagctcggttgttaatacttncttgagacgctagagcttaactacacacacccatctaagaactaagctcacctccttgagaagctgtcttgagaagctagagcttaactacacacacccatctaaaaactaagctcacctcctagacaaaatacatgaaaatacaacaaaagtccctactacaaagactactcacaatgccctgaaatacaaggctaaaaccctatactaatagaatgaccaatatacaaggcccaaaagaaggaaaaacctattttaatatttacaaagaagaatggatccaaccttgacccatgggctcaacaatcaaccctaaggttcatgagaaccctatcgccttctctagtagctctagcccaagcctcttggagtcttctatccaatacccttgnggggtaagattgcatcaccttctaccatacaaagcttcatacgga

SEQ ID NO: 228461 - DNA, 388 bp, Glycine max
agcttcttatccaaggcaattttgtttgtattctccttcttccttggcttattccctagtggatggtgtctcccctctcctcttctcctttgccttccactgcatctccatggtgtaaaatcaccattgaaggacctcactgaagctcaaagatagaagctccacaagtaagcttccatcaagtggtatcatagcacaagagcttcaagtaggggctccttatacctccattaattatttgctttaccttctcttccattgttggttcttcatttttctcgatgtatctcctcagatgtcttgtgctaaatgttgttaacatgattgtttatagtttccaccgattaaacttgctatagaacctacatttgaatttctatggatcaaa

SEQ ID NO: 228462 - DNA, 460 bp, Glycine max
  unsure (1)..(460): unsure at all n locations
tgaccctattctatgtgaagatatgcttgctagcttnttttttattgacntgaataatgaagaaaaaggaagagctctactgatgactcacatgtgagcacaaagatttcgatggagagattgacaacatgaatatattaaattgcataacctcttttatttctaatatgaatattacgaaacagtttgaatgtatggaattcatgacgtatttatcaacttatatttggtatctatttattgtcaaatggaattgcagcactctattctgtctatgtattatatgatatagcgtttgagctntagtctcacagatgaagtattttactcagctgtccatcattaatgtatagaggttggattattggttntctgttcatattattacacgctaagcttcaagaattccttgggagaaaagaacttgataggcatcttgatgctgatgaagcaatagttc

SEQ ID NO: 228463 - DNA, 460 bp, Glycine max
tatagaaactcagctttcatcataccttcctgttggagcctggatgcatatgtatgccacaaaacctgacaagatcatccttctaatatctgaaaattgactcctgaaccccagccctcttgaattaaatgacacaatattcatgggtttaattggcgctcttactacttacataggattgctgttgttgtggatgtctgcttcaaatcagtctataactttactattgtgcctgaggtgccattaaaagtcaggcccaagtctctggctattccaaaaaatcctccttctggatcccttacgattttatatgggatgatgaacggctggagatgagctgatgttgacatacatgagagtcctccgcacctgcgtttggttgaagatggccatcatacactgcgtgggctatgaagtccttcccaaggtcttctatactacctctggagacttcactgat

SEQ ID NO: 228464 - DNA, 348 bp, Glycine max
agcttctaatttcttgagtatcaatttcatattggggggggaaaattcattttcctttcttatatttggcttttgtttctacacataattattttatattatttgtcttagtgcaaatcataaagcaaaccctaggtctatagaatgtgtgttagaaactacataatataaagatgttccaccatgcaagatgctttgattcattgtaactttggaaatgaagttagaattttgattcattgtaaattaggaaattaaattagaattattagcctaattattctttcttgtaagttgcatcttgtgtttttttttaaaaaaaaatcctatctgattattctgcatatg

SEQ ID NO: 228465 - DNA, 207 bp, Glycine max
  unsure (1)..(207): unsure at all n locations
tccatcaganacattataaactatgtcagttatgactcgcagcttttcatgaggaaaaatacttgtacttgcgggcatgtcactccgtttggaacttccttgagactcaagttaatcaccatgggggggggggcgactgcccaccttccagatacgttcttcctacacacacccccctctgccttaaaccttccattctccttctct

SEQ ID NO: 228466 - DNA, 378 bp, Glycine max
  unsure (1)..(378): unsure at all n locations
agcttgacaactacgtcagtagcgtcatatttgaaagaagaancagggaaatctatttgaaattggaatttttcgaagctcggtcgcggaatattgatgggataggtcatggaggatgatatctatttgatgccatgctgaaattctgggattttggtattgagggaagaaattgtgcaaagaaagacttccaataaaactctctctatattgtgattatgtatttatgttgttcatgtttaataaaacctaaagcactaatccttattatattaatcatacaatattactcatattatgaaacatggaaactaatcccaagctattatctctatttaccctgaaatatgaaatacaatctagatcttattttaattt

SEQ ID NO: 228467 - DNA, 401 bp, Glycine max
  unsure (1)..(401): unsure at all n locations
agcttcagaccacaacaacacaaaatctatgtatcctaaacctcctcaattaatggatnttcaaggtttgagaagtgaaattgagaatgggataaatttgaagcaaactctcacttcgcacaagtctataacatcaatttaaacttgttcaaactggatttacacctaaaatttcaccgaatcaaaatttgactcctaaacacccaaatttaccctataaatggctctttgttcactttggtcatttgtttttctctctagcacagcccanactttctcataagtcctaaatggcatttcaagctaggattaactcactctaacctccaaataccactaaatccagatgtggcctccaactctcaaagtctcactctttngtcactcacaacaccatactc

SEQ ID NO: 228468 - DNA, 468 bp, Glycine max
  unsure (1)..(468): unsure at all n locations
tatccttatggctggcctccggacttcacgccccgtgctcccccggaagatttaagccaagcccctactttcgaggggcaactcccaccttatgacgactatcccgggcaagacgatgaggaaggagatacccatcttggccccctgctccacctcaaagatccgtccccccatgaactaccccaactgaacataatccgccatatcccggcctcacccacacccgtaaaagaatctgttcccttcgcggaagataagggaaagattgaggcgcttgaagagaggttacgagcagtcgagggccttggcaattacccattctcggatttagcggatntatgtctcgtgcccaacatcgtcatccctcccaagttcaaagtaccagactntgacaaatacaaagggacaacatgtccaanagggcatctncggatgtattgccgaaagatggnggcgtattccgcggat

SEQ ID NO: 228469 - DNA, 399 bp, Glycine max
  unsure (1)..(399): unsure at all n locations
gctagtggccaaagccctcatcagtgaggcagcataatcctaaggcgccaactgtattcaaacgtgaaaagctgcatcaccgcaaagagnttcttgcctgtaaagatcatactccacgagggagataattcaacaagaaaactatctttcacggacccagttgcagttctttacacctgccaacttcattggagcaacatcacgtgcttcatgctcttgaactcttgatgcagntgctgcctctatctggcgcctgggactttgcgaccataacttagtttttctaatgtgctcagtggccctttactngctagtcgctattcttcatatatattctggatctagttaaattcaatgaggcatatgggagaatatgagatatcaatcatatcatgatgc

SEQ ID NO: 228470 - DNA, 483 bp, Glycine max
ggaccttaaaactaagctaacaatgtttcggagtcgtgtttcagacatggcttctacttcattcttaaaggtttttatactttcaacgtctaaattttcttcatcacacttcaactttttaacagcaaatatttgacctcctttcatctctgctttataaacttttcccaacgctccttccccaatgcaatactggttgtcaaagatcttggtagcttcgattatgtctccatacacaactctcccattaaagtaccaaattgaaaatggatttggtcttttaattgaacttttctgtcttcgagttcttgactttctcttgtagcaaaagaaaacaatcccaacacacaacatagaaataaaaagagcacctcccaaggaagcagcaattgggatcagaaccttctttttgttacttgatccaccattaggtttagtgagagaaacatacatggacgcacaccttgaatattccgcataatc

SEQ ID NO: 228471 - DNA, 416 bp, Glycine max
agtcacctgaggcagcaagctttggtattataggccttttgcaacatatttttgttgtctctaaacaaatagatgtcttctctttagctcgtctctaaaaaacgcgatcgttggagcatttaatgcgcatacttcttcataccaaaaatttctattcttagctatcgtgttgaacacttcattaggaaaccactttcttttgcgtcagagcaagtctatacagcagagcgtttcttttgatggcaattaccaattttcagaacttgagtttcatttattcttcataggattcgacagatcctaaagaatatttctggaaaacaaatctcacacataaagtattaaatgaagtcctaaatatcatctttttaatggtgtatcagatcatgacattagcttgctatcatctgaaacat

SEQ ID NO: 228472 - DNA, 401 bp, Glycine max
ttagaacttgatagagcaagctagaaaactgtatgtctattatcttagtgcagcgacctactccatattatgttgtaaacttaatgcaactctcttacgctaagcttgttgagggatcaacgatgaggttcatagagagttacgctcattcactcgagggaccttgatttggataatttcccaacataagaatactaggataacattaaatagagaaaaatctttaacaacatcaaggtagattcagtagatcaacccaacgctgttaaagttgaatccctagtccatgtaccttacacatcatcattatttttcttacatacccattcaagcttcttctcttaccttttatgcttcttattctgacatcttcctttttctctattaactatctaaatgcc

SEQ ID NO: 228473 - DNA, 436 bp, Glycine max
agcttcatgatgaatcaagatcgattcaaagaagttttgatgataacaaaggcgatgacaaaaagctcaaaagtcaagaacacttcatgataacaaagatgatgatttcaagaatcaaagaatgagttcaagagtgaatcaagaacacttcaaggttcaagaagaaatttgatttcaagaatcaagtttcaagattcaagttccaagaatcaagatcaagattcaagactcatgattcaagaatcaagagaagacttaatcaagataagtattaaaaagttttttcaaaaactgagtagcacatgaatttttctcaaaaccttttaccaaagaagttttactctttggtaatcgattaccagattgttggaatcgattaccattagcaaaatgggtttcaaaaaactctcaactgaatttacaatgttccaattga

SEQ ID NO: 228474 - DNA, 468 bp, Glycine max
tgagtttgcgtgtcgtcccagttattctagtggcaaatatggacagaacttggaggatgtgcacagactgcagggccatcaacatcacagtaaagtatagacatctcattcctaggcttaacgatatgttggatgtattgcatggagcttgtgttttctctaaaattgatttgaaaaatgggtaccatcaaattaggattagagaaggggatgaatggaagacaactttcaaaactaagtataggttatatgaattcctggttatgccctttgggctgaccaatgctcctagcactttcatgagattaatgaaccatgtgttaagggaattcctcggaaatttgtcgggatattttggcaaatcttatttacaacaaattcatgataacatcttatgcattgaacaagtattagggcccttatgcgtacagtttgtttccaacatggataatgagtgttaccatggac

SEQ ID NO: 228475 - DNA, 365 bp, Glycine max
  unsure (1)..(365): unsure at all n locations
agcttacccctatggctagcctccggacttctcttcccgtgccgccctggaagatgtgagccaagcccctaccttcgaggggcaacttcctccttatgccgattatcccgtgcaagacgatgaggaaggagatacccatctcggccccctgctccacctcaaagatccatccccccatgaactaccccaaccaaacatagtccgccacgtgccatcttcacccgcacccataatcgaatccattcccttcgcagaggatcacggaaagattgatgcgcttgaggataggctgagagtggtagagggcctcngcatatacccattctcggatctagcggacctatgtctcgtgcccaacatcatca

SEQ ID NO: 228476 - DNA, 424 bp, Glycine max
cacacccctataatagctaagctcacccgcatgacatattaacatgacaatacaaaacaaatcctactactaagactactcaaaatgccctgaaatacaacgctaataccctatactactacaatggccaaaatacatggcccaaaataagaaaacaacctattctactatttacaaagaagagtggacccaaccttggcccatgggctcaaaaatctaccctaaggttcatgataaccctaaggccttctttatcaactctagcccaatactcttggagcctcttgctcatggatctggtaactggtcctttcctagggaggattgcatcacaatgccttaatgttttctctcttttcataagaatcgaaagattgtttaatggtccaatgccttaaatgacctttcattcaataaaaacata

SEQ ID NO: 228477 - DNA, 428 bp, Glycine max
  unsure (1)..(428): unsure at all n locations
agcttgtataaatatagtgtgcctttattttcttgcactttcattcttctcctgtcttattttcatccaacctaagtttcctcatgaagcttgtttttgtttgtctacatcccacttttttcatccttctatccatttcttgtttccttcattgtgaaccaatgacacatgcacaacctanacctattgatggctcgttgttgtgcttacaagacaaccatatttcgaatcaagtgtgggaaggccaagagagaatgatttgttcgaggtataattatgtttgggcttttacacacttagatcagatagataatcgtgtcaaaaatctaatcactttagctggttttggtcttgttataaatgtcaaaaaaaatgatattaaccagcatttggttagtgcgttgtttgacattgagaaaccgaactac

SEQ ID NO: 228478 - DNA, 440 bp, Glycine max
ttaggagaaaccatacaaaccaaggtagctcctatacttataataattgaggaagcttcgccaagcatccccattgaaaaacctttattcaaacctttcaaagttagtgagaaggctaaacgaaaaattagggaacttagaaaaactaaatccttaattgaaggcgtaggtgacaaccatagtgaattactaaacaagattggtagtttacttaaggtcattccagatactccccaagcctcggaaaatacttccaaaatggtaacaagaagtacctccaaattaattaattttattaatgaagatagtgaccaaaactcagataacacaactgatataggatcagtgtcagaaaagaatataaatccaattaattccaaacattggaaaacaccttccatattatattatcaacgtccaactggccttgaccttctatt

SEQ ID NO: 228479 - DNA, 436 bp, Glycine max
  unsure (1)..(436): unsure at all n locations
agcttcatgatgatgattcaagtatgaatcttgtngttttgatgatgacaaaaggcctaaaagaatgatttcaagattgagtcaacaagttcaagatcaagattaatttcaagtttcatgagaagaaatcaagaagattcaagattcaagagaagtttgatttcaagattcaagagaagataaatgcaagattcaagagaagaaatcaagaagacttcaaaagggaagtattcaaaagatttttcaaaaaccaaacatagcacaattttgtttttcaaaagagtttttctcaaaattttctaagttaccaaagtatttactctctggtaatcgattaccaattacctgtaatcgattaccagtggtaaagtttgatttcaaacgctnttaactgaatttgcaacgttccaaatgtttttttaaatgatgtaatcga

SEQ ID NO: 228480 - DNA, 416 bp, Glycine max
ctataaaactaagctgacattatcaatctaatatacgtcgccttgtgtgagtatggatcttcattcggccaaccatgaaacagatatctaacggcgttgggtcctcctactgagtaagttgatgcaattaaagatgtcttcctaattaaagatgttcttgtgtcctatgctgacgacaaaaataccacacactgattcctcgagagtttggactaatttaaatcaaactctgttcacagatccctctttgtgaacttagcctaatttaaacaacattatactcacaacataataaacaaaactaaaaccctgcacattatccttagtgtcgcaacaagcccttttgtatgcgtgcgacgcgaggctcacgggtgcgcttttcataggaggaaagatgcgcagagtcgccatcaacg

SEQ ID NO: 228481 - DNA, 367 bp, Glycine max
agcttgaaattgaaaacggaagctctatattaagtttaacgacaataccttttaactcggatgtccgattgagccctgtaatatatcgagacgctcgaaattgaaaacggaagctctaagaaaagtcaaacgacaataaattttgactcggatgtccgattgagtctcgtaatataccaagaccctcgtaattgaaaacaaaacctctgagtaaattcaaacgacaataacttttcactcggatgtccgattgagtcccataggatatcgagacgctcgtaattgaaaacggaagctctgagaaaaatcaaacgacaataacttttaactcggatctctgatcgagccctgtaatatatcaagacgc

SEQ ID NO: 228482 - DNA, 378 bp, Glycine max
tccctttctttggccacgctggactcgttaggcagtgatttccttggcaatttgacgctcagaaacatcaatatctatcactccatcagtaggtctgcccagatatttgttaatcacagcaggggagaatataacacactatcctctgacaaacacactttgatactcatcactttttctgttacatatgtcagagggaatgttgacaatgaattccctgactaagccttcatagcaatctcccaacttgctgacagtcttcagcagtccagcagccttgatgaggtccatgatctcctttgaatccaaggcatctcttgccagttctctctcaaccgcaagtctgcgttgatacacatatctccactcttcacattg

SEQ ID NO: 228483 - DNA, 217 bp, Glycine max
agcttcatcgatgcgagatttttgtttctttatctctaaaaactcactcaaagataagtgccttgtgatgaagacttttgggaccaaccacacaaaggtgtgccataacagagcgactagtgagacctacgaaagagaaacacaagcacttagcgagggttgtgtgctgtcggtggttttcaggctcttagaattataaaggggagtataaaatcat

SEQ ID NO: 228484 - DNA, 414 bp, Glycine max
  unsure (1)..(414): unsure at all n locations
cgctaagtccatgggttagacagggacaagcgctaataatttcctatgactttgtcatccacccagtccatgggcttaacggataagtccacaaaacttgacttgtatacccactcctagtaagagccagtggctactgctgtacttgtatctttgaaaaataaatagtaaaacttaatggattgcccaaaattggatatagtctcagtaatggagatagattaatataaatcttcttgtatctgttatatatctcttatctattctaattgaccaaaagattcgaatntagtattgtttataaaaagcttttgcaaaatctttcaagtatcgtctgactgtgtcttgtgtgtgaaaacttgtgatttttaaatcataatttaacctcttattcttgcgagttttgcctataca

SEQ ID NO: 228485 - DNA, 379 bp, Glycine max
agcttgtctgcctttgcaacatcaagaaccaatgcttccactacagagccactctccaaaataattccagccactaaggaatcatatcacaatgagaattggtacttgcacttgataagaaccatccaaatttattagttaataactaaataccatgtgggaaggacaaaacttacactgataattggcaataaaaccaaaaacatcattatgcttttcaaaacttatagcaagtccaacatcctcaacatccttaactttcccttttgcaaccataccaatgttaaatccttcatcccactttgaatcagatgcaccagatccccagtatggcaactttgcaatctaattcaaaaatgcacacaagattagaagtaaa

SEQ ID NO: 228486 - DNA, 444 bp, Glycine max
  unsure (1)..(444): unsure at all n locations
ntatatgggttgaaacaatcccctcggtcatggtttgtgagattcactaaggtcatgacagccttatgataaaaacaaagccaaggagaccacactttattcatcaaacactcgacctcagggggagtgactgtattgctagtatatgaggatgatatcattgntactggcgatgattggaaggaacaacaacttttaagtcaacatctagaaaaggagtttgagatgaaaactcttgggaggctgaaatattttttggaaattgaagtgttccactccaagaaaggtattntcgtatcccaacagaaatatgtcacagatctgctgaaggagacaggtatgacagcttgtaaacctctaagtattcccatgaattcaaaccttacattgngtaatgaagatganagcgcacaactggactatgagatatatcaacgtctagat

SEQ ID NO: 228487 - DNA, 337 bp, Glycine max
tgcggcagcaagcttagagattaagctttgttcgtgtgttcaaagctctgcgccacgcaagcgctttgactcttggtgctcactgacttgccagagtcaaattttccttcagagtgtgcacaccctattcatagtcttctaatcacaaaatttataagccttgtgaccagtgcaatacaaaacaattgggggatatcttaatcttaattaataggggactaccttaatcattccaactatctagccgtatttgttggtgcactgggacgttacaggacgaatgactcagcggatttttgttaccagaggaaattcaggctttagcaatttattctga

SEQ ID NO: 228488 - DNA, 406 bp, Glycine max
tgtccatgtcaagagccaacatcgagtagcacatgtctttaccaaagcaccgccaggcccggatgtttggtatattcattgtcaagttgcgaatgaataacatctattcgccaacttgaggggtatcacgattatagcggttgctgctacgttcctagaaagcatctgagacctactctggggcttacgatacgtgagtaagctaaccggttacgcaagttagttattctataataaaccacttttgatactctaagaactaatcctcaagcttcgatgcatctgtcttccatgcctgatctggaagggattactactacatctgccccactcccaagaccgaccacgctcaccacttatattcttgaatccttgctggttaaaagaaactgcctataccttatga

SEQ ID NO: 228489 - DNA, 342 bp, Glycine max
agcttcttatccaaggcccatactggtggtgaagctccttcttccatggcttattccctagtggatggcgcctcctctcacctcttctcctttgtcttccgctacatctccatggtgtaaaatcaccatcgaaggacctcattgaagctcaaagatccagccaccataaaaaccccacaagcaagcttccatcaagtggtaatcagagcacaagagcttcaagtaggtactccttaaacctccattaatttgttgctttaccttctcttccattgttggttcttcatttttctccatgtatctcctcacatgtcttgtgataaatgttggtaacatgattct

SEQ ID NO: 228490 - DNA, 463 bp, Glycine max
  unsure (1)..(463): unsure at all n locations
ntgacgaataaggtgatgcatttaggaaacacaacaactaacaagtatgaaaattataaattntgttgttgttagggtttaggatttaatggataaaaataattgtctttgtttacttgtttgtgtatttcatatccagggttgagtctactcattaggccttaaagagactactacagaatagtctttgagacctatgtagtgttttggaagccatgaaccacatgatcacaatacaacacactgaaattaaggcatcttttgagacaagtacacatgtggttggacatgtttttaaagttaccttatatgagaaaatatttggcatggcatcaaggtatgctttataccaaattgatgttgagcatgagcgtgtaagttatgctggtattgacagttctcattgtggatgtgcaatgagaactactcatnggtcttcttgtgcatgcgagttagctagata

SEQ ID NO: 228491 - DNA, 385 bp, Glycine max
gcttataatatattgatatgctcgaaattaaacatcggaagctctcgagatattcaaatggtcataacttttcacatgaatgtccgattcgggcgcctaatatgtcgagaagctcgaaattgaacaacggaagctcttgagaaattcaaatggtcataacttttcacacggatgtccgattcaggcttataatatatcgatacgctcgaaattaaacatcagaaactctcgcgaaatttaaatggtcataacttttcacacggatgtccaattcgggcgcataatatgtcgagaggctcgaaattgaacaacggaagctctcgtgaaattcaaatggtcataacttttcacacggatgtccgattcgggcgcataatatgtcgag

SEQ ID NO: 228492 - DNA, 469 bp, Glycine max
  unsure (1)..(469): unsure at all n locations
agaatcggacatccgtgtgaagagttatgagcatttgtttatctccagagcttccgctggtcaatttcgagcctctcgacatattatgcgcccgaatcggacatccgtgtgaaaagtcatgagcatttgaatttctcgagagttaccgatgtataatttcgagcgtatcgatatattataaccctgaatcgtacctccgtgtgacaagttatgaccatttgaatttgacgagagcttccgttgttcaatttccaatgtcactatatgtgatgcgcctaaattggacattcgagttaaaagttatgaccatttggatttctcaagagattctgttgtataacttccagcgtctcggtatcttatgggatcgaatcggacatccgagtgagaagntatgaccatttgaatatctcaagagcattccgtcttcaatctcgagcctctcgacatattatgcacccgaatcgga

SEQ ID NO: 228493 - DNA, 434 bp, Glycine max
  unsure (1)..(434): unsure at all n locations
agcttataagttagctgatttaattaaatgtatttgatattacggattaataattgtcaaatgacataaaagaaaatatttaatatttttttcatttgaagttttttctaataagttatattcttaaagagcaagataataatttttaaaattttgtattataagaaaattgtaaagatttggtgattttactcttattagaattaaatgaaataaactttattagaattatattgtttaaaaaaatataaatttaaatactttataattttattaaacatttttttctatttatacaagaataatttggattatacaaatcatatattatatntaaaactaaccatatatatttgaaattcaatntaaattacgtctatattaaaaaatataataacaataattcagcacataattattaagtgattaattca

SEQ ID NO: 228494 - DNA, 465 bp, Glycine max
  unsure (1)..(465): unsure at all n locations
tttatacttcctgcagntgagacctaacatagttagcttattactctcactttctaactgaatctagaatattccacatcctctaacagaagtggttactcgttccctacttccatgcatgaatcttcatgcttcccacgcttcacacgtagtcctccatgtatgtcggagccttcactttccttttgggcctctcctcgcgctgctgttctcttacttcctgcaacccctcttccctattcgtaacattcctctccccttcaaataacaccttttcctcaaggtggtgtaaggctttgaagctggaccattcctcccacgaggcttcctcgagtggtaagtccttccattggaccaagaccatgcgtgtacgtcctctttctatggaataacttggccgtgatgatggctaaccgataacgactgggtcgcatctacagctctggatgagaccacacaatcatg

SEQ ID NO: 228495 - DNA, 387 bp, Glycine max
ttaagtcacctgacgctgcgagctgagatatcattggagcgcatgactctctcaaacaccggatattgatgtctctgtacaatcaaggatagttgatgtctcgtatgtgtgtacactgagattatgttttcgttcctagaattcattggagtatctactgtcgattctaaatgagtgatccttcttgatttaaaattattgtctcctaatcaatggactgctcatcttattattggctgctcatcttccaggcatgtatagttaaaccgctcgataattttctcttgctgtacttctaacacgaataaagggagacttcgcctttgacaatcacgttaatatgttttgagaggaaatacttgagtatacatgatcattcgtacctat

SEQ ID NO: 228496 - DNA, 471 bp, Glycine max
tcccgccaatggtatttaagatctcatgaggtcatttcttcatttagctttgaagagaatgtcatggatcactgtatataccagaaggtcagtgggagtaagatttgtttccttgtattatacgtagatgatattctgcttgcaactaatgataatggtatgctatatgaggcgaaacaatttctcttaaagaactttgatatgaaggatatgggagaggcatcttatgtcataggcataaagatccatagagaaagatctcgaggcattttaggcttgtctcaagaaacctatatcaacaaagctttagagagatttaatatgagagattgttcaccaagtgtagctcccattgcgaacggtgacaaactcgctttgagtcaatgccccagaaatgaatttgagcgggaacacatgaaatattctcatatgctttagcagttggaaccttatgtatgctcaagtttgact

SEQ ID NO: 228497 - DNA, 329 bp, Glycine max
  unsure (1)..(329): unsure at all n locations
agctnggaaataatacaatgtttttatttttttttacttgcaggaggtaaaaaaaggtcaacaaccatctaaggtatgcattggagcatataactgaaggaaaaaaaaagtaatatataggctctttttcttaggtgatctagcacatatgttttgatctttttttttttatataaatataagaagcttatcaaaccgatcattatatgggttctaacacttgaaagtattataccatacattgtattggtgggaatttaaattttctccatcatgtaaacccggttatacaaggaaaactagtatatgtngatgatcaattgatcatg

SEQ ID NO: 228498 - DNA, 482 bp, Glycine max
  unsure (1)..(482): unsure at all n locations
tagcttgcttgatgcataagcaactagaccaaaatctgttgctttgttcaatataaattgtcccctataaatgaaaaaaaaaaaaagaaatgtttataaagaaataaggtgcataaatagccctcaaaacacaattcaataatattacttgagaactttagatcaacgattaaggacaggataaaagcagcatcaacacagaaaaatagagaaaaaatctcacgtncaaactggatcactaagtgggtgagcacgactatgctggtcaaattcaggatatttaaggtgcggagttgtcaaggcttcatatttctcatgctccaatgcttgcttgtcagatgaagtatttaaaggacctttaggtgattcaggctccttataaaggatgttnttatcttcaaggatcggctgtctcttttcaatgtcatttctcctaaggcattcagcatgaaaaccttcagatgatctaacagaatttcagt

SEQ ID NO: 228499 - DNA, 334 bp, Glycine max
agcttataagaacaagattgcctgaattattttccaatacgcacgtgaattacgaaggttcaactataatcaatccgtggctattgtgcaagccaataatggggcgaaacacacccaaagattatgatgatggatgactcatattctcaacaaggtaaacttatcacctttcaattgagctttcaaaactatcatggcatgtagaggaaaaacaagtgatttaaatcacataatgtcaagagacttttattttcagaacaattacccatttgttgaacatattctataattcaaagaaaaatatgcaaaggtgtacatgcacacataattgacc

SEQ ID NO: 228500 - DNA, 289 bp, Glycine max
atggcatatctcactatggatggcgctacggtttatgatttaatggatgaaaataattgcctttgcatggtggatagtcgctttcataggccccgattagcactctcagatccccctttatagactacccccgaatatgctttcataactacgtggcggtctcactgacagaaatcatatgaacaccattcacggcactgctattatgcgagaatgcccacaccgtatccgattggttcaacattaatgacagttactcctatgaacactatacgtactgtctgaagag

SEQ ID NO: 228501 - DNA, 363 bp, Glycine max
agcttctagagaaagctacatgaagctgcctcggtaaaaacactgcccagccttcattaaccgttggatcttctctaaatttggtctacaactttgcaaaacaattttccaagatctgaccgttgggatctttgagaagatgtctggagtgtgctaaaagcctcttaatgaagcttctggaggaagcctcttaatgaagcttctaaagaaaactacctgtaactgcctcggtagaaacgctaccccacctttgttaaccgttggatcttctcgaaatctggtttgcaacttcacaagacactttaccatgatttaaccgttgggatctttgagaaaatatctggagtgtgctagaagcttccc

SEQ ID NO: 228502 - DNA, 482 bp, Glycine max
  unsure (1)..(482): unsure at all n locations
tccgttntcaatttcgaccgtctcgataaattttcggactcatccggacatccgtgtataaagttattttcatttcaatttgctcagagcttctagtctcaattttgagcgtctcgatatattacccgattcaatcggacatccgagtaaaaagttattgtcgtttgaatttgatacgagcttccattttcaatttggatcatctctcgataaattacgacactctgttgggcatccgagtaaaaagttattgtcgtttgacttttctaagagtttccattctcaatttggagcgtctccatatattacgggactcaaccagacatccgtgtataatgttattcgcattacaattctctcagagcttctagtctcaatgtggagcgtctcgatatattacccgactctatcggacatccgagtaaaaagttattgtctgtcgaattttctatgagcttccgttttcaatttcgagcgtctcc

SEQ ID NO: 228503 - DNA, 384 bp, Glycine max
  unsure (1)..(384): unsure at all n locations
agctntagtgattgtgtgcaaccactaattttacattgagcaccctcattgatatgttctatagttgattntgaatgaatttctaatgatcataacatatgattcatggatatgatttaggcattctttctttctttgcattttaaaccaccgaccaaaaagctatcttattgtatattattttatcatttgcaagccctttgagccaaacacttcatattttgttggaacactaacctaggataaaagtttcctaccttacctttggttaggagagcaaaggtattttgttggaaatttctatcatttggtggctaatgtgatgtaaatactttgtttttaaatgagggtattgatgcaatcctcaccccaagggtattggat

SEQ ID NO: 228504 - DNA, 434 bp, Glycine max
cttggcacccagaagaagaagatgttgacagagattcattgcttgtcaaggattgtaatgaattgattggattgatagacagatcgattgaaaaggcaaaacaaagccttgctcttatagactctccatgtctggtcaagagaaccattttgaagagttataacttttagaaaaacttaaaaccaatttgaaaaagtaaaaaaccatttgaagagttacatcttttgattttattcagaaacaatcactggtaatcgattacgacattagtgtaatcgattacacaaagcttttatgtgaaaggatgtgactcatcatatttgaatttgaatttcacgttcaaaggcactggtaatcgattaccaaaacattgcaatcgattacagctttttgaaattaattggaacattgcaaatttaatttgaaaccttttc

SEQ ID NO: 228505 - DNA, 380 bp, Glycine max
  unsure (1)..(380): unsure at all n locations
agctcgngtttgccactaagcgagttgtcttatctgtgcctatcttgcgtgctaagcgagatgccccaatctcaacttttcttcaatatttgctcaattttctccaagcacttcgaatatccttccgtttgaatcttactggtccagacataggatgacactaaggtccttattatcctatttaaaacaatgttcagggagacgaattctaatcatgcttaggcaaattggacaatcaattaaacccaaatgtcacggttatctagttacccccattcaatcacgcaacaattggtgttataactgatggttcgacttaacgactagcttacactactataatggagttggcgggatctatggacatgggaatccctagt

SEQ ID NO: 228506 - DNA, 353 bp, Glycine max
actcaagctcatttacctatctatctcccagatgtccgagcttagatttactctacaaaacgcatgaagctctaattctagatgtatgctgtgatgcatgaacataatgcaatcactcgtatgtctagtaactaatctatcaagaaccactctctctattctataaaaataccctatatgagaactacattctaaactgatgcatggaaaaccctccttgcattaccctttgccgagcacctaacccctaaagatgatgcactgatcgaatgatacaataattacaagtaccaaatgactataggaaagagaacacatcgttgcatcgatatatatgaagtgtacaatacatc

SEQ ID NO: 228507 - DNA, 400 bp, Glycine max
tacgataggtagctccataataaaacttgagcgtgtttatctttaaataagacccttgttcttgcaacataaaaataataagacccttgttctcgtcttcccgagtaaaagaggtcccccctttcatcaaccgataattggaagatattgtttatttgtctaacaaatgtttagcagatcctattaattttatttatctattgattcctcaaatattttatccttagagcaacagttttaggacagttataagtcattattactggataattccaggcagttgggcagctactcaatataaatagatatgcttcaagcaaatctgtcagttagtccctactcctaaagatgttgatgttactttctcgagatgaataataattaatcaaggtggatgatt

SEQ ID NO: 228508 - DNA, 448 bp, Glycine max
  unsure (1)..(448): unsure at all n locations
acactatctaagactcacgctntaaggatcacacgtcctgattgacaaataatctattacggaccatcggtggtaaatgataaatcttggctactaagcgacaaacatagtagaaatctattatacctgaatattctaccacatcaaatcctctgagcagcagagactatcttccaagtcttgtatgtcacgtcgaccttgtcacaagcgacaatccctaaatatgatcttaatttcatcttgagaggaccgtccgccttgacagtcacaggatcgatgtggaccactgatctctctgcctcatgtggactagtggccaaggatcatagacgtgtggctatgcatgtttgctataacgtagatggacacactgatgcgtatgcacgacgacgacgatgaggaggctatgcatgtggactaccatcgccctttaagagacaacttgatt

SEQ ID NO: 228509 - DNA, 431 bp, Glycine max
agcttcttagtctcagctgatgaagatgatattgtggctacttcatgcactcctctaatgacaataacatcatttctggcactaaaatgctgggagtttgaagtcatcttctcaattaaatttctggcttcagtaggggtcatgtctccaagggctccaccactggcagcatctatcatacttctctccatgttactgagtccttcataaaaatattggagaagaagctgctcagaaatctggtggtgaaggcaactggcacatagttttctaaatctctcccaatattcatataggctctctccactgagttgcctaatgcctaaaatatcctctctgatggtcgtggtcttggaagcacggaaaactttttctaagaatactctcttgaggtcatccaactcgtgatggaacttggagcacggtaatat

SEQ ID NO: 228510 - DNA, 474 bp, Glycine max
  unsure (1)..(474): unsure at all n locations
ctcagctttaacanatgtcttcacagataatcatcacacagcagtatcctagcaagactacccatcatatctcccagaaccccatacccacgaaatttaagagagaaagaagtccacccaaacctgaattttcgaagacccactcgtagccacgcacttcacgactccaaaaatgctctcctttcgcgatttggagcagaaatgatggccaaaggttgaagctctgcttggagcttcaatggagaatgagggagaagaaaatggcaacgtgagggagagagagagctatctgaaaaagtgtgggggctgagtgaagagagagaaaagctctttggttttaaataaaagggctttctctttttctattactttatttaagcaatgccacatgtctccatntgagtggagcaaaaagggcccactttccctttttgactgtgacccatactcagccacaagagtgagaaaatctga

SEQ ID NO: 228511 - DNA, 489 bp, Glycine max
  unsure (1)..(489): unsure at all n locations
ttgganagggctagttttcaccttctcgctatgccaatctgctgttttagcgagcgtccgctaagcgcaacactcctgggctaagcgcctaagcgcgaggaagactctagaagaagatgagttgtacaggttcgctaagcgcaccacttcatctcactaagcccactaagtgagaaaggcacgctaagcaagaaagacgcactaagtgagaaaggcacattaagccaaaaatcactaacatgcgctaagcggtccataagtgcgctaagcgcacgagcacgaacaaggccacctatgtaagcttgaaatcagattttagaaagggagtttggactgtgattctaagctctgcatgtcttgggtttctagagagagaatggtccaagttctagagagatgtgagacactttgctgtgtgatgatctgtatagaccaaagcttggagcgcgagccggtttaagagattgacatgagtctgtgagtgattgc

SEQ ID NO: 228512 - DNA, 134 bp, Glycine max
  unsure (1)..(134): unsure at all n locations
tctccttcttntccctattaataggggaaggacggaagatcaataatgtttaaccctcctggcatctgaggatcacttaaaattagcgagacaaatcgttcccgtgtaatacaactcacgctcatccgcttttg

SEQ ID NO: 228513 - DNA, 422 bp, Glycine max
  unsure (1)..(422): unsure at all n locations
agcttatgaggagaagcataagaagatgcatgatgcatangaggaagcaagagatcactgagcaactcttgaagatgcaattgaaggagaatgaagaaagtcaatgttatgaaagaagtcaacaaggtcgaggtaaagctcaaggtcgcagtcgaggacaagttggatgtggcaacaatagacgaggttcaaatttcatcagcaacagttacaagaaaggaaaaagctcaacaagagaacgtggaagaggctatgcaagcacaaggtatgataaatctcaaacccgatgctataactgtcaaaagattggccactatgcttcaaaatgtagatttgccaagaatagagttgaggagaagactaactatgcagagcaaaaaatcgataagtttgaaatagtgctcctagcacgtgtaggcaat

SEQ ID NO: 228514 - DNA, 309 bp, Glycine max
  unsure (1)..(309): unsure at all n locations
agctcgacgtgggttcattcttgttttatctacnncactttaaaagggggaagcactttctcagatattgtatttaaacctttctcataatcatatccatgccttccatggtgagcttggggacaacgttgaagaatgcaatatctatccaaactgttgatctaagcacatatcacttatgtggtaaattgccctatctttcaagtgatgtgtttcagttagatctttcagcaaatcattctctgaatccatgaatgcctttttatgcaacgatcaggacatgccaatgcaattagaatttttgaatct

SEQ ID NO: 228515 - DNA, 360 bp, Glycine max
agcttgcctatccgatgcagcagtaatgattgcctgagttatgttggggaacggctacgaacccggaatgggtttaggcaaaaacaacggtggcataactagcctgataaatgccaaaggaaatcgtgggaagtatgggttaggctataagcccactcaggcagatgtaaagagaagcatcgcgggaaagaagagcaatagtcaaagctcgcggttgaaacaagaaggtgaaggaagcccgccctgccacataagtagaagctttataagcgcgggtctgggggacgaaggtcaagtggtcgcgatatacgaagatgatgttcccagtacattggatttggtacgaccatgccctcctga

SEQ ID NO: 228516 - DNA, 426 bp, Glycine max
  unsure (1)..(426): unsure at all n locations
tcccatngtattttcatgtattatggcatggnggtgactttatctataggaggggtgtgagtagcccccctccaacttctcaaggaagcttttttcctctatcttcccaaggaagctaccttctttgcttctcaaggaagcttcccatgtgctaggctctaaatagaaacatgtgtaacacttgtcataactttgatgaatgagaaacttgtgagacacacttcaaagttcaacttctctccctattctccttcaatttccatgccactctctctctctatctctctctctctcattctcttcctccattgaagcttcctctctaatcttcttatccaaggcactctcttggtggtgaagcttctccttccatggcttattctttagtggatggagcctactctcacctcttctcctttatcttct

SEQ ID NO: 228517 - DNA, 392 bp, Glycine max
  unsure (1)..(392): unsure at all n locations
gcttgactttgcgagctgattttagccttatttntactttagntattagncaattcaattaaaaaagagaaatcccaaagagaaacgtccgattgcttttttggtttattttactaaaagatatttttttattattatattattattttacctctttttggtttccaacgtggttacgaaatgaccgaacgggcagatttcaatttaacagaagttaacggatattacaattcaaatgatcggtggaaatttattttattttttgattaagcgagaatacggcttaaacgatcggttaaagctcgtcacaaacgaaagaaaagaaccaaaattgaacgaaataaaatggaagccaagacacaagaaatgaataaaagtctcggataggaaac

SEQ ID NO: 228518 - DNA, 482 bp, Glycine max
  unsure (1)..(482): unsure at all n locations
ntcagcaagatgtatgggacaatctaggattcggccatggtagaagtgtccgttgaagccatcgcatccctcgctcaatactacgaccagtcgctcagatgcttcactttcagggatttttagttggcatcgaccatagaagagttcgaaggaatctttggatgcccgctaggagaaaggaagccataccttttttccgggttctatccttctatggcaagaatagcaaaagtggtcacaatctcagaacaagagctagatcgattgaagcaaaataaaaatggggtagttgggataccaaggaagtgcttggagaagaagacaaaagctttgataaatcaaggcgagtggacctcgttcattgacatattagcattgctggtgtntgggaccatactatttccaaatgtagatggcctagtggacttagcagtgatcggcacctttctcgcttatcatcacagcaagggaaatctcagtca

SEQ ID NO: 228519 - DNA, 389 bp, Glycine max
  unsure (1)..(389): unsure at all n locations
agcttcctatggatttaatagtgtcaccatatttcaccaannaaaccagcaaagaggtgatccctcttgctgtctgattttcaattggacaagcacgctaattggaattgtgagcttaacaccaattacaatggtgacaagagcataataattctgacccatcattgcctgacatgtggtgaagccttggaaggttccttttaccaactcataataagtgtcattcttgcttgtagtggaaggtgtgttatactggtaaatgtttcctgaaacaaaacataggaacaatgattgacttatcggactttttaatcatacattataaaactaattattcacaccttgtgttattaagactagtattatcgacaaatgagcataacatattg

SEQ ID NO: 228520 - DNA, 362 bp, Glycine max
tgaagtgagaaagtgtggaagagtcggtcttcctacttttattcgtcgaccacaaagtggtacctggagaatgtcgcggggtcagaagaccttgggacgtcaggtggggtgctatttcccaaaaccaagcttgaccaatcccgacccaacccgggcatagtcagtcagtgagaacctgtgactgacctaaacaggcgagctcctgacagtcaaccgataaaagaacaaagaccacaaagcaaggaggctcgtgtggtggctggccagttatggatcttgagtgatatctggaatatggcctctggtaatcgattaccaagggtgtgtaatcgattacaaggcttaaaaatgaagacaggaag

SEQ ID NO: 228521 - DNA, 412 bp, Glycine max
agcttataatatatcgatacgctcaaaatttaacatcgaaaactctcgagaaattcaaatggccgtaacttttcacacggatgtccgattcgggcgcataatatttctagaggctcgaaattgaacaacggaagctcttgagaaattcaaatggtcataactcttcacacggatgtccgattcacgcaaatcacatatcgagacgctcaaaattgaacaacggaagctcttgagaaattcacatggtcataacatctaactcggatgtccaatctacgcgcatcacatatagtgacactcgaaattgaacaagggaagctctcgggaaattcaaatggtcataacttttcacactgaggtccgataaggcttataatatatcgatgcgcttgagataaacaatcgaagctct

SEQ ID NO: 228522 - DNA, 410 bp, Glycine max
actaagcttaagaataatggcctcacctaactatatatttcctgaatggaattcaataaatcggactcctatagagagtggagtgggttaccattactggaacaccacgttgcaaatttttatagaagcagcgggataaaatgtctgggatgctatataagtagggacctatattcgcactatggtggcaggaacagcctatggacgaatggagtgaacaatagaagagattagtgcaacacatcttataagccaaagatataattacatctgccttaggaatggacgagtactttacatgcgaaaaggtatatgataaatacatgaactcatgagtatgaattatttagaatgaatgcaagtgaaagtatacgagatatgcaaaataggcttacacatataataaatca

SEQ ID NO: 228523 - DNA, 410 bp, Glycine max
  unsure (1)..(410): unsure at all n locations
agcttgcatgcagcacagggtgagggtgcaccctgcttcctaccaccatctttcatggatcctctaatctctaatcaatcaattaatcaatcaattaattataggggttcccttcttcttctaactatctacaataggacacgatatagactgatatagcagaagaagaagaagaaggtttataggctaaaataaagtcaagaaaagtgaatgaaagcaattataaaaagagaaaagacatgaaagagggcgtgtggttgggggatcatatggaatggatctatggaggtggaaaagtggcctgcattatataattaagggaaaaagagaaggaaantaaaaccacaaaaaggaagaggaccacactagtaccagtacatgactccatatgtacaattcattcatgtggg

SEQ ID NO: 228524 - DNA, 386 bp, Glycine max
tcactgaagcattggatgagtgaagaacttatataaattttcaatcatccactcgctgagcgcgcctcatgcgttaagcaagacataccttatgcattaagcgagtatcatcgctcaataaacgcgccaaccctaacccattggctgaaggggtcctcctaagcaagacaattgcgctaagcccaaaaacctctctggattgcatttaataaaattgggctaagcgagccaactcgctgaacgcgacatagtttcttgttaagcatgtctgtgcactaagcgcaatatgctctctgtctggacccccatgtcaattgtgctaatcgggtcacacccgctataccacaaattctctatggaatggcataacgctaagtgagaccatc

SEQ ID NO: 228525 - DNA, 410 bp, Glycine max
  unsure (1)..(410): unsure at all n locations
agctnttctctctcctcactcagccaaagcagaaattcagaagccttttctctccctctctcacgtagctttcttcttcttcattctccattgaagcttcaagcaaagcttcaacctttggccaccatttctgccccaaatcgcgaaaggagagcattttcggagccgtgaagtgcgtggctacgagtgggacttcgaaaatccaggtttgggtggacttctttctcccttaaatttcgggggtatggggttttgggagatatgatgggtggttttgttagttttctgctgcgtgatgattatttgtgaaggcatttgctgaaaacttgttgaaatcgccatgnttggatgagttagacatacccattctgntttanggtttttgtgatgatgtttgtgatggttatatg

SEQ ID NO: 228526 - DNA, 355 bp, Glycine max
  unsure (1)..(355): unsure at all n locations
ntagatcaattcaaatggccataacgtttcactcggaggttcgactcangcgcataatatatcgacgctctcgaaattgagcaacggaagctctcgagaaattcaaatggtcataacttttaactccgaggtccgattcatgcgcataatatatcgaggctctcgaaatagaacaacggaagccctcgagaaatctaaatggtcataacttttcactcagaggtccgattcatgtgcataatatatcgagacgctcgaaattgaacaacagangctctcaagaaattcaaatggtcataacttttaactcagaagtacgattcatgcgcataatatatggagacgctcgtaattg

SEQ ID NO: 228527 - DNA, 414 bp, Glycine max
  unsure (1)..(414): unsure at all n locations
agcttccaagcactctctcagcgttattataaanccttaccctggaatgcagagcttggatgncagctcctgtgggttcgtatgtgaatggcataacctggaatatatggagtacctctcccctggctccaaaaccacaggggtctccaggaatgggttgagggtctcatcatcaaacttaatacaattgcccctcactctgacctgcctcagggacttctcttctggatcgaacaaataagcatagaattccttgaccagggccacatcaatgcaaccatcaagctgcctggtcaaggccttgtgccacctcctcatctcgagctcctttcggaactcgttgtactgggtcatgtataaatcaacattcctttctaggaggatatttctggcatgtacattttgctcataacg

SEQ ID NO: 228528 - DNA, 485 bp, Glycine max
  unsure (1)..(485): unsure at all n locations
gtgacaacnccgggaccgagatgtctacattatatgtcacactaaaacacacccacccacatacattaactcatgcttattgtcaacattaacatactaacatatgttattatgctaaacaccactcacactctcaacaataacggaacgtaataacaaattatattcattgacgatatcaatgaatcactctgaagctcttttctatatgcgaaatgctctctgcaattgttgtctcaactatatcgatcacgcattgtgaacacacatcgttgaataaacattcagttatctgaactatcatgttgcctccttcactttgaataccttcattcaaagaccggaactcattacattggctttcttcttcagcatgttcttgagagacagaaaactttacatctactcgtgcatacatacctctgcctccccatactgcattatagacatataaattaccactccttgctgacagtctaactcac

SEQ ID NO: 228529 - DNA, 422 bp, Glycine max
agctttacaaggagaaatatacctaccatcttcttatttcttaatctcatcaagacattgtcctgttgttccatcatcattttgcataggtacaagagccacgattatgcacttgaataaatatttgatggatgttgattgattgcaccattctatgttgaggtaatctcgatattttaataatacgtgtggattgtatggcactacatatctattgtctagggctatgtgattcttctcaatatatttctcatcattacgccttatataaactcaatatccatcttggtcaacaacagtttcaggttgccaattttttgaacaacaatctagaacactccccatctttcatgcatggcaacattctagtagcactaccacatacgccatgcatcatatgtgatgtcatctcatgtggagct

SEQ ID NO: 228530 - DNA, 475 bp, Glycine max
  unsure (1)..(475): unsure at all n locations
agctngcaataaccttatatataagtgcgagtattagttcttgagtggaatccnctctgtaaggagaaaacctgttatatgtgcaattaaatcacatacccttttattctgtaaagactaacagttgtggtggtggagaaatccaatggtgtagctagtctaataaaggctacgtttgaagtagtgagaaactgactggttgttgagatctagtggtttgctggtccaattaagaattgattgtgttaatgaaatctcatctttaaaggtgaggactagacgtaccccaaggttggagtgaactaatataacaatcctttgcgcagatttccttttcctttccttgctttgcttgcataaatctgacactattttggctgaatcataaatttgcatcttaccaaactaacaacaaaaccaaacattgtntaccaaaaggtctattaatcaatatctttaaacagaagtttcaact

SEQ ID NO: 228531 - DNA, 476 bp, Glycine max
  unsure (1)..(476): unsure at all n locations
ctaagctattgtactgtaaattgagttaattgatagtcaatttatgctatgaatgattagaattccttcaccttgctattggttttaatgaaataatgaagaatttaatgtcattgtaattttttaccaataggattcaaaagaagaaaatctcaagtgctttagaggaaaattgatgcaaaaactcgaagaanaaagttgaagattgagacagcttgtttagcacacaagacaggcctatgcgtctcgttgcttagcggccaactcacacttagtgcgaagaaggcacatgagaaagtccaaaggcgggcttagcgcanatctcgtgctaagcacgtgatcaccgccatacttgctaagcccaaaaggcccgcttaccacaaggtcgtgtgaattntaagctaccttatggcttataaacaacgtatgaagcaaagganacaatacatcacaacttaaagctctcttatgaatac

SEQ ID NO: 228532 - DNA, 201 bp, Glycine max
cccttcgagccgagacccgttctacttgctgcaactcactacactcctaagtcgaggaagcgcgatatcatctaattcttcacgaaatttagctcatttgagatgatatgagacaaactgtggggggaagtggtcctattgaatatcatcacatggtgcacatacttatctataaatggatggcctaactgcgacaacatt

SEQ ID NO: 228533 - DNA, 74 bp, Glycine max
gatatttaaggcgtatgctattgacatgctcattacacgaaagatttaggtgtccaccacgtggtcttctattg

SEQ ID NO: 228534 - DNA, 502 bp, Glycine max
  unsure (1)..(502): unsure at all n locations
ttaatcacctgagctgcagcttaaaagaactgagctgaatttatttgcctctctggtttcattcaaaaatgaatcttgtagttcaagatatggacattataaatcaactgcctcgtttaaggacttatgacagcacaaccaacttttttggtgcataatgaatatgcaaaacaaccatgtcagatttactagtgttttgcactgtattttccattttcttttatgggaggaaaagtgatcatttggttaactttacatttttttcattttcaatttgagatgcagttttatctaattacatatcatatggtgctgctattagaaagggcagaagttactgtttgtcatcaaagaattttaagcctgtaatcactgatagaacgttgtcttatgtttgtaatccatagtggctgcagaaacatnaaaaagtataggaataaattcatgggtataaccagccagattacactggtgcatcaagtatacttagccaaaatacttt

SEQ ID NO: 228535 - DNA, 460 bp, Glycine max
  unsure (1)..(460): unsure at all n locations
tgtccaatggtcaagttgaatgatttctttcatatgcgttgtttgccttcccctgcctgttntgcctagatgactagaacccaaatctataaagctattaactctatatctttcctcctttttcatttgaatacttttcaagagctaaaaagagagagagcaaaagcatcccttgctatcaagtcacttcgacaaaagatggaagacaaactgaagatagaactagaacaaaaggtgcacatttagtttttttgttggttttacacgtactggtttcccactttctcaacatgtatgctgtcaatgttattagttactatatagtatctgttaaataaaatgtatcgttggtaattgcaggacattgaaactgatttgaagttgaaacaaacttacgaattagcaaaggaatacttanatgcagccatagcacatgagaatgcagctcacattgaaaaat

SEQ ID NO: 228536 - DNA, 359 bp, Glycine max
  unsure (1)..(359): unsure at all n locations
agcttgaaaatattatgtagcattttatcacttcccctgcttgggcatntagaatttaagacaacttccttatactgtatagatagtaagtacttgatgtaaaattcatgtgaatccaacttgatntgtatttggactttcttcttgtatacatgtaggtggcaaacttcttttggagctgaatagagttttgcgacctggaggtttctttgtatggtctgctactccaatttatcacaagcttcctgaagatgttgaaatatggaatggtagataataatatactattgtctgcctctattaagcagtttaacgttgctgcattagttctgacattgtctgacttaatttgcagaaat

SEQ ID NO: 228537 - DNA, 464 bp, Glycine max
  unsure (1)..(464): unsure at all n locations
ctgcttcaccacctctcagccattggtactatatttgtctatgaatggtctcttgatgtattatcattgctgcaagctcgcttttagaaaaggccttgagataaaatactcagcaaagttgtttgcgtatcttaactgcaacagcaattagtaagtaccaatacaggttacaatgatttgtacaagtgaattacgttgaaatacacgagcactgaaagtgagaacttcagaatggacccttgtggctgcttactcaagtctatgaaactggttaatntgtgtgttgattgttatgcatactacaattgagagattaaaaataatttataccacatcaattgtgtttttcatggtatatgttttccattcacggataagtaacaatgtttttctttttaatcttacacaattcttatgaagtcagaaatcctgagacatgcatatattatctctatataatatgc

SEQ ID NO: 228538 - DNA, 480 bp, Glycine max
  unsure (1)..(480): unsure at all n locations
agcttataagaacaaaatagcctctttcattttcacatatgcatgtgaattagggagcatcaacaagaatcaagccaaggctattgtgcaagcaatcaatggggccaaacacaccaaatgattatgatgatggatgactcaaattctcacaaaggtaaaatcatcactttcaaattgagctttcaaaactatcatgacatgtagaggagaatcaaagatttcaagtcacaaaatgtcaaaaaattttatttntagaacaattacccatttcttgaacatatcctataattcaaagaaaaacatgcaaagttgtacatgcgcacagaattgacccaaaagattaaactaaaaatccgacgaaactaacaacattaacaaattaacacatctgacaaattaacaaaaccaacaacactagcaaaaccaaagaacactccccctccatacttagacaacacattgtcctcaatgtacacaata

SEQ ID NO: 228539 - DNA, 481 bp, Glycine max
  unsure (1)..(481): unsure at all n locations
tgtaacagntgggaatcatgccgaaagcatgtaaaagttgtttatctctattttcttccataactacaccggtaatgccaagattaatgtgtgtgatttgcattaaaaatgggaaataaggtcaatcattaaaagaaatgcctaaactagtggaggagactgcagtgactaaagagagcacacgactctacagacttgcaattgcaatatatcagactccttataattatatttttctaatatgatttcaggttgcaagaattcttcattgagtaacctcattgagtagctatatatgcatatagctacaatgttgacattcttggcaagaacacatcttggtacctccaagctaatcaacatacgaacaagagcttgaagaggaaaaaccatttttcacataacctagaatgataaggagggtcatatagccttacattaaatatcacgtccttaatactatatcatacttgtacaccat

SEQ ID NO: 228540 - DNA, 347 bp, Glycine max
agaataatacattacactaacagaggcatttctcttttctaagacacggcaacaactctggaggaagcatgcctcaatatggcatgccaactaagaaagaatacaactatatcaaaaatacctgtacgcgacacctaattacatgtttagtattgacaactatgaatcacgataggaagatgaagctgaactacaaggaacattatcacacacaatttgtacaaacggagaaatcgcaacgtgaacatataaattgccaacgagacagaagaaacaataccgggaattcttgccactaatcggtcaaacaagtcctaatactataaaaatatcatagccataattga

SEQ ID NO: 228541 - DNA, 249 bp, Glycine max
ccagcattcgcaaatacatactgcctgaacgagtacaacaacaccaatagggctacgaagtgaaaaagaaaagcgaacccatggggaccatgcgagacgctacctttatacacggccaccaccgcagaacgacagtgtgcagctaaatgctaatgctcctcttcacagctctcaattacacctcggccaaataaatatcgaaccatatttaagcacccatagcgccacccctcaccaacatataacttt

SEQ ID NO: 228542 - DNA, 326 bp, Glycine max
tagtttcatttttgcactttatcgaatgagtctgaacaatgaaaatacaactcctaaagaagcgttttctattgaatctgtaacaatcaccatgatggcatgctgattgcaatggatgagatctttggtccaatccaatccatattaaaattcaagtgacaaaacactgagtcttaaataccttgctgagaatggtattatactattatgtatgtgtgaactaatttttgtgatgatgaccccagagatcttggtgagagtagtcaaagagcaaataacacacgttacgggcttgcggtcggagtgtcacaacgaacatggacact

SEQ ID NO: 228543 - DNA, 124 bp, Glycine max
ttgaatatatatcatttgtcaaatcatgacaatcttgggtgctttgtaaatcttgcgaactctctgcttcaaccatttcctttgttagttcatcactacatataataccactctctagtaaatt

SEQ ID NO: 228544 - DNA, 214 bp, Glycine max
  unsure (1)..(214): unsure at all n locations
tatgccactgacttactgtctacagtggtctcactcttttgaagcgcatcacttttagaaaatcttgtatccttgtttttgatctcactatcaccaggaactatggcatccaaagcatgtaaattgcctttatgtgcgggaacctgctcatagcgaatataagaccattcccgtctggaaccatacgtagtcttaacctcgcntaattaattat

SEQ ID NO: 228545 - DNA, 467 bp, Glycine max
  unsure (1)..(467): unsure at all n locations
catgcaagcttataagaaacaaattgcctcaatcatatctcttatatgcatgtgaatnacgaagcatcaacaagaatcaagtcaaggctattgtgcacgcaatcaatggggcaaaacacaccaaatgattatgatgatggatggctcaaattctcacaaaggtaaactcatcactttcaaattgagctttcaaaactatcatgacatgttaaggagaatcaagaatttctagtcacaaaatgtcaaaaacttttattttcaaaaaaattacccatttcttgaacatatcctatgattcaaagaaaaacatgcaaagtcgtacatgcacacagaattgacccaaaatattaaactaaaaatccgacgaaactaatcaacattaacaaattaacacaactaacaaattaacaaaaccaacataactaacaaaaaccaaagaacactctctccatacttaaacaacacat

SEQ ID NO: 228546 - DNA, 430 bp, Glycine max
  unsure (1)..(430): unsure at all n locations
tctagattggtataccatgctacagctgctccggccaagctttcttgaaagatatggaccaacaactnttcgtccgcggaatacgcccccattttccggcaatacatccggagatgccctttcggacatgtcgtccttttgtacttatcaaagtccggtactttgaacttgggagggatgacgatgttgggcacgagacataaatctgccaaatccaagaatgggtaattgccaaggccctcgactgctcttaacctttcttcaagtgcctcaatctttcccttatcttccgtgaagggaataaattcttttacgggtgtaggtgaagccgggatatggcggactatgttcggttggngtagttcatgggtggacggatctttgaggcggagcagaggaccgagatgggtatctccttcctcatcgtctt

SEQ ID NO: 228547 - DNA, 487 bp, Glycine max
  unsure (1)..(487): unsure at all n locations
gaccttaagtcacctgcggcatgcaagctnttatccatggcctcctatggaggtgatcttcttctagacttatcttctccttgaagaggcgtctcctctctctcttgcttctccattccgctgccattcatcttccaagaagaaaaggaatccattgatgaagaagatcctaggcctacaagctccaatggagcttacatcaccttaccgaacccgtgctatagtaatgggtgaagtggaggaggtgcaagagcaggtgaatgccgccacagaggccttgaaagagcaaatggccacaatgatggaggccatgatgagcataaagtagataatggaggtcaatgcggttgcaatagccgctaccagcaccattgctgaggaggacctgacccccccatatggcctcaaccaaataaattatccaacctcaaatatggcaggtctggaaagaaagagttgggaagtacggggccccttttagtgaaaa

SEQ ID NO: 228548 - DNA, 486 bp, Glycine max
cgcggactataccttcgaccaaacactgccgtgtttctgtgtctgttctgatttaaagcgggctgcagcaccggctccgcttccctaactgtactggaggcggttgccgcggctttatcctctatagatctctggagttttaacatgacctacgagatggaagccatttgatcttttaaggctgatagatcggccttcatctgttcctgcacgccttcttcattatccatttttctagatcgagcgttatacgggtgcctttgcgctttcttagttatgatgaaattcctaaagaaataaacaacggtgagtatgccaccaacacatgaatatgcaaatgaatgatcggagcacttggatccaccccaatggtttttagataacgtgataagttcacaacttctcattttataaaaagaacaaagctttcatctagctcagattatactaaggtgttacaagagaacctaacggtttctaattata

SEQ ID NO: 228549 - DNA, 325 bp, Glycine max
  unsure (1)..(325): unsure at all n locations
aactanttccgctccggagtatgacagtcaccgctttaggagcgctgtacaccaacagcgcttcgaggccatcaaaggatggtcgtttctcccggaacgacgcgtccagctcagggacgacgagtatactgatttccaggaggaaatatggcgccggcggtgggcgtcactggttactcccatggccaagtttgatccagaaatagtccttgagttttatgccaatgcttggccaacagaggagggcgtgcgtgacatgagatcctgngtaaggggtcagtggatcccgtttgatgccgacgctatcggccaactcctatgatat

SEQ ID NO: 228550 - DNA, 482 bp, Glycine max
  unsure (1)..(482): unsure at all n locations
ctcatatggtcaaactnttcactcagatgtcttattcttgcgcatagnatatcaagatgctcgaaattaaacatcaaagtgcacggcaaattcaaacggtcataacttttgactcggatgttcgattcaggtcaataatatatcgagtcgctcgaaaattaaacaacggaaagtctcaagaaatttaaatggtgataacttttcacttggatgtccgattcaggcgcatagtatatcaagatgctaaaaattaaacatcagagtgcaaggcaaattcaaacggccataactnttgacttggatgtccgattcaggccaataatatatcgagtggctcgaanatgaacaacggaagctctcagctatctcatatggcataacttttcactcagatgtccgattcacgtgcataatatatcgagatgctcacaattaaacatggaagcacatggaagaatctaactgccataacttttgactca

SEQ ID NO: 228551 - DNA, 472 bp, Glycine max
gcaagcttgctccccacctcctctaatggcccatatcatattctcacccattgcttctctatcaagaagattaccattcacatcaactatgtgagcatcaattacattatcagcagcaagaccaaacttatgcatcaagaatccatagccacctccactgaagtggccaccactgcccacagtgggacacacacctgctgggaacccaagtgttgtgcttttctcgctaattctgtagtaaagttcaccaatagatgccccagctggaacccatgcagagtagttttccatttccactttgatttctccaacggttatgaggtcaatgactcacaaatggagccttggcaacgtaagagagagcctcataatcgtggcctccacttcaggttcgaatctgcatgccatggcgttgggaacagattatggtggcttgaatgtgggagacaacaagaggtgtcacaatgacaag

SEQ ID NO: 228552 - DNA, 408 bp, Glycine max
  unsure (1)..(408): unsure at all n locations
gctcccacacaagtgcaagatcatgcaatcctacaaggaagatagcgatcttaacaacctttcccaatatagaaactagaaagaaagaaagaaatgaaaacaatcttgtccttttggatacagacttttattcatagcattgcatgggcatcttcactaggcaaacattaaaaactataaaatggatgaccagctcacaaaattatggcagcagaggaatgtagaacatctagagatgaacacaagttgtctggtcaagtagaacctaatgaaatgatgctttccaatactaaggttaaaactttccaaagtaccttcccacaattaatgctgaaaaggtggtaaccgtagatcaatctactcataaaccagcatgaaagacctcaattcttgacagcannatacatg

SEQ ID NO: 228553 - DNA, 464 bp, Glycine max
  unsure (1)..(464): unsure at all n locations
gcaagcttatggcttgggccttacatgaaaattctcttttancgcctcnnnctncanccgggagtttagcttttggcagatgtttcattgttaaagttaagttagtatatgctcattgagaagtgctaacgacactctttctgatactcttttcaatactcgttctgtgattgactgaaatttgttaaagatcaacaatgttggtgggtctcacttatcaattgatgattatcaacaaatttcagccaatcatagagagagtgttggaaagagtgttagagagagtgttggtagcattcctcatgctcatttttctgcatagatgtatgtttctcttcttgagatcatatttactcttcggtaagctgttctttttatatatcatgtccgatcttctttgatcatgagatctgtactaatctttatttctctgatgctgtgtgtttctatcattaattaattat

SEQ ID NO: 228554 - DNA, 363 bp, Glycine max
cggccaaccactgcgactgcggcagatgataccctaacgaaggctcagaaggtaaagaagctcaaagccggttacgagaagctctcttgcgaaggtttcggcaatcatcaaatcgagctctctctctctgctctcagggtacgtcactcctcagattcaattccacccaccacacagtgctactcgagattagataagagatattgattatattgcgttatacatatttgtaggaagctgctacatatgaatcaactcttgattggatatgctcgaatatgcccggcaatgaacttccgctcaggttctctactggaatatctcaatatgaccaacgtctatttgcgcttcccttcattatat

SEQ ID NO: 228555 - DNA, 412 bp, Glycine max
  unsure (1)..(412): unsure at all n locations
agcttgaaggtgtgtaacccaccattttccttttagaacactagtaatatgtctactatcattgctattatctctttcttcgccattgaggaaaacacttaggttgccagatccctccacctttgggcgtattctttgaaagatccgngccctcattttgctcatgttctgtagttgcattctatccgaagccattatactgacactacttaacgaaggcaaccattatgtccttccaagaatggactcgggaaggttccaagttagtgtacaaggtaacagctaccccagtaagactttcttggaaggaatgtatcagcaattccttaatctttgcgtatgcccccatctttcgacaatacatctttagatggttcttcgtgcaagtagtctccttgtacttgtcaaagtc

SEQ ID NO: 228556 - DNA, 457 bp, Glycine max
  unsure (1)..(457): unsure at all n locations
cgagatgagaattgctgaacacaaatggatcatggtttgatatccaccaccagcagcnaacatggaccagatggaagatgaagctcaacaagagtttgcgtactaatggagtccttttgagtctcttatgattcagatgatggataccatgcttcacctccattaagagcacttagtcgatgttcacggcaccttataaaacatcaccactaggctatagaacatacaaactaggctaacccttaataaccttcttaacccagataaggatgaagcatagttatgttgcgcttggttctactgtctgctgatttgtttagtatgtcttgtctntttgtctttgtcttataatgatagttaagtgttttatgttctatgattaatgaatngcaatgcttttttattaatgaaatgcttttatttcnctttagcttgtattgtctgatgtatgaatgat

SEQ ID NO: 228557 - DNA, 463 bp, Glycine max
  unsure (1)..(463): unsure at all n locations
agcttgtgactctagagcaattcttttaaaactagtcacttaaaaaaatgtgacttttgaaaaaaatcttcaaaaacaagtcacttgaagaattgtgacttttggaaatgtatttttcgaaatcagtcactagtaatcgattaccattaaggtgtaatcgattacacatcaatagatgtggctcttcattntgaattttgaaaattaaaacgtttagaagctctgataatcgattacaagtattgtgtaatcaattacacaagtttaaaaatgatttaaaattgtttaaacataagttgtaactcttggaaattgaaatcttaacgttttaaaacactagtaatcgattactaccttctggtaatcgattaccagagagtaaaactctntggaatgatttgtgaaaacttttggctactcaatgtttgaaaactntttagtacttatctgatgagcttctctg

SEQ ID NO: 228558 - DNA, 497 bp, Glycine max
  unsure (1)..(497): unsure at all n locations
ctatgaaactcagcttgaggattatggggtacccatcacatgtggtactaggtggcggtcgggcgatggtgcacaacaagttttccacatccacaaatcacgcataaagccaccatcccctgttgcccacctccaactgagctcacgtactcccacgtagccaatatcctcgtttctctcaacaccgggtccccatcaatcctcccaagcttcctaacatccaagtaattcaacattcaaacaacacaaactatcacaacaaataaaacagggcaaaggcagaaaactctgcccaaaacaccaaccaaaatcacagcttttctcacttaaagaccccagtaacaattccttccttccaatttgttaaccggtggatcgactcgaaaattttactagaagtctctagtacttaagcctacattgtgaccgttgggatctactagcaaacgtccagaactcattctgtactactctntccacagcccatcacacacaag

SEQ ID NO: 228559 - DNA, 463 bp, Glycine max
agcttataaataatataatgtacttgagatattctctaaccataaaagcgctagagcctgttgtttttttatcatatattatcatagtttatatgaaattttgattaattgattaaattaaacggctaagaaaagaggttagataaattttgaagataaaaaattcacattttgggtaaattttactattttaaataaaagaagttttaaaatgataaatcaattcaggtataaaaatgaaaacataagcattttatgtataaattaacgaaatcagataagtataataattaaaaattataatattaaatcaagtaaaaataaataaacgactctcttttgtaaaaaaaaacttactattttatcaatccagtgttaagagactaattttttgaagtatacagtatattcaatgaattatgctttcttaacacaaagcttttcatgcgcaatgaagtggaat

SEQ ID NO: 228560 - DNA, 463 bp, Glycine max
  unsure (1)..(463): unsure at all n locations
ctcaccccaatcctgatgtcgtaggctgacttgctttcatccttgatcaccaaccaaatggtgatggtgagccccgagaagatctaccaatttctcttccctcaatggtacaaccccaacgcaacctgcgcttatgatggaggtgtcccggggcattcaatagaacaatgtgtggctttcaaacacaagctccaaagtttgattgacgaagggtggttgacatttcaagaggacaacccaaatgtaaggacaaatcctcttgccaatcatggggaatcaacaattaatgtggtggaggagtgtggaccttagaggccaaagtggatgaaagatgtgttaacctctaggaggctcatattggaggcactacgcgaagcgggcatgaaatttcttgatgggggcaangggagatgnnttgttgatacatctgggagtagcacacgatgtaaaggcatgccctatg

SEQ ID NO: 228561 - DNA, 456 bp, Glycine max
  unsure (1)..(456): unsure at all n locations
atccttaagcacctgcagctgcagctttgttttaccaagtgatgtattttcttcaagcaacacaagtggacaacctctgtacaccggagaatgaaaatgcaagattntggttaggttgtggaacatgcaactgaaattcaaaaatgagaaattccttcaattgaagtgataaaactaaaacattgcatgagagagtctaagtataaagattgcatgaggtgtagatgcatttagtgtaaaactaaaacctcttggttgaatgatgttgttgcatcaaaacatcagttgattttaattagttacacaacaacgatgtttgaattcaattaggaacaacaaagtcttacactctcaatataatattgcacacagtaattaatagacacgtatagtcttaaactganaccaagtaaaaaaagcatatctaanaactcatgttccatggttaggataatc

SEQ ID NO: 228562 - DNA, 394 bp, Glycine max
  unsure (1)..(394): unsure at all n locations
tgaacaccttaaggggaaccctattctcagccttctcctcttctttcttctaaacatccagccccttctttcatccacattagcccctgaagtgtaaagtctctcatggctatgagaggctaaaccccctttgttaggagcctggcaggtcaactcttgtaatgtaactctatctattatctatntaatgcaatattggttctattattcttctctgtgcctttctgtttattatggcctgatcatccatataatgtttagagtggaatgcattgaaaaataattattttctgaagaactgggaaaggatatctaaataaattcattgctagaaatagactgatatttgttctgcccacattttgcatctttggtcttaatgcagtgtattatt

SEQ ID NO: 228563 - DNA, 348 bp, Glycine max
  unsure (1)..(348): unsure at all n locations
agcttaagacagccagtaaccaatagaaattatttgcctgtcctgggtaaagtcgctgttgtgaagccagccagcagctgaagaagaagaagttgaagtgatcttattgaccaaagaaaccaaaagtgtgctcaagtaaaagccaaatgagtaagagcaatatgtgatggctgtaaagaatgcttgcatccctttcaaggactgtttataaaagaactcaaggaggccaatggctgtgaacatctctgacaagccaaatatcaagtattgtggggttatccaaaagatggacaaaactntgtgatggttcacagctgcgtcccttctctttttctccaacagagcagc

SEQ ID NO: 228564 - DNA, 285 bp, Glycine max
caactcggcccggccaaccactgctattgcggcagaagataccctaacaaaggctcacaaggcaaagaagctcaaagccggttaccagaagctctcttgcgaaggtttcggcaatcatcaaatcgagctctctctctctgctctcagggtacgacactcctcaaattcaattccacccaccacacagtgctactagagattagataagagatatctattatattgctatattcttattgggaagaagctgccacattagaaacacctcttgattggtatgcttga

SEQ ID NO: 228565 - DNA, 459 bp, Glycine max
agcttgagcagcagcattagaagagaaaaatttctgaacatgaaaacataaaagcagtaattcagagaacaatgtagtgaaactgagaggaataaaacaattaatatatgaatatgcatatatttcctgtcagtgctaactttctatcaaaacgcttggctaattgtatgatacttgttattactattatgggaacattatactttccctcaaatatcttaattttatgccaccgatgattatatactattttcactttaaaattgttttgatctttttatcatacattgtctcttccaattcttatattgatagtttcaaaatcatggcaattttacaagtgtatattgcataagaatatggttgaaaaatatataaaaatttcttgctatggcaatagttccaaaagtaaatgtttcatgaatagtatcatattttaaaatgtacactactggttat

SEQ ID NO: 228566 - DNA, 471 bp, Glycine max
  unsure (1)..(471): unsure at all n locations
tcatggagaatcacaggtgatntacaggtggtttgatgattacaaaagatgatgacaaaggtgatgacaaaaagctcatagatcaatcaaagaacaactcacgtgaattaagaacaattcacgagttcaagataagaatcaagaagaattcacgactcaagaagaaagtttagaatcaagaatcaagattcaaggttcaagatctcaagaatcaagatcaagattcaagaatcaagagaaggcttaatcaagataagtatgaaaaggttnttctaaaaaattgaatagcacatggttttctcaaaacatgtttaccacagagnttttactctctggtaatcaattaccattttgttggaatcgattaccagtagcaaaatggatntgaaaaatgtttttaaatcgaatttacaacgttccaattaatttcaaacagttgtaatcgattacaatggtntggtaatcgattac

SEQ ID NO: 228567 - DNA, 186 bp, Glycine max
  unsure (1)..(186): unsure at all n locations
tctttcagtncctgccctccccccacgggtatgtcggactgaaccgacnaaaacgagacagcaaaaaataattcttccaggaccagagcggacaaagaacctcccaaaccgaaacacaatacaggggaagtaaagataaaaaatacaccaggaaaaataagcaaaacataagaaaaagcaaaaaca

SEQ ID NO: 228568 - DNA, 417 bp, Glycine max
  unsure (1)..(417): unsure at all n locations
tctttgagaagcttccttgagaagctagagcttatcttcactcccttctaataactaagctcacctccttgagaagcttccttgagaagattcctagagaaactagagcttaactacacacatccctctaatagctaagctcacctccttgagatgaaaagctagagcttaactacacacaacccctataatagctaaactcaccccatgccaaaaatacaagaaaatacaaaaaagtccctactacaaacactacttaaaatgccctgaaatacaaggctaaaaccctatactactagaatgaccaanatacaaggcctaaaagaagggagaacccattctaatattttcaaagaannatggacccaacattgacccatgggctcagaaatctaccctaaggctcatgagaaccct

SEQ ID NO: 228569 - DNA, 303 bp, Glycine max
  unsure (1)..(303): unsure at all n locations
tttgaacagagcaccaattagactagtcctgctattgtgaaataaaatctctagaaagataacaaacagtgaaaaactagtcatgatgtaagcctttcatcccatgaaaagaatgggangaattacataagccaacagtcactgtgcaaaaatatgtgtgatgctcaaataatagctactgacactggaggttatcattctttgaaacttgaataaaaactaaagtatttagcattaatgactaaattagatacttttgcagcaagcaattattatgtgtaacgatttaacacaactttaaaa

SEQ ID NO: 228570 - DNA, 478 bp, Glycine max
  unsure (1)..(478): unsure at all n locations
actaagcttagaccaaagcaactcagaatctaggtatctcaaacccgttttnttatggattttcaaggtttgagaagtgaaatngagaatggagtaaatntggagcaaactctcacttcacacatgtctatatcatcaatctaaactagctcaaactggatttacgacgaatattctaccgaatcaaaatttgacttttcaacacccaattttaccctacaaatggctcttgccctcactctggtcatttgtttatctctctagcacagtccaagctttctcataagtcctaaatgacatttcaagctaggattaactcactctaaccaccaaatacctctcaatctagatttggccttccaactctcaaagactcactctcnttccactcataataccatgtactcaccttctaaccctaagttaactctacccttcatctctaacaatttttcataagcaattttatctcacaaac

SEQ ID NO: 228571 - DNA, 486 bp, Glycine max
  unsure (1)..(486): unsure at all n locations
agctgggtaactaaatgagctaagngatattttaatattattatattcatttagngcatgataaagaattaattttactcacaatatttgtgtgttacacgtacatattanaggtggggcaggagaggagaggaaacttacaaaagaataaattaccatatgtttataaaatataattaacttatttcaagttttctataatttataacgacaatttaatcttattcggctttttaaatatagaaatgatttatataaaaacatgtatatatgataaacattaagtgtttaattaaactatttatctaagcacataaacatcaaatttaaaaattaattaacctttaaaatcaaccgattaccagactagttnttcatttttgtcgccgtctagtaattttcgactaggagtgcgtttagtaagccttttggagagtctataaattatttgactaattatatactagttcgtcaaaataatctcat

SEQ ID NO: 228572 - DNA, 360 bp, Glycine max
  unsure (1)..(360): unsure at all n locations
taagcctcaagcaatatcatngatcatgagagaatgagagagcgttgcttttgtgatgatcagatgccactgcatgccaatccattgtccttatcaagcagaggctgatgatgattaagtcactgctagtctactctgctccatcaattattgcttctgtgcatacaattcttctgtcggttttactttattaactgttctattattgcccatcattatactattcacttgattatccgattactaactatgtttctaactatagagctcaatataatatccttattaataggtgtcgatctttcacgtgggtgtgcctaggattatccttctatgcctagatcatatggatctgaatga

SEQ ID NO: 228573 - DNA, 398 bp, Glycine max
agcttcttaccagcatacggctttctggatgtttattatgatctctataccgcaggatcttatatatctatatatctatagatagatatatagatatagatatatagatatagatcatacaatgaagtaccgcacgagtgggtatataggaatccaaatctgccgaatcactcatgttatgatcttctacatcctaggtcctaccgttccttcatctggctgatgttcttcatgtggcattcagactgaatgactctatgagattacgtcgctacttccacatggtacggagaacgtaggagacatctctatttttgccggtgggaatccttagaattaccacagcttaactctcaattcgcctctgaccatcaaatgaaatgtgaataacccgtcct

SEQ ID NO: 228574 - DNA, 490 bp, Glycine max
  unsure (1)..(490): unsure at all n locations
tctgatannaaccgagcagntctaataagagttggaatatgaatacccttacgctctgcaganatataaggggacattttaggattccattttctagtaccgtggccaaaatgaactcctgcttccatcatctcttccaagattatgttccaatatctttttgtcatttatatttatccccacactcttctttcatttcaaaatcgaaattctataaactttttgaaatgaaagaaagagacccggtatactgaaatagaaataagtgttccagaggaaccttctcttctaccgaagattggcctttgataaatgatcgggccactttttctatntaatatataatatgattattctctttattatctttcttttattatacaaaataaaatgaccgaagatgaatccgctcttaagaatcattantttaggaagtattaaatactagatcgctgcgatgtatcgcataaattctttgaaacaaaaaaaa

SEQ ID NO: 228575 - DNA, 406 bp, Glycine max
  unsure (1)..(406): unsure at all n locations
agctncacatctcacactacactactacgctttttctatatcctctgaaaccaaagactcaaacccttgactctcaaaaactactccaacagtttaaacgcatacaacaatgcgtttaagatgatatattagctggttcaactacgctggttcaacataagaagaccatatgttgtgaaaaacacaactcttacatccactggaaagcatcgattacgtcaatcaacactagagggtgactatgatcgacgtggaacacacaaaagcactgatcgcttcaatgaacattgaaaggtgacgaagaacggcaaccaccactagtgggagagcgatgatcgacatagacctagcacaagaacgctatctcttaatcataggagggagataatggtgagagggaatttat

SEQ ID NO: 228576 - DNA, 439 bp, Glycine max
  unsure (1)..(439): unsure at all n locations
tacgccccagtgatgtaaatgcaaacatcatattatagattcttatattatgntnnataattcttgctatcattagcattattatcaaataaaagatgtctgagcacaggaggtggatctttcaaaagagggagttgaactttgccatcaccaatacaaagataaaatttggggattgtggtgtgccttgtgtatttgtgttcttcttgataccacatataagcttggctatgtgtacattggattactagatttccaatatcaaaatatcctacaatgaataaaattgatattagatattgagactcaagttaaattgataactaatatacaatatacaataccttctagtgggtcatcaacaaaaactatatggggattggttaataagccatcttcctcagaatacaaattattttcagaaattaagtctgcatta

SEQ ID NO: 228577 - DNA, 472 bp, Glycine max
  unsure (1)..(472): unsure at all n locations
ggatcttaagcacctgagctgcagctgcttcttcaaaaaaaaaatatatattctcttttcaatttgttacgttctccacttaaatctgaatccttgcaaatataatatttagatggaatattacattaaaaagaaaagacaggatagattgattaccggtaaagtaaagcagttatgtttttattgggccgaaataataagaggagccacgagtgtctataggtggccaccaactgcataataatagtacatgctatgcttgctaatgttacggggtccaagtccaacacatccgtgattttgataaataccaacgacggttgcgcgagctcacagttactaatctcacgcacattctttctctctctaaattctgcaccacaatccgcanaatgaccaaatacttcttgctgtgaatgtcgaaaatgcctgcaggcacaacatgtgaagtgatgcanaacggcaacacttg

SEQ ID NO: 228578 - DNA, 497 bp, Glycine max
  unsure (1)..(497): unsure at all n locations
ggcttcgtgggcttctatggaggctggatctatgagcttcattgatgtccttntaatggtgatttccaccatggagatgcagtagaagacaaaggagaagaggtgagaggaggcgccatccactatggaataagccatggaagaaggagcttcaccaccaagatgagccttggataagaagcttggaaggatgcttcaatggaggaaaagaaagagggagagaaagagagaggggggagcacgaaattgaacgaataaaagagggagagaagtggaactttgaagtatgtctcacaagactctcattcatcaaagttacaacaagtggtacacatgcttctatttatagactaggtagcttccttgagaagctttcttgagaaaacttccgtgagaagcttctttgagaaaacttccttgagaagctagagcttagctacacacacccctctcataactaagctcacctncttgagaagcttccttaagaagattct

SEQ ID NO: 228579 - DNA, 440 bp, Glycine max
  unsure (1)..(440): unsure at all n locations
agcttagtaagcacgctaangacttaagatttatttccttccatancccacagncatctcctttgagtttaggaacatcacattgaatatcagaaaaactaacaattngagaagatgcataaattcaaaagcttatatcaaaatttgaggcatatcaatcttaattgtatgttgtgccaatgtaaacatatcagaaaattgaatcttatgacattaaaattacatgtgggctaaatctttaatctaataagatacaattaaactttatgataggataatcaaattacacactcaaattcatgttttatatgtacaacatgaaaataatttgattctctatcgcaaatatttactttatgatagaaataccaacatatacatcattctctgattcttatgggtgaaccatgaaaaataatatgacatcttattctcgataa

SEQ ID NO: 228580 - DNA, 440 bp, Glycine max
  unsure (1)..(440): unsure at all n locations
agctntactaatcaatattaaaatattatcgtgctgtcctgctcttctggatatctatatttgttccagaaagatatatctgtttgtcattttctatttatcgttctgtcgaggtatataattactttttagactgcaatttaagactcgtcgattgatatgcatatattatagtactatatgctcctccttgtcctatatatataagcatgaaaggtcgttgggaatggtattatttacgagttgtgatgatttgtaattcagtgtttggtttaatctttgagagctccatttattcactatgttaacatgtctttatcgcctttcacaaactgtttcactacacaacgatagcatttaaaatgcgaacttaatgcattaattaataatactgtggttaaagtaatctaaagtctctgtatatggcaagtaaaacagga

SEQ ID NO: 228581 - DNA, 355 bp, Glycine max
tttctgatctttcttgatcctatctgtcatatgtagtacctctggtacttttattatataatatatattatcttggcctttcaaaaaaaaaacaaaagcaggtttgtcattcaatcttattcaattgaaaagctctgagaatatggttgcatgccattggcaatatgggccacatttgcccattcctagctatctcgacatcagagtcctactccttaagaaggaagtcgaatatactgaaaactttttgaaacgccatacggagcaacgggtcaatgttggttgttctattatgctcgatgcatggaccgatccgaacataaatgcctcagtaatgtttcgttaactctcaagc

SEQ ID NO: 228582 - DNA, 335 bp, Glycine max
  unsure (1)..(335): unsure at all n locations
agcccanaagcaaagagagggcatgttaatgtataaccttcctgggcgcgccacgagcacataacaagacacaccacataatggcgctgccatgctcacttcactaaggtagatcatagggagaccagtcagggccacaatgttttgccagaatgcttcaaccatatgggatcagcataggcttaaaggagcactcaaacctcgtgacccccaacggctacactccgaagagttccgcaaggcctaccgcttctgatacaaggccgacacctaaaatcattttagcacacagacactgctcgtgaatatacaatcgctatgatctccactcctgt

SEQ ID NO: 228583 - DNA, 301 bp, Glycine max
  unsure (1)..(301): unsure at all n locations
tcacttgtgatcttcctttctcttgctcaaatttcacggcttatccattggtgatgatcatggaacgctcaacacttcatcaattcaatgattcactccaagctagactgaatatgagttctgcgttagcatatccaatccgcgtgaatgtacatttnttgtctttaatcctatatcgcgatttcatgattatgatcatgcttacgcatgaaaatggattaggctatggattcatttcctactctttaaacttaatcactaattgtctggatgatttttcaacctaatctgagattttaaa

SEQ ID NO: 228584 - DNA, 473 bp, Glycine max
agcttcacccacaagagaatgtctttgttattaagcttacagagaaaacttcaatgaaggaagagaatgagagagagagagagagagagagaaagtgacctggaaaattgaaggaagaaagggagagaagttgaactttgaagtgtgtctcacaagactctcattcatcaaaattaccacaagtgttacacatgcttctatttatagcctaagtagcttccttgagaagttagagcttagctacacacacccctctaatagttaagctcaactctttgagaagctagagcttagctagacaccctctctaatagctaagctcacctccttaagatgataagttagctacacacaaccctctaatatctaagctcaccccatgccaaaatacatgagaatacaaaaaagtccctactacaaagactactcaaaatgccctataatacaaggctaaaaccctatactactagaat

SEQ ID NO: 228585 - DNA, 417 bp, Glycine max
  unsure (1)..(417): unsure at all n locations
tccttgannaaacttcttgagaagctgtcttgagaagatttatagagaagntagagcttaactaaacacacccctctaatagttaagctcacctccttgagatgagaagctagagcttaactacacacaactcctataatagctaaattcatcccatgccaaaatacatgaaaatacaaaaaatattctagttcaaggactactcaaaatgtcctgaaatacaaggctaaaatcctatactattagaatgaccaaaatacaaggctcaaaagaagaaaaaatctattctaataattacaaagaatagtggactctacattgacccatgagctcaaaaatctatcctgaggtgcatgagaaccctacaagcctctttagcagcttaacccaatcatcttggagtcttctgtccaatta

SEQ ID NO: 228586 - DNA, 466 bp, Glycine max
  unsure (1)..(466): unsure at all n locations
agctntcgccaaattctctaatacaaaatatttgtttttaggtatacatttaaaaataacatcctaatatttcagtcgttaaaaatttattntaccagctgcattgaacgcatcaactatggtggtgtacgtaaccacatcaggatatttttggggtgaaattatataaaaaaaattaatttttctcttctaaatttttctttttgagtaaataattgttaaattaatatcacttaaatttttgtacagagaatattaaaagtggtggatttatgaagcttagtgagtaaaataaaactcataaaagtaagaataattaaggaaatcaagctaattaaggaaaataagttaattgagaaaaagaggactaattaagaaaaaaacataataattaagggaaacaagactaattaaggaaagtgaactaattaagggaagaaagctaattatgaaataaagacaatta

SEQ ID NO: 228587 - DNA, 339 bp, Glycine max
aaagagctcaatcagagctgggatataagtctgatgttgtggtgactgcatgcgccttcccgctcatatacgatggtctctaatcagaaagtcactgtccaccgcaccctgatgaataccactattccaacatccaacgcttataaacctatacacggcaattattcacttttgttatgtgacggtacaaacaaattatataaatatgattatatgcaatcgattaactgagagtgagatatctgtatatatctaaccatttttatacttaaaatataatacgactccagaatggcaatctataagtgtaaatcattgtctacctataaaattttttaa

SEQ ID NO: 228588 - DNA, 393 bp, Glycine max
  unsure (1)..(393): unsure at all n locations
agcttgagataaggaagtgtagaagggngattctttctgcttttattagttgaccacagagtggtacctggagatatgtcgcggaggtcatgacaccttggggacgtcaggtggggtgctattgcccaaaaccaagcttgaccaatcccgacccaacccgggcatagtcggtcagtgagaacctgtgatgtacctaaacaggcgagctcctggcagtcaacagataaaaggaacaaagaccacaaagcaaggaggcttgtggtggctggccaactgtgaattntgtgtgatatatgggttgtggcctctggtaatcgattaccaagggtgggtaatcgattacaaggcttaaaaatgaagacaggaggctaagatggtctttggaatcgatta

SEQ ID NO: 228589 - DNA, 468 bp, Glycine max
  unsure (1)..(468): unsure at all n locations
agctgtacaactcaaagataagaggananattcattagtcagagccttactgagggagttttaatctctttaagaaactctgaaagagctgtatcagcttgttgacgtatctcatgactcgaatcactcaacatattaaacaagcctgagatgttacagatgattaggtggtaggctttcatttcatataaaatgttgagaaataaaatgaccattcttcaaacaatacacttaccatcaagaaaatcaggaagaaaacccagcatatcaatatctgggacactgtccaatacagtaatccatcctaccaaaaactggcggacatatggattcaacacattcatgcgctccctcagcagtggtatgaattctttaatactaaagatcaaaaacaaaattgaagggaatgaggcagtgtaagttcaagtgaggaggaataggttgactcttactatttcattttggtat

SEQ ID NO: 228590 - DNA, 374 bp, Glycine max
  unsure (1)..(374): unsure at all n locations
acaatcaatgtaataattttctttaaacgtgcaagataaaattgattgcaataaaataaataagatacgggaagaaagaattgcaaactcgatttatactggttcggccacttcatgtgcctacgttcagtccttaagcaacccacttaagattttccactatctttgtaaatcatttacagactgtgaacacaccttgggattccttacccttgtgttcaagattntcacactccaagagacaccccgtctcttgattacaactgagtttctgagatgaacagaaagatttctctcctttagagtggatgatacaaatngaagatcctagaggaattctctcttttagagatataatacaaattgaagttcct

SEQ ID NO: 228591 - DNA, 483 bp, Glycine max
  unsure (1)..(483): unsure at all n locations
ntatccccaattntctataaatagggggagaagtgaagtagtattgggttcagccccttaggcacttctatctctttcgaatttgcttatgaaaattgtttctgtgaagaaaatccaagccgaggcgcttccgtaacgtttccgtgagtgatttcgcgaaggttttcgaccgttcttcgacgttcttcattcgttcttcatcgttcttcagtcttcaacgggtaagtacctcaaaccaagcctttcaattcattctatgtacccgcggtggtccacatttggtttcatgtatctctattctcgttttcatttactttntctaccccctcttgacgtgcttaagccatttatttaagtcattcctcgcttaacctaaaaataaaataaatttccaccgatcgtttgaattgtaccatccgttaactttggttgaaatgaattccgatcgatcggtcgtgccgcaccacgttggaataaaaaaag

SEQ ID NO: 228592 - DNA, 487 bp, Glycine max
  unsure (1)..(487): unsure at all n locations
agcttcccacccaagacatagcttcgttactgttcacagtaggatatggtgatgaaattagatgtcaacaacgatgtggtgaggtcacggtgcaaatccaacgaaactcattcacgatagactttcatatcctcccactcggcggtgctgacgtcgtgttgggagtgcagtggttgaagacactaggcccaatactcactgactacacttcattaaacatgaagttcatcatgggaggcaagcttattgaactaaaaggagatcgtgagagggacctcgaacaggtaacaccttcacaacttcgtcgtttacttcatacgaatccaactagctccttcttccacatacgcctggataagcaaactccacctcaaaccgcaactcatatgattccggaaattgcatccttagtcaccaagtactcttcantgtttcaacccccgacanacttaccttcatcacgatctacagatcactccataacttt

SEQ ID NO: 228593 - DNA, 501 bp, Glycine max
  unsure (1)..(501): unsure at all n locations
gacctatgaaactaagctatccgcgcagtgtgcagcagatacgtacactgcttattttatgaaggctgcacgggtctttcaccaagtcagagattaaagagttantttgtgagttttgtgacttgagtgttttgtgagccaccttgatgttaccctaacatcaagtgttggacctgagtgtgcagagttgatctctattgntcatagagcaatctctggtgtgtctttgatttgtttgtaaacaccggtgagtgattgaaagggagtgagaggcgttctcatatctaagagtggctcttaggtacaagttgcatgggtactgaatacgtgagaaggttgtatacagtggctgttataacttggaactaatactattttagtggatttactctctggcttggtaccncccacatgtatgtgacgattcaccgaactgggttaacaattctcttgtgttatatactagtttactctgtcatactgtgatatacaatctgcatg

SEQ ID NO: 228594 - DNA, 451 bp, Glycine max
  unsure (1)..(451): unsure at all n locations
ttaagcactgcggctgcagcttgcagngaagccactctactctaattttgtatgaatttttaccagaaagcttaaatatacgcatcaggaaaacatcatagtggaaggaaattgctgtgctgtgatccatcagattcttccacccaagcataaaaatccagggagtgtaactattccttggtcaatagtgagaagtcaatgtgggaaaagctcttatagacctgcgagccagtatcaatttgatgcctctctccatttgcagaagattgggagagttggaaataatgccctctctaatgactatacaattagctgagtgctccattaccatgctctatgaagctattgaagatgtgtgttcagagaaaaaatttactctgccggaaactntgtggtttgaatatctctgaaatactgacatcgctgaatatagtgaaggccattatgtgac

SEQ ID NO: 228595 - DNA, 410 bp, Glycine max
ttggcctacacgcagggaagaatttctccaagaacaccctcttaaggtcatcccagctaaaaatggacctgggagcaaggtagtatagccaatcttttgccactccctccagagaatgaggaaaagcctttagaaagacatgatcctcttggacgtcagggggcgtcatggtggaacaaacaatatggaactccttaagatgtttatgaggatcttcacctgcaagacatgaaacttgtgcagcaaatgtattagtccagtcttgagaacatatgaaacaccctcatcaggatattgaatgcacaagctttcataagttaaatcaagtgcagccatctccctaagagtcctctcacgaggtggagggtgagccacgctctcagtataataaataatagtggaatgcttaa

SEQ ID NO: 228596 - DNA, 482 bp, Glycine max
ctgcagcttcttgcttctgagatgtggatttttttaatcattccttcctctattaacgatgcattatgcgtgtgcacatttaccatgcttctccatgctatatacagaatacgctatgctcatatctggttatttataccgcattagcttttatcaacacttcattgtatactattctatcaatttgcactatagcattcctgcttctgtttcattgagaatatcattaaaagcagtcgtttgtgatgcagctggaaccagcttggaaacatgtcttccacagaagccatgcgccttgctgttaaaatattggagggcatgcatgctcttaatattatttcacattcttaccttcgtatatgagaggagaattcgtttattcttaatttccttctctgtgacgaagaagatcctggttggtattaagagcatctaactccgttctagaccctgttgttgatgtgcaaatgaatgtgtgttta

SEQ ID NO: 228597 - DNA, 450 bp, Glycine max
tccttgagaatattcctaaagaagctagagctgagctacacttctcttataatagctaagctcacccccattccaaaaatacatgaaaatacaaaataaaagtccctactacaaagactactcaaaaggccctgatatacaaagctaaaaccctatagtactagaatggcctaaatacaaggcccaaaagaaggaaaaacctattctaatatttacaaagaagagtggatccaaccttgacccatgggctcaaaaatctaccctaaggttcatgagaaccctagggccttctttagtagctctagcccaagcctcttggagtcttatatccaatacccttgtgggggaggattgcatcatttatgcgttgtgatatatgactcagtggtttgcatttcaatttgcgtttattcatgtatgctatatgtatgttctatcactatttatgtt

SEQ ID NO: 228598 - DNA, 496 bp, Glycine max
  unsure (1)..(496): unsure at all n locations
agctnaaggtatcgttagagttatcgatattctttacgaaatccctacgacgtgtcatgcctggagaaaataaataaaaaataatcaacaactaataacaatcatctctctggcccaatcaggcaagatgatcaaacacaaaatcaactcgtaaattagtcttttgtgcaataccaaaacatatagagaaaatgctcaccttttgttatgtaactatttgtttaaggaatctgttaataatctaaaataactgaagttatataattggatgtacattgaattcatgtntaaaagaattgaaaatagttctaaaaatgtgaaatttaatctcatccaactataattcaattaatgaataagttgtacataatatatattattattgatcgcacaaattatgataataaactaattattatggatgttatcttcttataagttatattggaaaaaaaatataatctgattatcatgacaaaactttaacagataaaat

SEQ ID NO: 228599 - DNA, 477 bp, Glycine max
  unsure (1)..(477): unsure at all n locations
attacggacctataaaactaagcttgtacagaacttaggananatcaagaacaagcttgttcgttcatcgttcgcgtgtatgatatccactcgacaaggtttgaagtaaaggagaccttcaatcctataacgcaacgtggcggacaaaaatgggcagttaacttgaatggccattattgtcaatgcggaaggtattctgtgcttcactatccatgttcacacattattgcagcttgtggttacgtgagcatgaactactaccaatatatagatgttgtttacaccaatgagcacatcttataagcatactccacatagtgatggcctcttgggaatcaagcggcaattcttccttctgatgaggcatggacactaatccctaacccaactacaattcgtgcgaaaggtcggccaaaatcaacaaggataaggaatgagatggatggggtcgaaccatctgaccaccgacaaaaatgt

SEQ ID NO: 228600 - DNA, 452 bp, Glycine max
  unsure (1)..(452): unsure at all n locations
agcttaccattgaagatagaggtatttacgttccgacactgctcaagtgtaatgaagcttgtggggatgtgatttgaataacactaaaatgagtggtttataataccatgtcacaatttggcccattataagaataaggataacaaggataggctctaccccacataatcatagaatttataataccatgtcacaacatagctctacaatcgtgtaagggcccattatggtttttatatcaaacacccaccattggctttccgatcacactatatacgttacagacttcaagattaatggaaaagcatcaatttgacaatcatattattccctcttaagatgacacacctgtactgtacctattngattgcactttcatgcttaagtattttacgtttcagtcaaaataaaatttatatgttaatataaaactttgactcctataattgaca

SEQ ID NO: 228601 - DNA, 472 bp, Glycine max
  unsure (1)..(472): unsure at all n locations
tctaactatatntacatgtggcagatatatatgacatatctctatatatacatatatagaataaaaataatacacaagcaagatattcaaactcatgaatttcctaattagttcctaaagtatacttaagcaaatacatatattttatatatgaaattgaaatctaaaacaaaatcactacagatgtatcattatatatatatatatataacacattagaatcttatatacatatgaatttatatatggaaaacaaatatacatatatcactaaacatattccaaggcaaccataagaatctagccacgagaagtttagtcaatagaagactatgatcaattttaattggtgaagcttcgcattctaattcacaaaaacatggtttcatgcatttgaccaatattacggagattaatcacaaaatttaagaattatcatatcttgtaaacacaattcggcanaattcatcat

SEQ ID NO: 228602 - DNA, 489 bp, Glycine max
  unsure (1)..(489): unsure at all n locations
agctnggagataccatcattntcatatgaatctaaagttttttcccgaatacttccaaaaaatgcgagttgtatactcactaaataatatcaaagttntgaggaaaagaagaaaagaatataatgtcaaactaaatggaaaatgagattgtccaaaatcctaacaatgattgatctccaatatcaaatttaaggtaaagacaaatgctagcgctaattttatgtaattctcattaaataaagagtgaagtaattaaattatttaataaaaattacattttatctaataatataaaaattgtgctgttaactttttttagaaaaactaagcatttttaaatattatgtaaatctccaaaccccatgcacagaatggaattatctcatctaanattaagaatacatataactggtggtttaaataaaataactaactaaacttaataacttatacgttgtactcttcaaaaaacttatactttgtatatat

SEQ ID NO: 228603 - DNA, 471 bp, Glycine max
  unsure (1)..(471): unsure at all n locations
ctttatacataaagaaagctagttacaagtctaactatctactaacaatcataaccaactatctactactttctaaccattaatgattggcttctaacatagctaatacgtacatcggttattcttgtccctatgtacaatgtgtatggataactaggaattacaaggttttctcttcattctgtcctccttgtagaataatttattttgcacacaatttaatgataaattggttcctaaactttatcgtttaatgtcaaattggtcattgaaaagtacaacttattatcaaaattggttntgaacattacaattcaataataaaatgatcttataaacttaatggtcagactaattagtcgcaattnttgcacatttagggactaagtttgtattttacattnttcgagatgaatntgtcaccgcatcacactntcacggtgaatntgactatttaccctnttatttaat

SEQ ID NO: 228604 - DNA, 489 bp, Glycine max; identical to SEQ ID NO: 228602
  unsure (1)..(489): unsure at all n locations

SEQ ID NO: 228605 - DNA, 490 bp, Glycine max
  unsure (1)..(490): unsure at all n locations
agcttgccttgccactagatatatttgaggtactcatggtcactatgaatgacaaattccttgggataaaggtagtgttgccatgttntcaaagcccgtactaaggcatacaactccttatcataagttgaatagttaagggtaggaccacttaacttttcactaaaataagcaattggatggccttcttgcatcaacacagccccaatcccaacatttgaagcatcacactcaatttcaaaagattcttgaaagtttggcaacgcaagtatgggggcattagttagcttttgcttaagaacattgaaagcttcttcttgtttctctccccatttgaaaccaacatttttcttgagcacttcattgagaggtgctgccaatgtgctaaaatctcttacanatcgtctataaaaactcgctaagccatgaaaactcctcacctcggtcacagacttaggtgtaagccattcttgaataccctaaccttctc

SEQ ID NO: 228606 - DNA, 426 bp, Glycine max
  unsure (1)..(426): unsure at all n locations
acggacactataaaactaagctgccttgccctngatatattgagggactcatggtcactatgaatgtacaaattcctgggataaaggtagtgttgccatgttttcaaagcccgtactaaagcatacaactccttatcataagttgaatagttaagggtaggaccacttaacttttcactaaaataagcaattggatggccttcttgcatcaacacagccccaatcccaacatttgaagcatcacactcaatttcaaaagatttttgaaagtttggcaacgcaagtatggggacattatgtagcttttgcttaagaacattgaaagcttcttcttgtttctctccccatttgaaaccaacatttttcttgagcacttcattgagaggagctgccaatgtgctaaaatccttcacaaatcgtctataa

SEQ ID NO: 228607 - DNA, 419 bp, Glycine max
  unsure (1)..(419): unsure at all n locations
agcttgcgctccagattctcttaatttgtttgattctgaacattngaataaccaatctgataaaagcatttttgcgtgggtgtgtgaaataaatatcatactctatgattgactatgattgccacataacaatttaccacctgaagtcaaaccttaaagccccaccatattacatttgatgttcaatgaatcagttgctgatggattagactttgggctatattaggcttgttccttcacttccttgaaataagcgaagccgagacaaaccaactaaatgtttgactactagcatgacgcttacttctagtgctgattttgctgaaacattcatattacggagaatcacattatattactcctgcttaagataccaatggatctcctacttgtagatgtaaatacacaaccttctcatc

SEQ ID NO: 228608 - DNA, 460 bp, Glycine max
  unsure (1)..(460): unsure at all n locations
ntgactnngaaaattaatcattgagctattcattgatctctatctttaccaagnttcatatagtaataaccactcaatttcgtttatcaaataccctgctgtcgaatcttctaatgcccaaaantttgttatattgatgaatgatgaatgatgatgattgggaaatcaagtaaacaatgtgatctttgaggaggatctttcatgtaaaaccctcaatgataacgtatggctagtcgagcttacgttgcttcatatataccctaataaatgtaaattcaactctaattnttcctacttgagaattttccggcttgataaatttggtactaaaatttcaattcaagctaggccaatttgaataatattagtagttggtgataattgcatcgccataaggaatatctagttatatgatatattatctaagattcanatcatgtgtccctattacctgtctctt

SEQ ID NO: 228609 - DNA, 476 bp, Glycine max
  unsure (1)..(476): unsure at all n locations
agcttaccatgatgaaattttcagcatgagttatatcatagagttgattatacttcttgtaaagaaacctcttgttagtaatgtgtagaagcattacagactcccttataagccagagaatcagtattccaggtactaatgcaatcacaaccttcatgaaataatggatctgtcgcttctgaaggagatctacttcaactccggaacttgtaataatctcaaacatatacggatcaagagggatatcaacctaccaaataagagctatgttaatcaaacagatgtccatgaagggacaccatccggagaaccttggcgagatatttgagatttctgatcagcaataacaattacgaggtaacttancaacaaatccaatggaaaaccttctttcatcgtcacatacaatcttttcaagtcttcagtaaagacaacggctgctacctgtccaaagaatatagctcncaactgcacct

SEQ ID NO: 228610 - DNA, 455 bp, Glycine max
  unsure (1)..(455): unsure at all n locations
ntggaagcacatgacttttgattaagtaggagtcaaatagatcacataaaattcaggttaagcacaaggcacatcaaactagcttagaggtgaaaactggagactataccataatacaagtcacacggcataagtatattgggtccaccgtacaaaacaacaaagaaatagagagatctaaaccattggatttaagcaaggtggttacactaatattctaagtaaatcctagtgtagtacagctggtataggccaagcccaatcaggctaataatattgtaagactcctaaaacaataagaatccttatattctaacaggatggttaaagttatggtgttgcttgaatcatctgctntgttacatcgcttacggttttaaaatgcaatagtatattagccagggattgcttgcccgcagaatatgtacaaatcttgtgtgtaactggtaactata

SEQ ID NO: 228611 - DNA, 461 bp, Glycine max
  unsure (1)..(461): unsure at all n locations
gcttcattagcatactgtgaaatgttatatccatgaaatggtgtaggaacctaatttactacagatatatagggataaaccacaattataaatgtcagaaaccactaaaaacactgcaaaattttaagggtctgcaaaaacctgccagcccaaaggccccaaaactcagattggatgtcctctctcctatctttccatccttttatcatttgcttcaaccccttttcccttcctaccctccttgccatgtatgcaaggttatacaacccaaatccctcctatccctaactcagtataatagtgcataactgcatgaaaaanaaaatcaagatatgaagatatttaaggctaccatgaccatgaaaccaaaaaaaaaaaagatatgcacatatggactgcatatgaagttacaaactattacctgaattgcagattgataataataaacatatgaatgacaa

SEQ ID NO: 228612 - DNA, 331 bp, Glycine max
  unsure (1)..(331): unsure at all n locations
taatttctctactattgcatcttctctcaatgagctggngaagaagaatgtggcatttacctgtggtgaaaaacaagagcaagcctttgctttgctcaaagaagagcttactaaggcacctgttctagctcttcctgacttttctaaaacttttgagctacaatgtgatgcctctggagtgggagttggagctgtattgctacaaggtgggcaccctattgcttatattagtgaaaaacttcatagtgccaccctcaactaccccacctatgataaagagctctatgccttaataagagccctccaaacttgggaacattaccttgttcca

SEQ ID NO: 228613 - DNA, 488 bp, Glycine max
  unsure (1)..(488): unsure at all n locations
gtcacctgcggcatgcaagcttctattattaacagtttagnnctagtgttctgaactatgtttaatagcacgttgattaataaaacttagaacagtttagggttagctttttataaaataactcagcttttaatagtataattcatgttggtattaaagtagttcacagatcaaaataattctttggacacccctaaatactttccatttgataatggcataatatatgggagaaattacataactcatgaatgatacttactacgcctactgcaatgtcaaggtgatacttgcgtcctgtagtgtgcactgctccaccacgactagaagtccggttaaaattatcatntatcacatcacctactaggaatttagaagaaactcagtataaatgctaaaagaggaagtagaatgatctgaagataaaaattagatgatctaaacgaagctaaagcccaccatagttatgattatttagcaagtgtcta

SEQ ID NO: 228614 - DNA, 383 bp, Glycine max
  unsure (1)..(383): unsure at all n locations
taacatgatcaatgtgcatatgctcatctaacacataaaagttatggcgtaaattttacctcgcggagaacatccattgactcatccgacacaatctcatctaaattattcccacctactattttcacatcaccatcattctgttaccaacttagcaaacacgttccacatgaataactaacattatagaacatccttatcgcggaatatatatgtaacatacactttcacgaactggatctgacttgttaaaaagttttagcttgtcttcaaggaaatctgccccatatgcctgtggaataatgaagattanaatcttagtcanaatattgctttatacattattatgcgtagataaccatccatgtcttttctaacattac

SEQ ID NO: 228615 - DNA, 428 bp, Glycine max
  unsure (1)..(428): unsure at all n locations
agctnctaatntctagagtatcaattccaatttgttgtggtcaatttcattctcctttcatatattaggctttcgtttctacacatagttatcttatattatttgtcttagtgcaaatcataaagcaaaccctaggtctatagaatgtgtgttagaaactacataatataaagatgttccaccatgcaagatgctttgattcattgtaactttggaaatgaagttagaattctgatccattgtaaattaggaaattaaattataattattagcctaattattctctcttgtaaggtgcatcctgtgttcttttttaaaacaaattcctatctgattattctgtatatgtattcctaaggttgagtgtgtttttactcgagcaattcactcaatattctctaaatagcacattctcttccttcttaaat

SEQ ID NO: 228616 - DNA, 116 bp, Glycine max
  unsure (1)..(116): unsure at all n locations
atcaaacatataaacacgcagagagacgcgctttnttttatgaggaaaaactcgtacttgagggcatgtcactccgttaggaacttccttgagactcaagctaatcaccatggggg

SEQ ID NO: 228617 - DNA, 450 bp, Glycine max
  unsure (1)..(450): unsure at all n locations
tcctgatgagggtgttccattagttctcaagactggactaatacanttgctgcccaagtttcatggtcttgcaggtgaacatcctcataagcatcttaaggagttccatattgtntgttccaccatgaagccccctgatgtccaagaagatcatatctttctaaaggcttttcctcattctttggagggagtggcaaaagattggctatactaccttgctcccaggtccattttcagctgggatgaccttaagagggtgttcttggagaaattcttccctgcatctaagaccattgccatcagaaaagacatttcaggcatcaggcaacttagtggagagagcttgtatgagtattgggaaagattcaagaaattgtgtgcaagctaccctcaccaccaaatttctgagcaactccttcaatatttctatgagggactgancaacatgga

SEQ ID NO: 228618 - DNA, 438 bp, Glycine max
  unsure (1)..(438): unsure at all n locations
tcttccggaagatggtcctttacttcaggaagaaggagctttcttattatttgtttntttaaaaaatgattgttttgtaataatttaattttaatgaataaactaaattataaaataattaatattattatacacaaataattaaataattagtgaacgtaattatgaataatatttataatttcttttttacgcgcatgtaattgtaaatattaatttgtgtgacaatttagtataatttaaaccataaaaattaattaattcatatatttttattaaaaatataaaatatttattatgataacatttaatttctattacaaaagttaatatataataaaaaaatgattattattttataacaatgtcaagataaaataatcttcattttataataataagtaaaaataacataatatctaatgcatatgtaatgac

SEQ ID NO: 228619 - DNA, 465 bp, Glycine max
  unsure (1)..(465): unsure at all n locations
agcttggaatagatacacgaacaacattctctgttctgtttatccttctggagagaaatgttaagatttatcataggagttcgatgagttcaaagtggagttagagaggcgtaatctacacaaacgcctcaccaaccttcaagatggaagcatacacgtggttgtggttaaggaattctatgctaatttatacaccacagaggaccaagctccaaagcaagccagagtaagagagcacctgatcaaaatagatgcagacagcctgaatgagtttcttcatattccagtggtattagaggagggggaatctttacccaccaactctagaatttgtagggtgaggtccaatcctcaagagatagaagccaaactctatattctccgcaaggagtntattntgaatgctgagggccaaccatggaaaactcttatanaggatctgactacactggcccagacatggag

SEQ ID NO: 228620 - DNA, 478 bp, Glycine max
  unsure (1)..(478): unsure at all n locations
ggacanaccaacatgtgtaagtaataataacaatgataatatattattattataataataataataataataataataataataaatattattattattaactaaaaaaattaaaactcttccgattcttattatattataaatataaaatgaaagacattttcagacaatttaaatatttttgtttggctatattagtataaatcatccctaatccatacatttactaatattatgctctttctctattttcatttgatatacatcgagtttgaacgacttgaacttaatatgattatgattatcaataatatttgaatttgtacattacttatacgtaattctataagtttcattatttttagttagtatttcactatggtttaagaaatataactgatcaaagacgtcttctagtaatgctcttaatatgcttcaccaccacaaaaagaagctctacatctgttgaataccggat

SEQ ID NO: 228621 - DNA, 344 bp, Glycine max
agcttcataaatgaaatgaagtgcttccttttctctaagtgtcctttcacgaggagaaggttgagccatgttctcagtatgaaaattactagctgaatgctcaaaattagaatgttcagaatcaccagcaatagaatactcaaaatgcacagaatgatcaggatgcacactatgcctaactaatcaatgaaaggttctatctattttaggatcaaagggttgtaaatcacctggattgtccctagtgtcgcaacctacccttcggcgggagggcgacgcgagactcgcgggatgcgtgttccacgaaaggaatacgcgcggagtcgccaccaacatttatttga

SEQ ID NO: 228622 - DNA, 405 bp, Glycine max
ctcagctactcctgtatgcccatattgtaggcatggtacttttgcgtgcgacacccggataagtatatatcaaacaatcatatggaagcattcgcatattgtgacataccaacaagtgccctaactccaaatattgaagaaggtcagaacttgttatgaactgttaatgcaaatacgagatagtgagctaatactcaaaatcaggacctatactagtaatctctctggtgctcagcagctataattaactagacaaacttcacatgtttctagtaactacaaatgaaaaagacaactaccttaaccaacaggcatggagtgaactacaaatgaccaaattagcttctcgtcctaacagcatctgaactgagacgctatattatttatatatatcataaactgacc

SEQ ID NO: 228623 - DNA, 408 bp, Glycine max
  unsure (1)..(408): unsure at all n locations
actangaaagacaaatnccttcggataaaggtagtgtcgccatgtcttcaaagcccgcactaaggcatacaactccttatcataagttgaatagttaagggtaggaccacttaccttttcactaaaataagcaataggatgaccttcttgcaacataatagccccaatcccaacatttgaagcatcacactcaatttcaaaagatttttgaaagtgtggcaacgcaagaatgggagcattagttagcttttgcttcagaacgttgaaagcttcttcttgtttctctccccattagaaaccaacattnttcttgagcactgcattgataggtgcttccaatgtgctaaaatccttcacaaattgtctataaaaacttgctaagccatgagaactcctcacctcgagcac

SEQ ID NO: 228624 - DNA, 471 bp, Glycine max
  unsure (1)..(471): unsure at all n locations
ntacttatcctaactaataattgatggacacctatcaccatctattaatcctatcaanggaacataaactgatgaatttctagctactggcttttaccatcatgccactcaaggccaggattgattaaagggacagcaaacacttgtgaaaaatcaaatcattctaaaagttgacatttatctctgcttaaaatgatgtgagtgcagaattcaagtgagcacagaacagcacaacatacataaactacagccactactagctaggaattatgattcaaaacaacgtaagaatgtgctttacacatatacatgtatatataagtatggcattgtatatgtgtatataaatacttggaaaaaagtcacaacagtaatgtgtgataatatatatatatatatactcacacatacatacatactagtccgcatgtacgtacctggagttgctataatcaaagagctaccacaaca

SEQ ID NO: 228625 - DNA, 410 bp, Glycine max
  unsure (1)..(410): unsure at all n locations
agcttaacaatcagagacatactattgatcatancttatcttgtntaaatatgcaatactagactcaaaatatgcaacaaacactagacctaaatcagtgtcacagaaattggaagacaatattttatccaagcacaaacttcaagccttattccatgtattggggggaagctatgactggccatatgggtagaggtgtcatatacgagcatgtatggaggaagggaccttgtactgctgaagaggacaagttgcttgtcgagtatgtcaggttgcatggtgaatgcagatggaactctgttgctaggcttgcaagtaagaaacaccaaacttttttcactgttntgttccttaatatatatgagtggatttccacatttataagtgacaatataccaacaaaacaactg

SEQ ID NO: 228626 - DNA, 442 bp, Glycine max
agcttgatcaaaacaatgatctaattattctcttccactcaaatcatacagtcgctcattcaaatcattctcaaacactcatttcatacaaaataatccactgcgtatcaattcaaccagttcactgttcaaacacgctttttgtacaagcaaacaactcaaagtactgaaatttaaataacttgaaatttaaagaacggaaacataaaaactgaaatttaaatgattgaatataaatcataaaataattgacaataaactaaaatgttcaaaatgcataaatttaaaagtcctgctcctgtggttgctcctgtgcatcctcattgagatccaacacctaatcagctggtgaatcctgagggataggctgctatatctcagatgtaggcgcacatggtatggcatcattaggtatgggtactggggatggctttgggagctg

SEQ ID NO: 228627 - DNA, 454 bp, Glycine max
  unsure (1)..(454): unsure at all n locations
tcaggctgctcaatagctccaagaagctgcatggattggcttatgtttgtacggtggtcaacacaagagcacaaaccactaactctcgcaacaggtacagatttctgattcaaggtccagctgggttaccaagttgaccaacgcatncagttttccttcaagcatcttaggttcagatgatgcagatgggtttgtagctacctcatgcactcctctaatgactatggcatcatttctggtgctaaactgctgggagttggaagccatcttctcaattaaattcctggcttcaacaagacgcatgtctccaaaggctccaccactggcagcatctatcatacttctctccataatactgagtccttcataaaaatataggagaagaagctgttctgaaatctgaaggtggtggcaaccggcacatacttctttaaatctctctcagaactcatac

SEQ ID NO: 228628 - DNA, 454 bp, Glycine max
  unsure (1)..(454): unsure at all n locations
agcttgcaggttaccagttgcaattattgtctttctataatcgacatactagcaggcaatgcttttagaggatatttgtgaaataagtcagctaatgacaaaggagtgagataggaatatgaataaagacaaataccatccaatgaaagacattggcagcaaacacttttttgatttctttgggtatgagctcaagttatcatctctcactcgctctctctattaatctagattagccacatgttttaaccctttgcagtcataaaaaagttatatggtctttgcgaggatggtggtggcatgtgaacaaagacaaacaagaatagaagacagagtttcggttcggttttgttgttggtgtgagacagacaanagggacaacaatatagntgatgttgctaaacagcttacacggagtcttgattggcgaacaagttcttatcatatatgattt

SEQ ID NO: 228629 - DNA, 466 bp, Glycine max
gggctcatagacactacttaagatgctgtcttacatggctctcgtctctctaattgaacctaataacataaatgaagccataattgacaaacattggattatttctatcaagaagaattaaatcaatttgaaagaaatcaagtatgggaattagttgatagacctaatgatcatccaattattggaactaaatgggtatttagaaataaattggatgaacatggaatagtcattagaaataacgctagattagtggctaaaggatataaccaagaagaaggaatatattatgaagaaacttatgctccagtagctagacttgaagctattagaatgttacttgcctttgcatcaataatggattttaaactttatcaaatggatgttgaaagtgaattctaaatgaactattccagaagaatgttgttgataacactctgatttgacaatcaattagcccctcatg

SEQ ID NO: 228630 - DNA, 461 bp, Glycine max
  unsure (1)..(461): unsure at all n locations
agctagtaagggattgtaagatattgattgttaaagtattcaagaatgaaagaatgaattaattgaaaatgcaaaacaaagccttgcttttatagactcttcatgtctggtcaagaagaccatttagaagagttataacttttagaaaaacttaaaaccaatttgaaaaagtcaaaacctttttgaagagttacatcttttgatttattcataaacagtcactggtaatcgattaccaaataagtgtaatcgattacacaaagcttttatgtgaaaggatgtgactcttcacatttgaatttgaatttcaacgttcaaaggcactggtaatcgattaccaaaacattgtaatcgattacaactttttgaaattaattggaaccgttgtaaattcaattgaaaactttttcanaacaattttgctactgagtaatcgatacaacaatctcgtaatcgattac

SEQ ID NO: 228631 - DNA, 468 bp, Glycine max
tcatgatgatgaaccaagcaattgtgacgatgcctattgtctctgtgatggattcaagaatgattcaagacttcaagatcaagcatcaagaatccaatccaagattcaagattctgtggaagcaatgccttccaagattattttgatgatgccaaagaatcaagagtcaaacaagtttcaagaatcaagattcaagaataatgaagatcaagattcgagaatcaagattcaagtaaagaatcaagactcaaaattcaaaaatcaagagaagaatcaatcaagataagtattaaaagagtttttcataatattgaatagcacaaaattttttcaaaaagaaaaatattctaccaaagaattttactctccggtaatcgattaccagaagacagtaattgattactagtagccaacattcttttcaaactcgattacaaagttgtaatcgattaccatactcatggtatc

SEQ ID NO: 228632 - DNA, 489 bp, Glycine max
  unsure (1)..(489): unsure at all n locations
agctagctggaaaagatacaatttatctctttcctnggatatcaaaaccaccttctatcttggagaagaatgacctcaaagtaagtcacttgatcataagaacacttgtaaatacttctaacggcagacacatgactgtgtgagaaagataacttcagagttatatagcatttttggtttgaattttgtggagtattttttcactaaaatggaagcagtttctagtagcttctacgtaaatttagatttgaccgtgaaaaaattggagtaacacgcttacaaatcaagcaagcgaacatgcatatagatgtttctgtatttcatgattaatcactatcacttgatttcaaaaagtgagataatccaaactcatgaaaaagatggtacttgcatatgcaccgttcttcggcaggaccaaattacttaacaccacctatgataatataggatcactttcttatatatatgattacaggtctatatcacatg

SEQ ID NO: 228633 - DNA, 460 bp, Glycine max
  unsure (1)..(460): unsure at all n locations
tctcaatagagntaggcaggtaactctgttataggtcttattctctatccctacatacattatgcaaaatatgcagttgccctccctgtagagcttgtaggccttggatcttcttcatcaatggagtcctttgcttcttgaagatcaatggtagtagaatagagaaggaggaaaggtgattggagatgccacttcaaggagaagatgagtcaagaacaagttgaccaccataggaagccatggataagagcttgaagatagaaaaacatgattggagggagagggagaggaggggcaccaaatttattcctcacatgaggtctgaaatttgaagtgtaatttctcaaattatcaaagttgaaaaaaatgcacacacaaggtctntatttatagcctaagtgtcacccaaaattggagggaaatttgaattgctattcaagtttcactcgacatttgaata

SEQ ID NO: 228634 - DNA, 472 bp, Glycine max
  unsure (1)..(472): unsure at all n locations
ttaagcaccgcggctgcagctgctgagagcttcttggcactgtatcttgttgtccttcaatgatgattttcagntatagagttatagcagaagataaaagagaagaggtgagaggaggcgtcatctactagggaataagcaatggaagaagaagtttcaccaccaaaagagtgtcttggataagaagtttagaaaggaagcttctatgaagaaagataatgagagagaaaaaaagtggtgtgggaatgaaggaaagatagggagataagttaaactttgaagtgtgtctcacaagactctcattcatcaaagttatgacaagtgttacacatgtttctatttatagcctagcacgggaaactttcttgagaagctagaggaagaaagcttccttgggaagctagagtggggctactcacaccccttcaatagttaagttcacctcatgctacaatacatgaaaatacaatgg

SEQ ID NO: 228635 - DNA, 370 bp, Glycine max
  unsure (1)..(370): unsure at all n locations
gttcgactnaattagcacgagaaagaacagttaaagtccccacgaatacacgtgtnttaagtgttttattggttatatgggagttaaataaagaaagaaaaatgatcctcgagagaaatacgaataaatgattggtgatataatgtgataaaaaaatataaaagaaatgagaaatgtctatgactttgaaggagtgttataaataattatcaccgctcataaagtaaacaaacacactcgtctatttgacagaaatcacgagaagtttcattatgactttctgcagtttcttctccgtaaaaacaatatttgttttggtttattcatgcatgtggctcanaatactttagaacttggaaataaatttaac

SEQ ID NO: 228636 - DNA, 455 bp, Glycine max
  unsure (1)..(455): unsure at all n locations
atccttaagcacctgcggcatgcaagcttcagccaggctcagcgcacaactagctctaaactcatatccacttactcacgctaagcgcgagggtggcgctaagtgcaacgtcacgggtttagagcctatttaaagcattntgggggagtttgttagttgtcttatacgactaacttttgtatagaaagcattttccaaaaactggtatagttcccccaatttatggttatttagtagtagtttgtaaataaatcttgttttattgttaaagctgtctctagaatatttccattggatttaatgatgaaatctgtgcaatttcaagtgaaaaaaaaggctaagtcatgaagtgctaaaagtgtcagttgagcttaactcatcagttaggctaagcgcgcatccaccgctaagcgcagctttagcgcgacagaagaatctgacagagcatcaatatc

SEQ ID NO: 228637 - DNA, 481 bp, Glycine max
tctcagctttgggggacatctgactgcgtcaatctgacatttatatttattctgcttcctctattatcagatcgggaatgcctctaacagcacctctgtcaatgatattcttcatgcctcttaagtgcagatgtccaaatctttgatgccatattatgacttcatcttctttggacgatggacatgtggaggagtaactggtttcttgaggtgtccataggtagcagttgtcctttgatctgctgcccttcattagaacttcattcttctcatttgtcaccaagcattctgactctgtgaagtgtacattgaatccttcatcacacaactgactgatgctgatcaagttagcagtcagtccctgtaccagcagtactctgttcagactatggaagtcatcatggactagctctcccattccagtgatatttcctttagagccatctgcacatgtcacatagctagtggagcatgttcaatg

SEQ ID NO: 228638 - DNA, 460 bp, Glycine max
  unsure (1)..(460): unsure at all n locations
agcttgctggatttggaaagactggtctaatttaatgcttctcttctgnganntttcttctcattcaattcccattttctccattctcttattattttacatgagacatcaagtcgttgtatcatgtagataggtatgtacttttataatatcatacggcatcaacctatgcatgctatatacaatatgttcattatatcctgctataaatatgttaacagntgatttttgtcttattcgatttccaaaatctcattaaattttatgatcaagatgttatgttatcttgtgcctatatattggtatatcttaatagatatgaataaggtatttgtatatgtaattaatatacattaaaagagacaaacataatttacatataatgtgttaccaaatggactcatcatccaagagtaaataatgcatagtataggaagatcttttatctatatcatataaa

SEQ ID NO: 228639 - DNA, 225 bp, Glycine max
aagatcttgtgcctttgagatgggtttgcatcatgcacaagaccttcgtcctggagatggagtgctctagcccgaaagattaatttgtgtgcaagatagtagatcgatctgtcgaccgggctaaatattggctcgcttgcctcgcaatgattagtggagcattctagttgatcctgatatgaggttctgagtagattatgcatgcgatcaattgagaccaatgct

SEQ ID NO: 228640 - DNA, 476 bp, Glycine max
  unsure (1)..(476): unsure at all n locations
agtcacctgaggcatgcaagctngttgcttcaacttccaccgtagactctttcatattctnttaattntacccanaaagacctaccttcattgaagacacaaaggaaggtggtaaccccaaagcttggtcatagcaaaccactttgcatgccaaacatgagttctcagcctcttggttacatccccagaagtgcaaaaaccattctctgggtttttctttagttcatatctccgatgaacacaccgaggaagcttcttttggtgattctcctccaaacctgatttggcaagggctttatcaattattcccagtttctgcctctttcttctgcaccctcttcttgcaatttggttatcaaacacagttgtccttcttctcttgttctnttgagacctataatcatctgttactctattttctatgatagattgaagactatggagttcgaaacacgggattancatatttctgcaaa

SEQ ID NO: 228641 - DNA, 509 bp, Glycine max
gacctatgaaactaagctgtatttgataaagattgatcaaatagaatttgttttattaattgttacctcttttaatcaattactgaaatcaaaataatagctatttgataatcgtctggcttctggattgaaggtaaaggacacgtcaagattggaggcttctacaatgtgactagaagtaagcagtatctgtgccttcccttgttaacagggagggtcaagaaaaatgaaataacttcagtgaggtgaaaaggtagaaagttgaatgaggcctaatggaagactaacgtctgtgctttgtcttcaattcctctccaagttagagtttggagcttagtctacactcaaattggttggttagggactggttactctattctatcagagtttaatatgatcggacaacaaatactataatggataaaattattccaacatacataacacatccaaccaaacaatacagcgtataaactatactatactattatactataacctaacactat

SEQ ID NO: 228642 - DNA, 419 bp, Glycine max
  unsure (1)..(419): unsure at all n locations
agcttatcaaactcgagataatattgcaaaattctcttatgtgatcataaacaaattcaaaggaaacatggagtaatagtatatagttctttataactttccactcaagtgtgtgatgccttcgaagctcttaaaatagagaccacaaagctccacattaaaaatgaggaaatttgtaaagaacaataaatctgacttattagaagatcttcagaagttggaaaaccaactagaagacttacaaatggagctaaaacaactcaatgaccttcatgatcacctaaatgaagaaagatatgatctatggagagaatgctcacaagcttatcatgattaggaaaactatgaagcgacgtaacataatctatggattgaatgtgacaactacacaaaaactctanaattcttgaatgataagc

SEQ ID NO: 228643 - DNA, 486 bp, Glycine max
tgtggactatacctccgaccgaacaccagtagagtttctattctctgtctaagattatggcgggctatagcatcgggtccgcttccctaactgcattggaggcggtcgccgtggcattatcctctatagttttctagagttttagcatggcctccgtgatagaagccatttgatcttttaaggccgataggtcggccttcatctgttcttgcacgccctcttcattgtccatttttctggatcgagtgttatacgggtgcctttgtgctttcttagttatggtgaattccctaaagaaacaaacaacggtgagtacgccaccaaaacatgaatatgccaatgaatgatcggagcactcggatccacctcaacgtgttttagataatgtgatgagttcacaacttctcgctttataaaaagaacaaagctttcatctagccaagattatacaacagtgttacaacagaacctaatggtttctaatta

SEQ ID NO: 228644 - DNA, 465 bp, Glycine max
  unsure (1)..(465): unsure at all n locations
agcttattccactgtaagatttctgtgtcctttttaattcccctcagtcttgacttaaacgtacacttggaacttgtttccattttatccttttccatccttgcaattttcatgcaaattatagacttccctcatttccactctgcttttaagacagcttgatattttgagcatgcaactatgttcatacaccttgctttgtttgcttgctggtttctccttctaatctggctttattgggatacttgcattgcatcctcagtgtttatttagtcaagaactcttccttctccattttcactccaaagaccatgttggacttgagggggttaagttgtccaaaaagaatntgtcatttccatatatcccacctagttnttatgccagaaaccagacaaattgtgtacaattccttgtttcaaataaaaattcctggtataaacaattgagttctgcataatataa

SEQ ID NO: 228645 - DNA, 470 bp, Glycine max
  unsure (1)..(470): unsure at all n locations
nntccaaacaaccaacttttggtcagcctgcatactattgttgtcagngaacattattcccttgaatcttaatttaagtacatgtattcaaattcaacaatacatattctcttggacctagacattagtaaaatggctactgtttattattaccaaacaacaactaacataacacaacaccacaccaactaacaggtagtctccaaattgagcaaaaagaataatttctttgactcatgttccttgaaacacactaaatgtttgtctgtgtagagtagcaattgcttgtttctaaagcatagaacttcaaatagtggacagaataatttttattttattttcccacaacaccaaaggatacaccgacttcagttaaagaagaatatcttatacgaatagcagcactctgattgaatgataagaaagctttgcaacaatgcttccttgaatgcagaatacatgaacaaatt

SEQ ID NO: 228646 - DNA, 462 bp, Glycine max
  unsure (1)..(462): unsure at all n locations
agcttgttcagccatatgttcattattaactctaaagccaaaacttaaatatttaatttcatcataagctgtgaattcaaagaaaataggcacataagaatataaataactacatgtatgaaattatttacagtaatcaaactgttcattatattttggataagtactcaacaattatccaaatttctcttctatacattctttcccaataatggtaaggtcatcctcctgcacactatcaattgattgcattggctggtgtgaagattcaaaatattaaattttccctatcttgngataaatatgaaacattaaatttattattggaccacgaatttgaaatgaaccatgaacgaccagaagaaaatagcagaacttgacagaattaagactaacaataacaagttcaataattctcaaatatacaatgaggaattctatgctaaatgagaaaatcaatta

SEQ ID NO: 228647 - DNA, 495 bp, Glycine max
  unsure (1)..(495): unsure at all n locations
tctcatatcgacttaaatgtcttcacattctgcagtgtatcttctccaaagaaaatggtatcatctgcatattgcacgatattaatcgatgtcttgtcctttcccacacagaagctgctgaagaggcccttatccaatgcttctctcattaagccagttaaactttccacaacaatattgaagagtagaggcgctagtgggacaccttgctgcagacctctatgagggatgaattcatgtgtgggactgccattaaccagcacaaaaatcgaggctgatttaagacagccctctatccagctaatccatttgggacaaaatcctaatcttttcatcatatatgataggaacatccacgatacagaatcgtaggctctttcgtaatccactntgaataccaagcatgacttatggcatctnnctcgcttctccactggctcattagcaatcaataccgtatgcagcacgttgcttccacttatgaaagctgactat

SEQ ID NO: 228648 - DNA, 416 bp, Glycine max
  unsure (1)..(416): unsure at all n locations
agcttgtaatcgatcacacatatactgtattctattaccagagtagattttcagaaaatattctcaacagtcacatctttttatgtgattcttgaatggctatcaaaggcctatatatatgtgacttgagacacgaatttgctaagagtttttcagaacaaaaaaagtcttatcctcttataaagcaaaattgttttatcctcttacaaattccttggccaaattacttgtgattcaataaggaatttttgagtgctcaaattgttcaatctatctctttcaagagagatttcttcttttcttcttcttcattctgaaaagggattaagagaccgagggtctcttgttgtgaaagaattctaaagacaacggaagggttgtccttgtgtgttataacttgaanaggaattacaaga

SEQ ID NO: 228649 - DNA, 359 bp, Glycine max
  unsure (1)..(359): unsure at all n locations
tnctgtcaccangaactagaacccatgcgcgaagattgttatcctggcngtccttaagaagatcttgagcctttggatagggaatgcatcatgtccaagtccaaacaacaaagagttgaagaactcaactcccaaagtctaatttgtgagcgaaaaagaagatcgaaaggtcgatcaatatgaagaatttctggctaccatcacacaaaaaaatggaacattctacccgagcctgatatgaaattcaatgaggaaataaatagtcaaagaattcttaccaatgcttggtcaacaaagctacatgagatcactaacatttctagggtgagaggggactcagtgaaatattatagagatac

SEQ ID NO: 228650 - DNA, 434 bp, Glycine max
  unsure (1)..(434): unsure at all n locations
agcttgttgaatagggattngaattatttgtctttatacaagctcttcaattattcaatggaaatgaagaacaggcagctgggtttctttttgggggctagaaacatttgttttggaaattgattggatttattacttgaaactatttttacttttaggcaattccattacaaattctgaattacagacgtgatggcatttattgtgagttgttcatactgtaaggaatgtttttatttaattgaaaaactaacttattggtactcaatgtctatcatgtaacctttaatagaggttgaagaaatctagtttagtagactttaagatatgcattaccgcaacagatgtggctccattgggaacgtgattccaagatggtgtcaaattatataatatatacatcatactaaccaacgagggtgggtgaaaatttg

SEQ ID NO: 228651 - DNA, 362 bp, Glycine max
ggagaaataccattggtgtgggcattagttgtccagtgagtatgatgtcccatcctgagaaattgtattatgaaaaagttgttacaaacacgtacgatggttaatacattatacattttctatgctcactaaaacttagatttgaaaaaaaaattatctttctctttagataagctcatctttatataataacgggttttctctatttaataaagtcacttctcagtgccctaagactgtgatgcataataaagaagttcttcgcaatatttgaatctgacacatgtccatacttatatcaaaaataattgtaagatttccacgaataattatatatgatttcattgatatgacaggatctt

SEQ ID NO: 228652 - DNA, 405 bp, Glycine max
  unsure (1)..(405): unsure at all n locations
agcttgaatcatatgatatatatgctctagttttaagaggattattaaagatgatttgtaattaggaaatatccacagctgattattagggattgtaatcattattagggaatattatgtttccatatattccaaagtaatcgcactataaataaaggatcatttgtgtgatacaaacacacaattacaaaaacccactttatagttatcttatgtcagtggatgtgtaaatactaaatggcaatgccttctactaaactcttggtcaaaatcattccttttccaaaacattatctaaagttgaagcanatccttgattgagatgaacaagtgagaacttcaactactttgtcgctctttaatacaacacttattcaattaataataaatcattgaacttaacat

SEQ ID NO: 228653 - DNA, 420 bp, Glycine max
tgtctcatattacaagatagcttggagtggagagagaagtttacaaaagtactgtccgtttttttagcaacgcttatgtgtctccattacttgtatgaaaatgtttttgcaaaaaataagctgatcaactttcttctatcatgccttataattatttcaattgaaatttaaatgataagatattttgaaaaaggagagggaacaaaagtacatgaactattttagtacaatcatcctcgtttagaacacaaacatattgtataaggtttggacaaaaagaaactttagtataaaatagtgtgtaagtttcttaggtccaatttgaacattacaagaaactatcattttggatgttatgtttgggtttcacaacttataattctaattctttaaataaaccatgagcagaaagaactgttg

SEQ ID NO: 228654 - DNA, 453 bp, Glycine max
  unsure (1)..(453): unsure at all n locations
acctgcggcatgcaagcttcgcggacttaatgtaatggtcaaacattcatcattctacgcgaagccaacaacattgtcgagaactaccctaggtcacatgttcttaccatgtgtgctaagacatgtttgcttccttttgggcttctactgagtctaaggctgatgctctcataagacaggttatgttcgacaatggtgctagtcacagtgaagagtatgatggataaaaaaagacaatgagtgagatgaaaagggtaaagtgggaactttacaatttttggggggtgcaccaaacaaaaaatgaggtacattaagtatttgtgcagttatatacgctagtgaaatgaagctatcaccattcaccctattggcttatttttatcacaatctatnatgatgtaaaatgaaaataaaatcattcatctacacatgtgtgcatataataataaatat

SEQ ID NO: 228655 - DNA, 495 bp, Glycine max
  unsure (1)..(495): unsure at all n locations
gggagaggatgcttcaatggagganaagaaagagggagagatttatatatgatggagcacgacattgatggaagaaaaaggcagagaagttgaactttgagttgtgtctcacaagactctcattcatcaaagttacaacaagtgttacacatgcttatatttatagactaggtagcttccttgagaagctttcttgagaaaacttccttgagaagctagagcttagctacacacgcccctctcataactaaactcgcctccttgagaagcttccttaagaagattcctaaagaatctagagcttagctacacatacctctctaatagctatgctcacctccttgagatgagaagctagagcttagctacacaccccctataatagctaagcttactcccatgacaaagtacatgaaaatacaaaaaaaatatccctactacaagcaaagaatgggagaaagtaaataaggaagagaagaaagctcctggtcaaag

SEQ ID NO: 228656 - DNA, 502 bp, Glycine max
  unsure (1)..(502): unsure at all n locations
agcttagggatataagagtaagaggatatggtatctcttatgcttgttcaaaacctcaccatgattagacaactatatatggatggtgcaagtgtgacaccctttatcctgacatacatataaatcagaaaaacatataagaatttagaatctaattaaatcaattttattcaaatcacttaagcaaattcatatggataaaagggtcacattcactatactgttacaaaataaaacttatcaaaaacatcttcggctcaaaacaaggtcgtccaaaactccaaagaatgaactaaagactcagcatatgaaatagaatgatacaaactacaagtccataacttcttgcaattaacacagaaccctgtgtctcaatgtcacgtcctatcagagcattgtacttcagcatcctctagcatgaggttctccatagcaattcacctaaccatttgcttccatgaacacaaagtntgagatcatcanatgatccaaacataaaatg

SEQ ID NO: 228657 - DNA, 385 bp, Glycine max
  unsure (1)..(385): unsure at all n locations
aaacttagtataaatacagaagagatattagagtatgaacagatcaaatatacgcttgtctagctaaaagccagtgacctagtgagctcatagattacatgttnatacatcggatacttttgtcaatatgcatacgatgtaagtacccctgtcttcagtaatagtgaaaggtcttataaaatggacaatgagaatttatagtacaagataaaaaacctaatgaaaccatagaataaataacctaattaaaggtggagttgttaatgaatggtatccggtatgaacgcgagaattaatgaatttatttggcagagtgaaatatcggggatgagatatcaatacagaaaagctgtttctgggatttagcccggaaaagagggctaaa

SEQ ID NO: 228658 - DNA, 446 bp, Glycine max
agcttacaaatctgatttttgggcccaataattgtctttcggcccaattacaaaaatacaacccaaaaacgaaataaaataaaactggacgacaaataaaattgtttgctctcttcatgtccaagccggttcagcccaattctggatgcaagcccaattgcttataattctcctgaaattaaattaaaacacaaaattagtcaagtaggctcaaatgataaaactgcataattaatttgacaattaaggctaatcagtaattaaaatggtggcagaaaggggtaagaaataggagaaaataatgacacatcaaattctcccacacttagccttttgcactcttgagcaaaatcaaaaagcagagcaaggaacaaatccagagacattatagagagacaaacaaacacaaaaatatttacatatttctcaatgaatctcaagtaatg

SEQ ID NO: 228659 - DNA, 449 bp, Glycine max
  unsure (1)..(449): unsure at all n locations
tcgttgacccattaattgccccaactttttgtttctggtgacctctaagctcttgattntgacttgataaaacctctntttaagcgaaggcttttgacttgatcccatgttttactaaagtgaaataaaatctagtgcgaatcaaaactccgacatctatcatgggtggaatggatgaatgcatgaaggaatgcatatgacacagatgcaatttatgaatacnggagctcgggaaattgtctccttcttagatacaacgctcttgggtagcaaagtgcccaacgtatgtattcaagaaggtgacacggaccctctgttggttngcccaagataggggattaagatggaacccacacatgatgcacatgcgataggtacaatacngngatgtacatantatgataatattcactgaacataagcaaacgggtatatgatacttatgcatg

SEQ ID NO: 228660 - DNA, 412 bp, Glycine max
  unsure (1)..(412): unsure at all n locations
tatgaatactaagctaccatatcatncaacccttacaagaagtaggaatgttgtatatttaaagtaaccacgcatcanaagcactagcttttgaagactaagcagattctagcccctgtaaatattaacaaatcatttcatataccgaaactttttacatagacctaaagacaattttctcatattgttaacaagggaaagtaattcacatgcaaaaatttacaaaaattcattcaaatttcacaaggcaataagataaaatatattccatctttgacatgcggtaatcgtgtgtaaattctacctcttctcatatccaaattgacttccactttttacagtttaaatctaacaaaactctctcttcatcgaagtagaaattcatacaaaaatgtgttctgagtcattccca

SEQ ID NO: 228661 - DNA, 312 bp, Glycine max
agcttatatgataagagagaagccgtgcccctttatttggtcctctcacattagtacttatgttgtccttgacctcctttcttgttcctttccttattaaaatattaaaatctgttacatatttgctaaatttgttacattgtaaagttgggttttttgcttatgtagcaagtatcagaaaaactacataatatgaaattatcaaagactaaaaaagttcaagaagaaaataagaaagccaaatgataaccttccttatctgctattctgagtgtcataaagatgccatcatcttctcttctacctttgatt

SEQ ID NO: 228662 - DNA, 381 bp, Glycine max
ggacttaatactagcttaatggtcaaaaccctagagaattttattactcttgtttaaactttgtgagttgatctctagtgttaaggataaaacactcacatccaaatggatgaaagtatgaaatattgagtcttcttcctctccatagttcataatgagttttttttttatcaatattctattttgaacatagcaagttttcactactactacccataagtgtttaggaagtgagtttttgcaaaacatggtcctagccatttcttgcatagatctattgttcttttcaactacctcatcttgttggggtggtctcgatgaagagaaaatgtgaaaaatatcattccttttacagaatgatttgaactccgcattcttaaa

SEQ ID NO: 228663 - DNA, 493 bp, Glycine max
  unsure (1)..(493): unsure at all n locations
agcttagtaaagctaagcactaactttctcttctcttggtcaaatttggctaaaacatacttagacacttcctgagcaggtacgagcagttatgcaagtgggatcagcaactttcattatcagagtaatcaagcacagcggaaattctgcaagttgcaagtcgtttccaggatgtcaagacatctcacatgacatcagctttcttcttctgctccccctgtctccatgctcttactgcagcatcttctatcagctactagtcttttccaggatgtcaagacatctcatgtgacatcagctntcccttgtctccatgctcttactgcagcatcttctatcagctactagtagcttacatcagtcatcatcagcagcagcagtctccctctcaaaatcatatacatacaactccccctcanaatcatgaatcatgcatacatcgtatcctacttctctaaatataagtcatgcataatactactactgcatacac

SEQ ID NO: 228664 - DNA, 429 bp, Glycine max
tgtcgccgcgcgagtttccgactatgctctcgagtgttgtttctagctacaaaacgagagagcaagaaatgaagagccaatggttgatacatgggcggagatgaaaaggatcatgaggaagcggtatgtgccgcgctagttactcaatggatttgaaattcaagctccaaaaactaacctaaggcaacaagggggttgaggagtatttcaaggaaatggatgtgctcatgattcaaccaaagattgaagaagatgaggaggtaactatggctcgatttcttaatggtttgactaatgatatccatgatattgttgagctgcatgagtttgttgaaatggatgatttgcttcacatagcaatccaagtagagcaacaattaaaaaggaaaggagtggctaagaggagttttaccaatctttggttcttct

SEQ ID NO: 228665 - DNA, 463 bp, Glycine max
  unsure (1)..(463): unsure at all n locations
aaaggcttctatgagaagccagatccttatctatccacacccctctattaactaaattaacctccttaaaaataattatggatgaaaataatgcaacaaataatcaaacattaaacataattactaataatatatagatatatatatcagggtgttacaaagtgtatttctctcatatcagacatgatttcaaaatgcacaatgatgagaatgctaggaattgagttttgaatctggtgcttaaatttcacgacgatccaacggtgaatgaatccgagaccgtcatttctctgacacaggtttggtggtatgcacacaaaaagagggttttacgataaggaaaatagacaacgatattgagaggaaagggaggctgagaatctatcgtcagacctaacattncattatgtatatgtacgtgatcgacgtcgtacccgaatcaaataaacatgaacatgcagta

SEQ ID NO: 228666 - DNA, 497 bp, Glycine max
  unsure (1)..(497): unsure at all n locations
acacataatactcagcttctatccaggcactctcttggtggagaagctgctccttctctggcttattctctagcagaaggggcctcctctcaccttttctcctttatcttccgcttcaacttcatggctaaaaatcaccattgaaggacctcattgaagctcaaagatctagcctccatagaagcttctcaagcaagcttccatcaacatcataaagtgagagctatctacatccaaagatgcaagtctgcttaaagttgaagttgtccttgagaaacattgatgagaagcattagagtaaaggactaaaacatactactcagtctaaccttggacagaacactagcacaccagctattaaacttctactaagnctttatgaagtaatcaacttcacaatgcttgcagctntgaagaagtatctagagtggtaaagttggactacttcagaatnggatatcaatatgagcttcatcacaagaatncatcaagcatga

SEQ ID NO: 228667 - DNA, 411 bp, Glycine max
atctctgattcattccttgaaagagtttgtctaaatcttttatttttaaagaacaacacctcatctcaaagagttcatcatttccaagccaaatacacatttatacttttaaatatattttttttattccttaaccagtatccttatgaacaaggaggatgaggcaaaagagtgagggttgaaagaaatccaagcatgtcatgccagctcctgttcctcattggatcctctttgttccatttcgactgtcggctttgtcactagcaccgaattctatcattctgtataactgccaggatttttgttttggtttgttttgatggcaaatataaaatactcttattaatcagcaatagaaatatagcagaggctgacaaatattcaattaagctcgaataatgaatggaatcg

SEQ ID NO: 228668 - DNA, 444 bp, Glycine max
  unsure (1)..(444): unsure at all n locations
agctttcaatgcacaaattctaaataattatttgaacactctggncagnttcaattatgatattaattttttaaattatatataaaaacctaaacaacaagaaaaagagaaaatacaaaatcaatatctctctctaaatttctccttactttatttcatcaattcatattaattagaaaaagtactcgatttatagggttcacgctcaacacaatagcatatcaatttcacaaaaattggtctgtcaaacatatataattcactataataattataaggataaaatgaaaatttcaaaaaacacccaaaaactcattccaattgatatctctaaggatccctacacatggtctcactaattcccaattggtaataactcatcccttacctctaagcggactcacgtgtcttccgacagtgatagcagcatctctagcggtcccc

SEQ ID NO: 228669 - DNA, 436 bp, Glycine max
  unsure (1)..(436): unsure at all n locations
tgtnagaagacaatntccaataatgctctcttattctttgatctgataaaaggctcaaggccagtcattatctactgttggactatacttacctaacccattgtttagtcatggaattataaatcaaagaatggattaaaagttttaatacatgataaagacaaaacaagcttgacctctaccaccaatgtagttttcaaagaggctttcaaaagcctgttaaggtatatatataatatctatatactgaccattttccttaagcattataatgtattcactactaatttagtcacactcttatatgcagcttcatttcatatgaatgtatactataattcttactagaaagccctccactttcctcgggtaagacatcttttcttattctaatctacactctatacatggcttttcatnttatcaagcaaaaatt

SEQ ID NO: 228670 - DNA, 483 bp, Glycine max
  unsure (1)..(483): unsure at all n locations
agcttctagcattctcaatttatctggcatttatagtgtactgaaggacaaaaatatgaacacatcaaaacttattcggttaatagaggcacaggaaaggcgtatgctagaacaagaatgacatatgtagtatgaaatcctcatgaaggatacatccaacatgtccgaacaataacgccaatgccaagaaaagtattgtgaccatattagggaaaaaactaggatattaaataacattatgtatgttttttaagctaaaatgatatgcaaaaccatagtgataggcatcccagcaagggtggcacccctaacactatgcaacataccaattgagaacaatggttgaaatatagtataccataagctaattagcttcaatagtgggaagcatattgttgataaagcacaatagtattatatcttctctnttttcttttatagattaagattctactgtaaatagtaatacatgcgaagggatta

SEQ ID NO: 228671 - DNA, 281 bp, Glycine max
agctgagcagaccccaagagaactatttgattttaaccgcgcaagagagccatgagcgggggcatatgggccactctgggatacacacaacccttgtctcactccaaaaaaagtcctatagcccccacatgaagaaagacgcgcataagcatagcactaggtgtgtggcttgatcacaaaccaagtctaaggagatgccttatgggctatacacacccttacccattgcactagcaccttaggccgacactaataaggactccgacctcggggtggagacc

SEQ ID NO: 228672 - DNA, 444 bp, Glycine max
  unsure (1)..(444): unsure at all n locations
tcgagatccttaagcacctgcagctgcagctctgtggtaatttgagagctcgaatattatgcgcctgttatcaacatccgagagaaaagttatgagcatttgaatttcttgagagcttacgttgttcaatttcgagcgtctcgacatgtgatgtttctgaatcggtccaccgtgtgtatagttatgaccatctgaatttcatgagagcttttgttgttcaatttcgagggtctcaatatgtgatgtgccttcaacatccgagtgaaaagttatgactatttgaatttctatagagcttncattgttcaatntcgagcgtctcggtatattatgcgcctgaatcggacattcgattgaaaagatatgaccatacaacttccttaaggctttcattgtcaatttcgagcgtgtgaaatatattgcgctgagtctgacatccgagtg

SEQ ID NO: 228673 - DNA, 488 bp, Glycine max
  unsure (1)..(488): unsure at all n locations
tcttttggacctttgacaagcaatcaactcctctgtcagaactatgctatgtgctcgcgactggtccctttcttcccttcgcaacttgagttcattattgctaccccatagagctccgcgaaatttgttccggccatactcttccttgcgagccctcttggtctcttgttcaagggctcttgcggtaattgcattctcttcccgtaacccggcacactccttccgaacgtgtgtagcagccaacttgaacttctccttggcgagatttgcctttcctaactcgcttttgagagcttggacttcttcgtcctcttccggtgcttcaaaattctcttcgctgacgactnttaacttggcgagccaatctaaacctcgtatgcgaactttcagccattcgtggacccaccaatgatgccttacgaatgctctaactcttgattttccttaacgggttcccatccttatggattctntgatagtctggaatt

SEQ ID NO: 228674 - DNA, 496 bp, Glycine max
  unsure (1)..(496): unsure at all n locations
agctntanangaactaagttataagccttaatgggcattcccacctacttccacccatataagagctaaaaatgaaaaataaaagtatttaaaattgaaaaggtgcatacttagataactaaaaatgaataaaaactaataggaactaaaattgaaaaacacaaagttacaattattcgagaataaaaatgaaaaaaaaaacttaaaaagaccaaacacatatttaaatctcaaagggtgtaaattattttaaaatatcttataaaaagatacaaaggaaatatatacaactaagagagaaagaaagataagaatgaactcgaaacatattaaatgataggataaaagagataaatacacaatataatattatacaaattattggacctatatcacttctcttatattgtgtgtgaatctctctcatctaccatatcattcactacatttcaaattaaanttatctctttgtttctcttaagtgatattttgttga

SEQ ID NO: 228675 - DNA, 425 bp, Glycine max
  unsure (1)..(425): unsure at all n locations
tagccctagaggggatggaccttctcaggttgtgaagaggatcaatatctatgcctatatgtnggacctcccagaagagtatggagtcagcaccacttttaacatttctgattcaattcctttctcaggtggagctgatatagaggaggaggaactaacatatctgaggtcaaatccttttcacggggaaggggatgatgcaatcttgccaacgaagagaccagtcactatagccatgagcaagcggctccaagaggattggactatagctgctaaagaaggccctangattctcatgaacctcaaggtagatttctgagcccatgggccaagtttgggtccaattctctttgtacatattagactaggatgtcattatatntgatccttgtatttagggctccatattgtacgtagcggaccct

SEQ ID NO: 228676 - DNA, 398 bp, Glycine max
  unsure (1)..(398): unsure at all n locations
tatanatactcaagcttatntaaattacgccanactcacgagagatgggcgagggtttttntgccctcaccacagaacacatgaataactttatatagagaataacccttatcgcatcaactatctctgaggaaggacccaacacttttacttatttgattacaaactcaattgttcatgttcactatttctctgatcacaatacaatatacctctgtgaaattcatgatacttaattctcttacaaacagttgccatttgaatgaagcttttccaagtagaatacggtccctgagcttgatactcaaatcattctggtctaattattcacttgacgagcccatgcactcgctagtaatatttcgcacccacacacacaagtattattcctatgggcg

SEQ ID NO: 228677 - DNA, 456 bp, Glycine max
  unsure (1)..(456): unsure at all n locations
agctntacatttatccatggcaggcacgagatttatgttggtatcagagctcttccatagaaaagctctgttgagcaactctcttctcttgcttcttctttagtttccttttgagttcttcaacatgactaacaattcatctttgaaagatcaatatctaaatatacacaacccatactatcttaattcaggagaaaatcttgcaattgctttggtttctccagtaattgattcgacaaattcaacttgtggagttgatcaatgcttactgcattgagtgcaaaaaataaattcgaatttctcgatggatctattcaaagatatgcatcaaaccatacacttcatacaactgggaagaggtgaataatatggcgctttcttggcttgtcactcagtctcacattcgattagacaaagcatcctttggatggatgatgcaagagacatatggaaaga

SEQ ID NO: 228678 - DNA, 473 bp, Glycine max
  unsure (1)..(473): unsure at all n locations
tgtcaattctcttgtgcagctcgggatcagaaggtggagcttcctgtggcggagcaggagcagaatcataaaacggagatggaacaagaggaggaggataatgcgaagggtatgcaggtggtccttggtgctgctgctgctgctgctgaagtanaagatgaggcggnggaggggcatgagggtgtaattgtggaagtggctgttgctgctgctgcatggcaggatgataagggaattgttgcatatgggggtgtgcacgaccaggacctgnggggataaaaggagaaccgtgcattgacgaangaaactgctgatgctggggatgaaatccaaactgctgctgttgttgcatattatcagctttgtcgttgtgctgagcatatgccatagcagatgcagttgcataatcatgaccctggcgctccataacctcaacagcacttcagaagtagtttatcttaattatgtaccta

SEQ ID NO: 228679 - DNA, 481 bp, Glycine max
  unsure (1)..(481): unsure at all n locations
cagcttcagcattattatttgctatctgagtttttccactatnggccaagccaaggactaataatatcatcccaactatgtttagttaaaattatcctactattaaatttatttgttccttcacgccttacaactcatttattttttatatagaaactagaagctcgccatattttaataatggctagtttctagaggtttgaaatatgatattgcttccaattttttaatccatatgattagcgtaacattcatagacaaatacatagtcaccacatatgggattaataattgctgtaaatggttctatgtacgtggtaagaactcctaattacatgtgccctgaactgcttgctgatattccatatggattcacatctgatattttggcactaagtatgtatgttataaccaagtatctaatacttgcagaatttgtgttgctcgccctaaaatgaatttacttgtcanggtgctgata

SEQ ID NO: 228680 - DNA, 407 bp, Glycine max
  unsure (1)..(407): unsure at all n locations
tctagacaatgggtgtgtagactctcaatatcatttattgtttatggtctctctcaatcaaagaatgactattctcttcttaccattggcaaaggtgcttccctggctgttctgttggtctatgtacatgacattctgcttgctggcccaagcgctacatgtgttcattctattcatgccaagcttcaagctttgtttagactgaagatccttggttccttacaatattatctgggcctggacagtgcaaagtccagcaagggcgttgtcttgactcacggaaaatatgccctttcactattagaggatattgagtntcttggctgcaaaccatcttcccttccaatggatccaaatttatagctcaacatgcccagtggtgattactgcccaatccctcaatgtac

SEQ ID NO: 228681 - DNA, 453 bp, Glycine max
  unsure (1)..(453): unsure at all n locations
agcttgcctatccgatgcagcagttatgatgttctgagttatgttgnggaacggttacgaacccggaatgggtttaggcaaagacaacggtggcataactagcctgataaatgccaaaggaaatcgtgggaagtatgggttaggctataagcccactcaggcagatgtaaagagaagcatcgcgggaaggaagagcagtagtcaaagctcgcggttgagacaagaaggtgaaggaagcccgccctgccacataagtagaagctttataagcgcgggtctgggggacgaaggtcaagtggtcgcgatatacgaagatgatgttccgagtacattaggattggtacgaccatgccctcctgatttccagctgggaaattggcgagtggaggaacgccccgacatttacgcaacgagcataatgtanacctttacggttntaaaagctctatagtt

SEQ ID NO: 228682 - DNA, 455 bp, Glycine max
  unsure (1)..(455): unsure at all n locations
tcccattgtattntcatgtattatggcatgcgggtgactntatctataggaggggcgtgagtagcccccctccaacttctcaaggaagctcttttcctctatcttcccacagaagctaccttctttgcttctcaaggaagcttcccatgtgctaggctctaaatagaaacatgtgtaacacttgtcataactttgatgaatgagaaacttgtgagacacacttcaaagttcaacttctctccctattctccttcaattaccatgccactctctctctctatctctctctctctcaatctcttcctacattgaagctccctctctaatcttcttatccaaggcactctcttggtggagaagcttctccttccatggcttattctttagtggatggaacctactctcacctattctccattatcttctgctgcaactccatggctgagaatcaccat

SEQ ID NO: 228683 - DNA, 499 bp, Glycine max
  unsure (1)..(499): unsure at all n locations
agctntaagaaaatagcatgacatttttatattttaattatttctaattngaatggaaatcgacttataaacttgcaatatattttgtaaaaagaatcaattgaaggggttccttaaaagtaggaaatgtgtccaagagttgagcatttgtaatggatttaaataaaatgatttctgctcacttccagataatgaaaaaattccaagacttagaacatcataaagaaactaaaatataaaagtgtaatttaattaggagacttgttttgatccttccagcaattgctttctaaaatttaagtgaaaaacaaggagaaatactaaaagatgcaaatttcaagatagaacattgtaggcaaagtactaaatcatgaaatacattgcatctaanatgtcatagctcttcaaggaaaaagatgcaaatatagatcccattcataagtcaaagtttaaatccttaccttttcctgcaactgtgcaactttatttattaataaag

SEQ ID NO: 228684 - DNA, 440 bp, Glycine max
  unsure (1)..(440): unsure at all n locations
acacatttttttattctattggtgttctagacgtgtattttgacgttcatctttatcaccttttcttgctcatttatttttccgttttgttcattatttttccattggtttcatttagatgtctattttacccagttaaaatntcagctcaaaacttgaagtattcaagccatagcagagttaagaagacaatgtgcctgaactgacaacaaccaaaatttcaacctagaaatcaagagtagtggttatgttgcttaaggcttggatagttacaatttgtatttgcttatgctcaattgtctcggataacacaattcagaagagcttaagacttattttgattcacaaatccatccataactcagcaccctcactcaatntcttcataggcatcatatatgagacttagaaaacaagaaaatgtcaacatcaagactact

SEQ ID NO: 228685 - DNA, 390 bp, Glycine max
  unsure (1)..(390): unsure at all n locations
agcttancccaagaggggaaggaccttntcttgtcttgtacaggatcaatactaatgcctataggtgggacctcccaagagagtatggagtcagcaccacttttaatatttttgatttaattccttttgctggtggagctgatatagaggaggaggaaccaacagatttgaggtcaaatcctcttcaagggggaggggatgatgcaatcctccctaggaaaggaccagctaccagagccatgagcaagaggcttcaagaggattgggctatagttgataaagaaggccttatcggtctcatgaaccttaaggtagatttttgagcccatgggccaagggtgggtccactcttctgtgtaaatagtagaataagttgtttcttatttgggc

SEQ ID NO: 228686 - DNA, 465 bp, Glycine max
tgcccagagaaagagtccacggaggagatgcttactatcttataagactggaaagcagtttctatatgactcctctgcggcttccacataaggcatagaggatgggcagctcaccaagatgtcttcctcgcctgatacgaatttcaacttttggtggagtgttgagggaacaactcctactgagtggatccacgggcgccccaacagacagctgtatggggggttaatatccattatttggaaggtaacttgacaggagtgagggcctatctgtactgggagatcgatctctcccctaacctctcggcgggtgccgtcgaaggcacagaccaccattgaacttggctttatgtgggaggcattgaatggtaatatctccaaagtgctcttaggcatcatcgttaaactggaaccattatcgatgagcaccctggctaccatttggtccatacacttgactgatac

SEQ ID NO: 228687 - DNA, 429 bp, Glycine max
  unsure (1)..(429): unsure at all n locations
cccggatccttaagtcacctgcngcatcaagcttgatgatatggtcttactgacgattggatcaaagncggnctaaaaagaggcaaatttaatcatcctgcttgggcgaatgagaaaacggtggcaaatgaacaaggtgaggatgtgggagaaacccatgttgtgactgccattcctatacggcaaagtntcccaccaatccaacaatgtcattactcagccaataacaacccttctctttacctaccacccatttattcacaaaggccatccctaaatcaacaacaaaacccatctaccacacaaccaatgctaaacaccacctttggcacataccataataccaaccaagaaatgaattttgcacgaaaagcctgtaggattcaccctcaaattcggtgtcatatgctaacttgctcccatatctac

SEQ ID NO: 228688 - DNA, 412 bp, Glycine max
acggaactataaaactcagctttactatgggcaggcggataaagtaattttgtttcaacgccaacatcgaccattgttcttccttcccgcgatgcttgatttcatgtacgccagagtgggcttatagcctaaaccatacttcccacgatttccttgagtatttaacagagctagtcatagccgcccgttgtgttttcctaaacccataccgggttcataaccgttccccaacataactagggccatcattaccgctgcatcggacagacaacgctgtccaaagagggagtccacggatgaaatgctgaccacctcaaaagactggagagcgggttctaacgattcttctgcggcttccacataatgcatggaggatgggcagcttaacaagatatcttactcgcctgacacg

SEQ ID NO: 228689 - DNA, 461 bp, Glycine max
  unsure (1)..(461): unsure at all n locations
agctggcaatanaacatagtgactcacatggttatggttcgcatcatatgttttgggaaatttaacttttcgacagatacacatttcgttcgcataatccgtcggaattgtcaactttccaacagaataattgaccgtcaaaaacattcatcgattttttgctaatttcccatggaaattattccttcggtaaattccatgcgaaaattcagcatttccgatgaaatattttccgtgggaaaaatttcgtcggaaataaacatttttcttgtagggggtcaatatatcattatttctatgtaaggtttaggcaatggtagccaataaaactctcaaaattgagtatgtattcaacactcaaaatttaaatacttcaacccatggcgcctcattctctgcttatttagaatttctagcttttgtcttgttaggttctggtcaccagagagaaggagagagag

SEQ ID NO: 228690 - DNA, 414 bp, Glycine max
taagaccttctaataggatcgtgacatgacaggatgcattctgaagcagatgtacatacctgaccaggccactgcttatccctctaaactccacattagtagatgcattgacatcaagatggtgcgtgacagaacctacccaaggctacctatctatgatgaggggaagaagggcttcaagctctacttcaacaaagaaatttctaacaaaggtcaaaaggtatagttagtcaactacccatgagactagaagcctatctttcaaggtcaaaagctcatcaaagagcttgatgttgatgatgtcgactttatggaatcaaaccatgtggaataacaccaaaggtgccagctcgtccactctgacacatgcttctacaacaagtatccacttgatgatgctaggatctggttaca

SEQ ID NO: 228691 - DNA, 484 bp, Glycine max
  unsure (1)..(484): unsure at all n locations
agcttgctatctctatagcgagacatgagatgcttataaaatctatagctcaggccattcccacttatgctatgagtatttatttgtttcccctatccctttatgaggagattcagcgcatgctaaattccttcttgtcgggtgcgtcatcaacagattccaaaggtatagaatggttgtcttgggataaaatggttgttagtaacgaatatggtggtttgatttcagggggttttattgctttattttaccaatgtcgaanaaacaaggagtgaagttcttatccaactagaaactntgttttctagagttttcaaagccaaatactaccagagagaggatactttaaatgtagtgatacgtcgcaacccatcttatgcttagtgaaacatctatacatctcatgttttgctaaaggagggctacacgtggagtattgtgtcaaggtcaaatgtcagtgtgtggaatgaaccatagttaaaaa

SEQ ID NO: 228692 - DNA, 350 bp, Glycine max
  unsure (1)..(350): unsure at all n locations
nggagaaatacaagttctggtcatatgagcgtatttgctagtttaatgttaggagtgtaaaggctttgtgggatcctctcacccgcagaccctttcttttgtcaaagggatgtgaacaaagtagctaatagtttggcttctttagcttccctttttgaggatagagtttggattgaggaagtttcccctcaaattctttcccttgtaaatgatgacttangacctctagccattttcagctaattaatatcgcttacttcaagaagaaaatgaattgacaatatccatcctttgatgattgaaggagatacaagaacgaaaaattattattataagtagaatttatatta

SEQ ID NO: 228693 - DNA, 441 bp, Glycine max
  unsure (1)..(441): unsure at all n locations
agcttgcaggaagctttatgcctctatgtgatcnaacatattcctacagaacaagagagctaacatgtaccacggcccggaaaataattgtcccccaaacgtttaatatgggacaagagaccttcgatatgcaacaccagaataacaaaagccttaacaagggagttataaggttgactcggtgattgaagagagatgggggagggagaggtcgtggattcaaatctctcccactaacaaaaattaacaaattaaccattaacattggtcttttagaaaacaaaacttaacaaatatggatttcggccaagtttaaatacacttctccataagtacttgtagcagcagaacataagaagttaaaacgaattgagcttcttatataagctaacattaactcgtccacttaactctacagaaaccattttcagttacttcctc

SEQ ID NO: 228694 - DNA, 449 bp, Glycine max
  unsure (1)..(449): unsure at all n locations
tggtccnctcaacacagatgagctttgcactaattntttctctctctaacgaatatgaattggattcctcttattaatacaagaattttatcgataatatacaagtattttgtatttatgtaaatatttctttattcggtgtgagttttatctcacctaaacttttcggttatgaaaaaaagcaaaacttattgcctggttcttggcagcctacgggaggtaaaaccgacattcctattacaaagatagtatggaatactttatcattttttagtaaatataaataattttaaaatttagttagttacttagtattaattacaacttctaatttatcataataagatatacttggtggctgaaaatcctcatgtctaagatcgtgtatcataagatcgagtatcatgtnctttatactatctatgatatctactnttaccgggtcactg

SEQ ID NO: 228695 - DNA, 107 bp, Glycine max
gggggaagaaaggacaagggaaggagaagaagaaaaaaagaaagaagggagagaagggggggagagaggggaaagggggagaggggagagaggaggggaaaaaggaa

SEQ ID NO: 228696 - DNA, 170 bp, Glycine max
agaaaggggagagaaaggagggggggaggaggaaaggaaagaaaggggggggagaaaggggaagaaaggaagagaagaaggagagaaggagggaaagagaagggggagaagagaggggggaagaaggggagaaagggaaggagagaaaagggagaaaaaggagagaaaag

SEQ ID NO: 228697 - DNA, 74 bp, Glycine max
ggggggggggggaaagagggaaaaggaagaaaagaggagaaaggggagaagggggaggaggggagaagggagag

SEQ ID NO: 228698 - DNA, 90 bp, Glycine max
aagaagagaaaggaggagaagaaagaaaaagggagaagacgggaaaaaggagaaagaagaaacagagaaggagggaggaagaaagagaga

SEQ ID NO: 228699 - DNA, 211 bp, Glycine max
  unsure (1)..(211): unsure at all n locations
gaaaaaggaaagagagggaaaagaaaaaaaagaaagggatgacgaacccaaaaaannggggaagaagagaagagggggggggagaaagaggggagagggggagaaaaaggaaagagaggaaaaaagaaggagggagaagaaaaagagggaaaaaaaaagggaagagaagggggaaggagagagaagggagaaaaagagagggaagagagga

SEQ ID NO: 228700 - DNA, 124 bp, Glycine max
gaggaaaaaaggggggggggaaagaaaaaaaagaaaaagaaaaaaaaaaaggaaaaaaaagggaaaaaagagaaaaagaaggaaaaaaggaaaaaaagagggaaaaagggaggaaaaagagaaa

SEQ ID NO: 228701 - DNA, 87 bp, Glycine max
agaagaagagggggggggggaaggagagaagaaaaggagaaaaagggggaaaaagaggaggagaaagagggggagaaaaaggggaaa

SEQ ID NO: 228702 - DNA, 51 bp, Glycine max
aagaaccacacaccacgcaacgacgttgcagccgccccgccaccccccccg

SEQ ID NO: 228703 - DNA, 405 bp, Glycine max
agctttctggagtagaaacatgggaccaactcattttattgcacagaggaagacatatctagtcaaggtctgagagaccatacaagttctctaacgatttctaattatgtgggccattaagtctatcatatgctgacaatagccgagaagcccatgaatctcttcgggggcggagtaggtgtgtgccatctccttgcgcttggctaacaatcggggaagttcttgactcctgttaaggtaagagcaaaccgatccatccacatggttgcctcttggtagaaagagacgatcacccttcctctagcctgtgtttccgcgtatactgtggcatactcaaacgtgattctatgctcgcgggcacgggctagacctaacatcttttggtacttggcgatatagtaacat

SEQ ID NO: 228704 - DNA, 225 bp, Glycine max
  unsure (1)..(225): unsure at all n locations
ttgaatgaggaagtgtggaagggtgagacttcctacttttattcttgaccacagagnggcacctggagatatgtcgcggtggtcatgagaccttgtggacatcacgtggggtgctatcgcccaaaaccaagcttgaccaatcccgacccaactcaggcataatcagtcagtgagaacctgtgatgtacctaaacacgcgagctcctggctatcaaccgataaaag

SEQ ID NO: 228705 - DNA, 458 bp, Glycine max
  unsure (1)..(458): unsure at all n locations
agctntntggcaaaggaagaagaagaagattaaagatgagtaggaaagaactgtaaaggtagtaaaggtttaaaggttcttcaaaagttgttcaagaagttgtttgaatgtaagccaaggtcttgcttttatagactcttcatgtctggtcaagaaaaccattgcaagagttataaccttgagaaaatcatgtcaagagttacatctcttgaccttttattcaaaacttatcactggtaatcgattaccataatcatgtaatagattacacaatgcattttatgaaaagatgtgactcttcacaattgaatttgaatttcaacgttcagatacactggtaatcgattaccaatatattgtaatcgattacaccatttaaaaatcatttggaacgttcaaattcagtaaaaacttttgagatcaatttatcactggtatcgatacaggaaactggaatc

SEQ ID NO: 228706 - DNA, 370 bp, Glycine max
  unsure (1)..(370): unsure at all n locations
ctattaagaactagtatgtcatgcaggttgtgtctngtttntatgaaangtgtctgcctctcatcaataagaccagatatcacttgtctcaatctatttgctaataacttagctatcaccttgtacatacatccaatcaaggagattggtctgtagtcatcaaatgactggcgatgtttagtnttgggaattagagctatgaaagaagcattactgcctctagggaagctgtcatgcacatggaattcatctacaaatcttctgaagtcagttntcagcatcttccaaaattctttaatgaatttgaagttgaagccatcangttcaggacatttgtccccatcacaactccacactgcttctntgatct

SEQ ID NO: 228707 - DNA, 453 bp, Glycine max
agcttgtatggtagaaggtgtacgacacccctatgttggttagagcctggagaaggcatcaccttaggaccaaaagttgtacaacaaaccactaagaaagttaagttaattcaggaaagcatgagaactgctcagagtaggcagaaaagttatcatgataagaggaggaaagatctggaatttgaggttggtgatcatgtattcttgagagtgactccatggactggggttggtcgagcattgaaatcccgaaaactcacacctcgctttattggtcctttccaaattcttaagagagttggccctgtggcataccaaattgcattaccctcatctctttctaatcttcacaatttctttcatgtgtctcaactccgtaagtatatccgcgatccatcccatgtaattgaattggatgatgtacaagtgaaggagaatttgacatatgaaaca

SEQ ID NO: 228708 - DNA, 498 bp, Glycine max
  unsure (1)..(498): unsure at all n locations
cttgatgatatggtcttcaccgatgaaaggatcaaagtgggtctaanattagacaaatatgatcatcatgctttgataaatgccaaaaaaaaactagggcaaatgaagagggtgagaatgagggagaagcccatgctgtgactgccattcctatacagccaagtttcccaccaacccaacaatgtcattactcagccaataacaaaccctctccttacccaccgcccagttatccataaaggcaatccctaaatcaaccacaaagtctgtctaccgcacttccaatgacgaacaccacctttagcacaaaccataaacaacaaccaagatatgaattttgcaacgagaatgcctgtagaattcacgccaattccagtgtcctatgctgacttgctcccatatctacttgataattcaatggtagccataaccctagccaagggtcatcaacctgcatttcttcgagaatacgaatccaatgcaacgtgtgcttgtcac

SEQ ID NO: 228709 - DNA, 422 bp, Glycine max
agcttacacaaacatttattagtgcagcactcactctacaaatagtcatcgtccatccataattccaataaatcatgctcggtatgatgcatgcacctaacctaaactctcaatgcaatgtggcaccatccccaaggaaatagcctaagcatgtccacacgacgctctcacgtaggaaaactatgcagtaagtgtcaaggtcaccatgtcgtgcacaggcaactcccccccccccccccacggtcatcagcctgagtctaaagggagttccaaaccgagtgacatgcccccaaatacaaatattcctccttatgagaaactacaagtacttactgacgaaggtaaactatctgcatgcaatatgaagtatgacacattggcaccaataatgccctgaccggggataattaaagatttctaac

SEQ ID NO: 228710 - DNA, 505 bp, Glycine max
  unsure (1)..(505): unsure at all n locations
tataagaacaacattgccttaatcatttccaaatatgcatgtgaattatgacgcatcaacaagaatcaagccaaggctattgtgcaagcaatcaatggggcaaaacacaccaaatgattataatgatggatggctcaaattctcacaaaggtaaaatcatcactttcaaattgagctttcaaaactatcatgacatgtagagaagaatcaaggatttcaagtcacaaaatgtcaagaacttttattctcaaaacaattacccatttcttgaacatatcctgtaattcaaagaanaacatgcaaagtcgtacgtgcacatgaaattgacccacaatattaaactganaatccgacgaaactaacaacattaacaaattaacacaactaacaaattaacaaaaccaacaaaactagcaaaaccaaagaacacttcctccatacttaaacaacacattgtcctcaatgtagcacaattaaaagaataaaaacaattagatcatcaaag

SEQ ID NO: 228711 - DNA, 457 bp, Glycine max
agcttatgacaacgctcaactatcatgtattgaagtattaaacttcaacctcaagtcttcagggcattcactaaggacaacttacaaaaacaatagacaaaaataacagacgctctgttctttcaggtgaagccaggaatttctcctggcattggagctaactcattcttgctaaatttctcctcatcataaaatggggcacgcaccactctacccccaaagtaccgaccatcaaggtcaacaagtgctttaattgtttcttcggatctctcaaactgcacaaagattcttactgcttcatgaacggagaaatttggctctgttatctcaaatatcagaacgcgggttacaattccatatttggcacattctgatcctacctcatcttcaagctcgtcgtctacctcaccaggacccaccttcaacaagagagcacatatagtgagtcatgtgtaat

SEQ ID NO: 228712 - DNA, 411 bp, Glycine max
  unsure (1)..(411): unsure at all n locations
tgcatccaatgcgcatatatggattcgtccagtacttcatatcagcttatgcatccaaagcgctacacaattgacctggccgaaaatcttttataaaaatattcatcagcgtccaacacatctttttgtccaactcgctaacaaaacttgtggaaatattttatactttcatttaagatttcttcatccaaaaatgaacacttgatatagttcttttctctatgttgttcgaatgctaaggtttatttgtgcttacattcttcattgtatgaaccttagtctgatattcctttctgttattttcaaatatgctctaatgtttaaatttcaaacatgagaataaaaaaattgtaaatataagcacaacctctgatcnaattaaagctacacaacgaggttcaggacaaggag

SEQ ID NO: 228713 - DNA, 366 bp, Glycine max
  unsure (1)..(366): unsure at all n locations
agcttgcatgatgataagatagaataaggtttagtccacttggccaattacccatttcatacggttgggttataaattctggtcgctgaaaataatagatatggcgctttctgattttaggagaacttggtccttactcttctgcagaaatacctccttanactaaaatgtctaaatatgcacttattggccacatgaggctttagctttgtgtttccaagcataagcacttttatttaatagccacccttttgtgtacttgaagttgaatccacaagtagataaactcacggagccagtcagaatattcactgcttatgtagccacaaccatccatgtcatttctataacgctgcttatgcataa

SEQ ID NO: 228714 - DNA, 313 bp, Glycine max
  unsure (1)..(313): unsure at all n locations
acacattaaactgcttcattggtaccacttactganaaaccatctctntgaatctggaacaaagcacatgcttttccatctaattccacacagcgctatcnaaannnnttatcttatggaaacgtactttttcggaatacaaattaaaattgtattcttgaaagcattctccagaacatctctttatgtgctctggaaagtagactccgaaataatatttaaattttgattaccgaaagcatttctcgaatacacagaagacacatcaattttgaatgctcttcctgaagatgatacacgatatttttacata

SEQ ID NO: 228715 - DNA, 394 bp, Glycine max
  unsure (1)..(394): unsure at all n locations
agctcgaatgcccctggcttatcattaataaataatcgngagactgtctctctcccgctgcatttcgatttcttcttcctcagagtgttttcttctcttcttcctcagaccgttttcttcttcttcctcacctcaaccattattatattgttcttgctcacctcaccggtgtctccttttgtcaccattgtcgggaaaggttcttctttttcttcacccaccattgttgttgtgaagaggagcttgccgtgaaaaggttgcgaggtgcattgaggaggtctccgtaaagagcaacgccaccgtccactgtcgagggagcttcatcaccgtccaccgtcgaggtaagtgtcgtaaccatgttgttccaccattgtgccagagttagatgatccga

SEQ ID NO: 228716 - DNA, 403 bp, Glycine max
  unsure (1)..(403): unsure at all n locations
tggctgngcagctgggaatcctgtgtgatatatgggttattgcctctggtaatcgattaccaagggtgggtaatcgattacaacgcttaataatgaagacaggaggctaagatagtctctggtaatcgattaccaaagggtgtaatcgattaccaggccttgaaacgaggtcaggaagctaggggagcttctggtaatcgaataccagcggatgtaatccattaccaggcttcaaaaaggaactggaagactgtggaggcctctggtaatcgattaccagtctatgtaattgatacacagaggagtgggtcactggaatccattacacatacctggtaatcactacacagtgccctttcangtttcatgtctgaactgtgtgttcaagttgcctctgtaatta

SEQ ID NO: 228717 - DNA, 379 bp, Glycine max
tcaacttcaccactgggatcataccatccttcaatgtagctgcagggctgtcggggtttgcactgatcaatgcctacactacactcctcaacaattgtggcaatctcaaaaaaccattcactctaaaagagaacactgtcatacaaaccttcgttattgcagcctctggaatcgccttcagcagcgagacattacttatttttttgttaccttgtgcagcccttttgccacatattgtgtctcacatcaccgcacatcaaagaatgctcacgttctaaagtcgacatacataacataacactgcattcgtgtcttacaaaatatgcatctccatatatgtaaccaacatgcatgctaagaaatcgttcttcttcctctt

SEQ ID NO: 228718 - DNA, 404 bp, Glycine max
  unsure (1)..(404): unsure at all n locations
tgaagggaagggctgactcaacacacatactttaatctttctatatatcccgccgcttggggactaaaccaccccaccacccttgaggcaacaattaaggcaggcccncaaagaagccgcaactaatgaaggctaaaggggaccacaattaaggcagctttccaacactccccctcacgcccaggacactcaacttggagcatgacaatgcaagtggctcaacaatagatctaggataggctctgataccataattaaaatgtgtgttatgagcctaactcaaccncacacaatccatcttataacgtgagggttgcctccacttatatacttcaatntggccatatcactagccaatgtgggactaaaccaccaccctcgtggttgcaactcacgagacccca

SEQ ID NO: 228719 - DNA, 399 bp, Glycine max
ctgcagcttgctgtgctgctcacgaatcctctcgaaacttggttcgacctcgttcttcctttcggaccctctttgtttcccgttccaatgcttcggctgtggccacaatgacgtctctcagttcgtcgcattatttttggacctttatagttgtcatcttgaacttttccttgactgtctgcgccctttcaagttctaccttcaaagcttgcacctcctcactctcctcaggggtttcagcctcttcctcactcgagggttttagcttcgggagacaatctagctcttgcatccgagcctttagccacttgtgatatctactgatgatcccattgctgcttcccttaagttctctatcctctcttaatgaccctttgaaaatccttgcattgggtactg

SEQ ID NO: 228720 - DNA, 456 bp, Glycine max
  unsure (1)..(456): unsure at all n locations
agcttgggtggatggaatggatcattcctattcccatgtntggttaagtcaagagacccaaggtgttcatcaatggcgaagttcaagaatcttgctttgatcgtgttgaccagaaagaagtgaggttgtcatgattggataattcatatctctttggtctacaaaagataagttttgttgataaattgcttcaagtgccttttgaattggaatggaaccatgtggaggttacatatgaaagtgcgttatatatccttcttaatttcttttggcatgactatacaacttctttaattatagagccattaatggctaatgaattttcctcaagtgatggtggngcaaagctgcgcattgcttactaggtacccaaacataccctatgttatatttgcaattgaggcatatatgcacgtaagttaaatatacaataaatggtttatgtccttccatata

SEQ ID NO: 228721 - DNA, 427 bp, Glycine max
  unsure (1)..(427): unsure at all n locations
ggtanggttaaagtctcacgagtgtcacgtgctcatgcatcaattgttagccgtggctatacgagacatcttgccaaacaaagtcaggttcacgataactcgcctggtgcttttcttccatgctatatgtagcaaagtcattgatccaataatgtttgatgagttggaaaatgaggccacaattatactgtgccagttggaaatgtattttccccctgctttctttgacatcatgattcacttgattgtgcatctggtcagagaaatcaaatgttgtggtcctttttatctacggtggatgtacccggttgagcgatacatgaagatcttaaaagggtatacaaagaatctatatcgtccagaagcatctattgttgagaggtacattgcagaagaagccatttgaatttgttcagatacttagaga

SEQ ID NO: 228722 - DNA, 421 bp, Glycine max
  unsure (1)..(421): unsure at all n locations
ctgcagcttgttctttttataaatgagaagttctgaactcaccatgttatctaaaaaaccttgnggtggatccaagcgctccgatcatccatttgcatactcatgttttggtggcatactcaccgctgtttatttctttaggaatttcatcatgactaagaaaacaccaaggcacccctataacactcgatccagaaaaatggataatgaagagggcgtgcaggaacagatgaaggccgatctatcggccttaaaagatcaaatggcttccatctcggaggtcatgttaaaactccagaaaaccatagaggataaagccaccgcaaccgcctccagtacagttagggaagcggagccggtgctgcaacccgccttgaatccgggcctagacagaaacacggccgtgttccgtcgaaggtat

SEQ ID NO: 228723 - DNA, 426 bp, Glycine max
  unsure (1)..(426): unsure at all n locations
tgatccttgtatcttgattcttgaattcgtctntcttcttgaatcttgaagtgttcttcaacttttcctcttgagtcttgaattgttcttgattccttcttgaacatcttgaattcatcctttgattgacctttgagctttttgtcatcacttttgtcatcatcttttgttatcatctttgttatcatcaaaacatctttgaatcattcttgattcaccatgaagctntgcttctacagtgctcgcccaggtgagctaaccctgtgcatttttattttttttaaaaaaaactnttttcgaagaaaatacgtgttctctccgggtcggtgctcatttactcgaagccccctangataagttaggcatatccgatcatcaccctagagaaataacaatgataataggtagaaattaaacgatacttgg

SEQ ID NO: 228724 - DNA, 446 bp, Glycine max
  unsure (1)..(446): unsure at all n locations
agcttgtcggngaagagagaagagaatattctnttgtggaagagacacagtgaaaaagagagaatgcttccgaaagagggaaaaaaatgctttttatttttttaaatgaagggcaaaattgacctttcattgaattgctgggtgcaccagcaatattgctgggtgcacctagcatatcccatgttataaagaacaaattaagataatgagtataaattgggttataatatatcttattcatcattaaatttctttgatttgtcttgggtaacatttctttatttctttatttctttcatcgttaacttaccttcacacgtggactctaagctcctagaatcttcattcttaagctccatataattgatctggctaggaaaaacataagttaacataatgacaatggatgaaagctaagtcttaactgctctgtttgtcattctttc

SEQ ID NO: 228725 - DNA, 385 bp, Glycine max
agcttataagaacaaaagtgccttaatcatgtctcattatgcatgggaattaggacgcatcaacaagaataaagcctaggctattgggcaagcaatcaatggggccatacacaccaaatgatcataatgatggatggctcaaattctcacaaagcaaaaatatcactttcaaattgagctttcaatactatcatgacatgtacagaataatcaaggatttcaagtcacaaaatgtcaagaacttttatattcaaaacaattacccatttcttgaaatatcctataattcaaagaataacatgcaaagtcgtcgtgccacgaaattgacccaaatatttaactgaaattccacgaacttaccactttacaacttacacatctcaca

SEQ ID NO: 228726 - DNA, 393 bp, Glycine max
  unsure (1)..(393): unsure at all n locations
tctacactntatacaagaaagaagctctgatgccacttgttatacatgtggccttacatatcttaataaggggggttggattaagatatagcaaactatttccccaattaacattctatttcaatttcaatgcacgttgcaagttcccttacaaatgaactcttaaataatgattcaaatagaacaatctgaatacaaatataaatcactaataaataaatgagttcaacggaagagaaagtgcacactcacatttatactgggttcggccacacccttgtgcctatttgcagtccccaagcaacccgcttgagagttccactatcatgtaaaatccttttacaagttctgaacacacaacgacaatccttcctttgtgtcaaatttctttac

SEQ ID NO: 228727 - DNA, 451 bp, Glycine max
agctttcatcctataaattaagtatttttgtttgttcgttcatccctgttataaattaagagtttgcttttgttcttttatgaaaaatgttaatcacaatttgttatattttatttatacttcttatgttagaaagaataatgtgttccatggataaattaagttatagaagttcgagtagaacaaaaatgtatatccagtaaaaaaaatattagaataaatttaaaaagataatttcattttaataatgaattttgaattaataattattattacagggaatcctctaaagtgcacttctcactgtaaagaagacaaatccataatagaaaacttatatttataagagaaaagtcaaatctttaataagttacataagtcaaagataacaaataatgaatgaacccataaaaataaaaataagagtgtataagaatttttttaaaatcat

SEQ ID NO: 228728 - DNA, 356 bp, Glycine max
  unsure (1)..(356): unsure at all n locations
tgcttgagaagctgcgatcttgagcttcaataaggtcattcaatggttattntcaaccatggagatgcaacgaaagataaaagagaagaggtgagaggaggtgccatccattagggaataagccatggaagaaggagcttcaccaccaagagagtgccttagagacgaagcttcaatggaggaaaagaatgagagagagagggggggggcacgaaattgaaggagaaagagggagagaagttgaactttgaagtgtgtctcacaagtttctcattcatcaaagttatgacaagtgttacacatgcttctatttatagcctatgtcactaactaaatgaaagcttccttgagaagct

SEQ ID NO: 228729 - DNA, 449 bp, Glycine max
  unsure (1)..(449): unsure at all n locations
agcttgtagggttggagggaatgaattttctatgaggtgtccatatatgcacctccatagaccattggattcgagaagtggggtccagtctgattgttgtagcaggtggagtgaatcatggtgttttggtaaaagggtccttggaagtgataacttccttcagcttctgctcttttggcataagggatggtgagtggttcttgcggtaccactaagcatctaatgaggacccatcttgactgggttggaatacattagcctcatccatgagggagtatctaaagccactatgccacctggaggcatagcctcatatgcaactaatgaagtatgaacatgattataccttttccattgaggtggagtcactacctcatgttgctgttggatgggatccagatgtgggcattagacgatctcgatcttcttgtagnagctctattgatttc

SEQ ID NO: 228730 - DNA, 492 bp, Glycine max
  unsure (1)..(492): unsure at all n locations
tgtcgaggacctcgtgngtcatggctcgtggtactcgctgtttccaagcttctctcgagctcgtcgttgacacaaccagcaagctgccaaacttctcttgagctcgtcgtgtttgtgggtgggactcgcggcttcaaactgaaccaggcaaccaccgcaccgcatcgtctggtcttgcatcgtctgaatagctccaactcatcgggaatgaagaatagggacaaacacaaaacgaaagaagcaaaatccctaaactagagtggagcagtgggcacaaaacgacgtcatatcacagaaaaaaatctccaactgaactcatgtgactcgggccagactcgggagtttacacaagtctatagtgagtccaccgagtctgctcttagtctgcacaataatgagtntgcttncgagttgactcgcaaggaccaagtaaactctttaactcctaagagtctatgagttgactctagagtttacaaccatggtgcacta

SEQ ID NO: 228731 - DNA, 451 bp, Glycine max
  unsure (1)..(451): unsure at all n locations
agcttctagtatatatagacctttatcttcaagtgttnngcgcctttaaatgaatataattctcctttgagattttttctaatgcttatggtcgttggagcatttaatacttgcattaaatgaacatacttcttcatgttgaaacaccactctcgttggctttcatattgagactatagcataaaatcacttcctttgtgctagagcaggtttgttaccacataacccgtcttttgatatcatctggcaacttctagatcttgagattcgtttattcttcatagaatttgacatacaataggtgaatgtcttgtgagacaatctatgcaaaacaactcttagacaaagagtatattagatgaagtctttgatgatattctcaatgtngcatcagatcatgacttatgtagcaccctcgaaattccttctcaatttatttttctacacgtgt

SEQ ID NO: 228732 - DNA, 467 bp, Glycine max
  unsure (1)..(467): unsure at all n locations
ttaggattgctagaccacattacagagatgtgtatgactttactttcagtgaacgaagataagtctggatagatgccacaaggattaccttgataagtctgagattggttcaacaaggaatccagagagaagctctcacaatcttatcacatgccaaaagttcctttattgaaaacgaaaaccaatacatatagtgtatttgaataaaaagataaatatagacatgagccttcaaaacagtttgggtcaaaattacaacgaacaatattataaataaaaaaagaacgtatttggcatggaccttcatccttctccacttgggcctttattcttctccacttgcgtcttcatccttctccacttgagccttcgttcttttccacttgagccttcatctttcctcacttgngccttgttaagtattcatgctaccatttgttggagggtactcactgattgtttagcct

SEQ ID NO: 228733 - DNA, 421 bp, Glycine max
  unsure (1)..(421): unsure at all n locations
agcntcctctccaagaacagctattctcgataaaatcctatngacccatgatcgttcgtgtgatcttttggttcgataggaaatcatgtgcaaaataaagtcatggtgcatctatggtttggaattatggtaaaacacttacctgtgtgagtttttatacactatgagtgattttattcccattctcagttcgacccgacgattcccctaaatgttcatttaaaagctaaatgttgacatcctgcccttcattttcggttacaaggaaaattacttttggcatgggtatattgattctcgataatatggagctctcgtgaatgatttatttttactcgctaaaacatgttcgccttttaagtggaaagaaaatcggcggaccattctgtcctgccaacaaagtttatccggagcccatgaa

SEQ ID NO: 228734 - DNA, 201 bp, Glycine max
  unsure (1)..(201): unsure at all n locations
attcggaccttagaaactcagctttagtcaatggagttaccttgaattaatgctctttgatatcccctttgagcctatgttcccctttctttgttttgaagctcttacaagccttaagtgaaacaccatgatatcaccttacccttacagaattntggagctttggaattgttctgcgaataagtgtggggaggggggggg

SEQ ID NO: 228735 - DNA, 464 bp, Glycine max
agcttctatataagctgaaccatttttctataaacagaagctgagctttactctagaaactagagttcatctcttttatcacaccgagagtgactctcctaaattcttgagtgagacaagaacaccttggctgtatcaaaggactttacaccctctgtgtgtcgccctcgctggaaagagtgattatttcctttctttcataaacacccttgttgtttcacaccacaattccagaaaaaccacctctacccacaataatctgcgggccatcactcccatttcacgccctcaaagtaagtgatccttgagcctaaattgaatttcaatacgatacctctcacctccgtttggaatctcctcatctgcagccctttaccttcagttcttgccattttatatttttgtgcagacaccactcatcctatgatttacatcccattcatctatttatgccataaccacct

SEQ ID NO: 228736 - DNA, 446 bp, Glycine max
agcttcacaagtatcctctttgataaatctttattccaacctttcaaagatagtgagaaggctaaacgaaaaattatggaacttataataactaaatccttaattgaaggcgtacgtgataaccatagtgaattactcaccaagattgatagtttacttaaggtcattccagatactacccaagcctcggaaaatactaccaaaatggttacaaaatttacctccaaattagttaatgctcttaatgaagatagtgaacccagctcagattacacaactgagatatgatcattgtcataaaaaaatataaatccgattaattccaaacactggaaaacaccctccagattatattatcaacgtccaactgcccctgacctactattagaggaaagaggtgacaacaattttaaaagctttagtgcacacaacatctatgaatgaac

SEQ ID NO: 228737 - DNA, 377 bp, Glycine max
tctttcttgagacttaactatgtcaaaagaacacgaacatacagctagctgatactttagccaaatctggcttgcatgtttaacgataaatactggatggaggaatcaccttatcagatgattccctcctttcagcagatgtaaattcctctatcttcttatgaatgatatccaattctcttctttaaaaaaatagaatggccataaaatgggaaaattgcacgacgaagtccgccatacaacaagtgacagtcacatgagcaatttagcaggaatcaaatctattagaggacacggacatgtggaggatgatgctcaatattacgcaccaagaatgagctcacgccatacgaatcagagctcattattgaatgcgg

SEQ ID NO: 228738 - DNA, 398 bp, Glycine max
  unsure (1)..(398): unsure at all n locations
agcttgaaggcgtgtgtcgcaacctaccctttggcaggagggcgacgcgtgactcacgggtgcatgttccaagaaaggaatacgcgcggagtcgccaccaacgtttatttgaggaaaacatcagaaaaaccagagaagacgtgatctacgaattctaagtgaaatgttcgtgagttgtatttacgcacggtgaaggtattagcaccccacgcgtccgtcacaagagacgacaacctttaatcaaatgtgcaaatatgacttcaatttatattcttttccctttttacgttcttatgtcttttntatgcctttntatgtttttattttcttgcgggcgacaagggcgtttccttntgctcttacgtattcctcaattgtgatgagaaaatcaaacctat

SEQ ID NO: 228739 - DNA, 492 bp, Glycine max
  unsure (1)..(492): unsure at all n locations
ntcagagatgaacccattgttcatgaacagagattcggattaggaatcaaatcctttgattaaatactttctattatttttcttaaaacgtaaattactagattggagttgttactgttgtagccggtggcatgattggtggggtgagagagaaaaaagaaaatgtaactggaaaagggaattggtacatgaaagaggagagagaaactattttatttttaaattatattacacactaaattactatattgtcctgaaaataaatgaactaaacaaataataatctttctgtcttaaatattttgatgaaagttattaattctgtttataaaaaaaatgcaagtacattagcaaatctcgcacatatattattaatatactcagtctttgttaattgaaatacataagaaccttacaccacaatttctaaatagaaaacttatcatactcctcttgttcaagtaaattattatacggatattatactaatat

SEQ ID NO: 228740 - DNA, 453 bp, Glycine max
  unsure (1)..(453): unsure at all n locations
agcttacacaagaagctaaacaagcaacttcatgttataagtcgnatccttgcaaaccaacaaagcaagacaaggagtgatagtatagaaggcttatagacttgattaagcaactcgatgtcaccatttctttcaccgatgccatagacatgatgtcggaatacttaaacctcttaaaagaccccataactaagaataagagtttgaaagactatggcatagttacttttgaagaggattgtggtgccatcttagagaatccaaaaaagctaggtgatctcgatagttttactattcctatatcaattatgaatatattagtaggaagaacattccttgatcttggatctagcatcaacctaatgacattatctctactaaacaaaattggaaaggtagcgatgaaatcaacacacatgatgatacaactatcagactgctccattacaatac

SEQ ID NO: 228741 - DNA, 463 bp, Glycine max
  unsure (1)..(463): unsure at all n locations
gtgcgggttcgggagacaaaggtcgagcgttcgttatatgcttatatgatattccgagtactggtggattggtacgaccatgctctcctgatttccagctgggaaattggcgagtggaggaacgccccggcatttacgcaacaagcataatgtaaacctttacggttttaaaagctctatagttgggcctaggctttagagttttcactttgctaaggctttgtgtctttctaaaatttataatacaaggatctttcttcatctgttcctggtctctacccattctcattcatttgcatgtttacttctttntctaanaacggcagattcgatgacgagtcccccgaaggtactaatacctgtgacccgtctatcaacttcgagcaagaaatgaatcacacggaagatgaaggagatgaggatgtgggacnttcttcggaactagaaagaatggtcgcccatg

SEQ ID NO: 228742 - DNA, 387 bp, Glycine max
agcttcgtcctcgaatgaggcaagcataacatattttgcataatccttccaaatgactacaaataggtaaataaataattaatgacagcttgattattgtttaatctaagggacaaaatcataaatagttgtcaaacaataatctttaattgtgcttataatgcggttaaatcaacagctctaacaataataataataataatactaatcatactaataataataataataataataataatactttcaatcttctttataaaaaaaatctaaataaattcattgaatcatattataagtattgtcacaaaagaagtgacatatcatatattactttcagctctttatataagaaaaaaccacataggtcactctttggccattata

SEQ ID NO: 228743 - DNA, 352 bp, Glycine max
aactaagcttgtaactatgccaagacagctgagcacaagcagagatatgggaatgtgtattccacaagtcgaaccactttcccttgatgttagtctaattttactattcagtgaagcacctatggtcaaaagctcaatggaattccctcaagctcttgatcttcatatctctctttggcccttgatcctgcaccaacttgtcaatactctccatgcctagtttcatgttcaccagaacctcattttctttttccgatgatgattctgagacgcttcttctccttctgaccaagtaagaattgcacttgtcccttacccatttcctgaaactatatctttcacatatcttcca

SEQ ID NO: 228744 - DNA, 432 bp, Glycine max
  unsure (1)..(432): unsure at all n locations
agctngacactaagctctgtttctctactagttttccttatacagataggcaaactgaggtggtgaatagaactttatctcaacttcttagatgcttggtaggaaatagtttgaaatcttagcaggattgtttacctcatgtagaatttgcatacaataaggtaatcaactctaccatttctcattctccttttgaagttgtttatgatttcaatcctttgtctcctcttgatttgattcctttgtctaatgttgattctatgttgaatagagatggattctcctaatcctattttattaggaactttcatgagaaaatgaaggctcaaattgaaaagaagatggaacaatatgctaaacatgccaaaaagggaaggaagatggtgttgaacccgatgattgggtgtgggtgatataacacacatcacacta

SEQ ID NO: 228745 - DNA, 494 bp, Glycine max
  unsure (1)..(494): unsure at all n locations
ntntgactcctaattcnttggaacttgcttaactcttgattctttggcatcatcaaaataatcttggaagtcattgcttccacagttatcccaacaaaacccaccaaaatccactaacaattatatttcaaaaaataattttttaactgttttgcagatggagccggaattntgggacaaaaatcccttcaaggccacagctaaggcatttccacaaggcttccatttcagaccttttgccataaataaaacaagaacattttatgaattcatattgatagacacaaactcagtgtctattaaacatttcaaagaccccaatgatccaaattcgaatacacactcaactatccaaattttaaaagttttacaacctcaaaattntgatgcctggactaatctattttggcatcaaaacaacaagtttaagcacttctgtgttgattactnntaaaccaatacnaattataactnntcgaattggttctcaatgg

SEQ ID NO: 228746 - DNA, 140 bp, Glycine max
tagttgggaagcaatagagaagcggggtttatgtggatatttccaaaacaggaatcgtgaaaacatttacttcatatcgagatgtggatatactactcgatcctaggtttatctcacgtcgccttttaaatgagaaaacc

SEQ ID NO: 228747 - DNA, 456 bp, Glycine max
  unsure (1)..(456): unsure at all n locations
agcttgcttgtggagcttctatgaaggctggatctttgagcttcaatgaggtccttcaatggtgattttccaccatggagatgtagcggaagacaaaggagaagaggtgaggcgagccgacatccactaaggaataagccatggaagaaggagcttccccaccaagaatgtgccttggataagaagcttggagaggatgcttcaatggaggaaaagaaagagagcgagacagagagagggggggagcacgaaattgaaggaagaaaagagaaagagaagttgaactttgagagttgtctcacacgactctcattcattaaagttaacacaagtgttacacatgcttctatttatagacaaggttccttgagaagctctcctgagaaaacttccttgagaagcttctttgagaaacattcttgaangttagagctagctaccacaccctctaatact

SEQ ID NO: 228748 - DNA, 329 bp, Glycine max
  unsure (1)..(329): unsure at all n locations
ctcagcttggtaaaccttctggaaaagaacttctgtttctctacgagacttcgtgcctctccggaagacttcttccagaagtctgaagaaannnncnnnnnnccccccncncccactnnccccccccccccccccccccccccccccccccccccccaccccccccgcccggcccccaccgcccccccccccccccacccccccgccctcccccccccgcccctcccccttacctctccctcctcccccccttttctctcctctccccccctccctccttcctcccccctccccccctccctccttccccctccttctctccccctccc

SEQ ID NO: 228749 - DNA, 389 bp, Glycine max
  unsure (1)..(389): unsure at all n locations
agcttctcctctatgttgctataaatagggggaanagcgaagaagaatagggttcagccccttaggcacttctctctctcgaatttgctgaggaaaattagttccgtgaagaaaatccaagccgaggcgcttccgtaacgtttccgtaacgtttccgtgagtaattacgcgaagattctcgaccgttcttcaagattcatcgttcgttcttcgttttcttcagtcttcaacgggtaagtacctcaaaccaagcttttcaattcattctgtacccatggtggtccacattttgttgcatgtatttttattattggtctcgtctactttntatacccgcttttgacgtgcttaagccatttatctaagtcatgtcttgcttaatctaaaac

SEQ ID NO: 228750 - DNA, 477 bp, Glycine max
  unsure (1)..(477): unsure at all n locations
ngatagaagccacatggttgacttttcaagatgacgggctcaacataaaggcaaacccccttgctaatcatggagggggagctgttaatgccatcgaggtgagtaggtcgcacaagcccaaacttttgaaggacgtaacgacctccagaaggtttatttacgaagctttgcaaaaggcgggcgtgattcccctcggcgaacacaaagaggattcatgtttaatgcatccgggcgtactgcatgatatggaaacgtgcccagcgataagagatctattacaacaaatgatagaccaaggctagcttgaggtcagcaatgagggggaagaggaacaacttatatgcatgcaatcggcagataatgaaggtcctaaaaggcctaaacccttggtaatacacttcaccaaagacacggctccccaaatgcctcgacacccctcggcagtgtctggtggtagccctattccattctcttaca

SEQ ID NO: 228751 - DNA, 311 bp, Glycine max
ttacatcgactgcggcatgcgacctctagccaatggcgtacttgaattattcctcggaggcccttggagcgctgatccctctccttgcttcgaagctcactacaagccttaagtgaaaaaccatgatattaccatatccttaaggaatttaggagcttcggaattgatttgggaataagtgtggggggtttttgcttcattggacaacgtgttttgttggctatgcttcatgatgtattatgggccatacttgatgtacattgtatattggttaaatgatggacatgctgaatgaaatgttgtttctcaaa

SEQ ID NO: 228752 - DNA, 405 bp, Glycine max
  unsure (1)..(405): unsure at all n locations
taacacctttgctngatattcaccatattgcttataacatggagcgtatatatgatttcgcgtattgtgatggcgatatcattccatcatctgaagggatattatatgaatatcgcagtggccctcaagtcatcacaataagtgaccaaatgtcgcttgatgccttaaggaaaactattgttgacaccatcagaggttgcaaaattttacttgatctttttaccgcacaccaatctgtgttgttgatggctgtgttgaatataaatgtatgaagctagaacgtgacaatgatatggggaaaatatttttcatcttttcagacattagtagaacaggtccaattaagatgaatgctaattttggtcgatctccaaatgaaatccttgccttgctgcgcacacaatg

SEQ ID NO: 228753 - DNA, 460 bp, Glycine max
  unsure (1)..(460): unsure at all n locations
agctnagatgacagatggaaggtatccctatatntttgatntcttctcctttggacttgtctctcaatattggttgcatgcttcttttataacaaaagaattgatttcatgaacttagttcagcttaaatttgaaatatgtatatctttattttgaaaaccatataggggcaaaccaagacatcatagttgtctgaatgcttctgtgtgttcacttggctatgtgacatgcttgtatgcatgcccatttatatctgcatacttctatgcttgtgctaaactgatagaacttgtatcacagtagaattttttgagttccttatatatcagagacagttcctacataccttattttaagagagagactgttaggccaggaactgcagaaatcganagtgggcttgagattgaatgacccaagagtcttggaagttacaatataatggataatggagtaatga

SEQ ID NO: 228754 - DNA, 311 bp, Glycine max
tttattaagaccctattgtgatcaatcacgtgaagaattctttttatacgaccaattggtttacaacctgaacgagttctgcatgcatgtctaatgaaaatatttacgacatcaagtcacgaatactgattccacccgtctacgagaacttcacagaattcgtacaaaggtatgtactgatttcgatgaggaagattaagacgtacgttgaatactttaatgatctgactgaccaagaaggcatgtttattaaaactatctgaatgagtggagaatgactctcttctgttacttgagacatatcttgcagt

SEQ ID NO: 228755 - DNA, 455 bp, Glycine max
  unsure (1)..(455): unsure at all n locations
agcttgttgagaatcagtataatntcatgaatcatcaccccaaaaactgcagaatcacatagaataacttttttttggatttctagtacaaatgagaataaaaattaagattaaccaaaatcatcacaacatattataagaaaaacaagatgaagatagaacaaactggataatcaatcacacacacacacacagttatattttgaagggtcataacttttcaaagcgtttttttgaagtgtcgttactggtaatcgattacaagcatctgataatcaattacaagattcaaaattcaaaattcacaaccctcttgaaagcttacttgcacacttgtcttctggtaattgattacactgctccgataatctattaccaatgccttgatttgttggaaataatgtgtntgaggaaaaagtgatcaaccaatgatattcttctaacatatattctat

SEQ ID NO: 228756 - DNA, 147 bp, Glycine max
aaaaaccagctgtccatctagcaacagaagatgagactggcaatttaaacacaacccgcaaaaagcgactcacccaaagatgacataacaataaatgtcagccagacaaacgactatcggaatgccatcatcaccatacacacaaag

SEQ ID NO: 228757 - DNA, 465 bp, Glycine max
agcttcatgaggaaatgagaaccttataatctactttagcaaaacttttcaatggaactaataatcttaatagacttttaggatagtgtagaagttcctttgacaaatctagaaatggatattgttagtgcttagctctactgagttttaaaagattggctaagattttgttaaaacataagcacttagacaatgaaggaaagctggagttgctgcacatgatgtccaacgttatgtcaaggaataagatcgggctgcacaatgcacaaggcaagataaaatgtcaaatgaagaattgaagctgcagaatccacgatgtcggatacaatgtccaggacatcctgcccgaaaatactggagttgctgcacaatgcacaaggcaagataaaagaagtgaagctgcaggatccacgatgtcggatacgatgtccaggacatctggcccgaaaatactggacatataaa

SEQ ID NO: 228758 - DNA, 440 bp, Glycine max
  unsure (1)..(440): unsure at all n locations
tccatcagtttgttggagtataatttagtaattggactcaccctcagttctaattctgctagagcattagacatagaagggacagtttgtgcttggatatttcattttttttggttattttgaaaaatatctatttggattttggattatgacattcatggcttgatatcttcttttctttttcaattcaccaagacaacgaanagcagcagttctttntatccttcctagaatattctgaccatatacttttctttntcaattcatccgagtcttacgaagattttcttagtagttgggaggtattattgtaggtggagtattatttcagtgatttaaacttaccaccatcattntatggttaatgatctagtatacaacaatttcaggaagtttactgctttgaggcatatgacaagcaccatcacanattcttgtct

SEQ ID NO: 228759 - DNA, 467 bp, Glycine max
  unsure (1)..(467): unsure at all n locations
agcttggaggttgataggagaatcagtaatgcactatgcagngaatcagaagataaggaagaagatattgagaaaacactaagtgtaataattgataaatgcaaagacatttgtgcagataaaagaaagaaagcaatggggaagaaatctatttctttccttctgaagaagatctttctttgtagaagtggatttgctccaacaccaagccttagagatacccttcaagagtcaagaatggagaaggtacccctttgttttagctaataatctttcatttgcctaagtgaagaaattattgtatggtctgagatcaccatgtgacaagtagtcgagtttttcaagttttgagagagttaataaaacttcgttatgtgtcacataaaaattgacgggagctataaacatgtggtggtctcataccatagattaatttctagattaggtgctattccagtttctatgct

SEQ ID NO: 228760 - DNA, 469 bp, Glycine max
  unsure (1)..(469): unsure at all n locations
tctggttatattcagcattgtgaataaataatttaaaatctaatattttctgtaggctctgattcggaagtgggcccctgttgctattgtttttggagttgtcttcgtacttttctggatcaaaaataaactatggtgatcgagctcagtatgaaatttaaaacctggattctgtggcttcttgcttttctcacatgattatccagaattgcacagattggtgggaaccctttatgcatgagatgatgtcaactntttcttgacaacttcggtttagaaaaaaaaaaaagactatcctttgttacatctggatcagtctttctggaacaggaaccttttgacctttatagtaaggagccaggatatgagaaaactttatccccgtggggatgcatgtaggcatttcttctttatacttctcaattattttcaggattattgcgttaatgaattaaatatattacctctt

SEQ ID NO: 228761 - DNA, 90 bp, Glycine max
agcttgaaattgaacaacggatgccctcgataatttcatatggccataaccatgacacactggaagtactgatatatcgcgctagacata

SEQ ID NO: 228762 - DNA, 318 bp, Glycine max
  unsure (1)..(318): unsure at all n locations
tctcgatatatgattcgcctgaatcgaacttccgtttcataatttatgaccatatgaatttctcgagactattcgttatacaaattcgagcgtctcgatttattatgtgcctcaatcggacctccgtgtaataagttatgaccatntgagtttctcgagagcttccgttgttcaatttcaatcttctcgatatactatgcgcctgaatcggactcttgtgtgacaagttatgaccatatgaatttctccagagcattcgttgttcaattaacagcgtctcgatattntatgcgccctaatcagacattcgtgtcacaa

SEQ ID NO: 228763 - DNA, 353 bp, Glycine max
  unsure (1)..(353): unsure at all n locations
agctntccatccatgtggatgtgaaattattctatattatcttcgctccaattgagaaaagatattttgtttgaatgtgtaactctgattcactcttcatcccagatttgaatgattttttaattagctcaatgctaatgataggagaatcttcttgccttatatctcatttctattgcgcaatgcgatggaagaatctttgcctttatatctcatttttatcgtgactgtgatgaagatttcctataattaacttggtcgaatagtgcttcatgcatgattttacagctgatgggtcctatttattatagagatgcttgaatttgaaagacgcttggaacaatgtctttttt

SEQ ID NO: 228764 - DNA, 428 bp, Glycine max
  unsure (1)..(428): unsure at all n locations
tgaagtactcaagggatctgcattaggtagatcgagcaatatttcttgcanaatatcatatcttgctgcaaattcagaaagactgaagcgactgagcatacatataggaagtggggctgtgatctaagaaggagaggttgaaagctcgagagaactgtcatcacttgagcatctcacaatatcatggggtgtgtcagacacaaggtacggtgatattccaatcagtttgccttcagagttaaaaatgttgcaacttgaaggctttcctggagagaattttccagaatggttgaatattcatacgaagctatccagacaactcatgtcactatctacgatatggggaaaacttgaaagtatggatattctcacatatcgttaccacgacatggggatcctangtctcaagcatttgattcttgacacac

SEQ ID NO: 228765 - DNA, 359 bp, Glycine max
ccttccacccatagacggaagggagttttatttctcagcgcagagctgcaatcttcgaagtagtccaaggctaaagctttgctaaccagtaggcatgtgatgtcaaaagcaaagctgctgtataaaatgttctaagagactcaaaatactaatctcctttggttgatattgctattttctaacatctcagtaaggaataccaaagcattatacttccctttatcttatacagaatcatggttgttatataaacttacctatagcgtgtaaacgtgttcgcatactaacatattgccggcgaaacttacttgttttggactatacgaaaaaagcagcctgcataaaaagccattgtggag

SEQ ID NO: 228766 - DNA, 224 bp, Glycine max
cgtacacattatacttttgtgaagtcccaaaagctggcctaaccgcaagcggttattatgtcaacagtaacctctagtgtctcattctcgcctgtgaagctatagaatggaccaacatgagggtggacaatggttcgaccgacttcaagcctactgacagttctctaatgaatgaagttaaccgatcttccttgtctcatgacgaacttggacacctatacgct

SEQ ID NO: 228767 - DNA, 374 bp, Glycine max
  unsure (1)..(374): unsure at all n locations
tcaagctctacccttaggctgctcaccatggtgctcatgttgctcctcctatcactaacaactattttcacacttagagaaaacaatggaaagaaatagatcatatggtatagcaatgaacccaagggagataccaaatttactagattatgtccaaaataacattcgcatttttccaaaatcttgatttagcttaagtaaaggtcttcgaaatccttcctgcgctcgataattactcccttgtaccactatttatagacttgaaaatgctcccnctgctcacaaagctacttttgccaaaatttatcttggtgactatcacaaatacccctaaatacttattcttgaggaatacgtggattgagaaacaataa

SEQ ID NO: 228768 - DNA, 443 bp, Glycine max
  unsure (1)..(443): unsure at all n locations
agctngacttctgtttagacatgatcgatatatgactngggacttgtcagatttgatttgtgcaaaattggatgagggaaagtgtgattttcgaaatctgcactttatgcagaattttgctgtgaaatcgtgcagcagaattttgcataagtgcagaaaaatactatgttttgctggttgtggaaagagtgaggcacaatgagatctggatgtttgctagcagatcccaacggtcaaaatgtaggcttatgtactagagacttccagtaaaattttcgagtcgatccaacggttaacgaattggaacgaacgaaatgttactgcggtctttaagtgagacaagctgtgattttggttggcgttttgagcagaagtttctgcccttgccctgttttcttggctgtgatagttagtgttgtttgaatgttgaattgcttggatgt

SEQ ID NO: 228769 - DNA, 413 bp, Glycine max
  unsure (1)..(413): unsure at all n locations
ngagatgaggaagtgtagaagggtgaaactttctgctnttattcgttgaccacagagtggtacctggagatatgtcgcggnggtcaggagaccttgnggacgtcaggtggggtgctattgcccaaaaccaagcttgaccaatcccgacccaacccgggcatagtcagtcagtgagaacctgtgatgtacctaaacaggcgagctcctggcagtcaacagataaaaggaacaaagaccacaaagcaaggaggcttgtggtggttggccagctgtgaatcttgtgtgatatatgggttatggcctctggtaatcgattaccaagggtgggtaatcgattataaggcttacaaatgaaaacaggaggctaagatggtctctggtaatcgattaccaagggggtgtaatcgattacc

SEQ ID NO: 228770 - DNA, 474 bp, Glycine max
  unsure (1)..(474): unsure at all n locations
cgtcccggatccttaagtgactgcggctgcaagcttnatctagccaagtttatacgaatgtgtttcaagagaacctaacgattcctaattatatgggccatcaaatctatcatgtgctgacagtaattgattaacccatgaatttcctcgggggcagtacacacttcggccatggcttttgctatggctaacagacgctggaggtcttgacttccattcaaggtcaaggcgaacctatccatccacatagtcgcttcttgatgcaacgcatcaatcaccctccctcttgcttctttttcggcatacacttgtgcaaaatcctccactagcttttgtcatgggccatggactggtcaattccttcttgtattgccctatgatagctagcatgctttgctccgggcttccaagtgttgaccaaacctcctttgaccttggcaacaacttaatttctttaatatatgcatgccccgg

SEQ ID NO: 228771 - DNA, 470 bp, Glycine max
  unsure (1)..(470): unsure at all n locations
ntggccttggcctctcttatcttcctctctgtgtgattctttatccgagccactgtaggatnttcaggcggtggacaaactgcatagtcttcttctatcggttcccaaagatctagtgcttcaagatgggtagtcatccttgcagcccataggtcgtactcctcaccatcaaaaactggtggtggtattatgtgtgttgtgtctgcttccattatggtttctctcaactcacagatccctcaagatgatgactctgataccaatttgttgaatattagatcaaaaacagagaagagcacatatatttatgaaggatacatagntgctattcatttgctcttggttagagctaaatatacaaaacacaaaatccctaggcatgactaanacagtttctagtctgataaaaaacanaatcagaactcctacaagatagagtctaagcaacagacaattttataatttaaaaa

SEQ ID NO: 228772 - DNA, 445 bp, Glycine max
  unsure (1)..(445): unsure at all n locations
agcttgaggaagaatccagatgaatatgtattttacatgttcgctaagcacaccactttatctcactaagcgcatagcttcagttcatccgctaagcgagaaatgtgcgctaagccaaaaatcactaacgtgtgctaagcggtccataagtgcgctaagcgcatgagcacaaacaaggccacctatttaagcctgaaatcagattttagaaggatattttggactgggattcagagctttgcatgtctagggtttctagagagagaaaagtccaagttccagagagttttgggagattttgctttgcaaagatctgcagagaccagagcttgaagcaggagccagtttgagagcttgagatgagttnttgagtgattgtgagatcctagaggtgaaggagacatcctcactactnttatctttgcaatctgtcatcttggccttc

SEQ ID NO: 228773 - DNA, 472 bp, Glycine max
  unsure (1)..(472): unsure at all n locations
gcttagttaagttagtctaacctatgttggctctctaaattgagcctagnccaacaagagggatctgaggacgaagcattgattgattcagtcaaactacggatcgaggattagtaacttatgctacagaatagaacacaaaagcatgattgattagagaaatatctttatatgcttcagctggtctgttagaaagacccaacatttctacctactggctgtcaatttacttgcactttttaactgttttagcctggacttagtttaattctgttttaaatcatcaattatcaatgtttctttcaacaatgccttatatatgacattaaccatgtcttatactagatctgtgagttcgatgtaaccctgtcaacaatgtttctttctgganaccagatttccttgacatattgcataaagaaaagtggccgaaagtattgcagggaaatctaagcaccaagtgcagtggcct

SEQ ID NO: 228774 - DNA, 458 bp, Glycine max
  unsure (1)..(458): unsure at all n locations
agcttctattgacagccactcaagacatatgtcctcaggcttccctcctttgacctacctcaaagttgtaaaatcagcacacatgtaggttaggaatgaaaaaaaactgtcaagaattagtttccatagtctataagtgcatatacattcagctaaatttacctcaaccttatttccccacatgtggacctcatatctcaggcccatgttatcaccacaccaaatgggagtccattgattagcaaaatgaatntctttttctagtcttttatattgcactggacataatggtccaggctttccagaaagtttaaccttgcgagtagccatggttctcatgatataactcctaatttcttcaagcatggcgataataggcttgcatctatactgcagaactctggaattgaatacctcacatgtgttgttgcatatattggccactctgggtattgact

SEQ ID NO: 228775 - DNA, 471 bp, Glycine max
  unsure (1)..(471): unsure at all n locations
tgcacagcaagctgcaatatatgtcattacgctgatatgcaacgcgcagtgatgcgagttgtcctcgatcatgatgctgcgaagatgaaggggggcacgtgaagccactcacactgtcgcaatcattgcattccctcatcgatcaaggttacgcgttacgcccctacctatatataaggtttccattttcaagccactttttcattttaactttctatttccctattgctttcaagtttctctggagtgccaaatatggtgaaaattttccttctcagcgatgttggtgcaacacgttctgacagatcatgatggtggttcacagctagtgtggccattcatcatacaactcacaaaatagaaaaggacgtccatagaaaacactcatattgaatgaacaatgatacaagatacaatgtcaatcggaaangagatatatatatatatatcttatcacgtaatatagcactc

SEQ ID NO: 228776 - DNA, 461 bp, Glycine max
  unsure (1)..(461): unsure at all n locations
agctttgaaatataatatcttgatgtttaaaatacccattttctctctgatgtgccattattntctcctatttcttaaccctttntgcaccattttaagtactgattagtcttaattgtcaaattaattagacagttttattatttgggcccattaagctaatttgatgtttttaatctaatttcaggaattaatgaagcattgggcttgaatccagaattgggcttggacttgaagagggcagattattttattctacaaaattagatcttatcttatcttatcttatctagatattatttagatttgatctcatctagatattatttcatctagatcttatcttatcttatctagagtttattttattttatttatgggcttggattaaaacagatttgtaagcttcggcgctgaataactatataatagtaccaaggctctagtttaggccctctctc

SEQ ID NO: 228777 - DNA, 506 bp, Glycine max
  unsure (1)..(506): unsure at all n locations
ctataaaactaagctntcacacatccaagcaaaacaacattcaaacagcacatgttatcactttctagcaaaacagagcaaaggcagaaaactttgccaaaacaccaaccaaatcacagcttttctcacttaaagaccccagtaacaattccttcgatccaattcattaaccgttggatcgactcgaaaattttactggaagtctatagtacatgaacctacattgtgaccgttgggatctactatcaaacatccagaactcattctgtactactctttccacagccaaccacacacaagcattnttctgcacaaagccaaaaccctgctgcacctattntgacagcaaaattctgcataagtgctgtcgcaacctacccttcggcgggagggcgacgcgagactcgcgggatgcgtgttccacgaaaggaatacgcgcggagtcgcaccaacgtttatttgnggaaacgtcganaaatcggaaagacgaatctacaacttttagt

SEQ ID NO: 228778 - DNA, 439 bp, Glycine max
  unsure (1)..(439): unsure at all n locations
agctnttctntgtgggttgatgggttctgtctcgcanaatggcatgatcactggctgacatactctcaattagctcagttgcttcttccggggtcttcagctttattnttccccttgcataagcatctatcagttgcttggtttgtggtctcaacccatatatgaacatattcaattgaattggctcaggaaacccatgagtgtgagttcttctcaataaacctctgaacctctccaatgcttcactcagagattcatcagggaattgatgaaatgaaaagattgcagctttcccttccaaagtcttggactctgggaagtatttctttagaaactttntaacaacttcttcccaggttttcagactgttacccttaaatgagtgaagccacctcttggcctctccttgcaatgagaatgagaataggctgagtctaat

SEQ ID NO: 228779 - DNA, 423 bp, Glycine max
  unsure (1)..(423): unsure at all n locations
tcatgataatgaatcaagactgattcaagacgttntgatgatgactaatatgatgacaaaaagcccaaagaatgatttcaagattaagttcaagatcaagattaatttcaagattcatcaagaagattcaagattcaagaataatcaagatcaagattcaagactcaaagattcaagaatcaagagaagacttaatcaagataagtattaaattttttttcaaaacattgagtagcacaagaagttttcataaaatcattacctaagagttttactctctggtaatcgattaccagaatatagtaatcgattaccagtgttttaaaacattaagattntcaaaattcacaatgaagagtcacatctggtgatgtgtaatcgattacaccttggcataccctaatttcgtccggggattattac

SEQ ID NO: 228780 - DNA, 413 bp, Glycine max
  unsure (1)..(413): unsure at all n locations
agcttatcacccttatcggtgattaagattttgctttaatggaagacaagagcatganagtgcactaatatcgttaactgttcagtaggttcttgagcgcgttggggacattaataatatcgttggaaagacctaaaagacggaaaaaaaattaaaacttgcatatggaagaagaggttgatattatttgatcttccatattggtttgatctagatgtcaaacattgtattgatgttacacatgtggagaaaaatgtgtgtgatagtgtcattgacatgcttcttaacattcaaggcaagacaaaagatgattcgaatacttgtcaagatctagttgagattggcatatgagatcaattatatctaaggcctgatggtaagatagcatctttgttctagcttgcatactttgc

SEQ ID NO: 228781 - DNA, 408 bp, Glycine max
  unsure (1)..(408): unsure at all n locations
tattcctgtannaaaaattattagagataaagtttagatatttgaaatattagatatgtcctgctatttaatatctatcagttaacttattaattagttctatcaaattctttcaattaaattaactatatcttataagctttcagctagtttccaactttttaagtcctaatttatagttcataatcttttagctagctcataagcggttaactaacttataagctttatcaaacatagtcttaacctaatttatcgcatgtcaaattcttttaaatcaatcaaatttttattttaggaaataattaagttttttgaaatatatcaaacaatttaaattcatagatggaaaaaattggatcattttacactttctataataaaacccctttgttgtcatggataatg

SEQ ID NO: 228782 - DNA, 330 bp, Glycine max
  unsure (1)..(330): unsure at all n locations
aagaacaacagagtatggacgttcattgaagctccaaggacatcaaatcatcggttgtaatgcgcttacacgataaagattggagcacatggaaaggccgagacctataaagctcgccttgctgctaaaggatatcgccaacacgaaggaatatattatgacgaaacattttctcctatggcaatgctcacatcaattcggattctacttgcaatagcagcatagtacgactatgagatatggcacatngatgtgaaaacaactttccttaacggtgagttgaaagaggaagtgtacatgacacaacctgaaggatcacatcattggctg

SEQ ID NO: 228783 - DNA, 409 bp, Glycine max
  unsure (1)..(409): unsure at all n locations
cttaagtcaccgcggctgcaagcnttgaaagggcatccaaagtttgtctttcttctgaaactcactcttgggtggttccacttcctatgaaggatccctcttatgtctctcaaacaaatccccagagaatctgaaggtttcctattggtgacttgtgactgcattggacatgtccactgaggaagctgtagatgaactatggaatctgaaggctctaaatagggtgtgcacatagtcatatcgctatcaatctggtgctcgtatagatacacattctctgggaatgggttcttcttgtagggtttcaaagaatgaaaataaagaaaggggattaccttcaatgaatgctcaaggaaacctctaagcatttgttaggttctcttcactgaactgaattctaacttctcaa

SEQ ID NO: 228784 - DNA, 470 bp, Glycine max
  unsure (1)..(470): unsure at all n locations
tccatcaatatccatgacatagaacaatcagttataaactgttaatgattcacctttattgtcatgtntaccgctttccatagtgctttctttntagaaccatcaacaaataatagagtcattttggtgggctttaggttaaggcgactaatcttctctaagaaagaataaggcatgaggttacaactcgcgcctaagttaagtagtgcatgatcgatagagagatttcctaatgtgatgggaagtaaaacatcccttgtcctccaaatgtttttcaggtcttacttgatgtagcacatcctatgtgagtttttcaataggtggntccttcttcttcccttgtagcatctccatgtatttcttgaattttccatcctcccatttctccttgcttatggatgtgtagctaataaaacaaacaatggagcttaaatgacgatccttgcgttgaagttgtgctgtgcttcatc

SEQ ID NO: 228785 - DNA, 417 bp, Glycine max
  unsure (1)..(417): unsure at all n locations
ggatcttaatgacgcggctgcagcttagatggccagaagatttgcattatttntaatcatnatgggcatataaatattgcgatcatgtaagaattgtttaattctgtatccctcttgatttaattagtgctccgggtacaatattttttgttaatagtaaaaatgtgtgttggaattggcttcacacatttttgaaagcaaccagttgaattttgaaaggaacctagtcaagaagtaggctattcactaccggccatggtgttcttcataccctgtcctactaactttactcaagttaattttgaattttgataaatttaagtttcagaaattatatctagcatacttgtagatgaacttatattatattttgggatgttgccatttgcgcgaaattctttattcattaagaaaata

SEQ ID NO: 228786 - DNA, 450 bp, Glycine max
  unsure (1)..(450): unsure at all n locations
tgagccttaagcaacttcttgtgaatgaattgtaatgctttctccttgtcagntatcatggtatcaacagcatcgatattcgaagttccaacaaggtatgccggaaacgatggtggtttacgaccataagtaacttcatacggtgtaacacccgtggccgaattccaagaagtattgtgcgaatactctgcccatgccagaaattttccncaatgggagggcctgtgatgcacgaaagaccacaaatgttgctcaacaatgcagcttaaaacctctggttggccatcactttgtgggtggtaagccgaactcatcttcaattgagtaccactcaaacggaacagctcttgccagaactttgtaagaaataatggatctctatcagagaccaaactcctgtggacgccatgtaacttcactacaagttctgacaataatgagggcacatta

SEQ ID NO: 228787 - DNA, 463 bp, Glycine max
  unsure (1)..(463): unsure at all n locations
agcntttgttgtgaattgtgagcgtctctatatactacgggacacagtcggacatcccagtaaaaagttattgtcgtttgattttgctcagagcttctgttctgaatttccagcgtgtcgatataccacttgtcacaatcagacatccgagtaaaaaattattgtcgtttgaatttgctcagagcttttgttttcaattttgagtgtctcgatatattacgggattaattcggacatccgagtaaaaagctattatcgttagaatttgctcagagcttctattttcaattacgagcgtctcgatatactacgggacacaatcggacatccgagtaaaaagttattgttgtttgaatttgctcagagcttttgtcttgaattttgagcgtcttgatatactatgggacacagtcggacatcccagtaaatatttattgtcgtttgatttgctcagagcttctat

SEQ ID NO: 228788 - DNA, 421 bp, Glycine max
  unsure (1)..(421): unsure at all n locations
nntacagcagatttagtaatgacccactaacctagaatttatataacttaatgccattaacctagggaattaaaacaaactaaatggctgagtgtaactgaaattgttggcaaccaaaagtcacccccaacagccaacaagtcagccaccatttggtctcccaaaaggctgatgcctaggttgccaattgggcccttattacaacttgaactaaagcccttttagttgattaacccaaaacatatttttggtcagccaactttacaaggattgngccattatttagacaaactaaacactctaaaattgaaataaagtggtgtcatttagtcctccatttgggccatgatacaactcacaaccttggacttttctccttgaaactagngcttgtattcaaatagtatggacagcactttgt

SEQ ID NO: 228789 - DNA, 453 bp, Glycine max
  unsure (1)..(453): unsure at all n locations
agctntaaaatttgaattgaaacgttcagaaactgctggtaatcgattaccatatatgtgtaatcgattacacagtgcaaattttgaattcaaattttaatagttgttgtaaatcagttttggccactggtaatcgattacatcctctagtaatcgattaccagagagtaaatttgttgaaaaagactttttaacttaaatttcttggccaaaccttttgctacttcaattggaattcccttcctttttaatatacccttcctaagactctagagactgtcttgatcattcatcttgaatatctttaatttctttgtcttgaataaagctttgagaagcgtgtgatgtgatcctttggcatcatcaaaacatttagcttgatcctttgtctacatttagcttgatcctttgtctacaatctcccccttnttgatgatgacaatcccttgaaat

SEQ ID NO: 228790 - DNA, 489 bp, Glycine max
  unsure (1)..(489): unsure at all n locations
tgtctcagcgtttatgcgagacagagaccaacatgttatctatcatcgccaagtaccaagaagagttaggtctagccacggcccacgagcatagaatcgcggatgagtatgcccaagtatacgcggaaaaagaggctagaggaagggtgatcgactctntacaccaagaggcaaccatgtggatggatcggtttgctcttaccttgaacgggagtcaagaacttccccgattgttagccaaggccaaggcgatggcagacacctactccgcccccgaagagattcatgggcttctcggctatcgtcagcatatgatagacttaatggcccacataattagaaatcgttaggaaacttgtatggtctctcagaccttgactagatatgaacttctttntgaaatanaatgaagtggtcccatgtttctacttcaaaaagcttgtgcaaatcaaatcactcctacatctcatctctagcatgcattttctt

SEQ ID NO: 228791 - DNA, 468 bp, Glycine max
  unsure (1)..(468): unsure at all n locations
agctggttccacctaaatagcataggttcttcattggtaatcagcctaggcgatggttgctaatttgttaatctctcccacacccaagtttggatcaagtagtaaaagggtgaccaaagagttaactacaattccaattcttcattaccagtcaaataaactattgttttcttcgatagaccaaaattattttatatgtgggataaaattgttggtcacaaagctgattctcaccagcaagatgaacaacaataaagaaaacaaactttctcaccaacccactaggagagaagccaatcattgccaagcaagttgcaagggatgtttcatgctcaatttcactctcactattgacaaaaatccatccatgctaatgtttatataaaccccactcttttnactccttggagatngatagtggcctgatctattgatccatctattgttcaccttcatcatttcctagta

SEQ ID NO: 228792 - DNA, 473 bp, Glycine max
  unsure (1)..(473): unsure at all n locations
ggtatagtgtgcataaagatatagataaagggaaagcatacttttaatgctaaatagtatgatgaaatggtaccacgtacatttcctgtaacaactgttaaagtatccttgatactatgttttgagtatagagataataacgacaagctcttatcagcccaatgcatgaaataatttataattaggcagtttatttaatatcacccgtgatatatagctgattaataattntactgctaccagtgatttctttactagaagactattaagcttcatagattaataaaggttntgaatgaaaaataaaaggccataagctgaattaatctgttcattcttagaaaacaaaanaaggtacatgaaccttacaattccaccatttggtgtttcttcccccttccaatcctacattggatctcatgacaaccttgagacatcttacatgacattcgcaccatgtttcagaatataat

SEQ ID NO: 228793 - DNA, 450 bp, Glycine max
  unsure (1)..(450): unsure at all n locations
agctngaacttctggctgtgcaatactagtgaaatattgcggcacaatacaacttacataatcctccaagggtactcttcttggctcttcagccatgattgtatcttcaactggttctatatgagaatgccctgcaatagaaaacactagaagatgcctcggaagagcgaggttcttcttctggagttgctgttgcttctaaaccctgcaaaaaagaattgattctctctgaattatgccttctacaggtggcgttaatcttcaaatcaacgggaatcaaatcacctgcagtagatcttctgtgcatacaagaaaactgaacaaagattatccatttcaaaagaacaatgaatatacgagtactataatatgaacaataagaatcaatgattatatgagaataattcaagcaatatcgataactgactaactcttttaatctacttcccg

SEQ ID NO: 228794 - DNA, 458 bp, Glycine max
  unsure (1)..(458): unsure at all n locations
tatcanataggatcatggcttatccactagcctcgcttcctcctccttcttctccttccgacgcatcagcttcaccgtcagccgtgaagcagacacgcaaagcctcatgtctacgatccttgtctactagaccacctggtgctgagagaccagtggtccatgttgatcctactactggcaaggccgacgatccccacaggaagaaattaagaacatatttgaggattgtggcatgtgataaggtggacgtcacgtacaagaattggaaggaggtccctactgctcataaggacttngattgggaggatattcaggtatttctcttttcttattngatgttctttaattaaccttatttgggaggatacattattgtaccaaataaaccttatttgctattgtcagacggaatttgaaatcttagaggcttctaacagtangacgaaaaagaagttact

SEQ ID NO: 228795 - DNA, 496 bp, Glycine max
  unsure (1)..(496): unsure at all n locations
gagacacctgaggcatgcaagcntgaaattgaacaacggaagcgcgggtgatanttaaatggccataactgatcacacggaagtccgattcacgcgcataatatatcgatacgcttgaaactgaccaaccgaagctcttgagaaattcatatggccataactgctccatacggacgttctgattacccgcgcataacattaacgagaacgcttgagaatagaacaaccggaagtctctcggagacactccaaatggtcatagacttatcacaccggaaggaccgtattcaggcgcataatatcattgagacgtcttcaaattgaactagcgaacgcgtttcgagagattcaactggacatatcttttcgcacggaagttcgatttgggcgcctaatatattgagaactcgaaattgaacagtggaacctcttataaactcaatggtctaactcatccacggagcccgattacggcatttatatcagacgctcctac

SEQ ID NO: 228796 - DNA, 350 bp, Glycine max
accttaaactcgctgaatgacacgaactccgagagactacatggtttaacttatccactaacgcccgatgcacgcgcatcatatattgatacactccaaatcgaacaacgcaccggcttgataatattaaatgtttataaccttgtcacacgaaagtccaattcaggcacataacacatctcagaagctcaaaattgagcaaccactgctcctctgaaattcaaatgcgcataacttgacacacggaagtctgattcacgcgcataatatatcgacacgcttcaacttgaacaaccaaagctttccagaagtccacatggtcctcactcttcaaccgatgtcccactccg

SEQ ID NO: 228797 - DNA, 374 bp, Glycine max
  unsure (1)..(374): unsure at all n locations
agctntaatatagaactggtagaagggatataatatatgatatccttaacaaatgactttatcttatatttattatgactttaacaacctatttatcgtttaccaacttaagaaaaatatgaggactcatttgtttcatggaaccttattggattctctgaaatatggagataagaatatacatttttatgtatgttaaaagataataaaaaatattccttgacgtaatgaattcacaggaatccatatcaccaatggcagagccagaaatttggttcaagggggaccaataaaaaatattaaattttcacttataaaaaatatgaacaaaggttaatacttatatatttatatgtctaatagtcctacaaata

SEQ ID NO: 228798 - DNA, 393 bp, Glycine max
tagtgctaaggatgctgacttcctccaggatgacaagtgtattcctgagtgtatcctgaaccgggaccctgcggtttcggcaaaaattctatccactattgttcctttcgagcaatgtgaggactatctcatttgaatagattcttctcatggtaatctcaccaacaggatggcagcggattctgctactccctttaaacctgaggttccttggggaaagaatatttggagcgcagttgtacccccatacaagtccttcttgctgtggaggctcattcataataaatgtcccactgattttaccttgcataagaggggttgcatctctgactccatgttcagcctctgtggtagcaatatggagaccgcagatcatttattctttgagtgcat

SEQ ID NO: 228799 - DNA, 402 bp, Glycine max
  unsure (1)..(402): unsure at all n locations
agctntgngtagaggaggccgggataatatatggttgtgctggcggatggcccttacatggtcagtgtggtagcagaggaacaagattactttttctaatgagacttttgatggcaacaaactattagaggaagctatatttctactatggacctggctgaggaactttgaggagaatttactatcccctttagtcactggtcgtcaaatttatcatcagcttttgtataatagtgggggggaatataaatagctgcaatggcagcaatcatatactgtattttcttagtttttggttcccatcaagactgattaaagtctgactttggaaccagntcactgatacatcatgctatttgtatccttagtacctctggtacttcattatcaatatatattatc

SEQ ID NO: 228800 - DNA, 369 bp, Glycine max
  unsure (1)..(369): unsure at all n locations
tgaagacaagactattcgaggtatcttccttgcgtatagcaatatctctaagggctaccgtgtctacaacttgcaaactaagaaactcgtcatcagtcgagatggttgaagtgatgaatatgcttcttggaattgggatgaagaaaaagtggagaagaacgttcttatacccgctcaactacctcaagaagaagctgaggaagaagaccgaggtgaaccaccttcaccttcaccacaacaacaagatcaagaactatcatcaccagagtctactccaagacgagtaagatctttggtggacatatatgaaacctggaacttggtcatacttaaacctcgaagcttttgagaangcgttaagcaagaagt

SEQ ID NO: 228801 - DNA, 367 bp, Glycine max
cacctattttattatactggaattaggaaaacataatttataaggagtaatattatttcttgacttcacaatcatggggataagactgcatacatcttaccctcctcatcacagttgttgtaatgaaaaccttgttcgctcatatatatatatatatatcagtatatatcatacttgtcccgtgtattgtaaaccctctcttatcgctttacatttggcttttatagattctttgactctgagacatattacctaaaaatgtggcattttcgctacaactattagctatattttcttttaatttactgcctaccgaatgcgcacacttcaacgccgttttcattctatggcagagtcccttgctgat

SEQ ID NO: 228802 - DNA, 415 bp, Glycine max
  unsure (1)..(415): unsure at all n locations
tagatacgggggaacatgagacataaactgattcatcttcttactaantaaataagaaaacaagacagcatccacatacaaaacttaagcatgcatagaataagctcgcacgtttatttgtcaatgagaggtacgctggaaagaaagaaaaccacacatgacgacgcagtcttgttagatagatagagatgctgttgggaattcgatagctaactggagacaagaaggaaaacgaagaaggagaaaagtctgtccatnttattactattctcatgcctttatactgaattgttgatcaccaatctaaggtcttggtgaatgattctatcaagaggatacacaggtatgggtataacagaatggatattggtgtaataacagaattatgggatagaagaatggaattggaataacg

SEQ ID NO: 228803 - DNA, 415 bp, Glycine max
agcctatgtcaaactgtctgacgtctccatatgtgtgcacactatggtcatgtattggtttctagaatacatttggaatatctgttgctgattctgaataagtgatcattcttgatttaaaattattgtctcctaatcagttaagtgtcaatcttgttgagggtcggctatcttccaattgcacctcgttaaattgcttgttaaacgcatcatgtcattgttctatcactagtagagagactttcacctttgctagctacattaaggtgttctgagagaaaatcatttagtaggcatgatccttttacttgtacacgaaagtctagcttagtaagtcctatacctgtgtttcttgaagatgcgcttagttaccaactaagtccatttttcatgtatttattatataaatatgtta

SEQ ID NO: 228804 - DNA, 392 bp, Glycine max
  unsure (1)..(392): unsure at all n locations
ttgagggtgcgcagcccaccatcttttcatagtagagtatctattatgngnctaccatcacgattatcatctccctttccattattgggggtaccacctgngccgccagatccctccaccttttaggcgtgttctttgaatgatccgtccctctttntgcacatgttctgtagttgcatcctatccggaaccatatcagaattgtactgacactgcctaatgaaggcaaccattangtccttccaagaatggactcaagaaggttcctaagttagtataccaggcgacagttgtcctagtaagactttctcaggaaaaatgtattagcagtttctcatcttttgcgtatgcccccatcttccgacagtacatctttagatgggtcttggagc

SEQ ID NO: 228805 - DNA, 431 bp, Glycine max
  unsure (1)..(431): unsure at all n locations
naactngatacattaaatgagaagtgtttgttaaagggncacatcgccccccaatgtcctaacataaggacaatggctgtgttgtgcaatgggatcattactactgcatcttctttgggctcttctagttcttctactacaagtgaaagtcattgttacgttcaacccttgaaaggtgatattttcatgtctaggaggttaatggggagtgtgtgtaacgattgagatgacacacaaagggagaacatttttcatactacgtgcatggtcctggtgaatatatgatattagattattgatggtggaaattgcacttattcagctagccatagattgatttaaaagcttgttttgaaactcctacataccctatgctcttcaaactacactgattgagtgtgaatgcggagctagttgtacatatacatagt

SEQ ID NO: 228806 - DNA, 367 bp, Glycine max
  unsure (1)..(367): unsure at all n locations
tcgctatcagnctctgactagctacataagagcttttttctctcatcaaaatcacagagcatatttctcccatgaccatgcacctaccatgaaaaatgttctcccttagtgttatatctcaatccttacacacacttcccattaacctcctaaccatcaaaagaaaacctttcaagggttgtacatcacatcgactttcactctcagtacaagacctagaatagccccacaaagatgcactcgtaataaccccactactcaacacagccattgcccttctgtagcacattgggagacaatatgacccttacccaaagacttataacacttaatggaactctcttttgacaaattgggagatcggcta

SEQ ID NO: 228807 - DNA, 414 bp, Glycine max
agctcggaggccttggatcttcttcatcaatggattcctttgcttcatgagggctgattgcagcggaacggagaaggacaaagatgattgaagaccccacttcaagtagaagatgagtctagaagaaactcatcaccatatgaagccatggataagagcttgaaggtagaacacgatgaatgaaggaagaggaagagaagagaatgaaatttagtgcttgaagtctgaactttgaagtttaattctcaaatgatcaaagttgaaaaaaatgcacacacatgacctctatctatagcctaagtgtcacacaaaattgaagggaaatctgaattccacttgaatttgaaattgaatctgtggagccaaatcttcacttattatgattagtgaatttccgttatgggtcagcccact

SEQ ID NO: 228808 - DNA, 481 bp, Glycine max
  unsure (1)..(481): unsure at all n locations
ntagctctcaacccanactctcctcacagaatctgatttcaggcttaaataggtggcattgttcgtgctcgtgcgcttagcacaattctggaccgcttagcgcacattagtgaatttcggcttagcgcgtgcctttctcgcttagcggatggactgaagtggtgcgcttggcaaacctgtacagctcatcttcttccagattcttccttgcacttagccaatgagtgttgcgcttagtggacgctcgctaagctagcggattggcttagcgagaaggtgaaaaaaccacttttaaagcttgcctaattaacctgaaattgagagaaaatgattattaaacacataaaacagaattactaagtatntattacctatctttaactaagagaacttataacactacaaaataaccatatattggaggagtttgtacaacttacacaggtttatacacagagttagtctattatcgactacaact

SEQ ID NO: 228809 - DNA, 456 bp, Glycine max
  unsure (1)..(456): unsure at all n locations
agctntattatgccctctcccctcggcggtgatttcttcttcggcgaaggcgagatagttgttggcagtgatattattgaccagccctccgaaaccttctattgagatgtcttgggccacgtgggcctcgttctgaacttttactagcagagcccgatgaggctcggaactcatgagtaactccaacagcgagaccctggccggagttttgttgagctggtcaataaccttgaattcgctctgctgaattatacggaggaacttgctggcttcctctaacgacacctcctttttaccatcctttntctccgaaaggccttttgccggaatatctttattcgaagcgtgtggtgcttcgccatcttgttcctccaccacttnttcttttcccttgacgttcgcgggttggactggtaggtccggaggtgcaaacacacgaccgctacgggtcacacc

SEQ ID NO: 228810 - DNA, 413 bp, Glycine max
  unsure (1)..(413): unsure at all n locations
tganatgaggaagtgtagaagggtgaaacttcttgcttntattcgctgaccacagagtggtacctggagatatgtcgcggcggtcaggagaccttgnggacgtcaagtggggtgctattgcccaaaaccaagcttgaccaatcccgacccaacccgggcatagtcagtcagtgagaacctgtgatgtacctaagcgggcgagctcctggcagtcaacagataaaaggaactaagaccacaaagcaaggaggcttgtgtggtggctggccaactgtgaactttgattgatatatgggatatggcctctggtaatcgattaccaagggtgggtaatcgattacaaggcttaaaaatgaagacaggagactaagatggtctctggtaatcgattaccaagggaagtgtaatcgata

SEQ ID NO: 228811 - DNA, 416 bp, Glycine max
  unsure (1)..(416): unsure at all n locations
agctttgagccaaaatcctgactcaccatataccttgacccagggtgagaatgtcgatccttaccctcggaagcaaaaaataagagaaggaaacattccaatcaaaggaaaaaggagaaggataatttctaatcaaagaggaagcaaaacacggagagaaggaaaatttccaatcaaagagaaagcaaaaagaaaagaaagaaaaattcccaatcaaagaatgagagaaagaaaaaaagagaagtaaaaaagaagaaagctcctggtcaaagaaaccagaagaaatgtgccgagaggtccttggaccagacgatatctgaacaatacagaattgtcaccaaatgaacaaaagaaagaaaaggaaaccatgacctanaagcggtcttctccctttgattaccaaccataatcctgtg

SEQ ID NO: 228812 - DNA, 193 bp, Glycine max
tctagccaaatggacttaccttgaattaatttctttgtataccctttgagccttgtttccctttccttgttttgaagctcactacaagccttaagtgaaaaaccatgatatcaccatatccttaaggaattttggagctttggaattgttttgggaataagtgtgtgtgtgtgtggtggggggggggatctca

SEQ ID NO: 228813 - DNA, 447 bp, Glycine max
  unsure (1)..(447): unsure at all n locations
agcttcctcggagccattttctgcgaaggcaaacatttggaaagttagttntaccaagaaatgctactcttaaaacaaaaatggcatacaacctcctccaataaacacaaacatcaatgtaaatttagagcaaacttatgcacatacttctttacaaacgttcacttgcacaagacattcttataactaagaaaaatgcacccatgtacaatcaaggctccttcgttacctagattatttatatgtacttccaaggtgtatttgctacctacatcacatgcacttccttggctaaatttacatacatgcatactcaaagcatttggggtaccaaaaattgcacatgtgcacattccggtattctaatacttatgcaatacaaacattgngatgaatcttggcatctacacataaagtgtacatttatgcttattcagtgttttgcta

SEQ ID NO: 228814 - DNA, 432 bp, Glycine max
  unsure (1)..(432): unsure at all n locations
tgctctanattacattgatgcttgtatttatgggacgatgttgtatgtcattcttgtttcttaagagtagtgtcccactggtaaaactaactttccaaatgtttgccttcgcaggaaatggctccgaggaagcttgcctcgaagaggtccaggaaggacaaggcagccgaatgaactacttccgctccggagtatgatagtcaccgctttaggagtgctgtacaccatcagcgcttctaggccatcaagggatggtcgcttctccgggagcgacgcgttcagctcanggacgacgagtatactgatttccaggaggaaatanggcgccggcggtgggcatcactggttactcccatggccaagtctgatccagaaatagtccttgagtgttatgccaatgcttggccaacagangcaggcgtgcgtgacatg

SEQ ID NO: 228815 - DNA, 439 bp, Glycine max
  unsure (1)..(439): unsure at all n locations
agcttctgacagtatgacaaagaagacattcttctgattgtcggcgagcgctggaggcagtttaaatctgacttgactaggaaatgggcacttgcagtcgacaggacggtgtggacgacattgnctgtgaaaaatatggctttaccaaggagaaatggactcagttttgtcaaacccgcatagacccctcatgggaggtatgtattttgtcattttatgctgtttccacacccaaatcacttcttataatttattgtaataatcatcttcattaatgtcaaacttttccaggatgtacgacaaaaggcacaggcctcccagaagcaaaacacctgcccccacgtattgtctcgaggagtgtatgaatatctataacataagctcatcggtgataatacaaagaaaagactggaagatgctgcctcagctggaagcactg

SEQ ID NO: 228816 - DNA, 251 bp, Glycine max
cacttatatctgtttctaatctgcttgcaataactgccctcgagataaaaatacaagccgatgcgcttccgaaatgtttgcgtaacgccttcgtgacgaataccgcgaatgattcaaccggtcttcgacgcactacattcgtgcataatactacttcgatctgcaatgggtaagaacctctagccaaccatttcgatatattcttagtacccgtggaggtccagaacgagtaaacagtatatatactcatt

SEQ ID NO: 228817 - DNA, 385 bp, Glycine max
  unsure (1)..(385): unsure at all n locations
cagcatgcagcttgagctncagacggagagaaagttaatttccccacctaatccaaatctaaatcgatgaagcttaattacaatatgcggcaccatggatcacaagcgtgcaactctaaatggtgtcaattattatacacatgcgatgacataacgtagccacactacatatgtgggcataatgaattctactcgacagatcaggaaacacggcagtgtccgctcataaagtataccccaaactgtcggaatgccttatacaaccataggcgacccgaaaaaccaaaagcctctctagcctgctatctagcagtaatctattgaaattgcaacctttaacaagacattatgcgacaagcacattgatttccccccacaaagagct

SEQ ID NO: 228818 - DNA, 376 bp, Glycine max
  unsure (1)..(376): unsure at all n locations
tctggttntctaaaccttgaagactagtgttattcattctctttcatctcttctccttctgccaaaaagaattcgccaaggactaaccgcctgaattcttttgtgtctctcttctcccttttccaaaagaacaaaggactaaccgcctgagttcttttgtgtcctccttctcccttgtcaaagaattcaaaacgacacagtctgagaatattcttgattcttccctttcccttatacaaaagttttcaaaggactaaccgcctgagaattcttctgtatcctcattcacaaagtatcaaaggtttaaccgcctgagatctttgtcttaacacattggagggtacattctttgtggtacaagtagagggacatctac

SEQ ID NO: 228819 - DNA, 468 bp, Glycine max
agcttctggtgggacatcttgacttgctttccaatctgacattcaccacagattctgccttcttctattttcagattgggaatgcctctaacagcacctttgtcaatgattttctttatgcctcttaagcgcagatgtccaaatctttgatcccatattctgacttcatcttctttggaggatagacatgtggaggagtagctggtttcttggggtgtccataggtaacaattgtcctttgacctgctgcccttcattagaacttcactcttctcatttgtcaccaagcattctgactttgtgaagtttacattgaatccttcatcacacagctgactgatgctgatcaagtttgcagtcagtcccttcaccagcagtactttattcagactaggaagtccatcatgaactagctttcccattccaatgatctttcctttagagccatctccaaatgtcacataacta

SEQ ID NO: 228820 - DNA, 465 bp, Glycine max
  unsure (1)..(465): unsure at all n locations
nganatgaggaagtgtggaagggtgagacttcctacttttattcgttgaccacagagtggtacctggagatatgtcgtgggggtcaggagaccttgnggacgtcaggtggggtgctatttcccaaaaccaagcttgaccaatcccgacccaacccgggcatagtcagtcagtgagaacctgtgatgtacctaaataggcgagctcctggcagtcaacagataaaagaacaaagaccacaaagcaaggaggcttgtgtggtggctggccagctgtgaattntgagtgttatatgggatatggcctctggtaatcgattaccaagggtgggtaatcgattacaaggcttaaaagtgaagacaacaagctaagatggcctctggtaatcaattaccaaggggtgtaatcgattaccaggctntataaaaacgagatcaggaagctaagaaggcttctagtaatcgatt

SEQ ID NO: 228821 - DNA, 465 bp, Glycine max
  unsure (1)..(465): unsure at all n locations
agcttcacaaaagttgtatggcttgaaacaagcaccgaggcagtggtacaagaagtttaatgagtttatgagcaactcaggattcaaaagatgtgacatggaccattgctgctatgttaaaaaatatactaatagttatgttatccttgttgtgtatgttgatgacatgttgattgcaggatctagtatggcagaaattaacaggttgaagcagcagttggcagaaaactttgaaatgaaggatcttggtccagctaaacaaatccttggtatgagaattcttagaaacagatcagaaggaattttgaagctgtctcaggagaaatatatacacaagttgcttgacaggttntaccttggagattctaagaccaggaatacccctttgggatctcatttgaagtttcaaagaagcaatctctgcagacagatgaagaaaaatgtacatgtcaagagtaccatatg

SEQ ID NO: 228822 - DNA, 473 bp, Glycine max
  unsure (1)..(473): unsure at all n locations
tcccgtatccgtacttggaaggatctgattaccgccttcctaaggcagtatcagtacaattctgatatggctcctgaccgtactcaactgcagaatatgttcaagaaagagggtgaaacctttaaagaatatgcgcagcgatggagggatttggcggcacaagtagctcctcccatggttgagagagagatgatcaccatgatggtagacactctgccagtgttctactatgagaagctagtgggttacatgccgtccagctttgcggatctggtgtttgccggggaaagaatcgaggttggattgaagagaggaaagtttgattacgtttcctccacaaacgtgaacgccaaaagaatcggngcaacaggggcaaaaaggaaggaaggagatgcccatgccgtctcttcaacacccgcctgggtcaaacccncgcanacacctcatggtacccatcagtatgcgcaacatca

SEQ ID NO: 228823 - DNA, 421 bp, Glycine max
  unsure (1)..(421): unsure at all n locations
gagcttcacaaggacatcaagggcatggttactctatctttattntcaggggaaaacacatcaccacaatcaagtaatgctgtcaacaaccaagtagtttcttggtcatcttcttctgcaactcaatcatcatctgggaactgtgcacccagcggatcactggttcaaggatccaatgctcgcaaaggctcattcaatcacccttcactctttgttccagacaatttcccaatttcaaagacacctacaacacaatcctctcagagtgatacatatgtatcccctactaacaattatcctgctgcatcttgcaacggagaggctagtcctacttcgtgcactatgaatccaaccaacaaagttatgggtggccctcgcacacaaatggcttataaagagaacagtcattgcaattcttcta

SEQ ID NO: 228824 - DNA, 330 bp, Glycine max
  unsure (1)..(330): unsure at all n locations
tctaatagcangtcttcttcctttgagaggttggtggactcatgccgtgttggcggaggttcttctcgcctttataagagggcacaactnttttctgcttctctggacagggaacctgttccagtcaccatgatctttcccctgtctgcttctaggggagtgagaaggagtggcagcggcgatatcaggatttctccctacaataggggtagctgcaatgctaggtcaccttcctcctctcccactgttgttggctatgagttggtatggaacgatgtgttgaaatatcgattctccattacctctgtggcaagcgtttntgctctgaag

SEQ ID NO: 228825 - DNA, 454 bp, Glycine max
  unsure (1)..(454): unsure at all n locations
agctntgtccacagaaatcaccaataactattttaagggccaacgccttaaacggtcttgtttgcttttatcggttaacatggaccgttcacaagcataaaatcaacatgtaactttactgcttttgcaagaactacgtaggtctgttttgctcatcgcaatcgaggatacgtaggagaaaaagcctcgcttttgttgaccaccccaagagatcgttaatggtccaacgtcttaacatttctctcctttcaaaaccaagagatcgttaatggtccaacgccttaatgtttctctcctttcaaaaacaaagagatcgtttaatcgtccaacaccttatatgacctttgttcaattaaaatatatcttgctaagaaagataaaaacaacttaaccaacatatagttctcanataactacgtaggtctcatttcctcatcgcaatcgaggatacgta

SEQ ID NO: 228826 - DNA, 341 bp, Glycine max
tgcttctacacctctgcctttgttgtttaagaactaaaatttatatggcatgcttagcgcttaggtgtgcttagcgtgtcaacgtgacatttgagtttaaaacccaagcacttagcctagccttgcgctaagcccaactcgaagttgtaaaatcctataagcatttggggcttagcacaacaagctgcgcttagcgctttctgcaacaccaaatttttttctgcaatatgcgcttagcctgaggtgtgagagttagtgtaccatcaagcttcaacttacagagagtagtttaggcatagcacaacaggagcgctaagcgcactttcaagagttcaaaaatc

SEQ ID NO: 228827 - DNA, 464 bp, Glycine max
  unsure (1)..(464): unsure at all n locations
agctngngactcttggcaatgtgtttaaaactagtcacttanaaagttgtgacttttgaaaaaatctttagaaataagtcacttgaagaattgtgactttcggaaatgtatttcttgaaatcagtcactggtaatcgattacacatcaacaaatatgactcttcattttgaattttgaaaattaaaacgtttagaagctctggtaatcgattacaaatgttgtgtaatcgattacactagtttaaaatgatttaaaattgttaaacacaagtngtaactcttgaaatttgaaatcttaacgttttaaaacactggtaatcgattactatcttctgataatcgattaccagagagtaaaactctttggtaatgattctgagaaaacttcttgcgctactcaatggtttggaaaacgtgcttagtacttatcttgattgagtcttctcttgattctcgaatcttga

SEQ ID NO: 228828 - DNA, 410 bp, Glycine max
  unsure (1)..(410): unsure at all n locations
taacaattacgtaccanagtaacattgttacgcattttaatttaataaatattattaattattttaacctcagaaataatattattattttattgaattaattgcactatttgtccccaaaaagttttacaatatcgtaaattttatccaatttgtgtccctcaatttataaaacattacaaattcagtgctcgcataaaaacttgtcgcaaaatttctaaatagtggagaattaaagaanaaccctttgcaaaatgtcttaattgtgctgattnttctacctataagaagaanaattgagatgttttgtaaatttgaagggaaattttgtgaattntttttaggcccaaaatttgcaacaatgtgaaacttntgaacacaaaaatattattgagtctattttatttaat

SEQ ID NO: 228829 - DNA, 447 bp, Glycine max
  unsure (1)..(447): unsure at all n locations
agctggtagagagtttaactttgtcttgtatgaggagtattctaggaacattacttttcctttntacgtgtatagacaattaaaattaaagcaatgaatattttctgaataatcaccataattagggcttgtgcctctatggtggaaccttgggatattcttacaagttttgatcttttgagtaagctataaaactaatactcaaagatttagtcacacttaaaagttcattgtttctctttaaggatgtattatgtgagaaaaattttaaagttgataaaaatatttgaataaagaataagaacataccttattaatttagggataattttaaaaacagaatataaatcttgaaaaaaatatattattaactaaatttcttaatcattgtgaattagttgttcctttcttataaaacaaatatatagcggacttatattttgagta

SEQ ID NO: 228830 - DNA, 459 bp, Glycine max
tctattgttctggaataatctattatcaaatgtggtaatcgattattttgagacatagagctcctaaagtttccagacgcaatctaatcgattactaaatgtggtaatcgattatcttgagccacaaagtcttccttctgctgaaactggcttatgtaatcaattattgaaactaaaatcgataaaatgatacttgccaaatttcaagtagaagtgagttttgttacttgtaatcaattacactgtgttgaactcattgcttctaagaaactttgagatcaattcattaatctatcatgtctgatttctactaagcacgaatatgcgaaaatgaagactaaatcatccatcatgcctaatctaaaaacatccaatacaagtgccacatcttctacgaattgtctggcattgacaatgattaaaacaaaaacttaagaccaatcttcaagtcttcaatct

SEQ ID NO: 228831 - DNA, 429 bp, Glycine max
  unsure (1)..(429): unsure at all n locations
agctagacggagtttgtcgcatcggtgaacaatttcactctaaaagtgggtcccaattggattcctaattttcaacttacctatttggaagtgacatcatggcaattaggtcccagctttccattgtggattcagtcacaaaacaaacttaaatatgttggactatctaacacggggattntcgattctattcccacacagatgtgggaagcactttctcaggttttgtatttaaacctctctcgtaatcacatccatggtgagattgggactacattaaagaatccaatatctatccgaactattgatctaagctcaaatcacttgtgtggtaaattaccctatctttcaagtgatgtgcatcagatagatctttcaagcaatccattctctgaatccatgaatgactnnttatgtaacgatcaggac

SEQ ID NO: 228832 - DNA, 390 bp, Glycine max
  unsure (1)..(390): unsure at all n locations
taacatcagtccttatggctgttaccttgaacttccgatatctctgcaattaccggcaagaaagtccttcagaaagtagaagctgaccaaaagattattccataaccgactcttgttgctgaatcaaaggggattagccgacaaattacttaattntctatgaatttttcatttatcacttaacaagtgaactttgcttatttctttttttaggatcggcgaatcaaatgatatttctgttccaaattttgtctcttctccctctgaatcacacttttcctgtgccttttacaaagtttatatntgttgaaaactttgtaaaattctgaatgttccttgcatcatgatgcanaattctctgcatatataagtttgaatctggagattatc

SEQ ID NO: 228833 - DNA, 383 bp, Glycine max
gagggaaattctatatatagacctctcatctttaatggagcgggttaccactactggaaaacccgcatgcaaatctttatagaggcaatagatttaaatatctgggaagccatagaacaaggaccttatgttccctttataatggtcgtaagagcaacaatagacaaacctacagcagattggactgaggaataaagaagattatgactatataatttaaagaccagaattattattacatctgccttaggaatagatgaatactctacggtttcacaacgtaaaagtgctaaggatatgtgcgatacactacatgtaacacatgaaggcacaacagatgttaaatatctacgataaacactctaactcgtgaatagaacttt

SEQ ID NO: 228834 - DNA, 400 bp, Glycine max
  unsure (1)..(400): unsure at all n locations
cagctcatgatgatgaacaaacagntcgatgatgacttacctgtaatcaagagaatacatgcaagtctcgttctatcgctcactcatctctttctcccactgccttattgaattcatgcttaaatttaaaacttactaagtgcgattatgttcttgatctctaaaatacccatttttcttggtatcaagtggtctcggaataattaagaaggggggagggctgaattaactataaacgtgtcctgatcaactacatattatccttcctaatggtactagatacaataaagctctactactaagctatgagatagtaaagaacagaaacaatatcttacaatgaataaagtggaaacaatatgacacatcggacaataaagagtgtgggaagaaaaagaca

SEQ ID NO: 228835 - DNA, 446 bp, Glycine max
  unsure (1)..(446): unsure at all n locations
agcttctgacagtatgacaaagaataaattcttcagattgtcggcgagcgctggaggcagtntaaatctgactngactaggaaatgggcacttgcagtcgacaaggacggtgtggacgacattgtctgtgaaaaatatggcattagcaaggagaaatggactcagttttgtcagacccgcagagacccctcatgggaggtatgtattttgtcattntagttgttttccacaacaaaatcacttcttataatttattgtaataatcattttcattaatgttaaacttttccaggatgtacgaaaaaaggcacaggccttccagaagcaaaacactgccccccacgtattgtctcgtgggggttatgaatatntagaagaaaagctcatggctgagatgacaaagaatagactggaagaagctgcccagtctggaagcactgagggca

SEQ ID NO: 228836 - DNA, 246 bp, Glycine max
cttatctctgtttcgaatctgcttggataaactgttctcgatataaatataccagccgatgcgcttccgaaatgtttgtgtaacgccttcgtgacgaataccgcgactgattcaaacggtcttcgacgcactccattgggtcttcatagctactctattgctatggagaaaacctcagccactctttttagtcattctttgtcccgtggaggccagattgagttcacgtatatttctcatttactt

SEQ ID NO: 228837 - DNA, 441 bp, Glycine max
  unsure (1)..(441): unsure at all n locations
agctntaacctcatcgtctctcacagtctttaganttgggagccaatccaatccttgtgttcggactctcagccacttatgatagccgccgatgatcccattactgcttcccctaagctctctgtcctttcttcacgccgcatcccatgccttgcgaactccttggagtaccctcgcgtttgtggtcactaaaaccccgtgcgatgaaaggcgtgatgctttcgtctgatggcacttctctcatggggtagccaagctgtcttatggcaaggacgggattataattaatacaaccccttgttcccatcaagagaacatctggacattcttcgcaggaagatagaatcctgattcttccttccttctagcgagggaaccaattaacagacgccccttcatgctagccaagagttggtcccaattcggcttctctttttcgac

SEQ ID NO: 228838 - DNA, 449 bp, Glycine max
  unsure (1)..(449): unsure at all n locations
ngaagggtaaaggtttacacagtttcatgttaaaagttactgacatcctgctgctaatagacattagacgtagctttactcttagtaagaatattagaacaacacagcaaacaaaacactttctatgcattgagcaaatgtattcaaaaaataattatggattagaactaagttttcacaaatcttaagcaagcatcagtaacatctttacctgcagcactagaaagaacccaattgtcatcataaggaacttgccacacagcatagccaagtaacttattttcccttgcataagaaaccttcattntgacaacctcaacatcatcataacctatccaagtcgatccattggagaagtaattaactacataagtagcattgtacttgacatggcctccatattgttgaatataagccttgatgtccttatagttcatagcttccacttt

SEQ ID NO: 228839 - DNA, 457 bp, Glycine max
  unsure (1)..(457): unsure at all n locations
agcttaacanaaggcatgcgaagtgggtggtaattttatagcaattcccttatgttatcaaacataaaaagggaaaaggtaatattgtagccgatgctctatctcggcgtcatgcattactttctatgcttgaaacaaaattgattggtcttgaatgtttgaaaagcatgtatgaaaatgatgaaacttttggagaaatttttaaaaattgtgaaaaattttcagaaaatggtttctttagacatgaaggctttcttttaaagaaaacaaattgtgtgtgcctaaatgttctactagaaatttgcttgtttgtgaagcacatgaaggaggtttaatggggcattntggggtccaaaagactctagaaacattacaagaacatntttattggcctcatatgaaagaggatgtgcagacattttgtgaacattgcattgtatgtaaaaaagcaaagtct

SEQ ID NO: 228840 - DNA, 378 bp, Glycine max
  unsure (1)..(378): unsure at all n locations
agaatcggacatccgtgtganaatntatgaccattcgaatttctcatgagcttccgttgttcaatttcgagcttctcgatatgtgatttgcctgaatcggacatccgtgtgaaaagttataccagttgaatttctcaagagcttccgttgttcagttttgagcgtctcgatatgtgatttgcctgaatcggacatccgtgtgaaaagttatgaccatttgaatttctcaagagcttacgttggtcaattttgagcctctcgacatattatgcgaccgaatcggacatccgtgtgaaaagttatggccatttgaatttctcgagagtttccgatgtttaatttcgagcgtatcgatatattataagcatgaatcggaca

SEQ ID NO: 228841 - DNA, 443 bp, Glycine max
  unsure (1)..(443): unsure at all n locations
agcttggtggatttagggatcgagggctgttttggtttgtgttcacgtttgagtttgtgtttgaggttcgcgttttggaagaaaaactcgaagaaaaagttttgggtttaggtgtatgtttctcttcatagagcttggccaacgaaattgttctgaggagtcatgtaggtgactgtgcaatgacatcccttctgatatcaggttttaatcctcccacaaagcaatccaatagagcttcttgtgtaattccttgtactcgattagctaaagccgtgaactgcacgtaatatgactgaactgaaccaatttgagcgagtttaaacaactgagatctatgacattcatacggtgatgggccaaattctgtctctaaggctcgcgttaaagcaatccatgttntgaatgaattctcacgagtcatcatgtggtagcagggcacaacc

SEQ ID NO: 228842 - DNA, 466 bp, Glycine max
  unsure (1)..(466): unsure at all n locations
nttacatgcatgtgcacaccatatttaactatacttgatcatctgatacaatctattngatgganaagataatttatactactcttctaatgtagtggacaactaaaattaaaataatataatagaaaatactgctaaagccattcaaatcaagtaattntgaatctcaccattactatcacgcatgtcaaagagaaggagaatcagacatcgtaatgcataacacaacgaaacattaaaagaaaacatgcttcctanagccaaccaaggtaaaaatgtattcatatttcgtgaactttttcaaaattataagacacatataaccatatataaaaacatggtggaacaatctgaccacatgcacaacacagaccacacattatttcagaaaatgagttgtaaggaataataataatgcactgttaataacaccgtacgtgcactaagataacaacggtgtcatgac

SEQ ID NO: 228843 - DNA, 250 bp, Glycine max
  unsure (1)..(250): unsure at all n locations
agaaactcaagctnaagacagcggcacaacacagagcggcggagaggcggatgaaggcttcttcaacacaaacgccccagagggaggagtccctacccaggacagccgtgaggtgagccgccatcgaacagtagcccccgatgaaccatctatataaccctgacgggcccaaacagcctctcatggctagagtgcaccgaggagtcggacaaatctggacagctacgatctacgccggcatcggcgccac

SEQ ID NO: 228844 - DNA, 458 bp, Glycine max
agcttcccagatatggagagctaaatcctctgttggttcttccttgtaagaacttgatgtaaatacttgtatatctatttaatgatgttttatgtgttctctgtgctatcagcacttcatttcagtgtgcttttgccttgatcacatagatgcatgctttgttaggactattcaatagtggaaactagtctgattgctagaacttgacaggacagggctagtttatcgtattatcacgagggatcagggtacagtaacctagctgtttgtatatctgtcttaatgtggctttggtcgagtttaatccaacaggaggaatctgaggacgatgcttgatcgggattaggcttaactatcatgaagaattacgggttatcatttcaagagacaacatagaacacatgagcattgttaatagattatattcttttaacatagcacatactaggaagccaacg

SEQ ID NO: 228845 - DNA, 468 bp, Glycine max
  unsure (1)..(468): unsure at all n locations
tcaagaaaagggcagactgccttccttaatctgatttcattcttaaatatgtggctntgttcatgctcgtgcgcttagtgcaattctgaactgcttagcgcgcattagtgaatttcggcttagcgcggcttttctcactcagcggatggattgaagcagtgcgcttagcaggatgacccttcgctcaaggaacatgcacaactcatccttcttccagattcttcctcgcgcttagccgaggattattgcgctcacgcggtggctcgctaagccaattttgtggcttagcgagagggtgaaaatcaacacttcanaacttgcctaattaacctgaaattaagagaaaatgattattaaacacacaaaatggaagtactaagtatttcttacctatctttactcagaagaaattataacactacaaaataaccatgaattggaggagttgatacaattacacaagtttta

SEQ ID NO: 228846 - DNA, 461 bp, Glycine max
agcttgccgctatagcagaccatctatgcttataaggggttcacaatcacaatgaaattttaattttcatcttttattacttacttgaccaaattcactcacattctataacatactacatatatgctacatctgatctgatcatatcttactgatatttttatactagaaaattatatatatgtatatatatatatatatatggcatctttttaaatcaatacacacgagatgctggagtttttgtttccgtagtcagaactcatgcacgtagagagacagtatagtcaattaatatgttaattaggtaccctacacccacctgtttccaagaattccatgtagctctaggatggtatgttcttcttctttgctgaatttccctcgttaatatcaagcctcaagtaaattatccaacgaagcctacaactcttgccacaccttaacaaacctaaacattc

SEQ ID NO: 228847 - DNA, 490 bp, Glycine max
tgctgtcagtaacagcagaggaagacctggcttgcctgtttaacattggcttggaaaggattctacaagaattagtgaagatttgaagatattgctgtcacaattttcagctactcgagggactgatctgtctgttaatgatatcagtcctagattgtctataaacagtgatgaagtgaagacttctgatgtttctaactgtgctggaatccagatacttcaaaaaatgatttcacttgagcgaaatgaatctggtttgtctctagatggaagccttgttagtgaaattgaaggtgaaagcgcagtcgacaggctaaaaagacaagttgaccatgacaggaaacttatgaatgctctgtataaagagctggaggaagaaagacatgcttctgcagttgctgccaatcaagcattagccatgatcacaatgctgcaggaagaaaaggcaccattacatatggatgccttcaatacttaagaatgatggatg

SEQ ID NO: 228848 - DNA, 457 bp, Glycine max
agctttaaccgcctgagatcttcgtcttattacattggagggtacatcctttgtggtacaagtagagggtacatctacttgggtttgactgagaacaagagagggaacatctcttgtggatcagttctagtggagggtacatccactaggttcaaagagaacccttgtggatctttacttgtaaaaggatttttacaagattgaaagaaatctcaaggaccgtaggtcgcttggggactggatgtaggcacgaattgttgctgaaccagtataaaaactcttgtgtgtttgtctccttcttccctagtcttttactttccgctatgcattttaatttccgcttttacttttggttaagtttctcttctactccttattctcttaacaacgtaagtaaaagccttagaagagtaacattttaattagtaaaggtttaggaataattaattcaaccccc

SEQ ID NO: 228849 - DNA, 378 bp, Glycine max
  unsure (1)..(378): unsure at all n locations
tgttgcaagttgttctcgttgttcccccacttctgaatcaacaaaaacctatctgccaacaatgggcacctccaaaagcaacatattatcaatgaacaaattaaccttatccatttttgaacaagaatatgaagatatactatattcccttcttcgctccccctagaggaaactatgctaaaatctctagtgatgccaaaatctccatttcttctccaatgaacaaggtgaatatacgttaataatcaacctatgcctcaactccctattccattttcctctgagccccanaaaccatatctagcaaacattnttcatccacctcaaacttacctttttcctagatgcaaagcaaactccccgtctgatgcaatccta

SEQ ID NO: 228850 - DNA, 465 bp, Glycine max
  unsure (1)..(465): unsure at all n locations
agctntattcaatcatatgagatgatgattgtgtgttagaaaatggcgatgcctactgtggactatttttcttccatgttntagttgcatgtagcttgtgttttcttcacagatggggcttgcatgatgacccttaacattgtaaccgctgagattcccatatgctggaaagtcattaatagttcaaaaaagcattgcacgcatttcaaatgtctccttgccaaatgcatcaaacactaaacccccctcataccataactttctcagatcttcaatcaacggacttagataaacatcaatatcatttcctggttgtcttgggcccgatatcatcatagacaacatcatgtattctcgcttcatgcataaccaaggaggaaaattgtaaattactagtagaactggccatgaactgtgttaagcgcttaaggcgccatatggattcattccatcactagctactac

SEQ ID NO: 228851 - DNA, 447 bp, Glycine max
  unsure (1)..(447): unsure at all n locations
tgtaggcctaggatcttcttcatcaatggattcctttgcttcttggacaaggaatggcaacggaatggagaacgaagagagagagagaggagacgccacttcaaggagaagatgagtctagaagaagctcaccaccataagaggccatggataagagcttgcgggaagaacgagatgactgaagggagagagagagaagagcacgaaattttgtgctccaaatgagctttgaaatctgaagtttgatattcaaatgatcaaagttgaaaaaaattcacacacatgacctctatttatagcctaagtgtcacacaaaactggagggaaattcaaatttcacttgaatttgaaattgaatttgtggagccaaactttggagctaanatttcactaattatgattagtgaatctagttatggtcagccactaatcaagatcaattcagat

SEQ ID NO: 228852 - DNA, 401 bp, Glycine max
  unsure (1)..(401): unsure at all n locations
accttagaacgactgcagcatgcaagccctatataagctgaagcttttatcttaaacggaagcngagttttattcagaatatcagagttaatttcttttatcttagtgagagtgattctcctaaatccttgagcgattcaacaacaccttggctgtatcaaaggactttcacaacccttcgtgtgttgcccttgctggaaagagcgattctttccttcctctaatcatcaccctcgttcttcaaaccacaattccagaaaatacacctctgcccagaattatctcgtggccataactcccattctacgcactcaaattaagcgattcttgagcctaaattgaatttaaaacgagacctttcacctcgtttggaatcacctcatttgagccctgtacttcag

SEQ ID NO: 228853 - DNA, 453 bp, Glycine max
  unsure (1)..(453): unsure at all n locations
ntgagcaaattcanacgacaataactctttactcggatgtctgattgagtcccgnaatatatcgagacgctcgaaatggaataccgaagccctgagcaaattcaaaagacaataacatttaactcggatgtctgattgagtcctgtaatatatcgagacactctaaatggattactgaagctctgagcaaattcaaacgacaataactctttactcggatgtctgattgagtcccgtaatatatcggaaagctcgaaattgaatgtcgaagctctgagcaaattcaaacgacaataactttctactcggatgtctgattgagtccccgaatatatcgagacgctcgaaatggaataccgaagctctgagctaattccacaaccaatacttttacctcgatgtccgattgagtccgaatatatcgacacgctcgaaatggaatgtcgaagctct

SEQ ID NO: 228854 - DNA, 455 bp, Glycine max
  unsure (1)..(455): unsure at all n locations
agcttgtgttgatcccacatggttggagaattctcgcaaaacagagtgaccctgattggtctccctatgatttcacttagtgagagtgacttgacttacccattgtgaggcatgcctcgtcatgtactcctaggtgcccgacaaggtttttcactaaaaatcataccacattgcatgtaggcttgagcctagtgtatctgttgcataacacttcgtgttgaatttcattgtgttaacaattgcagtttgatgttattttttggagtgtatgaacttgaatgagtgggaataatgtgtatgattttgtgaagagatgttgnttatgtaaattcagctataagtattatatgtttcacatgctctagtttttttattatatatgaatgtgagaattcatctccggtgtgtggttgtgtttacgctgaatgacattttgtttacgtgagccaacatat

SEQ ID NO: 228855 - DNA, 428 bp, Glycine max
  unsure (1)..(428): unsure at all n locations
ntcttgagaaaacttccttgagaagcttctttgaganaacttccttgagaagctagagcttagctacacacacccctctcataactaagctcacctccttgagaagcttccttaagaagattcctaaagaagctagagcttagctacacatacctctctaatagctaagctcacctccttgagatgagaagctagaacttagctacacaccccctataatagctaagctcacccccatgacaaaaaatatgaaaatacaaaaaaaagtccttactacaaagactactcaaaatgccccgaaatacaaggctaaaaccctatactactagaatgaccaanatacaaggcccagacgaaggaanaacctattctaatatttacaaagataagcgggctcatacttagcccatgggctcganatctaccct

SEQ ID NO: 228856 - DNA, 456 bp, Glycine max
  unsure (1)..(456): unsure at all n locations
agcttcacaaccatgtgtccactctacatgcctgtgtaagaaacaactntatgcattcaatattaactcataataaagaacctaaacatcaacatcaaccttagctatatatgcacaaacgtatccttattccccacacataattggcagaaatgcatcctcattccccatatataatttgttgaacttacaatcgtttagatagacatgtacctctttccaataacgaggcacttgctaaacttagaaacacgtagacaatgctccatccatccaacacattagtaattttgacgtagcaaggacatgttaagatataatttatagtatgaattagctcaaaaattggtaataaacacaaattataaataacatcttcatatgaacatacatgaatgtagttgtggaacctcatatttcttgatggcaattgcgctatcatgggcactatggaca

SEQ ID NO: 228857 - DNA, 376 bp, Glycine max
  unsure (1)..(376): unsure at all n locations
tcttgagaagatgtctaaagaagctagagcttatttacacacacctttctaatagctaagctcacctncttgagatgagaagctagagcttaactacacacccnctataatagctaagctcacccccatganaaaatacatgaaaatacataaaaaaaaaaatcccttctacaaagactactcaaaatgcctcgaaatacaaggctaaaaccctatactactagaatggccaaaatacaaggcccaaacgaaggaaaaacctattccaatatttacaaagaagagtggatccaactttgacccatgggctcaaaaatctacnctatagctcatgagaaccctanggccttctttagtagctgtagtacaatctact

SEQ ID NO: 228858 - DNA, 465 bp, Glycine max
  unsure (1)..(465): unsure at all n locations
agcttttcgattcattctatgtacccgtggtggtccacattgtgtnttatgtatttctattctcgtctcatttactttttataccccctcttgatgtgcttaagccattttacttaagtcatttctcgcttaacctaaaaataaaataaatttccaccgatcgcttgaattgtattatccgttaacttcggttaaaatgaattccgaccgttcggtcgtgccgcaaccacgttggaaatcaaaaaagaggtaaaaaataatataataatcaaaaaacatctttttagtaaaataaagcggaaaatcaatcggacgttntctctttgggatatctcattcttaattgaattgactaataactaaggtgaaactaaggctagaatcaactcgcctagtcaagctcgtccataanaatagggtttgaagtttatcacttcaatcttttactatgtaacatggatcatt

SEQ ID NO: 228859 - DNA, 404 bp, Glycine max
  unsure (1)..(404): unsure at all n locations
tgcttctacattggcatcacaacattacattcctctntatgattcttttctgtgttcgccctaaagctattggatgacttttcagctaattgtttggctagttggcccacctagatctcaaggtacttcaatgctgactcagtgcttctgcgatttgacatggttacctgcatgaattaagtcagagtctcctctcgctcggttgtcctctgaaaaatgttaggctcttgttgaggcgacctgttggaaggtccaccctggtctctgttgaattgattaccagggtgtgatctctactgtccttgctggatgtaaggaccctgctgaaaacctaagaatccatcttgattcgatncttgcctctgttgatccccatgtagctaacctcttgcgttttctcttca

SEQ ID NO: 228860 - DNA, 310 bp, Glycine max
  unsure (1)..(310): unsure at all n locations
gaagtttatctngcaanccgcaatcctaggaccagcccaccacctcgcgaatggcaccagctggaagncccacatcagagggagctcccactgggctgctctcaccaagatgagcctgaacaaacaccagagactctgcaatgcaaccccaacatagcgagctggagactctatatatagcctcactgccaggccttctctgacgggctaatagaggaaatgaagagctggattcggaatcggccgagagagcgtcaacatggctacgtgaagctgacaagaactaggagcaagaaaaggaccaaaggga

SEQ ID NO: 228861 - DNA, 452 bp, Glycine max
  unsure (1)..(452): unsure at all n locations
agctttgacatgagtcatcaaaagagtatatttatttgaccatggaangaattttaagatgatatcaatcatctatctttcaatcttctctcaaacatcattcaatatctttcaactctttctacaaaattttctgattctttttctttccatctttctaaaagtttttgttcaaaactttctcttccaatagaatttgatcaaaaacttgtgctattcatctttttcattctcttctccctttgccaaaagaacaaaggactaatcgcctgagaattcttttgcgtcttccctttcccttaagcaaaagatttcagaggactagccatctgagatatcttttgtttccccttacaaagattcaaaggactaaccgcctgagaagttctttgcccaacacattggagggtatatcctttgtggtacaaatagagggtacatctactttggga

SEQ ID NO: 228862 - DNA, 440 bp, Glycine max
  unsure (1)..(440): unsure at all n locations
agctnttcatacttatcttgatgaagccttctctttattcttgaatcttgagtcttgaatcttgatcatgattcttgggatcttgaaccttgaatcttgattctttactctttaactttcctcttgagacttgaattgttcttgattctatcttgatcacttgagttgttctttgattctatcttgatcacttgagttgttctttgattgatctttgagctttttgtcatcacctttgtcatcatcttttgttatcatcattgttatcatcaaaacatctttgaatgaatcttgattcaccatgaagctttgcttctacatctagccaaatgagcctaccttgaattaattcctttgatagcccctttgagcctatgttcccctttctttgttntgaagctcattacaagccttaagtgagaaaccatgatctcacccta

SEQ ID NO: 228863 - DNA, 427 bp, Glycine max
ccttgcggattggtcttcaccagtgaaaggatcgatgtggttctctaatagagggcaaattgatcatcctgcttagacgaatgagataactgtggcaaatgaagagggtgagaaagagggagaaacccatgctgtgactgccattcctatacggccaagtttcccaccaaacccaacaatgtcattactctgtcaataacaaacctcctccttacccaccacccagttatccacaaaggccatccctaaatcaaccacaaagcctgtctaccgcacttccaatgacgaagaccacctttagcacaaaccaaaaaaaacaccaacaaaaaggatatttgcagcataaagcctgtagggttcaccccaaattccgttgtcatatgctaaacttgatcccatatccactcaataattcaatggtagccat

SEQ ID NO: 228864 - DNA, 411 bp, Glycine max
  unsure (1)..(411): unsure at all n locations
agcttaatcggnggaacttatagaaattatgttattaacattcaacacaagacacgtgaggagatacatggagagaaacgaagaaacaacaatggaggagaaagtaaagctgaaaactaatggagctttaaggagcacctacttgaagctcttgtgctctgataccacttgttggaagcttacttatgaagcttctatagaggctggatctttgagcttcaataaggtccttcaatggtgatttttagccatggaattgcagcgaaagataaaggagaagaggttagaggagacgtcatccgctagagaataagccatgaaagagaagtttcaccaccaagagagtggcttggataagaagcttaaagaggaagcttcaatggaggaagagaatacgagagagagaggggg

SEQ ID NO: 228865 - DNA, 445 bp, Glycine max
  unsure (1)..(445): unsure at all n locations
tacgggcctaagcaaattcccgntcacaaacactacanattcattgcaaaaggncnnaannaannaaaaacatcaatcacaataattctagacaacgtctatatatatgatgccaatggtataaggattaatgtttttacataccaccatctttttctttggctgccacacagaaatcttgcagaggactangatcatatgcagagactaaagaggatgtctaagccaagatggcaacaaggaagtacacaactttcattgtttttccttagtaatacactcttaaacaattgtgctatatgtaattgcttgtgatgattgaactgcgattcatgtagagctcgctgattgctatttataagtatgaagcattgaattggtttgcattttatcttgaccgtaattaattatttatttgatgaggaatcattccttaacaactaca

SEQ ID NO: 228866 - DNA, 378 bp, Glycine max
  unsure (1)..(378): unsure at all n locations
agctngnncaaggatgtcgaagtgagcatatattttttgtctaacattcttatatgaggagaaaaatgaatgagcgctacgacattacaatatgttttggagtcttgaaggtggaggttaatttcaagctcaaaagaaaggaatttttatgccacggaaagtattttccaaatcttctcaagaaaactatgatggttcgcatgtcggctaaaactcctatagactttactcaaaaacttggaagtgaacacaatctactacatataacttactaccaaagaatagtggacggattatttatttatctcattcccgatcatatatagccattgcaataagtttagccagtcaatgcatgcacctcctatatatgatgaa

SEQ ID NO: 228867 - DNA, 455 bp, Glycine max
  unsure (1)..(455): unsure at all n locations
agctntacagcagattatagtaatgtttctttatcctagaattaaaataacttaatgccattaacctagggaattaaaaaaacttaatggctgagaataactgaaattttggcaaccaaaagtcacccccaacagccaacaagtcagccaccatttggtctcccaaaaggctgatgcctaggttgccaattgtgcccttattacaacttgaactaaacctaactaaagccctttaattgattaacccaaaacatatttttggtcagccaactttacaaggattgggccattatttagacaaactaaacactctaaaaattgagacaaagtggtgtcatttagtcctcctccatttggaccatgatacaactcacaaccttggacttttctccttgaaacttgggcttgtattcaaatagtatgcgacagcacttgtgaagacttccttggctttc

SEQ ID NO: 228868 - DNA, 487 bp, Glycine max
  unsure (1)..(487): unsure at all n locations
ntncaaatgggtaaaaggctcacattcactatcttctacatatattcaaactngtccaaataataataaagtcatctcggctcaaagaaggccatctaagtttcatacaattaatatagaacctatatcctaatgtcacatcttatcagagcgtggtgttcccgtgtcctctagcatgaggttcttaatagtcatccacctatttatctgctccctctaacacatagttcaagatcatcacaggatccaaacacatacaacatacccggagtgagttatcacatttctaactactagagagagacaacacagcatatagtacctaaatacaatttacttagcatatctcacactatattatcactgttgcattcatcaatcacactgttcaatcatcaatcacaatacacaggagtcacacactccgatcaagacatattaacacatcaatttcataataaacaattagcatgcgctatgcacagta

SEQ ID NO: 228869 - DNA, 447 bp, Glycine max
  unsure (1)..(447): unsure at all n locations
agcttgtagaatggctagacatgatacttgtcttggttnggtttggttcaaggataaaagggatgccccacattatttccatgacacaaatgcaaaaatgatgatttggaaactttatgcaaaactggtcatgcatgcacctatgtggacactcaagtgtcaaatttttatggtcatgtgatgctagggctcaagattcatttcctctattttaaatcaacccaatgtttccaaaatatgttcttttatcaatttgtgcattcatccgagtccatttcgggcgtccggggaaatttcacagcattcacccttcaggtgtagacacattttccaaaaattggttatgatcaatgaatttttttcaaagaaaagttggaaatcatctcttttcanaagcatgtcggtttttcagctagacaacttatttttctttttcccatctttttc

SEQ ID NO: 228870 - DNA, 505 bp, Glycine max
  unsure (1)..(505): unsure at all n locations
actaagcttaggctattcaattgctctagattgctgcatagaagggtttatggttgtatggnggtcaccagaggagcataaaccacagagtcttgcgacaggtacaaatntttgattcatggctagttaggataccaggttaaccaaggcgtctagtttaacttcaagcttcttagtttcagatgatgcagatgagtttgtggctacctcatgcactcctctaatgactatagcctcatttatggcgctaaactgttgggagtcggaagccatcttctcaattaaattcctggcttcagcaggggtcatgtctccaagggctccaccactggcagcatctatcatacttctctccatgttactgagtccttgataaaaatattggagaagaagctgctcagaaatctggtggtgatggcaactggcacatagttttttatatctcttccagtattcatataggctctcttcactgagtttcctgatgcctaanatatcctttcta

SEQ ID NO: 228871 - DNA, 453 bp, Glycine max
agcttgcatatggtattgagaaagtcttcttccatcattaggatttgttcctgccatctcaaacagacaaatcaaacgtaacaagacaatgtatagggttgttagaatacctcacccactcaagtgtatcacacaattatggcttttctctaatgaaacactcttgccttttaccactctaattccccttgagttcttaggcaattcaagagattatggccacaacaaagaacaattcaccaatatgtgtaaggtaaggctagagagacaaggaaaaaggttaaccaagaaaaaggctaacaatgtttttaggctcaaatgaaggaaataaaattcagaatttacgaattcaagtaacaatccttcatgcaaccaatattataccttaaagagatgttttaaaaagtcttcaagcatgaacattcagcccatttcttttttttaatttgctta

SEQ ID NO: 228872 - DNA, 377 bp, Glycine max
aactataaaaactcaagcttgtatactgctgggcatgatatatgtgaaggatatgtctatttaaaggataacaggcgatgtcccacattatttccatgacacacatgcaacaatgatgagttggatatcttatgcataactagtcatgcatgcacctatgtggacactcaagttgcaaacctttattgtcatgttatgctacggctcaggaatcatctgcctctattttaatcaacccagtatttccaaaatacattcctttatcaatttgaacatttattcgagtctattttgtgtgttcggaaaaactttcacacgattttacccttcacatgtgtacacatactttttctaaaaactggttatgattactgaat

SEQ ID NO: 228873 - DNA, 469 bp, Glycine max
  unsure (1)..(469): unsure at all n locations
agctntaacacagagacgggggggtgctntttagtttctatctttatgaggtttcttctattatcaccattattaaacggtgataaaaaagagacccttttttccataaagaaaataagaaaattttgtcttgtattcatctcataatctatgtataatcatctatgtaccacaagctattgttttactattttgactccaaaaaatgacagaattttaagattgaggattgcaaataaattggcaattactagttctgtttttctgtttcttatacgagaatgctttttttttttttgaaaaaaaatatgagaaaacaccaagtaaatactattaagcgcacgaaaacacacttgagaaaacatccatttaaatgacattatacaaaaacgaaggaataaactcaacaatctctcggctcacatctagagaatgataaaattagtcagttcatcagctactgattaat

SEQ ID NO: 228874 - DNA, 508 bp, Glycine max
  unsure (1)..(508): unsure at all n locations
tgtnaaggagtgtganacaatgctggaccaccttntccttttaatgatcctgctccagnttccactgagacaactccccaagctgaaggttntgatccttcaacttcaaccactaccaagagtgatggtttggtgattccgaaggaattagctgagatcgagtacatggagagcctttatatgaagagtactgtatcagcattgcatgttttgcaggaaattataagtggaagctcaacagttagcatgttttcattgccaccgttgaagataagtggttcagaagaagaaacatggaagaaaatccctgttctggaacaagcagccaagtaacctgctgtgttacgttgctgagtaatgtagagggatggctattctcccatctatttttcttctcttanatcggacgcctctgttatgcacgccttanatactaacacagatgtaagatgctaaatgtaaaatggaggtattttatagaatatatgtccatatatacaactctgga

SEQ ID NO: 228875 - DNA, 355 bp, Glycine max
  unsure (1)..(355): unsure at all n locations
agcttgcatatatatagctgcgtatctgttttttaacnanntntccttgcatctccaacatttatataattaaagaatatattctttgtcatgaattaatcttcggtgaatgtccatatctccggtatcctttctcgtgtatcattacttgcataatttttttactctctcataacccctttgtatctataaatatatcactcatctcttaatgaaaatacacaatgctcattcttcctaaactctcctcttctctatcttttttcgctctattaatttcctccaattacattatatttataagtcttcctcatcaccgctctacttcactatacatatacttcattaacatctc

SEQ ID NO: 228876 - DNA, 398 bp, Glycine max
acgaaatatagatgggaatagaggtaacaatggcggtaatgactgaccgaggcagaaccgggttgagggagtaaagctcatatgtaccttcagaggctaaagtgatccagatgtctaccaggatagggaaatgaagactaagcacgtatatgcctgcaaagactacactgatgcgcagaaagagaagctagcagcagctgaattctcctactatgcccttgcttggtggcataaataccatagagaaatgtgtgaaaatgaacggcgagaggtatatacatagactacatgaaaagggtgtgaaataaggatgtgccccttactatacagacaatgcgacaaaattcaaggctgtcgcatggaactaaccgtgagaatttattaacaaatgtaatgcg

SEQ ID NO: 228877 - DNA, 460 bp, Glycine max
  unsure (1)..(460): unsure at all n locations
cggacacatagaaactcaagcttcanacngcgcaatagctgcagaggatgcttgttatggcaaggncnggatcggggtcagcagaggagcacatacctcaaaccctcgcgacaggtacagatatctgattcaaggccagctgggttaccaagtaaaccgatgcattcagtttgccttcaagctttttagtttcatatgatgcagatgggtttgtaactacctcatgcactcctctaatgactatggcatcatttccggcacttaactgatggagtaggagccatctattaattaatggctggctagcaggagcatgtatgcgtggcccaccactgcagcatatatcatacttctttcatttactgagtcttataaaagattgggaagaactgtttgaatctgaggtggagcactgcaatactatttaatcttctagactatacggctctttcatgagtgc

SEQ ID NO: 228878 - DNA, 450 bp, Glycine max
  unsure (1)..(450): unsure at all n locations
agctngtagaatggctagacataatacatgttggtgtttggtctggntcaaggataaaagggatgccccacattatttccatgacacaaatgcaaagatgatgatttggaaattttatgcaaaactggtcatgcatgcacctatgcggacactcaagtgtcaaaattttatggtcatgtgatgctagggctcaggattcatttcctctattttaaatcaacccaatgtttccaaaatatgttcttttatcaatttgtgcattcatccgagtccattttgggtactcgggaaaatttcacagcattcacccttcaggtgtatacacattttttcaaaaactagttatgatcagtgaattttttcaaagaaaagttggaagtcatctcttttcaaaagcatggttggttttcagctagacaacttatntttcttttttctctttttttttct

SEQ ID NO: 228879 - DNA, 228 bp, Glycine max
  unsure (1)..(228): unsure at all n locations
tttgggtggacttctttctctcttaaatttcgngggtctggggttttgggagatatgatgggcggttatgatagttttctgctgagtgattattactttgtgaaggcatttgctgaaaacttgttgaaattgccatcgttgggtgaattatacatacccatctctgtttaaggttcttgcgatgatgctagcgatgtttatatgctgaaattgctgatagaaatctgt

SEQ ID NO: 228880 - DNA, 423 bp, Glycine max
  unsure (1)..(423): unsure at all n locations
agctngatactcctggatactaagaatatattcnctttttataacaattgaaagaaaatgcttaaacagaaaggtgctataaaatataagggacaaattataaaggaaatcaaaacaaaggttaagacttaaagtaaatctacaattagtcgattagagaaaatgaagagagtaaaccaccccactaacaattcatataaaatacaaggaaaatcccgaccacagtgaccggtactttttacaaattacacagcaacatagccacaataaaagagaaccatagctgtgtaatgcagcctaagtcaatcagttgatcaataatcagtaatcacgcacataaagaccacctactatacacccagaaaatttaccttgagctgcaatattgaagaccaagaacgttctctagagcttagaccaaaa

SEQ ID NO: 228881 - DNA, 374 bp, Glycine max
tgctcagctagccaagaatgattctgtccctatgaatgccctatttatataacgaggcttccttgcaatcagtgaagacgacgaggcagaagaaaaagcttgcttggccaacttcttttatttgtcaattcgtgttcctatcttttggtccatacacagttacacacaacacaaattaaatatgtatgaaactgttctttacacacacacaaacatttatatcctgaatttcctgtttctacgtacatgcatccatatatgtagactaaaactataagattaattcaacgaaggtatattgtagttaacgtctgaggcgaggttaagagcgtcctctaattaagcatatactcttatattcatccgtcataccc

SEQ ID NO: 228882 - DNA, 472 bp, Glycine max
  unsure (1)..(472): unsure at all n locations
agctttattagttnttctcaatgagtgagattccattccaccaacattcttagggtcacacatcacactttattttatagtatggatattcctagacataatgtcttttccttatacaaagggccaacatttttttatcaatttcatcaaatgttgaagtagggagcatttggaggattgattttgctagagttactacttgccccgccgttcataacgtcctagccttccaactactcaacctttgcatcactttttctatcaagaaactaaaatcttgtttggctgcccttttgtggaagattggcactcctaagtacttgcccaagttctcggtactctagaagccaaattgtcttgcaatctcctctttaatcattccatcaacaatttttagaagaaatatttggttgtctcaacattcaccctctctcccgaactatcacaannatagtttcaaaaaagagcttta

SEQ ID NO: 228883 - DNA, 248 bp, Glycine max
  unsure (1)..(248): unsure at all n locations
cctcactcaatgagcgcaccactctctttattgtatgacacatgcccatgcgtgngtgtctgaccaacttgacaccttctacttgcaaggctatgcccaaaccaacactactatcaaaaatctcttacatgacaccttttgttgcagccgaccaagctaaagggttatataatatcctctgtctacaaagtacacgtggcactccattagacacattgatgcactcctaccccacgagggcattggat

SEQ ID NO: 228884 - DNA, 469 bp, Glycine max
  unsure (1)..(469): unsure at all n locations
cctgaggcatgcaagctggggctggataggagtactgtagaatttntattatttttctcaatgctgatccacatattccatggccttcgtccctttgatagagataaaaagaggaaacacgcacatatgtatttcgattgataacaaggttgtaattgcgacagttctttttctataaatgtattataataaagggtttataagggtatggaatttgttaataaattgtatgattaaataaatatttaattaaattatttatttatcctaaaaaacaaattatttatttaaaggtaacatagtgcttggtgatctaaaaaaaatgcagacctttggggaaacgaatgtattcactcgtaagtagttaacagttggatttttttattcttcttcttgacattgtatcatattgatcaacagcgcgaacatattttgattatctatttcttatttacgcatatactaatga

SEQ ID NO: 228885 - DNA, 198 bp, Glycine max
ataccaccggcttagctcttcaatcatgaacatgggtgatctaatcttctccagatatttctttttttcatgtagtatattaagtgggtttacttttttttttgctagaatacgtgagtaggctaactaaggaagacggtgggagatagtgggtaaccaatactttacagcattgtggtgtcgtgcgggcgggtcatg

SEQ ID NO: 228886 - DNA, 454 bp, Glycine max
  unsure (1)..(454): unsure at all n locations
ttaagtcgacctgagctgcgctgcccccactgtcagggagcatggttcnttctccagaagcaacagccttctggaggagggcccaagtgggcctgtgtgctatttgcacccncatttttactaaatagaccccccttgccctttttttggagattcttttttcgtaaagttacggaaacttacggatttcgcaacgatacttgttttctttccgtaatgttacggaaccttgcggattacataatcatcccctttttttactttacggaatgttacggaaccttactaattgtgcaacgatgcttccttttgatttccagtgtgtcacggaaccttacggattgtgcatcaataccttcttttgatttccggcatgtcccggaacttcacaaattgcccaatgatgggtgccaagcacctcacaaggaccaaacaaaagttgcatgccaccaag

SEQ ID NO: 228887 - DNA, 307 bp, Glycine max
  unsure (1)..(307): unsure at all n locations
cattgagttcacaagaagttttcacaatatcattaccaaagagttttactctctggtaattaattaccagaaggtaggaattgattaccagtgttttaaaatggtaagatgtcaaatgtcaagagttacaactgtgtataaacatgttcaactcgtgtaatcgattacacaatactcgtaatcgattaccagtgattctaaacatattaattttcaaaattcaacatgaagagtcacatctgttgatgtgcaatcnaatacaccttaatggtagtcgatctccaatgattggatttgaaaaatacat

SEQ ID NO: 228888 - DNA, 448 bp, Glycine max
  unsure (1)..(448): unsure at all n locations
agcttctatggaggctagatctttgagttttactatggtccttcaatggtgattnttatccattaagttgcagcgaaagataaaggagaaaatgagagataaggtgtcatccactagggaataagccatggaagtagaagctattggacaagtggtatctacaagaaacctgctctaataccacttattggacaagtggcctcagaaattttaagaagggggggttgaattaagattttgttgactatcctaattgaaaatttctctttcttagatattccctatattcaattatttctttaattggaagttactcgaataacaaataaggagaagttaacttatagaaatataaacacaacagaaagtaaaagagattacggaaagagagaatgcacaacctgatttatactggttcgggcataacccgtgcctacgtttagtctcc

SEQ ID NO: 228889 - DNA, 313 bp, Glycine max
cttctcggggccattcttgttgggatgaacaaaacgcttttgtaatcttataatgcgaaaaaggatgaccctatggctgcaaactcgtcaatcccgtgggtatggcttttgaaaggggggaagggaagttctcgaatgcaaaaacgtccctcctctcgtcattcttatatgttggtgcagaggtggctcgcccaggcgaactaacctgcacccccgcccccttattttctttatctagtctcgtcttttttattgaagagaacattaaccatgttcccttcctttttaggattaacattctgccttacttgaa

SEQ ID NO: 228890 - DNA, 461 bp, Glycine max
  unsure (1)..(461): unsure at all n locations
agcttgtctttctcagggtatacgaatgattttccagganattcaaaaatttaatgactgccctcacgtactgtcttgtggggggtatgaactgcttgacaagaaacttatggaggagaagagcaagcgtggacataaggaacattcgtgtactgaaagcccaacgctcaacatcgacccaccatccccagttgcaagacacttgaagtggaagatcgcccgcactaagcggcatggccaaatgacgtctaaagtggcacaagaaattgcagacaaaattgtcagttcatatatttatttggttactgtcattggaaaataatggttagctaacctagtcaaatttgttttattcaaattcaacaattgtatatgcatgcaggattcattacaggaacaagcaacacaggggaagtttgtccgcatgggcgaaagacatactcaacacggccttggccgac

SEQ ID NO: 228891 - DNA, 305 bp, Glycine max
  unsure (1)..(305): unsure at all n locations
tggaggagacatccccactactagtatttctgcaatctttcatctttctctcctctatgctgaaaggaagctcccagttatggaaagctcaatcctctattgaatcttccctgtaggaacttgatgtaaatatctttttatctatctaatgatgatttgtgtgtgcactgtgctatcagaactccattccaccatacttttgccttgacgacgcaaatgcatgcgtgtntaagatcattccacaggggaaacctggcagaatcttacaacctgataggacggcagctagttgtcgcattatcaca

SEQ ID NO: 228892 - DNA, 357 bp, Glycine max
ataagctttttctgataagtataggtaataagtccttagcacttccaatttgcgtgtttaataatcattctctctcaatatcaggttaattaggcgagctttgaaaagtgttgtttttcaccttctcgctaaaccaatctgctggcttagcgagcgtctgcttagcacaccactcatgggctaaccatgaggaagactctggaagaagatgatctgtacaggttcgctaagcgcaccgcttcatctcactaagcgcaccgagatagccatgaacataggcgagaaaggcacgcgctaagccgaaattcaataatgtgcgctaagcgggccataatgcgctaggcgcatgagcactaa

SEQ ID NO: 228893 - DNA, 443 bp, Glycine max
  unsure (1)..(443): unsure at all n locations
gaccataaaactcagcttgaagtggaagcacacttatgtcgagtctccccttttctccccgctcaccagtgtgcattgatggtagctcgtgtatgtggggcatggtacgagcccgaaagagtttatgtacaatggcgacgacgtggagagcttggtcgagttcaaagagaaccatagaaggctcgggctatgatataagcctacacgtgccgcacgtaggagaagcgccttataaagaaggggccgaagcatgggctgatagcaaggaccgcaagtgaaagggactcccttatgtcacatcaacgagagtngtgtcagcgcgggctggacatgtgaaaggtgggtcaccatgatccacgatgaagtccctcaagagaagtcaaactaggtgcgtcaatgccctcctaagttcgagttgggaaactggcaagttatcaaacaac

SEQ ID NO: 228894 - DNA, 495 bp, Glycine max
  unsure (1)..(495): unsure at all n locations
atccttgagtcacctgcggcatgcaagcttctcaggttgagtctgtccacttcatgttttgcaccttgngataggcaagcactgctcaaaagccatttgtcatggatcctttgcaagtctccattctctgccaactccaatattgcagttgaaaggtcaactgctaatggcgagtctcgcggaaaggcctgaagaanaatgaaaaggacaagaaatagtgaaattctacctaccaattgttttccactacttacaacttcattttcactatcttgatcaggtacaacttcaagtgtcaagagctgggatttgataacttacagtaccagcagttaagcatggtatattaaccttgagctagattacgtgctaacaaacttaaaaatgcagagaaggtaacatcctgtcaactnttttttctgttttagaataacaagtttagcttggtacttgataggcaaaagaacatgctcagganaaaaaaaatcaagtaaa

SEQ ID NO: 228895 - DNA, 135 bp, Glycine max
taagggattgactatgaccgcctggtaaaacaaagccttaaccaccttcctcttaaaatgcaaagccctatcaacaaatccttactaaactgccgacgcaaaactagccaaaaccgggccaggggggtttatctt

SEQ ID NO: 228896 - DNA, 474 bp, Glycine max
  unsure (1)..(474): unsure at all n locations
tcctcagagtcacctgaggctgcaagcttccactagacttatgtaatgttatttttgagacgattncgtcaatttatccactattacccatactacatcttggcgagatttggtcctaggcaagccaaagacaaaattcatcaagatacaatcccatttccactcaagaattgccaaaggttgcaattcatcaggaaatttttgaagttccacattcgctttttgacacctcatacactttgccatgtactctgccacatttttcttcaagctataacaccaaaagttcttcttcacatctcggtacatttttgtgaaacctgtatgaaaactcaatcgactcttatgcatttttccaagatttcttccttcaacatgctctagtgaggtatgcacactcattccttgaattggatgagtccattcgcatccttactgaattctaattttgtgcctgtttcctttaacttaatc

SEQ ID NO: 228897 - DNA, 282 bp, Glycine max
taactaagctcaccgccttgagaagagtcccaaagaagctagagcttagccactcacacgcctgtaatagctgagctcacctccgtgagacgagaagctagagctcaggtacacacccgctataatagccaagctcacctccttgagatgagaagcttgagcttagctacgcacgccctataatagctacgctcactcgcattgcgaaaagacgaaagaaagctcctactccaagacgactcaaacgcctggaatcgaagctaaaccctatatactaaatgg

SEQ ID NO: 228898 - DNA, 413 bp, Glycine max
  unsure (1)..(413): unsure at all n locations
ctcgaccgggatcttaagcacctgtgctgcagcttaaattattgttaacatttattttctttagtaataatattattttttaaacaaaataaaaaatatcttttctttataattattcttagacatttattntttatatgtacaacaagaactttgatgtgtacgtctctcacttggatgactacaaaaaattagataaaagagtttttcacaccacgaacaaacaagatgagaattttaagtggagtaaagtatcaaatgaaatttcaaattaactagtaatgataaaatttaaaatacaagaagttaataacttataaactaccttaagattcatatacactagtaatgataaaatttaaaataaaaaaggtattaacttatacactaccttattgtccatgagttacttc

SEQ ID NO: 228899 - DNA, 466 bp, Glycine max
  unsure (1)..(466): unsure at all n locations
gtctcaaactgtatacaattctgcgttggattaattttcttgatctgcannggcctgctcctataaattctcattgccaattncgctattatatgtcatttgttgatgcttattcaaggcttactgggatatattatctaaagaataaatctgatgctttatctgtttttaaacaattcaagtcacttgttgaattgcaatttaacaaaaagatcaaatctattcaaacaaattggggacaggagaatttcaagttttctcttccttcttgtcagaattgtggatcattcataggctgactttgccacacacacattaccaagatgacatggcggaaagaaagcatcgtcacatagtggagttgggtctctcttcttagatatgcatcccttcctcttaactttcgcgatcatgcttgtcaaaccgctgtatatcatgcacatcaatngccctcacctcctcttaa

SEQ ID NO: 228900 - DNA, 461 bp, Glycine max
  unsure (1)..(461): unsure at all n locations
agctntctttaaatttctttaaagatacaattctctcaaacaccttcaataccttgagagaaaagactaaaagttatgagtgatatatctatctataagacgattatatattttagtcagtgtgaaaatttctagcaaatcttgttgatttgtttagagccagcagtggctaggtaggataaagaatattgggtttaagtcaagcttgggatagagcttgcaagagtaaaagtcaaaagtgacaatgaaaatacttgaaactttgacaagttaatggaatcttggtggttgccaagaattggacatagcctcgggtttgagacaaaccagtataattcngtgtgtgcttctctctttttctttaactggcaaagggttngaatttgtttttagaatntatatcttggtttggtttacaaagaaaaatggttttaccatcttggaacataatctgatctcta

SEQ ID NO: 228901 - DNA, 443 bp, Glycine max
  unsure (1)..(443): unsure at all n locations
agcttgacggtgtgtaacccaccattttctatttagaacactagtaatatgtctactatcattgttattatttctttcttcgtcattgagggaaacacttgggctgccagatccctccacctttgggcgtattctttgaaagattcgtgccccctttttgcacatgttctgtagttgcatcctattcgaagacattatactaacactgcctaacgaaggcaaccattaggtccttccaagaatggactcaggaaggttccaagttagtgtaccaggtaacagctaccccagtaagacattcttggaaggaatgtatcatcaattcctcatcttttgcgtatgcccccatcttccgacaatacatctttagatggttcttggggcaagtagtccccttgtacttgtcanagtccagcaccttgaacttgggaggggtgatgata

SEQ ID NO: 228902 - DNA, 433 bp, Glycine max
gtgtggaagagtcagtctttctacttttattcgttgaccacagagtggtacctggagatatgtcgcggtggtcaggagaccttggggacgtcaggtggggtgttattgcccaaaaccaagcttgaccaatcccgacccaccccgggcatagtcagtcagtgagaacctgtgacatacctaaagaggcgagctcctggcagtcaaccgataaaagaacaaagaccacaaagcaaggaggcttgtgtggtggctggccagctatggatcttgagtgatatttgggatatggcctctggtaatcgattaccaagggtgtgtaatcgattataaggcttacacatgaagataggaaagtaagatggtctctggtaatcgattaccaaggatgtgtaatcgattaccaggcctaacaatgggatcaggaagttgagat

SEQ ID NO: 228903 - DNA, 359 bp, Glycine max
  unsure (1)..(359): unsure at all n locations
agctngtaaaagggctagacatgatacatgtcaagtctagttttgttncaaggataaaagggatgccccacattatttccatgacacaaatgcaaaaatgacgatttggaaattttatgcaaaactggttatgcatgcacctatgcggacactcaagtgtcaaattattatgcgtcatgtgatgctagggctcaagattcatttcctctattttattcaacccaacgtttccaaaatatgttcttttatcaatttgtgcattcatccgagtccattttgggcgtgtgggaaaatcttgacagcattcacccttcaggtgtttacacattttttcaacaactagttatgatcagtgaatt

SEQ ID NO: 228904 - DNA, 433 bp, Glycine max
  unsure (1)..(433): unsure at all n locations
agctntagcaaacagtgtacaaacagaaatttttttgaataataagggctacaacatcaatgcacatccaagcatcagaagaacttcaaaagcatatgtcctgaagacagagaacagtcacacagataaaagattctggaaacaaaatctccatttgaacacctggtgtgctgaattcaacttgtcatccaagtcccaagctaagaaacagaatatacaatttactttgtgggaggtggccaagataggttcaaattttacttgttaatacaaaagcaaacacacatttcctagtctttagattatacacatcagaaataaaattcagaataaagggaatttgcctttcaaccataagggttcatgatgtantaccaataaacacggtcatcatcatcaattagtgaatgcacaactttcttcttcagcagtt

SEQ ID NO: 228905 - DNA, 343 bp, Glycine max
aattacccctacttgcttcaacagttgatgagtcatcggttgaatcatccaataagcacacattcgcatttcttctccactagaagaggcaaaggatgatgactcatattcttccaagctatgtaggcctgtttcggacttacatacttcattcctctaatttagcataacgcattttgaggttgacaggacaattctacttgtcattttagcataacactgttagagaattattagtcttagaactctttgagataagtgcaaacctcttgccaatcaaatcaaattctcacaatgtcatatcacaagagtcgtttttgatgaactactgtgagtgcaatat

SEQ ID NO: 228906 - DNA, 373 bp, Glycine max
  unsure (1)..(373): unsure at all n locations
agctcngagaagcatgtgagcgtgtggcatcttcttttcatttctctagacccttggtctgtcaactacccctgttatgatgatgaaaatccccgatgacgagacaagctgtgtccccgaagatcgcacgttcacacagcccttactgcacctatcttgcggcctgcatgcctaactttagtgattgcaaccgatttctaacacctattctaggttcgctccccctttggcaacatcaaagacgaactaaactggactctcgatagctaaacagagccgaacataggaccaaatatcactccatacattgtcataaccgaccgaaggaaagtctacacatataatggatgtgccacattactattactatagc

SEQ ID NO: 228907 - DNA, 378 bp, Glycine max
  unsure (1)..(378): unsure at all n locations
cgaacatanaacacacaagcatgactgattagagaaacatctttatatacattatcgtagttgcgaaagacccaatatctttacctactggctgccatcttacttacttgcattttcactggttgtagcctatacttagcttaattctgcttaaatcatcaattatcaatgtttctttcacaatgccttatttttgaattaaccctgtctaagactagtgtcagagcttgatacttggattcatccattttaagtttaaatacttgacgatccggtgcgctttccggcaaatcgtatttcccttgaacatatttgcataaagataaagtggacctataagttactgcacgcgatatccatcagacagtatgtctaatg

SEQ ID NO: 228908 - DNA, 461 bp, Glycine max
  unsure (1)..(461): unsure at all n locations
agcttctaaatccatctaacgaagcttcgattccttataagataggcnaacaccaactcagatggtgagccctctaatgacatgcaagaagggctaataacatttttgtgctcaaacgtaaattcaacaagtatcaagccatgacacatgataaagagtatgtattacactataatgcgtggcaaagaagaggaacacaaaccattatagaacacctaacataaaaggagggaggagtgaaatcctcacttgaggttcacaattaggcatagttggcgggagactacatgaaaccttaggcttgaatattcctacgtgctttcctattgatgtcctctaacatcaacaataatatattcttatatgattattatttattgagattcattaaataatgcaagttaaacttttatttatataagtcatattaatttttgtgcaattgttataaattaaaattg

SEQ ID NO: 228909 - DNA, 380 bp, Glycine max
  unsure (1)..(380): unsure at all n locations
agcttggttntgggcaatagcaccccaccttacgttctcaaggtctcctgacccccgcgacatatctccaggtaccactctgtggtcaacaataaaagcaggaagtttcacccttcaacacttcctcatctcaagcttgtaggattatggggtacccatcacatgtggtactaggtggcggtcgggcgatggtgcacaacaagtttttcacatccacaatgcgcgcataaacccaccatcccctgttgcccaccttcaactgagctcacgtactcccacgtagcccatatccttcgtattctcaacaccgggtccacaataatccttccaagcttcacaacatccaagcaaaacaacattcaaacagcacaagctatcac

SEQ ID NO: 228910 - DNA, 464 bp, Glycine max
  unsure (1)..(464): unsure at all n locations
gatgcaacatatagagagggcaatgaaacaacgagatgtatttctncttgagaggcnggatcanataggacaatatgagatcattcatgaataacaacggaggctgaagacgcgattgatggtcgttcctacacaaaacccgatngagggtattaaactcaacattccttcatctaaatgatagaatgatctggaggcccacttggagtgggagatgaaaatagagcatgttttctcatgcaacaactattaagaagaccatatggtgaaactatgccgcaccgatttttcctactttgctcttgtgtggtggaacaagctacccaacgagatagcaagacatgaacagccactggttgatacctggacggagatgaaaaagatcatgaagaagcgatttgtgcccgctagtcactcaatggacttgacaccaagctccacaactatcccaagcacaatggggt

SEQ ID NO: 228911 - DNA, 456 bp, Glycine max
  unsure (1)..(456): unsure at all n locations
agctngttcgcacatcgttcgcgtgttctattatcttctcgacagggtttgaagtagaggagaccttcaatcctataacgcaacgtggcggacaaaaatgggcagataacttgaatggccattattgacaatgcggaaggtattctgcgcttcactatccatgttcacacattattgcagcttgtggttacgtgagcatgaactactaccaatatatagatgttgtttacaccaatgaacacatcttaaaagcatactccgcacagtggtggcctcttgggaatgaagcggcaattcctccttctaatgaggcatggacactaatccctgacccaactacaattcgtgcgaaaggtcggccaaaatcaacaaggataaggaatgagatgtattgggtcgaaccatctgaccaccgaccaaaatgtattagatgtggagctgaaaggcacaatatgc

SEQ ID NO: 228912 - DNA, 483 bp, Glycine max
tgagaaacacctgacgcaattcatgcatatctagattatttttatataaagataaagaaagatttgactagccaaatctatcgagaatatatgtcatgtgatccaatcttaaatcatatactcttgtattatataaggatacacaattttcttctcctagaactttatagacaatctctcttacaaatataaaataaattattagataattcaagtttgagaagaaagaagagacaaacagaatcttactgacccactaaatggagaagatgaataataatcaaataacgcgtgaattactatgtgtttcaagaggtgagtaaaacaaccttcttcttctacacttccatgtgatagatcttaagcaatgcgtctttttgagtttactggtcatacatcgataaatcgatacactaatccttgcatggattaatccttgtgatattgcaaattcacgtccataatgttcttgcatgaattatt

SEQ ID NO: 228913 - DNA, 295 bp, Glycine max
  unsure (1)..(295): unsure at all n locations
gcacagtcccgcgtggaggcaaacataccgataactcttgtcacgatattctcagcggactcaagcttcgatatcagataaagttactgaaactcatcgcgaatgaggaanaataccacagcgaattgaaggagtcgtgtctgttttgaatgatttcgtgacttaccgcctgctaacgattcttgaagaacgagttggagcaactctttagagtgaaagataaaagaacgtgctatatgagtacgcacagcgctagcgcatatcagctggaaaccgcgctagctttcatgccaca

SEQ ID NO: 228914 - DNA, 334 bp, Glycine max
agcttaaggctagtgttcgtgttggattctttattttgtcccgcaagctgttattttatcaagtccatgctaaaacatctaatatcatttgggttctgggaacattcttcactattgtcattctcaaatgtttcaaaaaaattcttttgttgtgtctgataaaaaataaagtttaaaaaaatactcgttgttgattcttcaaagcatgttatgctcagaaaaatttctcttaaagttcaaaaagagttcttatctataatatactaacaaaatatcaagcatgccaaattagtcacaataactcacgtagtacataatgcactaagtctgattt

SEQ ID NO: 228915 - DNA, 491 bp, Glycine max
  unsure (1)..(491): unsure at all n locations
nacccncatgacanagnacatgataatacaagaaatttttcttactacanagactactcagaatgcctcgaaatacaatgctaaaaccctatactactagaatggccaaaatacaaggcccaaacgaatgataaacctattctaatatttacaaatataagcgggctcatacttagcccatgggctctaaatctaccctaaggctcatgagaaccctatggcctgcccttggatctctggcccaatctacttggagtcttctatccaatgctcttacagggtatgattgcatcacattctaaaattcatagaattatgcatagattatcactcacagctagtcgttcactcacagagtanggtcacactctcaccggttatggatcaagcttttctttctcaatcaatctgtctactgactaacaattctaattgcaagttcacaatctctgtctcttctttgtctaacatacacaaaatgctcaaactca

SEQ ID NO: 228916 - DNA, 289 bp, Glycine max
gctgcatgcagctcaccttatgggactcaatattgttgttgagaaacatctctatattcatctccctccaagttgccccgaatcattctttcttaaatggagaatgttgattaataccatcattcggtttgtcttgaacacacatccctctactcccttctactttatatgagcctatttccattgaccaccttctggagccatatctcttgtttattacccctcaaagctcataaacccgcttggaatgctaacccactcatattcgaatttcctgcatttttacaac

SEQ ID NO: 228917 - DNA, 347 bp, Glycine max
  unsure (1)..(347): unsure at all n locations
aaaaccaaaaactattggggacccctttttccgctttctttcacaatttatatgcctacttccttacatggattaacctttataaaggtttttcataattaatacctccaaattaagtttatacccggaagatctagtttaaattgttaaaccaagatgtgtgagttgttataaaattttaaatagcattattaattctatgaaaaaaatatttaccagctcgaattaaaaaaaacaattatcaaactattaaagaanataaattacttccacagagacgagatgtgtacattaataggatacaataatatatagcggaggtggcaatgtgtctttttaaaaaaaaa

SEQ ID NO: 228918 - DNA, 398 bp, Glycine max
  unsure (1)..(398): unsure at all n locations
agctnatccagagaggaccttatatgttttttcttangtgaagnataaccccttcttttattctaagaaaataataacacggtcttgcagtggaaaagggcgacatcacaagaggcactgtgttcactgatacactgtctctgcctcacacaacagctattgagttcatgcaaacttcagaaacgacatttctatttattatcaaacataatttgttgtatttaatatttggcaaaactttgacttccttcaattcttaatgtggcaatttacttagctacatgtaatattaagtcatacatatgtggcattgcatatgctctcctgaaaatagcgttttgtttcggcagctctgttcctgatgttaaaggttcatttaagagcttcccaaagcatga

SEQ ID NO: 228919 - DNA, 414 bp, Glycine max
  unsure (1)..(414): unsure at all n locations
agctntacttanaattaagaaaagtgtcgatgaattgtcttttaaaagtcgcaggggcgctaaattaattaacagaaccaattaaaagtgatgctgatataatataatttataaatatataacaacgaagtgtgattaattgacagatagttaggtcgattaactgtgttgggttttcattcttgctgttatatatataaaaaaaaaggacttcatcaccagagattaagttcgctccagtaatttttacacctcaaaaagattaatctttaactattgattagagggtatgcctacacacacaaaaacaaattcaaatttaacagtaatgtacgaattagaaaccaccttttgtttcaccgtttgttgtgagctacttaacgcactacatatatacttaacctgattataaac

SEQ ID NO: 228920 - DNA, 478 bp, Glycine max
  unsure (1)..(478): unsure at all n locations
tccatctgaagcttctccananattgctgaagagacaccactggctgaacatgttggagacaagctaccatcggaattctcttcagaaattgttgaagagacactactggcagaacatgttggagacaaccaaccatctgcatcctctttaaaaattgatgaagagacaccactggctgaacatgtgatagacaactccgaatcctcttctaaaactgctgaggagttgccactggtagaacatgttatcgacaaactaccctctgaatccactacanaaattgctggagacatgccactggcagacccccctgaagaatatactgaagtgataaacccacatggcgaccaatcttccactgaagctccaacaatttcacttagtaatggaaaaatggagcctggtactcatttgccagtggacgagttctctgaattagcaagtgtgccaaatgcttctgttgatcaaacttaatac

SEQ ID NO: 228921 - DNA, 393 bp, Glycine max
  unsure (1)..(393): unsure at all n locations
agctttgaacaaattctaacgacaataactttttattcggatgtctgattgagtcttgtaatgatgaggacatgttcaagagcaagggcaaggatccacttgaaggacttggaggacctatgacaagggctagagcaaggaaagccaaggaagctcttcaacaagtgctgtccatactatatgaatacaagtccaagtttcaaggagaaaagtccaaggttgtgagttgtatcatggcccacatggaggaggactaaatgacaccactttgtctcnaatttagagtgtttaggttgtctaaataatggcccaatcctagtaaagttggctgaccaaaaatatgttttaaggttagttcaagttgtaataagggcccaattggcacctatacat

SEQ ID NO: 228922 - DNA, 483 bp, Glycine max
  unsure (1)..(483): unsure at all n locations
actaagcttanaacacagcaacacagaatctggtgtgcaacacccttatttaatgggttctctaggtttgagaagtgaaatttagaatgaggtaaatttggagcaaactctcacctcacacaagtctataacatcaatctaaacttgctcaaactggatttacacctaaaattccaccgaatcaaaatttgactcttcaacacccaaatttgccctagaaatggctctttgttcactttggtcatttgtttttccctctatcacagcctaacctttctcataagtcctaaatggcatttcaagctaagattaactcgctctaacctctaaatactaccaaatccagatttggccttccagccctcaaaaattcactctttttccactcataacaccacattntcactttctaaccctaggttaattctaccattcatctctaacagctntccataagcaacttcagcatataaacatcatcac

SEQ ID NO: 228923 - DNA, 321 bp, Glycine max
  unsure (1)..(321): unsure at all n locations
agcttaataaacattatcaatttgaaataatatttgtaacaaacgatgttnttataacattaccaaaaaaaaaaaaagaaataaaaatagccgccacagtgcagtgaaagcagtagtagaagaagaaaacacgagttacgcacagtcccggtgccgccaccaccaccattggtttcagtcaactaatggcaaccactctcactccaatccaaaccctcaaattctgttctcccaatcccaaacctctcttcactcccaaacctctcttctctcccaaacctccttccatctccacacctcacaccttccgcgccgataaac

SEQ ID NO: 228924 - DNA, 436 bp, Glycine max
  unsure (1)..(436): unsure at all n locations
catagtaaacattcgcatgtatattcactgtttgattgaatttaatgtgcatcatgatcataatatagcaaaattcacaggtgaatatacctctgcttgttctacagagaaagtcgtttatactttagagaaggtttttccaaatttcatattaatataaagatcattctatacagtgaaaaattatttaaaaaactaaattttaatatttaaaaatttatttttattcattgtggtatatttttcattctttctgatgtattgntatttctatattttaataaaatacatgtactccaaattctggttggaatgctattcttaaccctcttctttgactgttatatttatattccctaattaggttcttaaaataatggctactggtgtgttttgtagataataaaaaatgaacatcgacgtgtaagaatgactc

SEQ ID NO: 228925 - DNA, 421 bp, Glycine max
  unsure (1)..(421): unsure at all n locations
agctggtctcagcgtttatgtgagacagagtctattatgttagctatcatcagcaagtaccaagaagaattaaatctagccatggcccacgagcacaaagtggcgggcgagtatgcccgagtgtacgcagaaaaggaggctagaggaagggtgatcgactcgttacatcaagaggcaacaatgtggatggaccgatttgctcttactttgaacgggagtcaagaacctccccgattgctagccaaggccaaagcaatggcggacacctactccgcccccgaggagatccacggacttctcagctattgtcagcatatgatagacttaatggatcatataattagaaaccgctaggaagtttgtattgcactcagatcttntataactttctgaataaatgagttattccacgtttactcca

SEQ ID NO: 228926 - DNA, 471 bp, Glycine max
  unsure (1)..(471): unsure at all n locations
ccttctagggaggatagcatcagagagctatttatnattaagctctcttagaacatctctatcttacttttcgaagtcagacacacattatatagacccattgtgccttttcaaaatggtttgaagagatgtgtcttttcaaaaagttcttctgaaattttctcactagtaatcgattacaggtttctggtaatcgattacacagttatattgtgaagggtcatgacttttcaaagtgttttctgaagtgtcgttattggtaatcgattacaaacatttggtaatcgattacaagattcaattcaaatttcaaaaccttgttgaaaagcccatgtgcaaacttgtctctggtaatcaattacaatgtctggtaattgataccagcgccttgagttgttgaaaaaattgttgaggccaaaactgacaacccggagatctttacatataactaagcctatcttttcttgactg

SEQ ID NO: 228927 - DNA, 404 bp, Glycine max
agcttactcccaccttctccactgtacctctttccaagagcagctctacacactatatcattggtgagtttaaaaaataaatcagttaaattcacaggcatcaaggaagaacaacactgcctaatattctccatcattatggagatttcctcttctctcactgcaccaaaggattgaacctttttggcactgagaagatgaaagacacagatactccttatctccctccaaaaatggccatatgaagaagataccacatcttgggaaccatacaagaggatatcaaacatcttacgatgtggtctgttggagaaaaccaggtcatgtgttttcataacttcacgagcagcctcagcagttgagacaacaagaactggcacttttccaaaatgaagtaacatcaa

SEQ ID NO: 228928 - DNA, 504 bp, Glycine max
  unsure (1)..(504): unsure at all n locations
ngacggngtcgtgtcgcatcgggaacaatatcactataatagtgtcgttcttatnggattcctaattctaacttacctatgtggaagtgacatcatggcaactacgtcccatctttccattgtggattcagtcacaaaacaaacttaaatatgttggactatctaacacggggattttcgattctattcccacacagatgtgggaagcactttctcaggttttgtatttaaacctctctcgtgatcacatccatggtgagattgggactacattaaagaatccaatatctatccgaactattgatctaagctcatatcacttgtgtggaaattaccctatctttcaatgatgcgcatcagttagatctttcaacaattcattctctgaatccatgaatgactntttatgtaacgatcaggacaagccaatactatataaattctgaatcttgatcacataattcgtcagagagatcctgattgtggatgaatggacattcttgc

SEQ ID NO: 228929 - DNA, 334 bp, Glycine max
agcttccttaagaagatgcctaaggatgctagagcttagctacacatacctctctaatagctaagctcaccaccttgagatgagaagctagagcttagctacacaccccctataatagctaagctcacccccatgacaaaaaacatgaaaatacaaaaaaaagtccttactacaaagactactcaaaatgccccgaaatacaaagctaaaaccatatactactagaatggccaaaatacaaggcccagacgaaggaaaaacctattctaatatttacaaagataagcgggctcatacttagcccatgggctcaaaatctaccctaaggctcatg

SEQ ID NO: 228930 - DNA, 271 bp, Glycine max
ctaagcttagccctcatatccttgctgttggactatacttataccaaactagctctttgtctcaggatacttcaatacagagcgtaataccgccatgcctcttgttataattagactcacttttgcttcattcaagttctaatgcagctatacatctaccactgttattgtcacctatctaggcacacaagtggtcgctcagaataagagcattcataatataattgctgaaataagcattgaacacaagaaacaagatcaattccatatg

SEQ ID NO: 228931 - DNA, 458 bp, Glycine max
agctttctcccaagtgctagatgacatttcttgctagtattaactcactttaacctccatttaccacagaattcagacttagctttccaactctcaaagcctcactctttttccactcataacaccacattctcactttccaaccctaggttaactctacatttcatctctaacagttttccatgggcaatttcagcatataaacatcacaaacatcatcacaaaaccctaaaacagtatgggtatgtttaactcatccaaacatggcaatttcaacaagttttcagcaaatgccttcacaaataatcatcacacagcagaaaactaacaaaaccacccatcatatcttccaaaccccatacccacgataattaagagagaaagaagtccacccaaacctgaattttcgaagtcccactcgtagccacgcacttcacgaacccgaaaatgctctcctt

SEQ ID NO: 228932 - DNA, 368 bp, Glycine max
  unsure (1)..(368): unsure at all n locations
tanggatggaacacttacttgttggtgatgaacattttctcttaacggaatananaaaaagcgnaaaaggatgaccctatggctgcaaactcgtcaatcccgtgggtatggctttgaaaagggggggaaaagaagtttttgaatgtaaaacgccccccctttcgtcattcttataatttggtgcaggggtggctcgcccaggcgagcccagctcgcccaggcgagctaacctgcactttnttgtttgtttttttttttttttgaggggaacattaaccatgtcccctcccttctcatggattagcatcttgcctaacttgaacttacttaggttagaattatgcgctgattacttattttattattat

SEQ ID NO: 228933 - DNA, 455 bp, Glycine max
  unsure (1)..(455): unsure at all n locations
agctngnnggagaacttgcatgtggtatagtcttgcttgtgcaagagctataagtgacactaaaaaatacttgtaactntgatagcttaatagaaatttgatggattgtcaagaagtgaacgtactctcaagtttgagatgaactaatacaattctccgtgtgctttctttttcttgttttaattgacaaagaatttaatgaatttgtttttaaatcttatatatttttttgtttcacaaagaaaacaatttttctcattgtttaacaaagtctgtatcaaaaccttctttcatctggttttatgtttatctatatcagacgataaacatgnttttatctttaaaaaaaattaaatgtctaaaaacacagttgaattggttatgtatatccttctacaagaataatgcatgtactattcagcttgtgactttctatttcttaaattggggtatgt

SEQ ID NO: 228934 - DNA, 376 bp, Glycine max
cttaaccttgagctgtgcctgagctagcgtatactggtgctataaaatggtatgggaggatagctgcatttatgctgctgcacaacgtggatcttaggcttcattggttgggaaaacattggtgagactatttggcttgatgtgcttgaaggaaataaactgaagctctcatcaatatatgtgttattgaggctccagtttagatgcatatcacgtgtggtgtatatcagatgtgcatatcagtataccgagttatgacctatcatgtgaggtgtaggtgaaatctgaattctgccaatacatgtaggaatggatgtggtatatatgatttgccaaatacaggtaggaaatggctatgcaattcttccattatatg

SEQ ID NO: 228935 - DNA, 402 bp, Glycine max
cgctcggatgcctcgagttattataaatcatgtttcgacttgtgttgaacattcaataatcaatgaattgccataagcattcttctataaaaccgttctatgtcttaatcgaaaccgataattgaaaatagtattatccaattcgtatacaatgtacatatctattatttccactataataataaaaataattcactatccattttcaaaaaataaaaaatcactatccactaatcaaaatttcaggatcagtcgctggctgctatccaaaattgattattatgatttaatataatccaatcatggctatctttaacaaaactaacttaaaaaattaactaaagttaagaaactaacttataaaattataaatatttgataaaaataactgaaaaatataaa

SEQ ID NO: 228936 - DNA, 468 bp, Glycine max
  unsure (1)..(468): unsure at all n locations
atccttgagtcacctgcggctgcagctatatgtgaaacagtgctttttttttctttcaagacttatgggcaagtggcttatgtgcaaataagcatgtactaaatagccattatttagctaccatttgggaaaaagaaatcatgattacattgttgttttgacaccatgattttaaacttaaccacctgtgcattgcagtaagaatggaggctcaaagaagaagtgatgtgaaataaggaatagaaaatcattctctataattacaaatatggtagcatattacaaacagaaacattggaacgggaaaaaacattctgttttcaaaatantataattttcaggaatgcaaactccatttctaggaaacaaatgtgaaataacacgaatcagcaaaaaaaaaaaacgtgaaataacattccaacattttttttatttatattctcggcaagtgaaatggaaattttaatc

SEQ ID NO: 228937 - DNA, 396 bp, Glycine max
  unsure (1)..(396): unsure at all n locations
agcgggagagttgagacggggtnatcannatgatgagaaagaganngccgatccgggaacctctgggagtctagggtcactgcaatctatgccttctaatcgtggagacaatgacgttgacggtagcactacagagacgggtgaatcacatgatattagtgatgggcatgaacattctcacgttgagacacaagaggagagttaagaagaagagagggtccaagcacatcaaagtgaaaagagaaattcttctgttcaacccgaggcatgaagtgatactgagaacagagatgatactgacacttctattctacactctgtgactgttgaggaaaccaataacactgatcagtcaaatatcgaacactgagtcagtgtgactccaccaaatgaatc

SEQ ID NO: 228938 - DNA, 418 bp, Glycine max
  unsure (1)..(418): unsure at all n locations
tcatcatgcgnnnacatctgtctgatacggtcatatactttctagcangaatcgaactcgatgacaactaggtgctctggtacttacaaaaacaaaataagacaacttggttctcgacttgaatcattcattcatccgacaaatacttgacatattgattcgatcaaggatatatatccgcatattgctgatacccagaatcaattattttatcaataagataacatatctctcttgatcttttatgtatatatccagaaattcgaaaacaatattaaatacttttctccatattcatctcttaaaagcaatgctttatatgcttattataaataagagacctaataacagaaagtatcgtattctatcataacaacagatactgagttcaacaaagacgacaatacactatcatcat

SEQ ID NO: 228939 - DNA, 460 bp, Glycine max
  unsure (1)..(460): unsure at all n locations
agcttagcgcancaggcgcactaagcgcactttctatagttcaaaaatcgnaagggatgggcgcttagcgcttcctggccagctaagcccagcttaaaagctcaagttatacaatggattgggggcttatcgtaggagatcgcgcttagcgctgctacaataaaatttttccagagaagaaggggcgcttaacgcatcatcaacgctaagcccacaggttaaagttcaattaccgcaaagatgtggggcttagcgtagtgatgtgtgcttagctgaactattcagccaaccaatcaggggtatgtgcacttagcataagcaagctcagcttaccgcgagaagactgagtgcttaacgcaaggtctgcacttagcggatagacaatttccaaaaattctacgtttttcttgctatctttcacacaattcaaaccccttgtcatactaaataactgaattat

SEQ ID NO: 228940 - DNA, 499 bp, Glycine max
  unsure (1)..(499): unsure at all n locations
tccgtagcttggtgagtatgtggaagtatacactgctaccaagtacccactaagtagtcagttaatcatggttgataacttttcgctaaacaacaaattaattagtcagttgacatattatatgtaaaaatccaagcggtggggattaatcttaagaatcatttgctaccggngaagtgctcctacacccctggattatcatgtctgaagtctcctagctggttttccattagcaactaattggaaatataattatgtataaattcgcctactcttacatctggcttcgcggtgccttctttgaagaattggatacgctgtaatatggctgcttaccctagtgtcactgaaatcagtacactattagaaaatatgctttctacatcggttatttatgactctcaacatcggtttttaaccgatgttgaaagaccgacattgatagtattattcgtaacatcgcgttttaaaaaccgatggtaacgtataattaccaaca

SEQ ID NO: 228941 - DNA, 352 bp, Glycine max
  unsure (1)..(352): unsure at all n locations
agcttctacttatgtggcagggcgggctcatatctttttcttgnctcaactgcgagctttggccactgcttttccttcccgcgatgcttctcttcatatccgcctgagtgggcttatagcctaaaccatacttcccacgatttcctatggcatttatcaggctagttatgtcgccgttgtctttgcccaaacccattccgggttcgtaaccgtttcccaacataactcgggccatcattactgctgcatcggacaggcaaggctgcccagaaaaggaatccacggaggaaatgcttaccacctcgaaagactggaaagcggtntctaatgactcctctgcggcctccacata

SEQ ID NO: 228942 - DNA, 408 bp, Glycine max
ccaagaataatggcctcagcaaacttcttattgccataatgattttctataaatacgcctcctattttaatggagagggttaccactactggaaaactcgaatgcaaattttcattgaggcaatagatttaaacattcgggaagccatacaagttggaccttatgtacccaccatggaggctggtcatacaataatagagaaacctagagaagagtggtttgaagatgaaagaagattattgcagtacaatttaaaggctaaaaacattattacttctgcccttggaatggatgaatattttacggtttcaaattgttagagtgataatgatatgtgggacactctacaagttacacatgagggaacaactgatgtcaaaagatctatgataaatactctaactcatg

SEQ ID NO: 228943 - DNA, 331 bp, Glycine max
ttctgttaatacttaattcagttcggctagatgttcattacactagaattagggttttattatggattcaatgtgcttgttttgattagggctaagtggagtgctgagaatcctttgctttctttggaaatcgtgatgagcgcgcttatcgccttgctactctaagcgagttcatcgttccattggatttctaaatgaactcgctaagcgcgaccctgtcccgctaagcgagttcatcttctttgattgaaagttcaattgcttatgaactcgctaagcgcgactgtgcgctaagcgagtaatatgttctcagacacttaaaaatttctat

SEQ ID NO: 228944 - DNA, 476 bp, Glycine max
  unsure (1)..(476): unsure at all n locations
ctcaagctcctaaccatatagcttgacaagcactcatgctagcagctatgtttttctctctccangacgataaggccactaccgattgcttcttagaacaccaactgatagctgtacttcctagctgaaacaaataccttgcggtactctttctatcagttatatccccacaccaatcatcatttgagaagccaatcatcttccaagaactgctactcaagcttgtaggaaacagcaaaccaaaaccaatagtccctttcaagtacctcagtagccttttcactgcattcaaatgaccttgttgtggtgctctcaataatttacttaccaaaccaactccatatgctacatctggtctggtattgcatatatacctcaaagagccaaccatttgtctgaacacagtcatatccaccaatgtttcacgcccagattgatccatcacaacactagtttcaacacgagttgaaactgag

SEQ ID NO: 228945 - DNA, 467 bp, Glycine max
agcttattgcgttattggttgtgaatttattgatgttcatatttctatttacctaagtataagttatttgtaaatccttattgtaaacatatttgttttattttgatagggtcatgggaacaccaccaccgtcacccccgcagtcagatgttcggtcagagggtatgtctaggaatacgagataatccacatgactcaaacggttgactttaagaaccttggatcagcccagaccaattgtcactattaatgctactactgggcgaggatcgggcccacataaatagaagtttcacagctatttaggggtcttagccagagaaaaaattccaattgtacataacacctggaaagatgtaccggacgcgctaaaagacctagtatgggatgacattctggtaagtgacgtcattgttaagcagtgtatttttgtatgccaatttaactggttaaacctttgaaattat

SEQ ID NO: 228946 - DNA, 472 bp, Glycine max
  unsure (1)..(472): unsure at all n locations
ctatagcttcatttttttttccaacttgtggattntaactcttagaaattggattctaaaactttaaaaaaataccttgtaggtttagataggttccaaaatatctaaaccttgctctgagcccaaaagtagcacattataattntatagggacaaaactagacggaaatctttgcaggactaaattcgaactttggtaattntcaatgacaaanaatatatcttagccaacaatctatagaagtgttacccatcacattgaaattaatctaanatgagctaagtatgattcttgctattttggtattgattgctaatggcaaaatatgataacatttctcacgcttaaataaatatatcctccattctcgtaatttagtgttttggtttcagccttacaatgtattgtgcttaagctttggaatctattggtctgctttatcctgacgtcaatttgcttaaaaatgtgaca

SEQ ID NO: 228947 - DNA, 409 bp, Glycine max
  unsure (1)..(409): unsure at all n locations
agcgttncatgcttattacgaatgagagcgttgttatcctttgccatcgctgctactaacagtgagtggaataggatggaggctagatacggtgcggctactaatatatatgctatttctatgggcggcgactgtatatatatgcttctcctatttacggcctttgctgtctgcacccatcataaatgctgctgcacccatcaaataatgtgaagtggcaaaaacgtccttcacattaatttcaaagacccttccttctcattatacttcttcctcgtgttgtatgtacagttagtgtcactatctacatcattcaccagacactccatcgcaatcgtcgtcgtattctgcttctgtggcgaagtagctcatcgtctatgtcgtagtttgagggttgcattgtatatga

SEQ ID NO: 228948 - DNA, 494 bp, Glycine max
  unsure (1)..(494): unsure at all n locations
ctatanaatactcacacttcgaaccctcagtcctccaatacaaggagtggaagctgtctgtgttcaccatntgcattagacacgaaggtcagacatttaatgcctaataagcgttatggtccaactcaacaagtaggtgataagatgttccatataccaactggataggagtagtcctgtacgggctctgtatgctggtatgtatgcccatatagcttcatcaagcttttgggaccaatccttgcttgattgagcaactatttctcctaaacatttcttaacttccctattagaaacttcatcctgctcattggtctgaaggtgtgaaggtgaggctaccttattttcgacattgtagcgtcggacgacttttgtgagttggacactacaaatatgacatcctttgctcttaatagtaccctgagtgtgcaaaccttgagaagatattcctttttacgaagcgaagaacacgtcctgcatctacatgctatacc

SEQ ID NO: 228949 - DNA, 415 bp, Glycine max
agcttataagaacaaaattgccttatttatttccaaatatgcatgtgaattaggacgcatcaacaagaatcaagccaaggctattgtgcaagcaatcaatggggcaaaacacaccaaatgattataatgatggatggctcatattctcacaaaggtaaaatcatcactttcaaattgagcttttaaaactatcatgacatgtagagaagaatcaaggatttcaagtcacaaaatgtcaagaactttttattctaaaacaattacccatttcttgaacatatcctataattcaaagaaaaacatgcaaagtcgtacgttcacatgaaattgacccaaaatattaaactgataatccgacgaaactaacaacattaacaaattaacacaactaataaatttacaaaaccaactaaac

SEQ ID NO: 228950 - DNA, 416 bp, Glycine max
  unsure (1)..(416): unsure at all n locations
ngagtgcgttcctgggtaggttctgtagtatccatattatgaatggatgcatccacttcctatgtcggtgccatagctctaggttgctcaagatcaacaatgattgcgtgagtcctgcaaatggtcacttcaactttctttgtggccaaggttattcttctctcattagcatcaatcctttacttccatgtctattcatattgaccctatgtcagatctttcttttcacatagatgtttgacccgagctttgaacttctcttgggacatccttatcacatctaagacgttgtggttgaagatgatgggcacttctttatactttgagtgaagtcatcatcagagttcttaagcaagcatacattggtatcatcgaaatgattaaccctggtggacgcaacacttgtatagaatctt

SEQ ID NO: 228951 - DNA, 430 bp, Glycine max
agcttgattatgttgtgtagggatttcattctttctaagaaggagccacacaccagcctcctcattaagaactaattcctttcttcctctatagcctttagttgaatacaccttagtttggctcttaaccttctcatgcaacttctttacaaactctgacctagatttcccttctttatgtataaaagaagtgtaaagtgtgagggtaatgaggtctaagggtgctaggggattgaacccataaagaacctcacaaggggattgcttggcggttttatgaacccctctgttgaggtaaattctacatgaggaagatactcatcccaagacttattggtgcctttcagaaaagcccttacgagggtggataacaaactattcactacctctgtttgccatcagtttgtgaatgaccagtggtatagaaatg

SEQ ID NO: 228952 - DNA, 407 bp, Glycine max
  unsure (1)..(407): unsure at all n locations
tagaaactaagctngagcacaaggaagaacgaagtcgctnccattttttgtttggctnngacgttatctcggtacgactatacaaattgcaatctcgaaatacctcctcctcttctgcttgtcaccaacaccaacttccttgcacttcatgatcatggacaattctactgcttcaaaatcattataacactttatatgttcaaaagaagccctagaaggatgcaaagtatcggcgatctcttgaaccttaccaccacttccaacactcccactagacacatgagagacctctttttttcaagatctcttctaatgaaaaccatttataaacacttgtctcttttgttaactcaactccgcttgtcatatctactttatgcttaattcttccacctcagatcctggtc

SEQ ID NO: 228953 - DNA, 457 bp, Glycine max
agcttgagaatggagttgtgtggatattttttcaaataacataaaataccaaatgagcatcaaacatattaagtcatattatcgagagaagagtttaagaaatacctagatccatggagttcgatcaaacaaacacagttgtttaccttcacaactttgcatgaaaggttttttatgtgagacccacactgtttttagagatttctttggtatttcaatccgatcagattatggaagtttaatataactcaagctcccattactctttctttctcttcatttcattgatattttgacttcaccaaatagatccttggagtgttaaatatatcattgtgattcattttagaacagttctgtgatatctcattgctattgcatggccaaaaccttacatttgtctatgaataaatgttcaaacaataaaacatagcggggaacaacatattaaacatat

SEQ ID NO: 228954 - DNA, 398 bp, Glycine max
  unsure (1)..(398): unsure at all n locations
agcttgtagaactactctaaggaaagaaagctttgggtgttcataaacaagctggacgaggcaggtaaggttttgagaaataaggcaagactggttgcaaatggttactcacaataggaaggcatagattatatagaaacctgtacttcttgtgacaccctctactccacacatatatgtactaataataaaaagaataaaaatacagaattaattaatagttttaaaaaacatttaaataaaaatatttcacaagggtaaaaggatcacattcgctttaatattgccaaataaaacttataanaatacatattcgactcagagcgaggccgtcaaagtttacaaaagaaatattgttaaatgagtgacgtaaaataaaataacatcatgcaattaaa

SEQ ID NO: 228955 - DNA, 497 bp, Glycine max
  unsure (1)..(497): unsure at all n locations
acggaactataaaactaagcttgaagacagganaagcaantcctaacaatgcgtaacctcttataattgnncactataccntaatcacctcgttaaaacattttctggcaacttataactactagaaaattaatcattgtgaaatataattaaataataacaaaattattatcacatcatcatttaacaccaacattttatggcaaaaaaccaaaatatcgaacaaagacttcaggaactaaaactagtcaattttttgttaagagcctataatgaaaactcaaaaaaaattatgaaccaaaaacacaattaacctgattttctttntaagccatgtttgacaagacatttcaattagcttctagttttctactagctaaaaaacttatttgattgtttagtaaataattttttttaagatacttctggcatttataaatggtacttcaagtaattctttaaatgctagctacaacactacttttatattcatttct

SEQ ID NO: 228956 - DNA, 382 bp, Glycine max
  unsure (1)..(382): unsure at all n locations
gacacccatagcataccaacttcttttgagggaaataggtcattaagtgtggaccatcactaagacattgagatcctaacaagggcacaactaaactctcctgaggttggaggggtcaaaaataaggctctcttctaaagattccacttcttagtgctagaggatccaccaccatgggttctgatcactntgctaccaccttctaggcgcccacagattatgccttctttaccaatgcaggaaattccctataaaccatagggaccaccatcttcttcaccttaagcctcaaataatctcctagtttcctacacttccaagcttaagaagaagcttgacagtgaacaaaaacaaaagggaggaacattcctcacaatatgga

SEQ ID NO: 228957 - DNA, 398 bp, Glycine max
agcttccaaattggtataccatgctacagctgccttggccaagctgacttgaaagaaatggaccaacatattttcgtccgcagaatacgcccccatctttcggcaatacatccgaagatgccccttcagacatgtctgccctttgtacttatcaaagtctggtactttgaacttgggagggatgacgatgttgggtacaagacataaatctgctaaatccgagaatgggtaattgccaaggccctcgactgctcttaacctctcttcaagcgcctcaatctttcccttatcttccgcgaaggggacagattcttttacgggtgtgggtgaggccgggatatggcggactatgttcggttgggggagttcatgtggggacggatccttgaggtggagca

SEQ ID NO: 228958 - DNA, 517 bp, Glycine max
  unsure (1)..(517): unsure at all n locations
tatgctacacacattaataatagacttcctcagcagcaaatccaactacagctgaatcattatgacctttcaagcaatagatacaatccgggttggaggaatcatccaaatctgagatggacaagtcctccacaacaacaacaatctataccttctttccagaatgctgctggtcctagcaagccatatgttcctcctccaatgcagcaatagcagcaacagttcacaacaaagacaactagcaactgagacccctcctcaaccttccgtagaagagttagtgaggcaaatgacaatccagaatatgcaatcttagcaagagataagagcctccatctagagtctgacaaatcagatggggcagatggctactcagatgaatcaagcttagtcccaaaattctgaacaaattgcttcacanactgtgcagaatccgacaaatgtgagtgccatcaccttgaggtctggcaaccaaattcaagtgcctccacaagtagcagcacatgcacctgaacct

SEQ ID NO: 228959 - DNA, 440 bp, Glycine max
  unsure (1)..(440): unsure at all n locations
tatttgtgtatactagataatagagatgaagttctgtcatatatgtttcattaggangctctagttagggaatgttatccatacacgaccaacaatatggggttgagataacataatgagactgtcctagattggtgtaaagatacaatctatggaggtgataaattgggtaaagatacaatcttttgcaatgataatgctcctaaaatgattatgcaaagcatatgagcctaaaataaatgatacaagttggcaaggatacgatatctacaaatatttgttctacaccaaatcacaaggcgatgaaagtacaatgcaccacagtggtgctggtcttagggcggaattccaacacttgctatagacataatgaaatccttgactacatccatccaaactttggagtattgatagatctggatcttaatatgcaaattcta

SEQ ID NO: 228960 - DNA, 441 bp, Glycine max
  unsure (1)..(441): unsure at all n locations
gaccttaagncacctgaggcatgcaagctnatacggcctaggatgtggagtggtgtctatattctattcaaacacaagtcttgcacttgccacattggtacaactccctccatcaaagatcaccatgcaaactttgtcattgatcaaacatctagtgtggaaatttttttctctttgactttcctccatagacttcaattgatggccaagtaaccgcctaatcatcaacaattctccctccagtgttttctccacttcctcttcatcatcctcactctcttctcccttttcaacttcggactcactaatatactcttcatctctaagaatcatggctttcttgtcagggcactcatatgcataatgtcccaagccttggtgtaacataccattctttcgcatataaaatttatgagaataatgaagttttattatcaaata

SEQ ID NO: 228961 - DNA, 273 bp, Glycine max
ctaagagctaaccctcaacacttcgactcggaatcttccctcaacaagagacacacaggtaaaaagcaacaaaaagggcgaccaacagccccacacaggattgttcctaacttgttggtaaggaaagctcaatgaaagttaattaaggaacatatctctataccaacaagtttaagaccaacccactgtggataagcaaaagctcctactggggctctctacctgagcgtctctcgttgaggggatgatagcactcagaacccaatgggagga

SEQ ID NO: 228962 - DNA, 403 bp, Glycine max
  unsure (1)..(403): unsure at all n locations
agctagngttattctcatagataagacatgcattatgcccttngacactgtatccacttaaatttccatatgttggaaagtcattaattggctgcctacacatcaatatcattccctggctgcctaggacccgctatcatcatacacagggtaatgtatattcgcaaaatacacaaccaaggagggaggttgtaaatcatcaacaaaacaggccatgaactatggttggtgcttaacttaccatacggattcattccatccgaaacaagagcaagccttatgttccttggctcgtccccaacatttggataccaacaatcaattgtcttccattatggagaatcagctggatgtcggactaatccatcactctttctgtcatctacatgacatgaagggtttt

SEQ ID NO: 228963 - DNA, 458 bp, Glycine max
agagaaagaatgggatgtcgtccctgacgccatacgaatgtgaacaacattactcttcattggtttgctgggccatctttattaacaagtaggtacctgtgctttggtctgacaaggacaactactacaaggaatatgataatgattataggttgataatcaacgtgtgttgatgctatacctcactagtctattgttaatgttcatagattcgtaatggtgaatcattaattcgcataaaagactatgttttggagtgtattagctggaatttgcataattaggcacttgtccaatatactcttgtcaaatgagaggtaattcatatatctgattataaatgctactattaggtatgcagaccctacttttattagtttgtccataaacttattgaaatatgctaagaagatgtcatatgcaatattcacaagccccaattagcgcgttgaatccat

SEQ ID NO: 228964 - DNA, 414 bp, Glycine max
  unsure (1)..(414): unsure at all n locations
tgctagtngcaacctatcaaccactaccagcagcattcactattgttctaaaataccaaatcccaataacctctagaaatagcacacagatctttattttctgttgtcaacactagtgttgttttggatgtaaaagctaaataccttggtcatgtattccaagtagttaaataaccccacattatagtgcagtacctgacccctatatgctataatggtacagcaaagcagctactacacccaatcaaatagtttctatataacatgctccaaactaaagtactcatatcaaaactggagaaacaatgttgggcttggttggaaaacgatgaaagagaggctgacggacacgaatatgcacagggtacatagaccaacatagcatgaacaagtagttggctactggatacttga

SEQ ID NO: 228965 - DNA, 444 bp, Glycine max
  unsure (1)..(444): unsure at all n locations
ccgagctgcagctaagctatataattagcctgtttgtgggtcanatattgtaagaaatattgttgagatatatggcatagttagggaaatattttccatctatgtaattaggaaaactctgctatctttccattatttctgttggaaaatgattctaattcctaactcccagccttgtgtatatggtactgttctcgcgaaataaagcatttcacccatcaaggataaagcatattgcatagatgcctacaggtttgataaattatccatgtactctcatcacttgtgtcatgcttatgcttttactgtttgggttaacgtttaaagctgattagttttctaggaatttgttggcccgtgattttctttgaaaacataacatgaagcattttgtctgatacagtgtccttcaacaagaataggattagagaaatcttgatctaa

SEQ ID NO: 228966 - DNA, 156 bp, Glycine max
gactgggctctctatgatactacctagtgagagtgacctgtgttattgattactatgcgatctagggtagacttgttctccaaagtgcttaatgatatgtatctctgacatatgagcacgattaagatagagttttagtatatcgtgtgcataatg

SEQ ID NO: 228967 - DNA, 459 bp, Glycine max
  unsure (1)..(459): unsure at all n locations
agctntacaaacgaatagcactgggacccttatagtcttaccagctaataagaaagctattgggtgccgttgggtttataagaataagtatcatgctgatggctccgttgaatgatataaggctctacttgtagccaaggggtatactcaaatggaaggattggatttccttgatactatttctccagttgtgaagctcacaacagctcgattatcgttagcattggctgttattcatggttggcatcttcgacagctcgatgttaacaatgcattccttcatggagaattaaatgaagaagtctatatgcagctgcctccaggaatgcaagtctcacaccctaatcaagtttgtcgattacaatgatcactttatggtttgaaacacgctagacgacagtggttacatcgttagactcatttcttctcactcaagggtcactcaagttcagctgatca

SEQ ID NO: 228968 - DNA, 460 bp, Glycine max
  unsure (1)..(460): unsure at all n locations
ctcaagctaagaactgaatnttatttgtctgctgaggagcttctttaaatactgcnnctatgtctgtatttcatatccaactccttttacccactgctatttcttttacatacaaatgcagttgtgttaactgaatattgcgagcatatagtgttgttacgtacaaaccaacaaccaaaaaatatatggctaatgcaaacactccatcgacaaagaacaacccttctctacactgtagcaacctgttcttagcttggaccagttctttaaatggcctgattctacactaagtgctgccagcaacaaaatcttcacaatttcagaacaaatcctacaatacacattgagttagattcacaatcacatgttttcgctagtggttaagctaattgctaatggaggaaaattctactgatgaactattcagatattaattggaagcaatacaacatagactact

SEQ ID NO: 228969 - DNA, 438 bp, Glycine max
tttacacttgcacatttgagaagcaaactcattcgaccaggagctcatggaaggtgctcaaagacaattgtgatagtagggtacatctagtgttagtcactcatgtagactctctagggttcccatgtcatcaagaatcagcaggatcgatagatccatggcatccctctaagatcttaaatcaagagagtttcacttggtcatataccaaagtgtaacaacccattgccatctttcaatggtgcacgtggtcggtccaaaagccttacattaccttgctgtggaaaataatcgaagtttttttttataaacaaaatggagggacgaccctaggatcaatattagttgattgataaatgtcaatggctaactgcatcatcaaattgcaagtgataaatcaacaaacatacctatgaagagtctccgacgatctgcaaa

SEQ ID NO: 228970 - DNA, 402 bp, Glycine max
  unsure (1)..(402): unsure at all n locations
agcttcntgcatccataacatatgatggagtctttgtatctatctttcttttccttgagcaccctttataaggaattattacatctggatccaccattgttcttccacattttgcgaatgctccgtgagatgaaggcaagttcatcttcaacagggtcttcctcagattcttcatctgaggaattatcaactttaagggctttggatgagcttctcaagacttgctctttggatgatgacgccttcttgttcttttgactaatgagagccaatgataagaagaacaagttacaacaagaggatagcacgagcagaccctagaggaaaataacttcaccacagtatttagcagattttatgtgattcagttatcggaggaaaagtgttgagtgagttagtgat

SEQ ID NO: 228971 - DNA, 355 bp, Glycine max
  unsure (1)..(355): unsure at all n locations
ggcttctacaatctcacccttttgtgatgatgactacttcttttaatcttgaaacacacacacccacactntgtcctagtcgatcactcttatagatttccattcttcccctttgtttgtgaatatatgcttctcttaaaattaagttgattactcatgatttcttaatttatgcttatttctctccccctttggcatcaacaacaagacaaagtgcgtaatgtcataccctaatttcgtccggggaccattatttggtggcatgcaaccttcgctggaccgccttgatgtacttaacccccatcgttaggtaatccgtaaagttctgcaacattctngaagtaataaagaaaca

SEQ ID NO: 228972 - DNA, 224 bp, Glycine max
catctgatattaactgcttctgaagccttctgttccaatcaaaattcttctctgagcagggacccttgtccttcatttccagtataaaagcacctttctcctttcctgagaattcagataataagggatttcacttctgaactaataaaaccatagaggcttatacttttaattgaagcacactttcaatagaaaacataatatatccaaagtgattttaagtc

SEQ ID NO: 228973 - DNA, 410 bp, Glycine max
  unsure (1)..(410): unsure at all n locations
tcagtgggcagagggactcaacaagcaataacaaattatttatgtgttggacatatnnnaaaaaaagggtgatcatagacaatttcatctctttacacgaaaaanacttctttcctttcctcttatctccatgttagaagttagaacggatcatattttcatgtgatatcttcacattcttttctttccttcactttttgntgacgctctgaaataacgaacagattaattattttagctagttgtcaatacttgtcattcaactcttaacccttccttttcttttgaaccattcaaaacatagcgtacgtgtcataagctcattccaccacacaagactngattccaagtaaacaaatactccatccggtttatatatagaatacaaatgagtcaataattttttttat

SEQ ID NO: 228974 - DNA, 438 bp, Glycine max
agctttagcttgatacatagaaacatttgtttgtctctactaaaaaagacaactagttgaatgacaactcagggatgttggtgaagttggggcatattgctagaaagagagagctggaatatccatcagcctaagaaaagcaagttctgactctcttaaaagttaaaaccatcatttggaaacttcaaattttgaagacaactcagggatcttggtgaaatcggaaaatattgctagacagagagacgaaatagtcataaatagccagcgattttcttaaaaccaagatttggatgcctcaaacgaacccgggagactcaaaattattcaaactgaagagacgaaatagtcttatatagccagcgaagagagagatacacgcaggagaaggacaacgatagaataggcgacctgaacagtctttccttgaaaatgagt

SEQ ID NO: 228975 - DNA, 88 bp, Glycine max
cggacacaatgacgcagcagcaccaaaaggaatggacttttctagggacgccccaggccctatacagaaacccaacggcgccacaaaa

SEQ ID NO: 228976 - DNA, 454 bp, Glycine max
  unsure (1)..(454): unsure at all n locations
attctactagggactctagacaacatgcatgtcgattttttctttttaaatcatacaaantattcacattcatggtagcaacacgcctagagggtaccttcacatcaagatgcaaatattgtaataactctttaaacctcctatgttcaacataagagaatggaagatcatgctcaacaatcatcatagatatcatctcatataccacactttgatcaattattttagttcttaatctcctagcatgatcaagaataatatttccaacatcactattagaatgtgtcttcaaatatacatcacatttccccatatgacattgtaaggttgaagtctcattcttattgtcatcgcccacataatcttgcanacaatatntgcatgtactcctcactcttccatcactatgtgtagcaggtgtctcagaataattccacacgacttatgaataatt

SEQ ID NO: 228977 - DNA, 282 bp, Glycine max
  unsure (1)..(282): unsure at all n locations
agcttgggagganagatggggagcgggtgtttgtatatactaggacacgggctacgtgggagtacgtgagctcaaatggaggtgggcaacacgggaaggtggttttatgcctgcattgtggatgtggaaaacttagagagcacaatcgctcgaccgccacctagtaccacatgtgatgggtaccccataagcctacaatctcgatatgaagaatcagtaaacggtgaaacttactgcttttaatgttgaccacagagtggtacttgtagatatgttatgggg

SEQ ID NO: 228978 - DNA, 389 bp, Glycine max
agcttctttgttagacctcgagtcggtcatctttctatgccgaggacgaccgtcatttatttcgatccattacggtgaatgatatttctttgcctagatgggctaatgttttcctggccgaataaatgggaaaatgccagtttcggtcgaaacgaaaagtcggttgggctcgcacaaaaaaaccttaccgacctacattttgatatttttatgcaacaccaaaacaagaaaacttcctgtgccgtaaaaaaaaaaaaaacttctcatgacagcgtgctgtttgaaaaacaatattgctcaacgtcggcttgataaatataatctgggttttttcacgaccatgtcggctttgagtttcaattcatccggaacggaatttcatgatgtcg

SEQ ID NO: 228979 - DNA, 476 bp, Glycine max
  unsure (1)..(476): unsure at all n locations
tactaagcttaccggatgacgccgatcgaacatttcctaaccgacgtttgcttatttcgttcanggattgaattgataactcgttatgcgacatctgtcgtgaagtagcgaccgatatttttcagccgacattgcacaattctttttagaaaagctcgctggtcgataatggtctttttacggcagagtaagctttcttggtttggtgttgcataataaagctacaatgtacttcggctaagtttttcgtgcgagttcaaccgacattttgtgtcggccaggaaaacattagcccacctctgcaaaaaaaatatttgctaaccgtcttcatgcatatttcattcaacgattgaatagaaaactcaatagccgacaacggtcgtgaaatagtcccgactgatatttttcagcccgcattgcgcatatctcttataaaaacgctcgctngcagattatgttctcttcaccatcaaaga

SEQ ID NO: 228980 - DNA, 368 bp, Glycine max
  unsure (1)..(368): unsure at all n locations
agctagannttgaccaacataaagaagaattatttataataaacgggatttactggattgcaatgccaggcttggtagagcactttcgaggttaaagaaagtgatcgatgaatccttattaaataagagaaaagccatatcaatatcaattgataccaaccatgcaaaagacagcttttaatgcttatcattccaatagtaaacaagggaattttgactcacgccttgaattcaatccttatacagtattccatcttaactccccacctcaccctaataatatgacaaactcttaacttgtaaggatagccacacttatttaccattacccctagcccactttaattgcataagctgtggccaatgca

SEQ ID NO: 228981 - DNA, 426 bp, Glycine max
  unsure (1)..(426): unsure at all n locations
ggatcatacctagaaaggtggaggagacccatactaatctgcacccttcatatttgaccatcagatactctatgcaatctccaggaaagatcgatatctaatacctacccaattgaacagcaaaacagaaattaagaaacagtatttccagagacaactatttatgcattcccacaaaaaactntccagaaatagccatgcataaacagagaaaatgaacatcaagagaccataatggctctattttggtcaaatctggcactgcatagctcagtctttatgccatctggcatctaatatcaaattcatggatagatgctggtaacatcttanatgcattcacctcaatgaggtagtttccttatantttattaacatanactacataaggtaagagaaacctcatgggcaaccacattcataaat

SEQ ID NO: 228982 - DNA, 390 bp, Glycine max
  unsure (1)..(390): unsure at all n locations
agcttatgaagtgaagcataaacgtataagttttgntttcgattcaaatacctaaagagaacaataatgaggatggctgcaaaaaacctcgtttaaataagaatatgaaatcagaaaagataaactaaataattcaagatttagatatgataatcctaatttgtggtcatatcatcactctcgccttgactttgagcatgtcttcaagctcaaattcatatttgaataagaggtctgctgcggtcatcctcatggttgtcctctccaagtatatttgaatccaaaacaaccttntacatttatgcttcacatcataagcttcatcatctcatttgtagcacatgcccttagctcttcttttaccatctcaccttgttattttttggaatg

SEQ ID NO: 228983 - DNA, 455 bp, Glycine max
  unsure (1)..(455): unsure at all n locations
tattcgatagcgggaagagaaaagagaaatccatattatttcttatcccaagccgagaagcacagaagcaactcacggtttgcgaataattctgaaaaggagagtattagaggccaggagaggtgcaacagagagtacccggtgaaagcgctcgacaacttttgaaagtcagacacgacgtcattctcgccgccaccaccgtgctgtgcagcagcaacatcgactgcgtgcatctcagctcctgcgaaatcctacaacaaaccaacgacaacaatgacaaatcgataattctaaggcttgtttgcgattangagcaaaaacgaacattgtaggacgaagggaaacctgtgcaataaggattggtgaatangagaaaaggaggaagttgctttggagaatgaagaagcgcgaatgttgaatttgatggctgatattatagatgaaattgatgttcg

SEQ ID NO: 228984 - DNA, 444 bp, Glycine max
  unsure (1)..(444): unsure at all n locations
ccgggacctcagagtcacctgcggcatgcaagcttgtaggattatggggtacccatcacaattggtactaggnggcggncgggcgatggtgcacaacaagttttccacatccacaaagcgcgcataaacccaccatcccctgttgcccacctccaactgagctcacgtactcccacgtagcccatatcctcgtttctctcaacaccgggccccccatcaatcctcccaagctttcccaacatcaaagtaatacaacattcaaatagcacaagctatcacagccaagcaaaacagggcaaaggcagaaaactctacccaaaacaccaaccaaatcacagcttttcacacacaaataccccagaaacatttccttcgttccggttcattaaccggttggatcgactccaaaatnttactggaagtctatagtgcataagcctacat

SEQ ID NO: 228985 - DNA, 456 bp, Glycine max
  unsure (1)..(456): unsure at all n locations
ctcaagcttcggggaaagcctaccaacgcatacgctagagaaatgatttatgccttcccatgacatgagcgaagaaaaacaaaataccttaaggcttcttttacaacactgaaagagaagaaaaaaaatcattatacactcaggacaagctggaatattctctccaagcaaacagaaattaacatttagaattgtaacacttgtgtaagaaacataatagaataagatcatcaactaaaatacaacacaagcatttcccttctctccaagcacatggcaacgacctacttacataagcttaactcaccaattagcacaagtaaagcaagcaagaaaaaaacccaagcagaaattactatatatatgtattaaataatgtntatctacaggctataatattaatattatcaatcctaagtcaaaagtatatatatatatatacatatatatagatat

SEQ ID NO: 228986 - DNA, 417 bp, Glycine max
  unsure (1)..(417): unsure at all n locations
agctggaggtagagctggatttgtagtgctcttatgngaccataacgcactacttataacttgtgagaagttagtagaacttggtgtttttccaagaactagatgtagtctcagtggtagagacgaaccaatataactcattatgtctgatattttcttgctctccttttgctttcaactgaccagggtttgaattggttttattcttttgaaacatcttgtgctttaagtgtttgtttttcatcgttttagcgtgttttttttataagatatgctatttgttaacaaagtttcttcttcagatgataatacttgtttaattacaaaagaggtttcaaagccttctactttcaaccaatcttgtatacagatataagccttcaacttttaggtgatagacaactatgacatggatta

SEQ ID NO: 228987 - DNA, 500 bp, Glycine max
  unsure (1)..(500): unsure at all n locations
actaagctaacgtggatgtganctgtcttctatggtcctccaatttgttgcgggcgggctagttagagatcacaatggtgactnttgtgtgggtttctctagctcagacggngtcgatgatgcttcgaaagctgagattctggcggcccttcatggattggatcttacatggaataagggctctcgaaaggtccgatgtgaaacaaatagcttggacgtctacaattgtttccagttaatggtgtgccctcccttgcaccctcattcggtctcgttactagagggccctctattgcttcatcaaagttgggatgtttccttttctcatgtatgcagagaagctctttgacaattttgatctatctgatgatacataccaaactatataaagatgcacgtcaatcaacatctgcaccgtcagtataaataatcaattcatgtctacataaatactttaagaagcagaacttttttatataagagtcattcaaacctaaata

SEQ ID NO: 228988 - DNA, 457 bp, Glycine max
  unsure (1)..(457): unsure at all n locations
agctttacacaacatgtgtttgtttatttatttaccaatncaatagaattaaggcaatccactccatttcacagtaaccaggttttctctattcattcagttttgctgtcatttactcaagttataatcattcttgtacaagaatatccaaatgtttgagttatcagttttgtattgcccttcctgccaattattgcctttctaattataatatttctagcatttctaattctttttctaaatcatcacaggtttgatagtgtaattgcacctggagatactgtgcacataatcggtcaattcgacctggggggaaattgtgatattgatcacaataaaaactttttgattgtacacccagatattctagtgtctggaacacgggtagttatctttctcgctcccaaccatagtacatattcccatttggaacttcaggccttctaccttatattac

SEQ ID NO: 228989 - DNA, 385 bp, Glycine max
ctcaacttgaatttcatacatgaattgtacatgtcgcataatttgttgagatgttcaagaggaggggtatagtacacataaaaatgctctctttatatgtcactttacttagatgatcttctttttggattctataacataagaagcatgtttttttcttttcctgcaaagtactttcttggatgtatttaaacttttggaaagtcctttctggaataaaaaatattaaaattatattttggaaagcactttccataacctaatgtgttctaaaaaaatatattttggaatgatgttaaattttagtttctaaaagactttctggaatacacaattaaacatcattatgaatcgcccttcttgatgatgaatacgaatattgggt

SEQ ID NO: 228990 - DNA, 414 bp, Glycine max
ccggatccctaaggcacctgcggcatcaagctaaatccataactttgtgtgtcttttatatcagacgagaatgacaagtctatgattgatgacctttacctaccagtctgtcccatcaagcattcggtatatgtaaggctgatttgaatgacaagcacatgctacttatagtttcccctctattctgttgagtttgaaggacaaggacggtctatttaattttccctttatatacatagctatttgcttttgtaagcttctcaataatttggaggaatgataaatatttactccattttcttttgtaagatatatagagtgttgaagaaaattacacaaagatctaagtaattatttcgtccttatatctaattatgcttacatgttagtctttatacagaaattattatttta

SEQ ID NO: 228991 - DNA, 358 bp, Glycine max
cacaacaccattccgatagatccattttccactgctgtattagattcaacatctttacaggcagcagcatccttctcatgttgaatgaagggctcttgcaaaccctgaatcctattggcttctccactatcaacatccttgtgctcctcaattgcccactatcttcaatagcaatatgcactcgaaaaacgagtaacacaagaacaatgaaatagtcccaccaaaagttaataacaaagttatgatactaacagtgtacatgctaaaacaagacgagttgggtggtatttatagtacgtgtttggcctaaagatacttatttgttaaaaatcttatctctaaatattggtattctatt

SEQ ID NO: 228992 - DNA, 374 bp, Glycine max
  unsure (1)..(374): unsure at all n locations
taccagngggacattactcttaaagcaaaaatggcatataacctcctcccataaatacaaacaccaatgtcaatttagagcaagcttatgcgcatatttccttacatacgttctcttgcacaagacatttaaccgaagaagtgcacccatatacaatcaaggcagcttcgttacctatattatttacacgtactgccaaggtgtatttattacttacatcacacacatctccttggctgaatatacatacatgcatactcaaagcattctgcggtaccaaaaacagcacatgtgcacatcttggtatttctaatacctatatatacacacacttcatgatgaatcttgactatcttcacaaaaaggtgctacac

SEQ ID NO: 228993 - DNA, 218 bp, Glycine max
ttaagatggcttgaattaaaaatagggaaaccaaaatcgatgaataaaatcataggggacctacaaaataaattaactcctttttttcatgaaaaccactcttattttaaaatattaatctaaatgtgaccgagcccatatttttttattaaaaacatgtttgcttgaatatctgaaaggaaacaacactctaaagaaggcacatgccttattatttt

SEQ ID NO: 228994 - DNA, 467 bp, Glycine max
  unsure (1)..(467): unsure at all n locations
gctttaatattcaaggagttgcaaactctatttatctaccctttcacacgcttacgtgtttttattatcatgatattgttcattcaatttaatatcattgttattaaaaccaaaggttaatgtancacttttaaattgcaaatctgaattggcttacatttatttgacacctacttccgctgtaattaattcattcaataatattatcattgttacccaaagtttagtatttttaacttttaatatatcaaaataattaacatatatttgacagccattatcaaccaaaaaagttctcattatatatatatatatatatatgacaaatgataaataaaacaaaatcttaatagtcctcgagatttaattaagctaagatgttattctgagctttttatttttctattcaggctgagtttttattttgatcatttattttatctcaacaacatcaatttgattttttt

SEQ ID NO: 228995 - DNA, 509 bp, Glycine max
  unsure (1)..(509): unsure at all n locations
gggctaactctatatgagacattctataggagctatggatattgttccgacactangtaccaaatcaatagaaaactctatctctcgctcaagtggtaaatatgatatatccttaggaaacacttctggaaattctctaacaacagggaggtcacccatagaaaccttggtctctacttctaggttagataagatcatgtacacttcagaatcttctttcatagatgtcataacttggttagtagagataaacattctatccctactcacttcaaaatcatcaaacaccacagtactatcgaaaccgtttaataagacttggttggaagataaccaatccatttccaggtaacatcaatctggcttaagagtaataaatcaaatgaatcaataatgttctatcaaaagtctttacaggacaattcaaacacatcggaagttaacacagaaccactagttggggtcttacacaagacaacgacgctcaagttctcactgatgtgcatcat

SEQ ID NO: 228996 - DNA, 462 bp, Glycine max
  unsure (1)..(462): unsure at all n locations
agctntanaagaatggctaagatgttgttataacataagctcttagacaatgaaggaaagctggagttgctgcacatgatgtccaacgttatgtcaaagaataagatcgggctgcacattgcacaatgcaagatgaaatgtcaaatgaagaattgaagttgcaggattcacgatgtcggatacaatgtcctgacatcctgcccgaaaatactggagttgctgcacaatgcataagtcaagataaaatgtcaaatgaagaattgaagctgcagaatccacgatgtcggacacgatgtcctgacatctggcccgaaaatactggacacataaatctgttatatctttaacagattactgtgcagttagcaagagataagatgatctatcttctggacaaattaaaagatatttaagttcaatttcaagtagaagagtcgttcaggattaagattaagataaaac

SEQ ID NO: 228997 - DNA, 508 bp, Glycine max
  unsure (1)..(508): unsure at all n locations
tatgcgcctatttccttacaaacgttctctggcacaagatatttaaccgaataacatgcgcncatntacaatcaaggcagcttcgttacctagattatttacacgtacctccaaggtgtatttgttacttacatcacacacatctccttggctaaactcacatacatgcatactcaagcattttggggcaccaaatattgcacatgtgcacatcttggcatttctaatacctacatacgcaaacttcatgatgaatcttgactatctacataataaggtgctacatttcatgctccccttttttttttcaagtttttgctacctaaagccgcatacaaattcaagcatattttcctttgctgactaaaattgcattcaaaattaaaaggtatctatntttntgcaataggttctcttcatgcaacatanttatatatantttttgtgagacattttgactaccacaaattatatatacatacattcaaagtattttctattcataccc

SEQ ID NO: 228998 - DNA, 456 bp, Glycine max
  unsure (1)..(456): unsure at all n locations
agctntcattcctctactgtaagaatggaagcatatntgtttctctttatattacactttttctattttaaattaattaattttgttttcattcactttttttaaaaaaaagtatttataagattaaatcaattattagaaacgaatgcaatcaaagaaactaaaaaatgttgatcatgttatagtgttaattaaacgattgagattgctgggattgtggatttcatcaatttcaggtcctggtccttggttgaaggctaagatggaatcattttcagcttctttaatgactggacagtacaacccaatttttggtgatttagataggctgatgcagtttatttttttggtaaactatgctgtccaatttcgggttccatgttattcataatgaataattactagctaattgataaatttctgtggagaaatatgattgaccaccttggatgaaat

SEQ ID NO: 228999 - DNA, 503 bp, Glycine max
  unsure (1)..(503): unsure at all n locations
acgtacacttagatactaagctcgagggttaaagtctcacaattgtcacgtgctcatgcaataattgttagccatggctatacgagacatctttccaaacaaagtcaggttagccataactcggatgtgctttttcttccatgctatatgtagtaaagtcattgatcctgtcaagtttgatgagttggaaaataaggccgcaattatactgtgccagttggagatgtatcttcccctgctttcttagacatcatgattcactcgattgtgcatctagtcagagaaatcaaatgttgtggttcggtttatctacggtggatgtacccggntgagcgatacatgaagatcttaaaagggtatacaaagaatctttattgtctacgagcatctattgttgagaggtacattgcagaagaagccattgaantttgttcagaatataatgagaaggctaaaccttggtggccttcctgagtcttggcatgatgacagagtgggtggta

SEQ ID NO: 229000 - DNA, 405 bp, Glycine max
  unsure (1)..(405): unsure at all n locations
agcaggctggaggagcattctttggcctttatggngnncaccaaggtcctcatgtggctctccctatctctaacatattttcataaagtttacatgctaccctatattttcacacctaacaaactcatttttaaagtcaaatctttaacaaaaccagtccatgcaaccatatcaggcaatttattttcgggacaatttagaccaaaaagaaaaattccttatacttgttgtagtcataactttcattaaaaagcctcaatttatgtgaaaattaaggctaaccctaagttttgacacccaaggaactcattttttaccttaaaatttcataataaataacaacatttttacaggtttagtcaggggtagagctaccaaattttgacatcaaaacaacatacaatg

SEQ ID NO: 229001 - DNA, 473 bp, Glycine max
  unsure (1)..(473): unsure at all n locations
ntaactntggaaagtgaacacaagtaatattcttctatgttntcattaatatntatggcttaacgacacttacatgaacaaatgttaaaaacacaaagtagatgattcacaagccgataccgatgatcctaacacttagcaaagttaaaacaaaagaagacagcaaaaaacattgatccttagcattactgtctgttacctccactatctccccattcaccacttccttgaagggccgatagctccaaaggcaacatcgttggccacaactttcacttgctccatcatggcattaaaatccggcacttgctccctaggtcttcaaccatatagtattgtgcttaaatattcactnttgcatgagcacgcctaacactgctcctgaaagtcagttgtaaagaccacataaatggctctgtctattggcatgtattgtgaccaatgagagaagcacatccagacaagtgcctcat

SEQ ID NO: 229002 - DNA, 467 bp, Glycine max
  unsure (1)..(467): unsure at all n locations
agctnggcaaaagttccttgtatcttgaattcattagtctgcttcaagtaaattatgccaatctgcttcagtaatttaaggatatgtttttgttatctgagtcaaggaagctaaagtttgcaaaacaaaagtttacttcagatcttctctggcttcaaatggtataagagaacttagagaacaaacatgaaattaatcaaataacaattattgaaagggccttcctaaaatatttcccaaacaagacttctttggcctcttcgaagacattatttgggtcagcaaagaaacaaatccttgttttattatttctactttctatacaatatttcaaaggtcattgatattgtttgagaacacaaacttcaaattttcaggtgtctctacctgcaatagaaacatacaacatattcatgtatacaactctagtgtcttatctaagctcgagtccacaccacatcatggag

SEQ ID NO: 229003 - DNA, 449 bp, Glycine max
  unsure (1)..(449): unsure at all n locations
tacgtgacactataaaactcagctttttgttgcttcttttttttctaatatatgcttgntttgattggtaaagtaatattatccacataatttgctccaataattagttagctagctaataatgaagttgttccttttcttgttatgcaaattatataaacaggtagatcacggaaggaatgtaacgaagatagatggtataagaagcaaagcgtgaatgagtgaatattggaagcattcagaacaaagtcttacatcgaaatatgcaacaaagcacaagaggggattgaaaagacaagcaccaaaatgctaacttcctcttcttcttcaattcctttgtgcatgcagctcacggagtatctgcttgagccgcggcatgagatgatagcaaacatagcacagagattgaagctgcatcatcttcttgtggactacttcgaagcaagctt

SEQ ID NO: 229004 - DNA, 399 bp, Glycine max
acaacaggtagattgtttcttgtgatcttcatttatcgatagcggtcgtttgggcatttaatgcttgcattaaatgcatgtcatttcttcgtgcaaaaagatcactctggttggctttcatgttgagtacttcagcaaataatgcttccctataaatcatatgcagtatgcatggtacagcttgccctttgatagagtttggcactctcaaatcttgattttcatttatcttttataggattcgacaaattctaggagaatgtctctacaaaaaatatctccaccacaaagtgttaaatgaagtcttaaatgacaactcttaaatgctatataagatgatggcttaagcttgttattgtctaattattgatatgcagaattgcttaaaatatatgatat

SEQ ID NO: 229005 - DNA, 495 bp, Glycine max
  unsure (1)..(495): unsure at all n locations
ctcagcttgccaaccattctggtggctgtgtgtagttatccattgttctatcagatattcaaactcttgatcagtatatattgtaatatttctgcccaccaaatatggtctccaatgttgaatagccaaaactaaagccattaactctttttcatatactgatttccttagagaagcctcatataaaggcttactgaaataagctatggcttttttattttgggaaagcacagccccaatttcttctgcactatcctttctccacttgaaaccctctttcttcaacagattattcagaggtcgtgctatctcgccatagccttcaataaaccttctataatactcagccaaaccaagaaatcttctgacttgattcactgtgttatgcatangccaattcatcacaacattccatttcttgcatacatggcacacctgctccaaaataatatggccaagtattccatctcttttctccaaagctgcacttttaat

SEQ ID NO: 229006 - DNA, 406 bp, Glycine max
  unsure (1)..(406): unsure at all n locations
agcttaccacccagcttgtccaggtgacctatgttgctncctccagaacaaccgtcttctggaggaattttctggaaggcccaagagggcccggttgctatttgcacccccatttttactatatacaccccttgctcttttctggtgattatttttttccgtaacattacgaaactttacgaattttgtaacgatgcttgttttctttccgtaatgttacaaaaccttacggattacgtaatcatccctttgttttcctttcagaacgttacggaattttacggattgcgcaccaacacttccttttaatttctggcattgcacggaacttcacggattgtgctacaatgctttctttcgacttccgacatgttacggaacttttcgaattgtctcacgatgggtg

SEQ ID NO: 229007 - DNA, 443 bp, Glycine max
  unsure (1)..(443): unsure at all n locations
cggacacttagatactaagcttgtgaactngtcatggttggatgagttagacatacttcattctgttttannggttttgtgatgatgtttgtgatgtttatatgctgaaattgcttatggaaaactgttagagatgaatggtagaattaacctatggttagaaagtgaaaaggtggtgttatgagtggaaaaagagtgaatttttgagcgctggaaggccaaatctggaattggtagtatttagaggttagagtgagttaatcttagcttgaaatgccatttangacttatgagaaaggttatgctgtgctagagggaaaaacaaatgaccaaagtgaacaaagagccatttctatggcaaatatgggtgttgaagagtcaaattttgattcggtgagattttatgtgtaaatccagtttgagcaagtttagattgatgttat

SEQ ID NO: 229008 - DNA, 406 bp, Glycine max
  unsure (1)..(406): unsure at all n locations
agcnttttattttcagtagatgaagatgaatctgtggccacctcatggactcctctaaggacaatagcatcatttcttgcactaaattgttgggagttggaagccatcttctcaatcaaattcctatccttagcaggggtcatatcaccaagagctccaccactggcagcatcaatcatactcctctccatgttgctaagtccctcatagaaatattgaagaaggagttgctcagaaatctggtggtgaggacagctcgcacacaatttcttgaatctttcccagtactcatacaagctctctccactaagttgcctgatgccttatatgtcatttttgatggcagtggtcctagatgcaaggaagaatttctccaagatcaccgtcttaaggtctcctagctgaa

SEQ ID NO: 229009 - DNA, 409 bp, Glycine max
  unsure (1)..(409): unsure at all n locations
ngagatgaggaagtgtngaagggtgacacttcctgcttttattgntgaccacagagtggtacctgnagatatgtcgcgggggtcatgagaccttggggacgtcatgtggggtgctattgcccaaaaccaagcttgaccaatcccgacccaacccgggcatagtcggtcagtgagaacctgtgatgtacctaagcaggcgagctcctggcagtcaacagataaaaggaaaacaagaccacaatgcaaggaggctcgtggtggctggccagctgtgaattttgtataatatgtggattgtggcctctggaatcgattactgagggtgggtaatcgattacaaggcttaaaatngaagacacgacgcctagatggtctctggtaatccgataccacggggtgtaatcgatta

SEQ ID NO: 229010 - DNA, 439 bp, Glycine max
  unsure (1)..(439): unsure at all n locations
agctttacttgtacaccacatggagatgttatcggttatagaatgagattagaccacatgacaattgaacaggtaataaataaactatgggttacataaaaatattgttgagttttatgtttttaataattaattaattattccttttgtattatttcggttcttgcggaattcatatctccactttttggatgttctgaagtcgacaactttcgtagactcctccatatggacagcctgtacccctctaattagtttctcgataatagaatgacatctgcctcagacaagacataccagatcccccaagaaacatggagaaacttcataagatcgacatgcgaagtccaactgacacatattgtgttgaaaacatgcaagtggatatgtatatcattacgcaatcatggtttacangcaaccgatataggctgcaaca

SEQ ID NO: 229011 - DNA, 490 bp, Glycine max
  unsure (1)..(490): unsure at all n locations
tcngctcttgatacaggctctatcctatcctattcttttttttttctttcttttaaggtgatttgtccttgattcgatcttgattgcgtcttgttgcgttcttcgttgtgtctttgtttccctcttggtcttgtcatgtattttgtttctgctcttgcttcttgtatctttcagactttgatttaaaaaaaatgtggtttgagttcttgttcaagtaaaaaaaaagttgcagaatttttattttatttttttttaacaacagagaagataagaagataaaaagttggtgtttgatctttgaacacgaaattgaggcatttagaggtatttcttctttaagaaaatcgtggatcaagtccccttctctagattctcctctgaattctgagcatttcatatatagtggcctcaacagacacccgagcanaagtattagcatctgaagttacttgcctatttggatctatctgcatccatctgcatctattgt

SEQ ID NO: 229012 - DNA, 423 bp, Glycine max
  unsure (1)..(423): unsure at all n locations
tctcttggcctagaagtcagatgcaaattcagttgaacagataaatatatgatgctctaatntacaaaacgaaatanaataaataaattgtctttcatgttgattggaaaccttttgagtttggaaacttacacatcctggtgaagctgacaaatgcagtatatgtagctgaagacaaggcaggcaaaagaaacattggcaaaactcggattgccctcattttccaattcatatccattgatcttggtgtcataatagcataacctacagcaatgacctgaaagttgaaaccattttaagcaaaattcatttataaaaacaccctcaataatcaataagaatatattaatttgtcagagaaaaaattaaaattcaagtaaaccctccattgtcactcaataaaagggaaacattactgcacac

SEQ ID NO: 229013 - DNA, 459 bp, Glycine max
  unsure (1)..(459): unsure at all n locations
gtttgattcctctgtccggaagcctttcttttctcatgtgcacccaaacccaatctccgggttcgaagacaaccttctctcttccttatgtggcatgtttagcatagctnttattattcctctcaatttgatctttgactctcccatgaagcttcttcacatagtccgcctttgctcgaccttctttatgcttaaaaacagaaacattacgcatatgcaaaagatcaagaggagntattgggttaaaaccataaacaacttcaaaatcatcaatagtgttagtggtcaaaatctgactcttgcaaaacaagatatatagtgactgtttaacacgatacaacctcttgacctcactttttgtggtaaatagctctccctacttcaagtgtttcactcttttccttctaagcgttccctcgtttctcactctaagagtttgctacttttcttttcttttct

SEQ ID NO: 229014 - DNA, 426 bp, Glycine max
  unsure (1)..(426): unsure at all n locations
agcttatatagtatatataatatgttttgtgctactactactactacacgttctcttgnccctttccttcttttcctctttatttttattcttctttttctgccttagatcttgcactcactcaccaccttgcagttttcagacatggggtttctcttcttcttcttcttctcctccttctttttcttctctccaaccacttccaagatgcgatgctgatctggagtgttgctgtttttcccttgtgatcgattctcttgtgttggtggtgatcaagaacaagaaagtgtggttatatttgctctctttgacaaaatccaatggaagaaaatcatcaagaagtgaaacacgtgtgcaagttctgctgcaagagctctcctttgggaagatccttgggtggccacatgaggtcacatgtcaccacca

SEQ ID NO: 229015 - DNA, 337 bp, Glycine max
acatcatttcaaaacaaatcccaaatttccaagttagacgaggcacaggaaaacatgaagctttaaagataaggaaatgtgcggtaaattgatgtctgatttcagagtaatataagttttgtcctaatgtctttgacgcttgtggatattattaatcgcaatttaaaatggtagcaagttcacttccaagaattctctgttcaagtttataactctactaaaagaattcttgagcggtttgattggggcaagtttaaatttaactcgtggcatcattctactataacaatgaagcctactacatactacgcatatattacacacataaatataacaa

SEQ ID NO: 229016 - DNA, 176 bp, Glycine max
ccccccacccccccccgccaccgaccccccccccccccaccccacccccccaccccccccccacgcccccccccccccccccaccccccagcccccccccccccccccccccccccccccacccacccccccgcccacacccccccccccccccaccccccccccccccccccccc

SEQ ID NO: 229017 - DNA, 424 bp, Glycine max
gagcttcacattaacacattaggttaggttttcttgttgttcatggcaaagtttggatttgggtcttattaaatgaatagtattggttggtgcaatgcactctgtgtttggaagtgcacacagcaaaatctaggaatgaatgaatgggatggatggatgggtgttgtgatcaaacatgtagctatcattcccaatgtcatcatctccaatactactacaatagtctcagcggttgggctctgaagtcaaaggcactcgtatatttaactcccataatcataaccctttccccctattgccactggtgtggcattgatgatagatgcttgtggttaaaaaattcctaactctaccatcatagattcttcctgtgttacataagcaccgattgatgtagcatatatacaagcgaatcaaccataat

SEQ ID NO: 229018 - DNA, 436 bp, Glycine max
cttgagctgttataagcctcgtggaacatgatggcttgtgctataagccaagagaggtaacggaattgtgggtggaagagagggtgtggtgcaagccaacgtggtgatggtgtgtggtgaacaagttcttgttgaggttaacggaagaaggagattgcatgtttgtgacttgtgagctaggaatttagatgctatacaaaaccagttgttttggaggtttagctggtacaaagtagcctaggaaagtgcacggcgatcaacaattattattagcaagcaaaaacgatagtgtttttttgctaaaataaataaataaattgtgggtacatcttttttctttttccgatcagcaataagaatactcgagacagaatatttgggagatgcttgattgtctcacactcagctgagacttttcatacatatattatatatg

SEQ ID NO: 229019 - DNA, 279 bp, Glycine max
cagccactagtaatccatcaccattaagtcggaaccaattacgcatcaatagatgcgactcttcatttatatattccgaaactcaaatgtctacaaaccctggtaatcgattacaagtgttgtgtaatcgactacccacagtcaaaatgatctacaactttaaaacacaagctgctactcttgaaattcgaaatcctacgcttaaaacactggaatccataccaccttctgatatcgatacccgagagaaaactctttggaacgatttggaaaactctt

SEQ ID NO: 229020 - DNA, 455 bp, Glycine max
  unsure (1)..(455): unsure at all n locations
ntctggagtagaaacatgggaccaactgattgtatttcattatgtcgtatctagtcaaggtctgagagaccatacaagtttcctagcgatttctaattatgtgggtcatcaagtctatcatatgctgacaatagccgagaagcccatgaatttcttcgggggcggagtaagtgtccgccatcgccttggccttggctaacaatcggggaagttcttgactcccgttcaaggcaagagcaaactgatccatccacatggttgcctcttggtgtaaagagtcgatcacccttcctctagcctctttttccgcgtatacttgggcatactcgtccgcgatcctatgctcgtgggccgtggctagacctacctcttcttggtacttggcgatgatagctagcatgttggtctccgcctcgcatatacattgacacaagcttcttttggaccttgaacag

SEQ ID NO: 229021 - DNA, 228 bp, Glycine max
  unsure (1)..(228): unsure at all n locations
gataaaatgttatcctttccttncttcacatttgtggcatttaatagcanactggatctggatttcgttttttaattaactcaattggtctgaaatcatgtggcattatttggttatttaagatggtatgcctcatattcttaatcatgaatggccacatgaatgatcatagttttgtctttggaaaaatacttttgttctgttttgaaaaattttcctgggtttttt

SEQ ID NO: 229022 - DNA, 459 bp, Glycine max
  unsure (1)..(459): unsure at all n locations
tgaatcttcaggaaaagcttgaacgagctgtagattatatttggctcttacatatccgactcctttgagtgacattngtattggttgttaacttgattgtttcatcttagtacattngatatctattttgcattgcggatcatcatagtgtgtgaaggaaattttctaagttagaaaaatttcttaagaggtaaaaactctttatttttatcgattacaaagttgttgtaatcgattacaataagttgtttgaagttaaaagagttaagtctcatatttgtttaatcgattatgatagtactttaatcaattacactatcgtttaagacaatgactgattttttcaggagtctctactttaatcgattacttctctcttgtttaaagtgttcaaaggtgaacaagaacactctaatcaattacttaggccatataatcgcatatattattcttgagtta

SEQ ID NO: 229023 - DNA, 419 bp, Glycine max
  unsure (1)..(419): unsure at all n locations
tagactcagnttcttcaactaggagtgggacgtctctatatcttttcttaaagtctccctatccttggacactgaagacgatgtcaaacatgataaattctttcaagagtctgaatataagaaatcaactctgcattctcaaatttatgctgctctaagttttcctgtaacaataataaacagttagtgccccccattttctgtagcacatattctcaaaaattcgacagataggatggaatacatatcatcaactaaaggccaaccatcacataattctgggaattctgagaatctagtttagactcctgaagatgctcttgaagatcagccaattgtgtgccacaagaatctgcagacaaatattatacaactcaacatctctgaaatatatatatagaaggaaacttaccttttat

SEQ ID NO: 229024 - DNA, 272 bp, Glycine max
actaagcgactcggatcgaagtaaaaaatacttaaaaccacaccagttggtagaaaaactactgctcacgaaaaaaaaagtgaagggaagcgtgcttgttgttcggctcaaaactcggtctataatcggggcctatcttataccatacctagttctgaaacttcaattgaaaattattgtgaaaaccagtggccaaaaatagaggtttcttgagtctatttttcttatttcttttgacgatttgctactctactctagagcccatctaggta

SEQ ID NO: 229025 - DNA, 445 bp, Glycine max
  unsure (1)..(445): unsure at all n locations
ntagcttagtccccaaggctacatgtagactcgttttatatcgcgaagtaaacctcagatccctgtcagatacattactataaggaattccatgctaccttactacttccctgatgtacaactccactagcttctccattctatacttcatatatactgggataaaatgagcagacttggtgagttgatcaactatgacccacacagcatcatgcccacgactagtcttgggtaaactatatacaaaatccatagatatgctctcccatttccattccggaatttccaatggcttcaattcttccgatggtcgctggtgctcaaccttagccttttgacatgtcaaacatcttgctacataatcagctacatctctcttcatgccatgccaccaaaaacttctcttcaaatcttggtacatcttaatcattcctggatggaaact

SEQ ID NO: 229026 - DNA, 363 bp, Glycine max
atccgatgacagccacgtacttccatgacgaaaccctaccggcagatggtgccaaagtggcccattactgctcaatgtgtggccctaaaatctgctctatgaagaaaacagaagatgtgaggaagtatgccgcggaacatggctatggaactgatgaaactatgcaccgcgggatggatgctatgagtgctgaattacatgctgcccagaagaccatcacgggggagcaacatggcgacactggtggagagatttacttgcccaaagcttacgctagaaccaagacgtaacggtaaataaaatgcaatactttctctaatatgaggcgcctattctcactcggcatggaacataatggcattc

SEQ ID NO: 229027 - DNA, 428 bp, Glycine max
  unsure (1)..(428): unsure at all n locations
agctatgatgagaaaaatctagtctatattatacagaaaatcaaatacttaccgctgaattactgaaaatagaatctacattatcaagactaatattagcctgttcaaatacgggtggtttatatcccttcttgaaccagtcattctcaatgacctcagcaaatgtaatccgctgtttcatattattaaaagaaaaacagatacaggttgtcaataataatatatttggtgaaatggagggaaaagtaagagtatctgttaaacactagattagtccttcagtttaattaaattaaacaaagaaaacatcaggtcctacagtggcaggattgggatcaaggattnttgtgattagctcttttggccttgaagagacccatggaggagatttgaactcggccttgtatatctgtcaccaaaacggggaa

SEQ ID NO: 229028 - DNA, 422 bp, Glycine max
  unsure (1)..(422): unsure at all n locations
tatagtttanatcagaagacatctgtttgttatatctttttgtccaacaatctgagttcttcttttttagcttatcaagctcaatactggcaagggtgcactctctctgaagtacaagtttttgctatagcattaccttgcgtttttcttctgaatcttcaagagtcatggctcaggattccaccttttcttctaagtcctgaaaatcctcaacaaaagaggtgtgtctactagatacattttcgtctaacaacttcttgacttcctcacagacaatggtgtctcgtacattactaagtgaagtggttccataacaaagtcaactaaatgaactcgatgagctgtcttgagatctcatgctctttatcacatcgtgaaatgcttgtaagtttctataaccctaacaacccagtcaggcagac

SEQ ID NO: 229029 - DNA, 384 bp, Glycine max
  unsure (1)..(384): unsure at all n locations
agctccatagccataagaagaagatgatggttgctgntcattgaaaccataactcgatagtggatccaagtaaccctcctagaagaagaagaagacctgacagatgaactctgcctccaactttcctacttagaatatggaccccccatcaacacacgcactttttagaaaacccaccaatacgaagacgattaaaaatgaagcaatgaacacaaccaataattcttccaaatgctatataaaatgatatgagtgtatcgtccttgagggtgcagtttccattctccaagcaacctttgaaaacttgttcaatgcgacacgtaattaatgaacaacatggaagcttctcgaaaaccaaaaccacctcgtaattattactaaatc

SEQ ID NO: 229030 - DNA, 355 bp, Glycine max
agagacctgagtcacacatggttcatcttcctgttggtgaatgcagaatcaccttggagagtgttgctcttcaacttgatttatgcgctaatggaagactagttactagtgcaacatattatgaatgggaaccaatgtgcgcaaaatatataggtgttgttcccccaaagaatgcattggtgggatcaaagcttaaactaaaatggctaaaagaaaacatgttgactctcccaacagaacccttaccacaacaattagcagcccgttgtaaggcatacatcttatggttgatttatggttgttgatgctaaacaagtcaggaaacaaagttcacttaatgtatccactcctgtta

SEQ ID NO: 229031 - DNA, 419 bp, Glycine max
tagcatggataatgccatagataatgcgctcgatgatttgtctacatgcaaggacagaggcttgagtagtcattcgtggacaagcggcctcagatatcttaagaggggggggggggggggcaccctctctcacccatcgaacccctacacccctcacccctcctcgtccttcccttaccactcaatacacgcctatttacaccgcttaactcatttccctcactaaccctctgttcccttctaccagcccttccgaatccactcctacacttcattaccaccccccacccccccattcacccacacatctgtccacctcctacccactcccgactacatcatacctcccccgtctcagatcacatgccatactctactcccactcccccaccttgcacttaccccactccgtcacccac

SEQ ID NO: 229032 - DNA, 436 bp, Glycine max
  unsure (1)..(436): unsure at all n locations
gcttggcagttatttctgcagcactcattgtattatgaagatcttgcttgttggcaaaaacaaacaaaacagcatctctaagttcatcctgaaacaaaatcaacatttagattcaaacaccaacattataaatttccaatacactcatttaatcccaaatccttatttacattatcttgaatttgggttaggtatacgtcaaccccaaaagctagctaatgaggtgaggattgttcattttttttacaagttctactttagccatatctcaacaccctcctcatgtctaggattagacatctggaacaaagagattgtaggaattttttctgtaattactggaattccataaagacaatcacaaactatcctccattttacactaactcttaacacattacatgggcaaaaaataggatataantttgataacaaa

SEQ ID NO: 229033 - DNA, 473 bp, Glycine max
  unsure (1)..(473): unsure at all n locations
cgngaatgtgatggccaagtctgacaaatgtcatttattgaatatgaccctcgatttaaggttctttgcatagaacaatggatggatttttcaagtttccagtgttgaatgaaatgatacaaataattattatttttaagcacgaaaacaatttttttttctgttaaatggaaattacagtaatgttatgttgtttttatttattttctatttttaacgatatgtacggagaatagaaataaaaaattatcttatattctaatatttaaaatacgaaataaaattattttttctgttatttataaaacaaaggagttaaaataagattgtttgctaaattaaaaatgtaagtccttaaaatagaaaataaattaaaataagataatgcttatataagcagtaattaaaatacatccattaaaaattagaacaatcaaaagtcaagcacctacatttaataataaaatacgtaa

SEQ ID NO: 229034 - DNA, 261 bp, Glycine max
gcatgctgataggtctaacgcgagcggcgtagctgagcactcaccttctgcatgaagctacaagagcgtgatgtaaataggccttattagaggattatatatcctcttaagcttagccctatgaatagtgagaacagccttaattgtacgaaaccttcgacatacatgaaatcacgcttgtcgcttatacaaagcctagcctattttatggcttttgactcgaaacgagattgatggttattacggaagctattcctatgc

SEQ ID NO: 229035 - DNA, 350 bp, Glycine max
ttgacccaaggggagaatgccaatccttaccctcgaaagccaaaaaaaagaagagaaggaaaattttcaaacaaaggaaaaaggagaaggagaatttccaatcaaagaggaagcacacaaaggagagaaggaaaatttccaatctaaggaaaaaagagaggaaaggaaattcccatcaaagagtgggagaaagcaaaaagaatagaaagaaaattcccaatcaaagaatgggagaaagaaaaaaagagaagctaaaaagaagaaagctccctggcaaagaaaccacaagaaatgtgccgagaggccttggaccgacaatattgacaataaaaattgcaccaaatgacaaa

SEQ ID NO: 229036 - DNA, 437 bp, Glycine max
  unsure (1)..(437): unsure at all n locations
tatgtntgacaaaatggaagaccctgttctcagctttttatgactactcacacattccatttggtgttctatagtgttctataggccttgcacaacgcagataggtcaaaaaagcataaaatctggaatttagctacaattctcaattaagctcaatcatttgccttggatcaaaactgagttaacgtcataaaataagagtcaaagagatgtaaatttaactaacaagaatacaaaaatattatactaccgatgttcaatcaaattcccccacactttatcttttgcactcctgggcgaaactcaaaaaataaagattatgaataagaaatcacactaagaaaataaccacactcaaacaacgtataaacaaggcacacatattntngaatggatcctaacaatgcacaaaagtgagagagatgaaatatgaagaa

SEQ ID NO: 229037 - DNA, 52 bp, Glycine max
gtattatccacttttccccccccccccggatggccgaaaccaaaataaaaac

SEQ ID NO: 229038 - DNA, 447 bp, Glycine max
tgcctgtccgatgcagcagtaatgatggcccgtgttatgttggggaacggttatgaacccggaatgggtttaggcaaagacaacggcggcataactagcttgataaatgccaaaggaaatcgtgggaagtatggtttatgctataaacccactcaggcggatataaagagaagcatcgcgggaaggaagagcggtggtcaaagctcgcgttggagacaagaaagtgaaggaagtccgccctgccatataagtagaagctttataagcgcgggtctgggagacaaaggtcaagtggtcgcaatatgcgaagatgatgttccgagtacattggagttggtacgaccatgccctcctgatttccagctgcgaaattggcgagtggaggaacgccccggcatttacgcaacgagcataatgtaaacctttacggctttaaaagctctatag

SEQ ID NO: 229039 - DNA, 367 bp, Glycine max
  unsure (1)..(367): unsure at all n locations
agctatatgaagggtgctggttttctaattcttgaaaactngtgctattcatccttttcattctcttctcccttttgccaaaaagaattcgctcaggactaaccgcctgaattctttttgtgtctctcttctcccttttccaaaagaacaaaggactaaccgcctgaatcctttgcgtctccctcttccttgcaaagaattaaaacgatcagcctgagaattctttgattcttctattcctaaaacaaagggttcaaggactacccctgaaattctttgttccccatccaagtataaaggttacagctgaaacttggttaccatggaggacatctttgggcatgcaaggactctatgggtatttaaa

SEQ ID NO: 229040 - DNA, 285 bp, Glycine max
ctttcggaccttcatctcagctgctactggcggctatcgtttgtcctgtgccatccttgacctacaagataatgactggaacacgagacttccatttactgtgtcattggagacgattttcctcctgcattcttctacatcatgtgacaaacaattgctcatctggttagaaaaatcaaatgccgcggaccttctatttgcgcgggatgtacccggttgagcgatacatgaatatcttaacagggtgtacacagaatctacaccgtttggaagcatctattgtgg

SEQ ID NO: 229041 - DNA, 429 bp, Glycine max
agcttcatctaactgtgtgatcatccaatgcaaccttccattacaagtccatttcggcattttcaaaccacttctagttatgctcgtgatcaaggactcaatttccacattcatattgctcttgcatacagtttcctcatgaatgcagtagtaggttcggacgctctcacaccagaggatgacattatttcttgtggcactatcacttgtcagctctcccacaaatattggtaacggcacggatattccacaattagaggacaggaatcaccttcagaaagcaaagatcagaaattagaatagctgaaattctcattaccttccttttgatctattacatatatttatagcgcttgagatgaaaaagataaacacttatcctaacagtcttgccgccaagcagggacaagccaatactaattactatcc

SEQ ID NO: 229042 - DNA, 406 bp, Glycine max
ttgccaatttatttttcgctggtgaaatgtatcgaaggtgtctgacaagaggcaaatttgattattctactttgatgaatggaaagcctgcggcaaacggagagaataataacgagggaaaaatccacactgtgattgtccttcccatatgaccaaattttctactagctcaacaatgtcaatactcagtcaatatcagaccttttcattacccaccatcctatcatccaataacacctaatcattcacaaacgccacccttaaatctgtcaaaaacctgcctgctgatatctgatccaaacaccacccttacatgaaccagacaccaaccacggaagaatttccagcaagaatcctataaattcagcccattttggtgctgatgtaatttgctccatatcttcta

SEQ ID NO: 229043 - DNA, 436 bp, Glycine max
cgcaactttggaaacgtataaatcagtggctttatgtaacatttatcctaggttggcaaggaaattcttattaaatcttgtgcacacactattccctcgtactacatgagcgttttcttgctattgacatccctagacgaccaactccacaaatgacgaacaaattttgatcgtgcttgaaaaaaaatccaacaagagtgattaactggttaattgggactaaatgactatgaaaaaggacattgtggtatgggttttaaacacttccatggattcaaccttgtcatgctagggaagcaagtgtggaaattctccactcaagaagatgatattgtatcaaaaaattaccagccaaatacttccctaattgaggatttttagaggccacattaagccacaatccaagttatatatggcgtagcatccataccttata

SEQ ID NO: 229044 - DNA, 423 bp, Glycine max
  unsure (1)..(423): unsure at all n locations
gtgtatttatctatggnttacgatataataaatgtaggtggtatgtcttgtgttcattgcagctgtttttatgatggtgacttgacatgaacattatcggtgttgtgtgtttatttatgatctggaatatcggtacatgtatggaacggaaatatattccaatgataacttgactgattacatcgtccgtatctctttattattgttccacaatggcggggaattcttaatacaagccaacactcagaaacgccaaaaatttcaagaagatggcagcgcacgcgattatgaacgtgttgaggttgcgtttatgactccatatactctttgctatagttatagaatagccgcatctcacgttgaaacttgaaaacacctactactgnataagtcgttacactaaaggtctatcctatctctatt

SEQ ID NO: 229045 - DNA, 286 bp, Glycine max
aaccgcagccgcaaccagacggccaagagggagctttttatacccccacgaccaccaggccgggcccagcgcccacagacccaaaccactaagaggaactcccaggaacagccagaggcaactacagccacaaagtcaactccgacaagccgacgacaagcctcagacccccccgaacaccccgcctcgcaacgcccgccccccggggacacacgcagacaaaaccgcgagaagaccccagacccaccaacaacaggcccgcaaccccgaccaacgacgcccacac

SEQ ID NO: 229046 - DNA, 394 bp, Glycine max
cattctctgaatgcggcacgggctcgcgtactgtcttatgttcttatgctgtggaggcctcacccccttcagaagcacaaggctggaatcctgcccaagccacctgtgtcagaaactcatttgcgctcataatagatggcaggcctgagctcgggagactatgcatgataatggactgccctctgtggaggctctacatcatagagtgaagcatctctagagtaaacacaaaatctgacgcttgaacaaaacaacctgggagctgaattggaaactgagctggtatggaagatcgagtggatggagtcaaacaataacgtgtcgctgaagtacggcctggctaagtacatcacaaacgaacacacgcatctggcgctgctgaaaacggggagcc

SEQ ID NO: 229047 - DNA, 448 bp, Glycine max
tgctgttgtgtacaagcaacttcagctggagaacaagtttatctagtgatagatgcacaccacgctcccaccttacagtaatgtcagtagcactgacaagagaacagacagcaatgtctttaagcccacctgaacgctgttcaaatctagcattttgcatatcagacaatgccacatttgctactggcctattatactccatatatccctgatagacagatctggctctttcgagttccatctgtgtggactgtttctctttgttcacacacaaactagatttgaatatttcacgagagacagagtacttcagtctctggtttcatctgaaatagtggacattctattttcattggctggggtaccactcttgtccacacatttatcataactctacccacctgtgagccgtaaataactacgttgggatctggaacgattgtatttt

SEQ ID NO: 229048 - DNA, 403 bp, Glycine max
  unsure (1)..(403): unsure at all n locations
gcttgtcggatttatcgcgaggctctttgttataagnctgncagcggggtcgaagtttgagcataacccaatcccctatttggtaattaacgtcacagtgtccagtatctgcgtgttgtttcattaaagcctgcgccttgatcagcttcttttagatgtaatggaagttgtcttccctatgggccaatattgcatcgacgacagcaaccgttgaagttcctattccgggaaattaaaaggcttatggacaaacattatttcatatggtgtagtgtcggtgccgacatttcacgaggtattatacgaacactccacccaacggagtaatttgtgttatgttccccggtcatcggtgaacaaaagtgcacagatactgctccacgacgccagttagaactttggt

SEQ ID NO: 229049 - DNA, 463 bp, Glycine max
  unsure (1)..(463): unsure at all n locations
cttgcattgtgctgagtgggtaatattcttangcgcaacccctctgaaaacctgtcgacgacgacgaagatacacgtgttgcctttgtaagaaggtaatcccacgataaagtccatggataaatcttcccatggctgtaccggtatcggtagaggactcaacaacccaactggttttctgttatcgtatttggtacactggcacgttaagcatcctgctatgaaggcacgagtatcatctctaatggaatcccatgtaaagttttcttgtaagcgatgaagtgttttttgaatccccatgtgaccacctgtcggagattggtggaattcttctagtaacaacttagtgaaggaggaattccagggaatccaaattcgacctctgtgtaagatgaaatcattagttaacgcgtactctgcgtgtgcttccgggtcatctctaatcttacgatataactccatga

SEQ ID NO: 229050 - DNA, 463 bp, Glycine max
aactattaatactccgcttatcttaagcaggcgaatagacgcgtaggggaattactattaaatatcggctaaccagttattatgcacaacagtcattactatctacaattataactccgagtcagaggcaagaccttacattgcacacttggtataaatgaatactgatatcttacttctttgtttatgccagcaagctacagtgttgtaaccaaatgagccttctaatatacaaagctgagacaatctgaactcattaagctgctaaatattgaaccctatatacaagtattacctgatgaccactatgagggattgttaagtgcctctctctaccatacctttagactgagcttgcttctagaacatcactttcctttggtctcttaacgagtaaatgcgtccttacggcatttaccattctcatgccactattgaatgattgaggtgtgtgtttttgctt

SEQ ID NO: 229051 - DNA, 314 bp, Glycine max
  unsure (1)..(314): unsure at all n locations
gaccttaaggcgaccgggcagcagcctagacaaaagatttcttagattttcaagacaatttgagcgctcgattatgaaagtccgaatcggacctacgtgtgaaaagatatgaccatttgatatttttgagagatacgcntgttcaagtacaagcgtctcgatatattaggcgccggaatttgacttgcccgcgaaaagacatgaccattagaattgctctagagcatacgtgattcaatttcgagcgtctctatatgagatgccgctaagagagacctccgggggggaagacatgacactttgaatttcacaaa

SEQ ID NO: 229052 - DNA, 291 bp, Glycine max
gaatatatcccgagctctctgggttcggtactaagccgctctactgatgatcagccgggatattggcgtacggtggaacgtcccggccttttcacatcttgcatagcgtccaccgttccagctttagcagctctatatatgggcctacgctttcgagccttcattttgataaggcttagcgtcttatgttcttgaagagatatacaatgatatttcttcgtctggtactggtatgtacccaaactatacatccggtgagaagcttctttccttaactgcgtattcgatgac

SEQ ID NO: 229053 - DNA, 432 bp, Glycine max
acctgcacagctgcaagcctaacatggagaagaatttggttagaattacgtatcatactcacaatctcctttttaaactatatgcccgggtgggtttccttgcttttccttacccaatgtcaatttataccgcattatgattattttattcgttatgttgaacgctgcttttatgtcttcaaattatagcggggaccaaaataaactgtggctatgagggttgtgcacatacaattctctttggtattgttggcttaatgctccccattaagtgcaatgtaagtaaaggttctataaactatagatgaccatgctaaaccctaccacccaatgcttttattttaaactaaaactgtgaattgtgcaaacacacactaaaattgtctcttattcaacctacaatatctttatctcgagataataaatcttaaa

SEQ ID NO: 229054 - DNA, 433 bp, Glycine max
tgcacatacaccaccacgatttattagcatatgagtaacggactactttcagggcttattttctctcacactctatggaaaggcctacatacaagtcatgagaatataacatcactgttcaagatcacttcaatccatgccttaaaattagaggcattatactgtgttaattgtatcctcgcgtgccattgcttggctgttatctccatatgataaggcattgcgagagtgtgtataagagtttatacgagctagctgaacctatatatgtaaaaactaatcggggagcagactcaactctgtcaaactgtttctaataagattgataacatggcgaaatctattttaataaacatgagtaatgatacataagtttctataaccatgtgaggagattaacttttaatattattaaatgcctatataaataaaa

SEQ ID NO: 229055 - DNA, 441 bp, Glycine max
agcttatagaatatataataagaaaacattttctattgaagaatctattcatgtttcctttgatgagtctaatgctatttctccaagaaaggatattttagatgatattgcagaatcttttgaacaaaacaaatgcatattcatggacaatattctaaaggaaaaggaaaaggaagcaatgaagatcctccagtagaagtcaaagcatataatgatcttccaagagagtggaaagcttcaagagatcatccccttgacaacattattggtgatatctcaaaaggggtaacaactagacactctctcaaagatttatgcaataacatggcttttgtgtctatgattgaacctaaaaatttaaatgaagccataatagatgaaaattggataatagctatgcaggaagaactaaaccaatttgaaagaaataatgtttgggag

SEQ ID NO: 229056 - DNA, 426 bp, Glycine max
  unsure (1)..(426): unsure at all n locations
ccttgagcatagggccaaatagagacctttgttttacctctaggttttgggagagtttacaagaagccatatagactaaagtggaacttagttcatcctatcaccctcaaatagatagttaaaccgagagaactatctaatccttagaagaccttcttagagcttgtgcgatggaacaaaaaggtagttggaacgagtgtttagcccttgtagagtttacctataataataatttccatgccagtacagggatggcaccatttgaagccctgtttgggcagaagtgtaaaacacctttgtgtttgtatgagatagatgaacctcttctgtaggtctcagcgtgttgtgaaagcacactaagcaagtganaaccattagagaaaagatcacggtgggataggatacgccacacagtactatgacaag

SEQ ID NO: 229057 - DNA, 350 bp, Glycine max
atttttttggaacacaactaagataactgccgctcacagaacattataaaaaaaatggttcctaacttgcatttgctatcgaaaaaaaaaatttaaatatgccctgataaaataatgattataaactctacaaaatcatgtttggctgcaaaagtaaaacaaaaagaactccatccacatgtgttgaagtaacgaactacatcaaatcttagaatatgttcagagattcaaggggtgtttgtgttacttctgcacacaggtataaagcaacaaagagttggtaaactccatgctctcatatttgataaatacaaaaagtataccaccagtgagttatgtttgactactct

SEQ ID NO: 229058 - DNA, 422 bp, Glycine max
  unsure (1)..(422): unsure at all n locations
gctgctgattacattcctcttctcagaaatcttcnttttatcatcaaaatcttcatgatttacaaccctggatggaggaatcaccctaatctcagatggtccagccctcagcaacaacaacagcagcctgctccttccttccaaaatgctgctggcccaagcagaccatacattcctccaccagtccaacaacaacaacaaccccagaaacagccaacagttgaggcccctccacaaccttccctcgaagaacttgtgaggcaaatgactatgcaaaacatgcagtttcaacaagagaccagagcttccattcagagcttgactaatcaaatgggacaattagctacacaattgtaatcaacaacagtccagaattctgacaagctaccttctcaagctgtccaaaatcccaaaaatgtcag

SEQ ID NO: 229059 - DNA, 318 bp, Glycine max
cctaagatctaccgactcttcccgtgaatgatggtacatcacggtcgctattagagaagatcttatctgaatgaaaatataaatggagcggacggtaacacttcctgtttagcttaagagtagtcggcgtcatcattagaactaccgggacacgcaacctatctgcgctacccttgaataaatgactaacgatcggctaattgaggaaaaccattgttgacagcgacgtgatgcaaataattgtatgcctaaatagaggaaaactcttatttaggaatagctttcaaacagagaggaaatctggccgaactctatctt

SEQ ID NO: 229060 - DNA, 402 bp, Glycine max
cgttgggacgatgtcattttcctatattgtgatgcctttgatgtcatggctctaaaaaattatatagagataaaagagatagtgattaaaacaaattattgtctgagattgctatcaaaaaaattgtgaaatcaaacaatatttcacctgcgtctctccaaattaactaaagaattaatagtaaaatatttattaacaatacataaacaaagagttgcgactggcgagcagcacagcgacatcaagctctcggctgcttgtacaaatgtcggcgatggatcaaataaggcagggaagaggaagatttcatggcaagacccactggctctgaggcgtttatctatatataaagtaccgtacactgaatctatactctctttggaacgtgtattctcgcttgat

SEQ ID NO: 229061 - DNA, 344 bp, Glycine max
catccatacccttcaaagctaaacaaaaaagagacggaaatttcaattcaaggaaaaaggagaaggagaactttccatcctacaggaagcaaaaaatggagataaggaaaatcttccatcctaggaaaaaagagaggaaaggaaatccccaattcaagagtgggagaaagccaaaagaaaagactagatcatttccaatctaagaatgggagaaagaaaaaaagagaagcgataagaagaaagctcctggtcaaagaaacataagaaatgtgccgagaggtccttggaccggccatatctgaacactctaaattgccccaaacgacacaaaaatgaaggaaccc

SEQ ID NO: 229062 - DNA, 346 bp, Glycine max
tgaaaggccggcggacccccactcctgatcagggccaacccctaaaacaatttttgactgcagacactgcccatgaattatacaatattcatgacctcacactcgagttttaaacacgtacaacacactgcgctacaatataatactggttcctaaataggaaacctacattttttcttaacactccacaacaacacttttctcaagaaacactgaccggattattgtacaattctagcctacaacacacggatgccatatcaagggcaaccacacacttattcacacccaaaatcattcacaatctacatctataatgcacaacccacaacacgtgttacacgta

SEQ ID NO: 229063 - DNA, 460 bp, Glycine max
tgatgaagatggaggacatgcattaggtacacggtatatatgctcttcatacattaccatctgtcgcgcattccttattctttctttctttcgccgagtttcgtcccgcatctcttgcatatgcatatatgcacaagtgacgtacatggagcaaacatatacaacatagggtaggccacacattgattggatgataaaaactgtgcaaaaatacaatgtggtcatacatatgtttgagcatcacgcattgtttgtttctataccttatagaagttccgccaactagattctacatgcacagataaggagtgaccttcccacatttgcaattcgtcacctaaccttacattccatttgaagcacaaaagactagaatcctacgatctagttcgcacgtcaccatgcaatcgtgatatatcataataatatgatattttacctgctcaatataatctaatct

SEQ ID NO: 229064 - DNA, 380 bp, Glycine max
attgagacccggtaatacactcgagacgcctcgaaattgaatgttgaagctctcaccaaattcaaacgagcataacgttttactcagatgtctgattgagtccccgaatacatcgagacgcttcaaattgaatgttgaagctctgcacatattcaaacgacaataactctttactcagatgcctgatcgagtcccggaatacaccgagacgctcgaaattgtatggcgtagactgtcagcaaaatcaaacgacaataactctcttactcagatgtctgatcgacgcccgaatatatagaaaccctcaaaatcgatgccgaacttctgacaatctaacaacaatacttttactccgatgctgactgacccctaattatcga

SEQ ID NO: 229065 - DNA, 459 bp, Glycine max
actcccccagagtgctgtgcctatgtctcaggactataaaatcagcttcttacgtaaaaactagttggcagcgttttaaaatgccaccgccgtgaaaatatcatccgagctattaactccgagctgctatgtctttcattccaccctgaaaatacttggacgatgtcgattgaaatgttcgatcggagtcatccggtcatgcttctttttgagacctctaactgtcatcttttcctggcccacgtccgctggcatttatttcgatcaatatcggtgaatcatgctttttgccaaggcgggctaacgacttcttggctgatgaaatgagagcatgccactgtctgtcgaaacacattctcgcacgaaaaacccttaccgacctacattgtaaattttgtacgctataccgaacaacacagaaatattatcgaccagtggttgtagaaaaatatcacaatg

SEQ ID NO: 229066 - DNA, 358 bp, Glycine max
  unsure (1)..(358): unsure at all n locations
ctatataaactccacttgccttacaaagatcaggaacgataatgttttcnaatgaactacatcctctcctgagcatgacagccaccgctttatgagcgctatacaccagctgcgctttaaggccattaaaggatggacgtttctcctggagcgacgcgtccctctcatggacgaccagcataccgatttctcgctcgagatatgtcgccggaggtgggcatcactacctacctccatggccaacttcgatccacaaatattcctccaattatatgccaatgcttggccaacacaagaggcgctgcgtgacatgatgaccttgttaaacgggtacatggatcccgtttgatgcttatgc

SEQ ID NO: 229067 - DNA, 270 bp, Glycine max
acctcgacatgctaaccagttgttatgatttctcccaccaactcagggtaccttgtgaagaatataacatccggctctgtcaacgcctccttaaccacaagggttctcattatcacctctgagctcacacccaacttgagctcacggaggcaaaatattcccttcttttcgtcaaattcgatggtcatgttgccaccttccacgggttgaaaatagaccccaactgagtgaagctcacccacacaagggaagttgacaacctcaagagcc

SEQ ID NO: 229068 - DNA, 434 bp, Glycine max
ctatagaaactcagcttatgagaaccagtggagaagaagttttactctttttcattctatctctacagatgattgaagcgtgaattgagaattcacattcagagcattcatgagaggaagagagcaaatacaaagctctgacaacttaagttaggtgtaaatctacaatgaaacaagtgcttcaagaattttataatatgctcaaaaaagtcagtaatttaattacaataatttacggaaacaataaattaatgattcgcatttctgacaagaaaactgatatagttacccgcttttaaaaaattctctcaaaagagattgtctcgaaatttttaaatcccaatctaaatccattaatataattctattagacaaataactaatttccataaactaccggatctgatcaaatcacttaataatatgccacaaag

SEQ ID NO: 229069 - DNA, 399 bp, Glycine max
agcttgaatactgataagtttcttgttattgaaacagttgttcagggggtatattctcggactaataagtttgatggtaacaagcttcccattcgcagtgttgaagacgtacctaaattaataaaatcaccatctacaggcctgtggctaaatattcaggtaaatggaagagtatttgtttcttgtccttgaactggaatacactctttgtttcaaggcaggtcctgaatttatgcatttggggtctgagtttaatctctattgttgactcatcttgttttttgcattctacaatacaacgcagcatgattcattcttcaagcaacaaaatttgagtgtaaaaactttctgaatctctccctgtaaaagtgtcctgtcaatacatctcatacctgatgt

SEQ ID NO: 229070 - DNA, 332 bp, Glycine max
  unsure (1)..(332): unsure at all n locations
tgaaattgaggtgaaacgaaatagcagaggtgaagcaaaccacacttgattagcccacactcagtttaaatgcatgaataacgattttagcttcaataccacatcttggacagaaaacatcatatgtcactcttagcacttaaggcacctcttcttttctgcccttatttgcaatcttcttttttttaagagaattatgggcttacatattttttaacggtgccctattatgtgctactttcacatctccaacatcatcttcattntatccatccncccgattacggggttattatgactaaaacccttatgctctcttataaccctaatac

SEQ ID NO: 229071 - DNA, 271 bp, Glycine max
gcgcctcactctcacaccttcttctatagacttatgcaagcgcaccacggaggaaaacaaccattagaggaccccactgaagctaaaagacccaacctacataaaagccccacaagcaagacaccatcatcaatgcacaccacacccaacagggccctataaataggacatacaccaacaaaagggatatgaggacgaagctaggattgaactggtcaacaagggaccaaagtaaacaatctacgctacaccataaacacaagagcacgat

SEQ ID NO: 229072 - DNA, 73 bp, Glycine max
cttattctttcatctcctcccccccgacgggtttgcctgtagcctgagtctaatatcccatcaaacattactc

SEQ ID NO: 229073 - DNA, 354 bp, Glycine max
agcttgagtcaaaagatcaatatatggtgttataacaaaggcaccatgtcggacaagaagtctctacaggatcaaatagttagccctcttcatagagctaatgttgctctaaggcaaattcgggtcccaaagttgatgaatggacgaaccccacagtgaaagaggatcatttgatcaatcttttcatcattgaggaaattagaaagtacataaccccaaaggagaatagggttggtaagatcaacctatatggggcagacaaggtttacaacacaataggccatgcttgtgttttgtacaagaaagagttagagaagtacatggactatgacattggctcctattgtgatgatg

SEQ ID NO: 229074 - DNA, 345 bp, Glycine max
  unsure (1)..(345): unsure at all n locations
tcactgagtaggataggcagctatctagctgcatgcctataanaatgcaaatggagcacggccatatatattaaattatttcggactaagtgcagagagtagaattgctacgtagaaatttttatccgggctagaatatattctctttgggacaaaaagtaaatacctacgcaataagttttttaaaagataaatctaatcttaatggcaaattgcggtaaattggattgaattgaactactcagtgtgattcaagagaggatagtaattaagattgaattgaaatgtcttttgccggtgccagngccattaattaatatttatagtttttgttgcgttttctga

SEQ ID NO: 229075 - DNA, 233 bp, Glycine max
  unsure (1)..(233): unsure at all n locations
ggcatccgaanatgcgcatatggatgaccctagggctgtaaactcttaaattccgagggtatggctttcgaaatggggaaaaacaagattttagattgtgaaaacccccccttcccgcttcttataatttggtgcacgggaggctctctctaccgagcccatatttcccagactcctacacacgactgataaatagttattgtcgtctgatatggcgggaatggtcaacattc

SEQ ID NO: 229076 - DNA, 388 bp, Glycine max
gcaagcttctaaactatatacaagaaagaagttctttaccacttgctagacaagtggactcagatatattaagaacgggggggggctgaaataagatattccaaactatttcccctaattaaaaccctttcctcttttacccaagtatgaattcccttaatgacaatcttcttaaatcataattcacatgaaacaatttgaatatgaatataaagcaataataaataaaggagattaagggaagagaaaatgcaaactcagttttatactggttagccacacccttgtgcctacgctcagtccccaagcaacccgcttgagagttccactatcttgtaaattccttttacaagttctaaacacacaaggacaacccttcctttgtgtc

SEQ ID NO: 229077 - DNA, 324 bp, Glycine max
ttgcttgagctccatggagaatggaggagatggaattttttcttgacgaacacggacggagatagctgttctgaaattgtcctgagtgaagacagagagggttgctctttgggttttacaaggcttctttttctttttcctcctctttctcttattatttcattcaagctctgccacatgtccctatttgattggagcaaaaagggcccactttctctttctgactgtgacccatactcatccacaatagtgagaaaaatctgacctttgaaacgctaaaatcctgcctcggcatgcgtgccatttctctggttccagtttctc

SEQ ID NO: 229078 - DNA, 378 bp, Glycine max
gtgaattaggacgcatcaacaagaatcaagccaatgctattgtgcaagcaatcaatggggcaaaacacaccaaatgattatgatgacggatggctcaaattctcacaaaggtaaaccctcactttcaaattgagccctcaaaactatcatgacatgtagagaaaaatcaaggatttcaagtcacaaaatgtcaagaccttttattttcaaaacaattacccatttcttgacatatcctataatcaaagaaaaacatgcaaagcttacgagcacaccaattgacccaaatttaaactaaaatcgacacgctaacacattaacaattaaccaactacaaattacaaaccaactactagcaaataaagacactcccccatc

SEQ ID NO: 229079 - DNA, 386 bp, Glycine max
tatataatacataagctctgggagctcactctgactcctcgacgaggagagtctgattctgctcaaaatacgacatatcttcagaagaatagccgaaatcttgacgatccaacacgcaacctttatacgactcacgaacgccccagaggaatagacctgaagcccctcccacttcagcattacaggcaccaacaccttcctcacacgacacatcctgcctctaccaccatagaactacagggaacccaccagcaccttcttagatcacaattccaactcctcactccgcaggaccaacaaagtatattataactcctcacatgctccactacatgctctacagcactcataaggggtagtccataatcatgcaaagtcttcacggc

SEQ ID NO: 229080 - DNA, 145 bp, Glycine max
gttggtggatctgtgctacaatgctgaccaccatacagacctaagcacacccatgcacaaacctgcaacaatagaccagaccgcagcttatgctgcgaaaacattacaactacaacatccatgcagcagacgccgcgaaaatcaa

SEQ ID NO: 229081 - DNA, 389 bp, Glycine max
ctggtaacccaattggacatgaataaaaaatctgcacctgtcgccagactctgtggtttatgctcctctgccaaccaccacacagacctttgcccttctgggcagcaatctgaagcaattgaacagcccgaagcttatgctacaaatatctacaatagacctcctcaacctcagcagtaaaatcagccacaacagaacaattatgacctctccagcaacaggtacaatcccgggtggaggaatcatcccaaccttagatggtcgaatccttcaccgaagcatcaacatcaacaaccttattttcagaatgctgctggccctagtagaccatacgttcctccaccaatccagcagcaacaacaacagcctcagagatagcacacatttga

SEQ ID NO: 229082 - DNA, 468 bp, Glycine max
cgcttagcaataaacacggaagggactacgagaaagattctttagtgcggaaattttatcaaaagtattggacgatcaaacacctaaacttacagagtttatcctttgtgtagaaaaattattttttatatttgagcttaaaagtttatcctctctttgagataattgaattgtattcattcaaactattgcttagaaatccagcttaatgatcaaagaatacttgggtgttcttaatcttaaagggagattaacgggaagctagaagtggcatagataatacttgttgtagccaggggtggcaaagtcaaaactcgattgtagtcatttgtgattagtggaaccctctacagtctatgaagaagaattatacgtatctcacggtgagtgaaccagtataaacattgcggctttactcaaacatactttataacatcgttgtcttctattacttctatcttatatatt

SEQ ID NO: 229083 - DNA, 417 bp, Glycine max
  unsure (1)..(417): unsure at all n locations
agcanccgcatagtagggggagcgtcttgtattactaccgaaccccatcggacatccgagtaaaaagtatataagctagaatctacctcaagcttctgtattcaatttcgagcgtctcgatatataacgggactcaatgggacaccgatcaaaagtaatcgaggtagaatttgctcacagctgctgtatcctatttcgagagactcgatatattacgggactccatccgacattccgataaaaaggtattatcgctagaatctgctcacagcttccgtatcaatttcgaacgtcctgaaaataacccgactacattggccatccatcgtaaaagatatcgacgatagaattcgctcacagcttctggattccattctcacgcgctcagattattaccggactcgatccgacatcccg

SEQ ID NO: 229084 - DNA, 462 bp, Glycine max
  unsure (1)..(462): unsure at all n locations
cgncttgccccttgatatataggagggactgatggtctctatgaatgacaaattccctgggataaaggtagtgttgtcatgtttccatagcccggatcaacgcatacaactcgttatcataagttgaatagcttacggtaggaccactcaacttttcactaaaacaaccacattggatggccttcttgcatcaacacagccccaatcccaacatttgaagcatcacactcaatttcaaaagattttngaaagtttggcaacgcaagtatgggggcataagttagcttttcgctaagaacattgaaagctcctacttgtttctctcctcatttgaaaccaacatatttcttgagcacttcattgagaggtgctgtcaatgtgctacaatccttcacaaatcgtcgataaaaacttgctagccatgaaaactctcacgtccgcacagactacgtgacgccattc

SEQ ID NO: 229085 - DNA, 255 bp, Glycine max
cccctccctagtgacaaactaaatcactacttcacttatcttccccaccacctgcaatgcagcggcgaataaaaacgaattgaataccctgaatcctccgaacatgccaaaccccagggataaaaatatttaaacatgacagctaacgtcataaggcataactatttcatttaagtgtgactggcgcctgccacaaacctaagcgatggaacatcttatctaaaggatcaaacaagatcacgggtgtcttggctc

SEQ ID NO: 229086 - DNA, 350 bp, Glycine max
ccgctaaaactaaaacgaataaaccccattggattccactagccgaggtcagctacatgcaaaaatgataattaaaactaacactgatattcaacagaagggccatcacgcaaagggtcggttataaccataggaaaactgcattaacgatgctccagctttgccattggccaccaattatttctttatgtcaccaattcttattggcgacaaaacagctaagagcaaaaatggtttgtgaatacgtgacaacttacaattgctaataacctaatgtctcgtataagctcgaactaattcagcataaaaaaacgttatattgaactgagtcgacctattaaatataatac

SEQ ID NO: 229087 - DNA, 441 bp, Glycine max
agcttgctgattagaaggttggatgagatattttttgtgaccattaaaataaaagaaaatagggggttggtgaaagataatgaagtgttggatgggaaagtcaatgacttgggcacggaggctgttgactccaagaaagttgttgagacattaagcaactagttggctgaggaggatgagaagagaaagattgttgtggccgacaaaagaattagtttggatgagaaaaaacttgctcatcagaaggttgagcaactagagaaaaaagtggttgagttggataaggacaaagagaaattgaatgccaagatcaaagagatcaagcaagtaattatccttgcttgtataaggttttaagaagattgagagataagttgctctttttgctactgaacttgatttgaccaacttcaatgtttacacggatgtgggcataatgag

SEQ ID NO: 229088 - DNA, 479 bp, Glycine max
accttaaaactcagcttgatgagtactgggaaagattcaagaaattgtgtgcaagctgtcctcaccaccaaatatctgagcaacttcttcttcaatatttctttgagggacttagcaacatggagaggagtatgattgatgctgccagtggtggagctcttggtgatatgactcctactgaggctaggaatttgattgagaagatggcttctaactcccaacaattcagtgcaagaaatgatgctattgttcttagatgagtccatgaggtggccacagattcatcttcatctactgaaaataaaaagaatgaaggaaaacttgatgccttggtcaaccaagtaactcagcttgccatgaataagaaatctacacctgttgcaagagtatgtggtctatgttcttctgcagatcaccatacagatctctgtccttctttgcagcaatctggagtcaatgagcaacctgaagcttatgct

SEQ ID NO: 229089 - DNA, 399 bp, Glycine max
tcatcttaataccccccccccgcgattgactgtgacgcccatgaacacctaggaagccggtatagaggaaagggtttattcatcagcaaagaaatgtcgctgattgaaaagggtgatcgatttggaaacgcatggcagcacccttacggaacatgttcgtcgatcgggtcaatcaaaccatgaagttcaaaatggcacggaccaatggcgtgagaaatacaagcgcgtaaggggtggcaccgatgaaacgacaatatggcaattgtaatcattattgagttgatgcaagctacactagaacggttgctatggtccatagaagtatctttaccgtacgtacatagaatgaaggaggtgcctcacgcgcgagaacaccaatcacaaaagttgcttatgtta

SEQ ID NO: 229090 - DNA, 198 bp, Glycine max
gagaagtaaagaaagaaaaaagagagaaaaaaaaaggaaaatagaaggtttggaaagaaaaaaaaggaagaggatatggagaaaaattattaaatagggaaggaagaatagggatagatgggaaggaagaaggagaagaatgagtaaggtgcaatagaaagaaaaaaaaaatagaaaaggacaggtaatagaaggaga

SEQ ID NO: 229091 - DNA, 443 bp, Glycine max
aatacacaagcttatgagagcgacacatgaacaacaacattgggcaaaatctatttatcatgcccaccgcctaaaccctctccataacacatatgaattatacatatatgtttctcacaaacgtcgagtcaaacccctcaaaaaatcttacataatcctattacaaataaaggaatcatactcataggtttaaaacgtacaaaaacaccaagagcactcaattgtatcaaccaattctcattacggaatcaatttgccttgtaaacataacaatcttatgattataatcataaagaccgaattacatatagtacacatccaaaaataacccccatttatcctctaggatccctatcaaatcattccaccccatttggaaaactcatcttttcttggtgctctctatggaaaggattaaccctctaaacattaattttaaatcc

SEQ ID NO: 229092 - DNA, 327 bp, Glycine max
ttcctgcttttattcgctaaccacagagtggtacctggaaatatgtcgcgggggtcaagagaccttggggatgtcaggtggggtgctattgcgcaaaaccaagcttgagcaatcccgacccaacccgggcataatcagtcagtgagaacctgtgatgtacctaaacaggcgagctcctgccagtccacagataagaggaacaaagaccacacagccaggaggcttgtgtggtggctggccacctgtgaatcttgtgtgatatatgggttatggcctctggtaatcgattaccacaggtgggtaattgattacaaggcttaaaaatga

SEQ ID NO: 229093 - DNA, 467 bp, Glycine max
ctatggcgtctgaatcttggcattttctgtcaacatattttggttaaatgttcatctatagtgggttacctcctgttgttgcttgataaagatttgctattacggaatttgttctgcgaaaggtcagcttttgaagatcacttttgcggaagaaatgtgtacctaatttttctttctagattttgtgtccattttgctgtaaatgcttcaaattcgtgcttctcttccatagccaatcacatttcagatgccacttaaaatggaaatgtgtttactgtgtaagaacacctttaaaacacaagacaatgttatctgttcaaagttcttttgagtttggtaaccaagagtactgataaagtacaatactcatctaacttggtttcaaacactacgtctgctagtgagctatgaattgcacttctaaagtctgtattgctctagtacctctggtactcatcaatgaatat

SEQ ID NO: 229094 - DNA, 372 bp, Glycine max
tatttccagaacggaattctatcaatagaccttcaatctttaatggagaggggtaccattactggaaaacccgaatgccaatttctatcgaggcaatagacctatacattcgggaagccatagaaacatggcccttatatacccaccacagtagaaagaattacaattaacggcagttcataaagtgaaagtataactatacaaaaacctacagatagatagtctgaagaggacagaaaacgagtacaatacaatttaaaagccaaaaacataataacatctgccctgtgaatggatgaatatttaagggtccaacattgaagagtgcaaagaaaagtgggacactcttcgattaacacatgaaggaactac

SEQ ID NO: 229095 - DNA, 435 bp, Glycine max
  unsure (1)..(435): unsure at all n locations
tgttattntccttgaagcaatagcgtgtagctcatttattatctccnctctgcgaagaaaggagataagctatcaatacaataatagacagctcgatgaaggctgacttcatttgcgaagcgacatacaccaattggctagtcaatgtggtcatggtacagaaagcaactggaacatggaagatgtgcatggattacaccaacctacacaaagtgtgtcccaatgatgcctaccctttgcttaacattgacaaactaactgatggggcatgtgggttcaaggtgctcagtttcttatatgcctactcaggctataatcaaatcaagatgtatctacccaaccaagaaaagacaacatttgtcattgatagggctaattttttctataacgtaatgactttttgatgcaatcctccntatgaacggactagtcacc

SEQ ID NO: 229096 - DNA, 211 bp, Glycine max
atgatgacagaatgggtggtcagggttcaagaggactgcaggcgaacactccacaggtagaatatcttgttacaagctcactcgtatgtcttgaacaacagcactgaagccctgccatacattgttaaccatgaagctctagtcaaacagaattactccgaaaatgtcaaagaattgggtgttgaaaaagcatcacatgactttctgtgat

SEQ ID NO: 229097 - DNA, 450 bp, Glycine max
  unsure (1)..(450): unsure at all n locations
tgtctgtcactgctggcccacgatgtgccaanacaagttcttacaatacaacaactcacccggagatactaattagctatagcggcatggcaatatcagagataatcggctccttttctttctaaatagtcatgcataggtaattaccccaacacccttcttcttaagacttctgtgtaactcttcaaaggcttggatgccacttgtgtctatgcccgtaccggctgcaacaaattaacacaccgaaatgaataatagtatataataacaagccgaatgaaaatgaaggctctactgcaggagtttaaggtataacaaaggacataagtagagagtctcacgtgacatttcaactatcaaaaactggatttctgtgcggtagtctcctttttcttcatccatcagccatcttaatattctgcaagagaataagttttaagcgccacgaac

SEQ ID NO: 229098 - DNA, 425 bp, Glycine max
agcttctctggaccctatgcaacctctactcatccttcaagaacaaactgtctactcgtgattggcccctctcctctctccggagtttaagctcgctgttgctaccccacagagcccctcgaaatttgttccgggcgtgttcttccctacaagccctcttggtttctcgttccaaggctttggtggtagccacatttacatctctctgttcggtattctcctttcggatttttcagagccgctgatttgaacctttctttaactgtttgggcttgctcaagttccgccctaagggcctgcacctctttgtcttcctccggtgcctcaactttctctcttttagcggttctcaaacttagaagccaattcaaaccttgcacgtgggcttttaaccacttacgatagccaccgatgggcccattgta

SEQ ID NO: 229099 - DNA, 449 bp, Glycine max
  unsure (1)..(449): unsure at all n locations
tnctttcttcacattgagagcacactctgacacaccctctcatgcaaactcaccttcctcacaagctcctgactttcccttcttccgagacacctattaccttaaaacccgcaaatccgacccatgtccacctcatgcagggtggtggagtgcgtttacattctgggctgcgcatggtggctgtggaagcgctgcacctaccacgagaaatgaacaatttggcaacattatcattctgggtcgcgcgtctgccacctcattctcgcagtaccaaaaacccacctccgccactagccccgacctgaacccgaactgcatcatcaagcatgtgacctacgaggacacactgggccacgcgccttcgtacataatctaccttgactaanatttgttgctttggtggggagttgaatattgatgaaaaatgcactgcgtgttttgttatttta

SEQ ID NO: 229100 - DNA, 155 bp, Glycine max
gaacccgcgcgggggttttttctctaaccccacacaaccaacacagcccggaattacacccccgccatgagaaacaaagctcccgaagaaatcctgcaagcctttgtacttcccagggacatccgaagggcatcgacgaccccgaagtcccaatc

SEQ ID NO: 229101 - DNA, 304 bp, Glycine max
cacaagacacacacctatccaagtaccacggtgccacacccgcttctatatatagtccaggcaccttccttgagaagccactcgaacacccctgtaaaatctaaactaacccccctgcctaaacacacaaaagaagaaagctgccgtgtggagcaagcgcacacccctccaagaaggagctactgccatagaacaacacctccaaacgcaaggcagcccgcccgcgcccgaaaaaacaccaagacacgatacccctctacaagacactcaaagccccgaaagacggacacccgactacaggaaa

SEQ ID NO: 229102 - DNA, 356 bp, Glycine max
gtttactactcttacttccgccccacttattccccgttgctccactattcctttgggtgctagttacttatcccatactttcctctaccttatccttgggcccattacaaccttaaaggaccttttgaccctcatgagcatgtgattgcggggtggctgtctattttagactcttgccaagtctatgcagtcgctgtctccatgggcgctctgagagtaaacaatagcccacacacttgagagataaagagcatatctcatgaggctctatcacttttcattcttgacctgattgactatcttgccatgtctgagatgcttggatgactttcatgactgccttgattcattcatga

SEQ ID NO: 229103 - DNA, 437 bp, Glycine max
  unsure (1)..(437): unsure at all n locations
gcttagagatcaactcaggagcgcaggtctcttgagcaaacaaaccaacaacttatattcacatcaaatntatccatattattagcattgcgagtgttgtatacagtaatggcataaaaccaaaaattctaatgagtcattggagacatctaacaaaaaccttcaaattgccccaagcatcatacatagtattgcttgacaacatcagaactcaggagcgattcccctcctcgaatctcagccagcctgcatcaatcagactttgcaccttatgtttcagggtcatacaatgctcaatggaatgccctgaaactcccccatgataagcacatgacacgttggggttgtatcctctgggaaatggaggttgagaaatctttgttgggcttatgactaccattgcattatcgagcagataggggagttagtcagcattt

SEQ ID NO: 229104 - DNA, 413 bp, Glycine max
  unsure (1)..(413): unsure at all n locations
tgaatcttgacagggtcaggtgcagctgctactactggtggaggcacttgaatatggttgccagacctcaaggtgatgacactcacatttttttggatctttcacagcttatgaaggcaatttgtcacaatctggattgagcttggttcatctgagtagccatctgccccatctgatttgttagactctgaatggaggctcttgtctcttgctgaaattgcatattctggatggtcatttgcctcactaactcttctaaggaaggttgaggaggagcctcaattgcttgctgtctttattgtgactgttgatgctgtattggaggaggaacatatggcttgcttgganaccagcattctataaaggaggataagctgttgtgttgtaacgacttgccatctcaaattggatga

SEQ ID NO: 229105 - DNA, 432 bp, Glycine max
agctattaaactttgtacaagaatgaagctctttatccacttgttagacaagcggcctcaaatatcttaagaagggggggttgaattaagataatccaaactttttcttctaattaaaaatctatcttacttgttacttcacttatgaattcccttaatgacaatcttcttaaatattaattcaaatgaagcaacttgaatatgaatataaagcactaataaataaaggagattaagggaagagaaaatgccaactcagttttatactggttcggccacacccttgtgcctacgtccagtccccaagcaacccgcttgagagttccactaacttgtaaattccttttacaagttctaaacacaccaggacaaccctttctttgttgttagagatcttttaaacaagagactcacagtctcttagtcccttag

SEQ ID NO: 229106 - DNA, 435 bp, Glycine max
tcacacaacttgggtaatcgattatgatgaggctgtattctattaaaacaaagagtttcgccttttgaataaactttcctaacttagaaatttttcttctcacttactcatgatgatgcatgatgcacaaaagatgatatggactaagatgcaatattcaatataacaatcaatacaaatgtcactcaagggagttacgcatgtaaaagataaaacatcttcaagctattctccaagcttccagatttagtcttcatgttgttcatgttgctcccctatcttcaacaattttttcccgagatcaataatctctaattaatggaactaataattgatgtcatgtgccaacaaaactaaaacattaatgtcatacaatagttatatctttgataagatcacacgcgtgtacatttcacatctcttatctatagtcta

SEQ ID NO: 229107 - DNA, 422 bp, Glycine max
agcttgcaagttggtaggggatgagaagttattgttgctgaaaaggaggagggaatccgtacattgaaggggattatggaggtggagaagagaaagaatgattctgagaggaaggaagacactgaagcatgcaagttacttggagaagagaagaaataggttgctgaaaaggaaaaggaaattggtagattgaaggggtgtatagaggagaagaagagaagggttgattctgagaggaagaaagctactgaagcttgcaagttactagaagaagagaagaataaggctgcctgaaagggggagattgccagaattgaagcagagaaggcagtgaagtatagttttcagattggtcaattagagaaacaggttaatgaagcaaaaacaaagttggcgtctgagatttctacgtttagagaggc

SEQ ID NO: 229108 - DNA, 479 bp, Glycine max
  unsure (1)..(479): unsure at all n locations
tagatacacagtcntaatatttctgaaattaaaatgagtgtttaggttggagaacgagaattcattgtgagtgtgagcaaggaggaggcggtggtaccatagattccaatgcaagagcactggctgccactatctaaccttgatctactcattccccgaatggatgttattgtattcttctgttacaaaaaaggttgatagtgattggtacggataaaaatgtctttcgccatttcttataaaagtcaacatttttgttgggatacctaatattcttgtccaaacattgacacccaacattttttactggagtacccaacaatccaggtgaaagggcggaaatgctcttcacccttttctatataagccacataacgacttgtacggacgagtcatcattcatttcttttctgcactctccttccttccgtctccttcctcctttcttcgtgactgtgtcgtccgtgccattcgtggtt

SEQ ID NO: 229109 - DNA, 408 bp, Glycine max
  unsure (1)..(408): unsure at all n locations
agcttcntgcgtagccgatgtgggcgcttataattatcccaaaacaaatccctcttattactagctattttgaattctttaaatcctgaatgctcaaccttcaaattgttgctcgttcccctatttcttttttgcaaaaaagaaaaccaaatgctgtcaaaacatggatgaagtcctaaaaaaatcaatatcaaagaaaacatggatgaaatcacaattaaaaagcacaactacctatctttcagagccctttggttaatttgtcttgtctccttatgtggcggggttttgattaataatcttatacttttgccttccaaaaaaaacttatcactaatcctcttttcattaatcctntattcaaaaaatacttatcacctcgctccattactcctcttcctcctactc

SEQ ID NO: 229110 - DNA, 472 bp, Glycine max
  unsure (1)..(472): unsure at all n locations
tttttcatatatacttactcttcccctcccagcggcctgtgcgtgttttcgcaccttanaaactagctttaagacatgagactaaaaaaagcgctcatattcttttcattttgcgaaaagctctctgataactattgtacagcttacaatagctctcaaaatactttgaatatcttgagagagaagactatgtgctaatgttgtatatttgcttgtaagaccatggaaagttactcaatgcgcaaacaaccaaacaaatcttctaatttgtattatagacaccagtggcttgcgcagacaaagaatactggttgtaacaagcttggtgtaaatcttgagctgtagagctagtagcgcgagtgattaatacttgtaacttgttgaagttagtggaatttggtgggttaccaacaataggacgtggtcttactggttgagacaaaccaccataacttcatgtgtcttatcatac

SEQ ID NO: 229111 - DNA, 423 bp, Glycine max
  unsure (1)..(423): unsure at all n locations
nagcttgctaatacacttattattgatggtgggtcacattcttgtaatgcacagttgcagaatatgttggggcactacaatgtcaagtataagggtgcttctccttatcatccctagacaaatggccaggccgaggtatccaataaggaattaaagaaaatcctggagaagactattacatcctcaagaaaggaatgggctgtgaaattggattatgctttatgggcttatagaactactttcaagactccaattggttcgtccccattttagatggtctatgggaaggcatgtcatccaccgatagagatgaagaacaaggcttactgggctctcaaattcctcaattttgatgaatccttatcaggcgaaaagtgaaagtgcaactgctatagctggaagaaataacgctcaatgcctatg

SEQ ID NO: 229112 - DNA, 411 bp, Glycine max
cgtataactcttagagaagaagagtgctagttgtgtcttgagattgagacacgcgctacggaaagagatactcttctcaagaactttcatgatttggcaaacaaactgacagatctttaaaaggagttgaagaagctgaatgaacttcatgactataaaacagaagaaagatatgatctatcgagtgtagaagcaagcttcatgatgagtcaacattgattcacagagtcttgatgataacatagatgatgacaaaaagctcaaaagtcatgaacactctctgataaccaagatgatgatctcacgaatcacagaatgagtctaagattgaatcaagtacacttcaaggatcaagaagagagttgaattccacaatcaagaatcaagtttcaagattcacgttccacgaat

SEQ ID NO: 229113 - DNA, 367 bp, Glycine max
gctgccaccagaaatcactaatattatttgaagctttatctcagcttttccttaccaagttaaatggatcatttttaaaggcccacctttaagtgatcacctttcaagtaaaagaatcgcttgattcactcttaaggaagaactacctaggtctgatcttctctttgatggagggtacgtaagatcaagagccccgcttatgtccacctcaacaaataaaaagaaataaaagtaaaggcaaaacaatttccacaattctaaaaatgaggctgttgtcctttgagataaatgtgagaagtgctaataccttcctcaaacagaaatacaactcccgaacttagaattttcattatgaccagtttccttc

SEQ ID NO: 229114 - DNA, 435 bp, Glycine max
cggaaactaatattatgctacaacagatgcacatgatccactatccataatgagagaacaagcgctatctacaattgtgcatcatgtatgaaagatgttctctccttgggattaaaatatatcacacgattgacctccaaggagccttctaaccattaggaattcaccttcttcatgggggtagacttcctcactagactcttcaccccttacttcatcttcaattccactagaggaaggggaagaagtagtctcctcttgagtactataaatgtcttgacccctcataatcattgttttctttatggggggcattgagaggcaatgtgacctctcccaacacatttgaagcatttaatggtgctagtcctctcttgggaactattcttacgggcgtattcctctatggtcttatcctcatttgtcttgggcttg

SEQ ID NO: 229115 - DNA, 400 bp, Glycine max
  unsure (1)..(400): unsure at all n locations
cgccctttggcncaatccatcaccataccatacaatacagctttgcaatggttgcaccaaagctctcaagccaagcgtatcctagagaggcaaaggaagaaggcaaccaaggctaccaaaagtggcatgggcaaaataattttttgaaatactcgaatcaatattatctcctggatgcaacacacatattttcagatgtataacatatttccctaagtatatattgtgcctgaatcacttatcttttgtggctggaaactattaatacacacgtacctagtagaacaacaagagactatcttattgagtcacaaaacaaacatcaaccactaaacaacacggatacacaactcttgtaaaacaaaataaaaacaaggctgattttataaaataaaacctg

SEQ ID NO: 229116 - DNA, 450 bp, Glycine max
tattcttccaaccagccaatatggcggtggattttatctataatgaacgcaaactcacactataattcctaagtctcctagaacgaatatgacaacccaagcatatatcaaaacttcgggttcgcgtatactataatcaaatcaatccttcaacacacgcacaaactctaggatcaagacatctacatgtgcaagcattaatcttgaagcctcctgccaaactacaagagcctaaaacttgcttgataagccctcacgtgagaagttgtcgctttaacacgtgatacccagtcgaccgcgaatggcgtccggttccggtttcttcccacaccaaaagtcgggtaccggtaccgctatgggattacctgatccacctcgacactgactctgaccctgacaataacataataaaacaaatcactacgggtctggactctgcacattaaaaaa

SEQ ID NO: 229117 - DNA, 389 bp, Glycine max
  unsure (1)..(389): unsure at all n locations
cagcatgcaacctgnnctcagggcgagggacatttctccttaagccaccaacagcaatgagcactatctggaggtgctcctcccaatgaagccaccgaattacaaatgctccacttgctggagatggcacaatctgaatatataccaacacaaacccattaactcggtaacaacacaaagaaggtagggacacaagaaacacagacctaatacaacacaaaacaaagctccaaaaaaatctcaagccaaggtgatcaaactccaaagcaagaattgcctgatttaacaaccaaccattgaacaaacttctgcatgaaaaactatcaagcactcaaataaagccagtatcaattcgaaaagcgaggcagaaaaatacaatcaaccataaa

SEQ ID NO: 229118 - DNA, 305 bp, Glycine max
tgattctgttaaatacaaaactacgcaaggatctttttaaaaaacattcacgccgagccgccatgcattattacactacttcaaatatgctttcacaactgccttcccttctcttgtacttgacacacacacaccatacctaggagtcgagaaccaacactattctcaaaaactttcttcttctccaacacaggaaatgctaattaaaataggagttgcggagctatctgacaaaaaaacttccagcagacaaaaatttatcgcatgcgacccttacacctcgggtactcacactcactctaata

SEQ ID NO: 229119 - DNA, 424 bp, Glycine max
  unsure (1)..(424): unsure at all n locations
acttgaagacaagactatntcttgtttcttccttggatataacaatatctctaagggctaccatgtctacaacttgcaaactaagaaactcatcatcagtcgagatgttgaagttgatgggtacgcttcttggaattgggatgaagaaaaagtggagaagaatcgttttatacccgctcaactaccttaagaagaagctgaggaagaagacccaggtgaaccaccttcacctccaccacaacaacaagatcaataactatcatcaccagagtctactccaagacgagtaagatctttggtggacatatatgaaacctgtaactaggccatacttgaacctggaagctttgaaaaagcgtcaaagtaggaagtatggatcaaggcaatgtgagaagagataccgatgatcgataaaaccacacat

SEQ ID NO: 229120 - DNA, 434 bp, Glycine max
  unsure (1)..(434): unsure at all n locations
gtattcagctntgaaatccaaagatatagatcaaggtgattgtttcatatgtacgaatcccctacttgtgatatataataccggtgcgaaccattctaatgcggctccatgtacagcttgtagccttggatcatcataatcaatggagtctttttcttcttataaatcaatggcctctggaattgagaaaaacgataggtgattgtatatgccactttaatgagaatatgagtaagaacaagcttaccaccataggaagacatggataagagctcgtaagtatgagaagatgattggagggagagggatagaacggaacgaaattttgatagagataacatggagaatgaggcttgaactcttgagtctaatttttcaaatcatcacatgtaaaaaatgcacacaccaggcctctatttatatcctatgtgtac

SEQ ID NO: 229121 - DNA, 341 bp, Glycine max
agcttagccctagaggggatgttctttttatagttctggagaggatcaataacaatgcctatatgttggacctcctacaaaagtatggagtcatgcccacctttaacatctccgatttaattccttttgcaggtggagctgatattgaggaggaggaactaacagatataaggtcaaatcctcttcaagggggaggggatgttgcaatcctccctaggaagggaccactcactacagtcatgagtaggaggctccaacaggattgggttatacctgttgaaaaaggccctaaggttctcatgaacctcacggtagatttctgatcccttccgccaaggttg

SEQ ID NO: 229122 - DNA, 327 bp, Glycine max
ttgaaaccataactcgataggggatccaagtaagcactccaagaagaagaagacgacctgactgattaactctgcctccaacttttctccttagaatttcgacccgccatcaacacacgcacttcttagaaaacccaaagatacgaagacgattgaaaatgaagcaatgaacacaaccaataattcttcccaatgctatataaaatgatatgagtgtatcgtccttgaggttgcagtttccattctccaagcaacttctgaagacttgttcaatgcgacaagtaattaatgaacaagatggaagcttcacgataaccaaaacgactc

SEQ ID NO: 229123 - DNA, 413 bp, Glycine max
  unsure (1)..(413): unsure at all n locations
gcaagcttctcatggcctntntatgactccaaatgaatatttatttatgttatttattggcacacattaatttgaagcctacaacattaaataatgaagcaaatactctaaagcaggcccaaaacaacaacagtacatgtaaatgcaaaagaaagcagtgtttgactgtttatatatactatcaaaacttggatttaattcatgggtccaactatttgacaccctcctttattctcttcacaccacttgtgttntttaaactcctatactacccatgtccctttgtacctgcaatcccttctatttctctcctaccctctagtcttgatgtaagctccatttgagcttgtaggcctaggatcttcttcatcaatggattcatttgcttcttgaaagatgaatggcagcggaat

SEQ ID NO: 229124 - DNA, 349 bp, Glycine max
  unsure (1)..(349): unsure at all n locations
agcttgtccttananggttgactaattcagaatgtcttatattgggctttaaacccttttatgctatactaattctcaatgctgttaactcgtgcctctgaaatagtgaaatgtgtgcatgagttccaaaaacggtgtacacccatcagtcattataagttactgcctaagaatctctgaccgtgtgctaacattcaaagaaatgaataacgtgaactgaagctgcagatggcgaattgaatggagaacgagatgaaggctaactactgacgagaggttgcatgaatgacaataatatggatgtctaacaccccatactccatgactgtggaaaaatatgtttctagtc

SEQ ID NO: 229125 - DNA, 210 bp, Glycine max
aactatttatatcacttgtttagcctgtttgcaatacaggatgacaatatattctattgctgtggtgacagattattacttggattttagaatcatatatgtctcaggttactcagtgggtaaatttataagcgtgatgtaaaaattgaacttagtaatccacttgtttgtgtgccagggaagaaaggtatcaactcctagaatattatt

SEQ ID NO: 229126 - DNA, 472 bp, Glycine max
  unsure (1)..(472): unsure at all n locations
agcttcccgtcaggggtaccttaagtttcatgggataatttcttcatttggttntgatgaaaaccccatggatcaatgcatataccacaaggttagtgggagtaaaatatgctttcttgttttatatgtagatgatattttacttgcagccaatgatcggggtttgctacatgaggtgaaacaatttctctctaagaattttgacatgaaggatatgggtgatgcatcttatgtcatcggcattaagattcatagagatagatctcgaggtattttaggtctatcacaggaaacctatattaacaaaattctagagagatttcggatgaaagattgttcaccaagtgttgctcccattgtgaagggtgataggtttaattngaaccaatgtccaaagaatgactttgagagggaacaaatganaaacattccttatgctttcagttgtggaagcctcatgtatgctcaagta

SEQ ID NO: 229127 - DNA, 203 bp, Glycine max
caccccagagatcgtaatggtcacacctaacgttctctctttaaaaccaaagatcataatgatcaatgcttaacgttctctctttcaaaccaagagacataatggccaacgcttaacgttctctctttcaaaatcaaagacgttatggccatgcttaacaatttgtcgtcaaatattgcaaaaaaaataacactccacatatt

SEQ ID NO: 229128 - DNA, 478 bp, Glycine max
  unsure (1)..(478): unsure at all n locations
taagcacctgcagctgcagctagcctaaccttcattgagctactcttttataaaagtntactaactcgccacatgtttccaatttacaaatagggaataacacattaacacaaaaggaatcaaaaacaatttcaatattaggacataccacccaatccccatacccgtgcaacataggactcattggaagaaaaaccaataccaaaattcaaaacataaaatagaaactcactactcatcttcagcctcgcaagacaaatcgtgaccttgcaaacatattcaaaacttctattggagaccaatatctggaaaccctagcaacgaggtgcatgcgtaaaacaaaccaaaaggcagacacatattccaccataccgtatgttctctatcaattcactcgaccaaataatcaaacatacgatgcgcagtgtatgaaacagagggataatgctaatcaaagagttcataagcaacgaaacac

SEQ ID NO: 229129 - DNA, 437 bp, Glycine max
  unsure (1)..(437): unsure at all n locations
agcttaacggaagtaattgaaatgttatggtttatattntnaccaatttcacagaanaacgtttaactaagagatagtgtagctcagttggttgatagtgtgggtgaattgatgttaaccactaagtatgaacagaaatatgtttatcggcttatgcatctgcgcccaatgctttctctgcaataaacaaaacagaaggttcagcgcgtcagccattttatgctaaactcgggctgaaattgttcccagtgtttagtgctagtagctacctttcttgccctaatttctatgctacatatatatatagagagagagacacacacacacacacaaagatctggagtttacccatatacttagatttgagggaaacatatctattaattatttctctgtgatcgccccagatatgctatcttatataatgaaccatgagc

SEQ ID NO: 229130 - DNA, 445 bp, Glycine max
agctgggttccaggtacttacccgtgaagattattaacgatgaagaacgaatgaagaacgtcgaagaacggtcgaaacctttgcgaaattcctcacggaaacgttacggaaacgttttggaagcgcctcggcttaaaatttcttcacggaaacaatttttccaagcaaattcgaaagagagagaagtgcctaaggggctgaacccttttcttcttcacttcctcccctatttatagcaaaataggggagatgcttgccacccagctcgcccaggcgagcagggttgcttcctccagaagcaacaaccttctggaggaatcttctggacggcccaagtgggcctgggtgctatttgcacccccatatatactaagtacacaccctggccttttttggtgattcttttttcgcaaagtacggaaacttacgaatttcgtaacgatac

SEQ ID NO: 229131 - DNA, 356 bp, Glycine max
  unsure (1)..(356): unsure at all n locations
cttagagtcacctgcggcangcaagctccagcaatagagagcgagggcatatggatatttctctatagccgatcntagctttaagcgacaagataattctaactttacgggagccagttcgactcatataacttctatttttctccaaatgttaattaagacacattgtaaaatagggctatcttttattcatttataagtgtattatgtctagggagttcagattgtggatcctaaactgccgtttcatggggtggagaatcccatttatgctgtgattcatctggcacagacaacaatgcgtagtgagcttgccaacattactcttgactatacctttgatgaaagggacacac

SEQ ID NO: 229132 - DNA, 457 bp, Glycine max
  unsure (1)..(457): unsure at all n locations
agcttgcatggtatagttccgagcttcttggtttgcaacagccgntctccgttcaccatctaatgaggaagttcctcctcagaggcttcttcataccattgatcgtgctgcggttgtggacactatcaaacaagactttgaaagatcctattttgtcacaggttttgctatgcccatttgcttagtttttctgggtcgattccaatttctttcctttcattcataagagagataaatttgatgcatcatgaatgatgataggttctatgaattgtagatttgtttttataggtcaggggaccccaaaactctggagtagaattgtaggcttaatgtgaaattgtgacattacgtcgtaagccaaaaccttaagttattaaatcataatggaccagttattccttttcaatctaangtttcctcattcaactctgcttcacgtttgaattctcaacac

SEQ ID NO: 229133 - DNA, 428 bp, Glycine max
  unsure (1)..(428): unsure at all n locations
agcttgtaggattatggtgtacccatcacatgttgtactaagnggcggncgggcgatggtgcacaacaagttttccacatccacaatgcgcgcataaacccaccatcccctggtgcccacctccaactgagctcacgtactcccacgtagcccatatcctcgtttctctcaacaccgggtccccatcaatcctcccaagcttccccaacatcaaagtaatacaacattcaaacagcacaaactatcacagccaagataacagagcataggcagaaaactctgccaaaacaccaaccaaaatcacagcttttctcacttaaagaccccagtaacaattccttcgttccaattcgttaaccgttggatcgactccaaatttttactggaagtctctagtacataagcctacactttgaccgtgggatcta

SEQ ID NO: 229134 - DNA, 71 bp, Glycine max
  unsure (1)..(71): unsure at all n locations
cctttctattatctttctccccnncccgtttctaccctaggacacaacactatcaatttcacgtcccgact

SEQ ID NO: 229135 - DNA, 391 bp, Glycine max
  unsure (1)..(391): unsure at all n locations
gcaagcttccagattggtataccatgctacagctactccggccaagctgtcttgaaagaaatggaccaacaactttttgtccgcagaatacgcccccatcttccggcaatacatccggagatgcccctttggacatgtcgtccctttgtacttatcaaagtctggtactttgaacttgggagggatgacgatgttgggcacaagacatatatctgccaaatccgagaatgggtaattactgaggccctcgactgctcttaacctctcttcaagcacctcaatctttcccttatcttccgcanagggaacagattctttcacgggtgtgggtgaggctggggtatggcggactatgttcggctggggtagttcatgcggngatggatctttg

SEQ ID NO: 229136 - DNA, 213 bp, Glycine max
  unsure (1)..(213): unsure at all n locations
actgtgatgtgcatcatagttgtatgcattaccttgctattgtactacattangcatctatatagcctttcataataaatgcacatcaactattattagaatcacactatacacttagctacataatccattcatatcatttattatgagttgcataatacgtgtctctgaaaacatgtatatatacatctctatattactcacatactcaaa

SEQ ID NO: 229137 - DNA, 456 bp, Glycine max
  unsure (1)..(456): unsure at all n locations
agcttgccacccagctggcctaggcaagctaggtggcttcttcccgaagcaatcgccttctggaggagatttttgaaaggcccaagtgggcctggttgctatttgcacccccanttttactaaatacaccccttgctcttttttggtgattctttttccgtaacgttacgaaactttacgaatttcttaacgatgcttgttttctttccgtaatgttacgaaaccttacggattacgtaatcatcccttttttgccttccgaaacgatacggaactttacggattgcgcactaacacttccttataatttccggcatgtcacggaacttcacggattgtgctacaatgctttcttttgacttctggcatatcacggaacttcacgaattgcctatcgatcggttgccagtacctcgaaatgtcaaacgagggtcgcatcctaacaacggatggtcc

SEQ ID NO: 229138 - DNA, 489 bp, Glycine max
agcttccttgagaagattcctaaagaaactagagcttagttacacacacatttctaatagctaagctcacctccttgagatgagaagctagagcttagctccacaccccctataatagctaatctcacccccattccaaaaatacatgaaaatacaaaaaaaagtccctactacaaagactactcaaaatgcccttaaatacaaggctaaaaccctatactactagaatggccaaaatacaaggcccaaaagaaggaaaaacctattctaatatttacaaagataagcgggctcatacttagcccatgggcccaaaatctaccctaaggctcatgagaaccctagggctttcccttggatctctggcccaatctacttggagtcttctctatccaatgcccttgcggggtaggattgcatcaggatgtaccctcccttgttatctttgaacaaccaagtggatgtacgctccacttgaactgatccaca

SEQ ID NO: 229139 - DNA, 315 bp, Glycine max
tggtcttacactgctaaagttagtgcttcattgctgtaaggtatttagtcacgctgaagacaccctagtaagaaaatacgtgtagctcaacacgaggctgattttatcgaatgatgatcgaggagcacaagcccgctttgtcgacaccacgaagatcgttatggtcaacgccttagcgttctctctttcaaatcaaagacatttatggtcacacttaatgactttgtattcaattatctgcaaagaaaaacactatcaaccttgtccaagacacgagttgattctatcgaatgcgatacttgacaaggaacacct

SEQ ID NO: 229140 - DNA, 444 bp, Glycine max
agcttccttgagaagattcctaaagaagctagagcttatctacacccaccccctataatagctaagctcacccccatgccaaaatacatgaaaatataaaaaaaagtccctattacaaagactactcaaaatgccatgaaatacaaggctaaaaccctatactactagaatggccaaaatacaaggcccaaaagaaggaaaaaccaattctaacatttacaaagaagaatggatccaaccttgacccatgggctaaaaaatctaccctaaggttcatgagaaccctatggccttctttagtagctctagcccaagcctcttggagtcttctatccaatacccttggggggtaggattgcatcatcccctccaccttggaaaggatatgacctcaaatcccgagggtcttcatactctgggctccttccctcgacacctgtaaaa

SEQ ID NO: 229141 - DNA, 333 bp, Glycine max
cctctcagggagctggtatagaagcatgtggcattcacctgcggtgaaaaacattatcaatcctgtgcttcgttcagagaaaagctaacttaggcacctgttctagctcttcctgtctattctaaaactacttagctagaacgtgacgcctccagagcgggaagtggagctgtattgttacaaagcggggcctctattgcttattatagtgataaacttcatggagccacccttaactacccctcctatgataaagagatttataccttaataagagcactctgaatctgggaacataaccttgtgatcgaggaaattttcattgatagtgat

SEQ ID NO: 229142 - DNA, 421 bp, Glycine max
  unsure (1)..(421): unsure at all n locations
agcttgaatcggacatccgagtgatttgttattttcattnngaattcccaagagcttccgatgttcaatttcgatcctctcgacatattatgcacccgaatcggacatctgtgtgaaaagtcatgatcatttgaatttctcgagagtttccgatgtttaatttcgagcgtatcgatatattataaccctgaatcggacctcagtctgaaaagttatgaccatttgaatttgacgagagcttccgttgttcaatttcgaatatcactgtatgtgatgcgcctaaattggacattcgagttaaatgttatgaccatttgaatttctcaagagcttccgttgttaattctgagcgtctcgatatgtgattcgcctgaatcggacatccgtgtgaaaagttataccatttgatattctcaagagc

SEQ ID NO: 229143 - DNA, 281 bp, Glycine max
gctcgactccgtgaagcttgcaatgattctatactttaccgagtcgaccgcctattgcggagtcgaatgcacgagcttgcaataatgcaactttccggacttggaacattggatccttccctcagcgtgagtataattcatcctggattcctggaatctaaatcatggatacttaccgagccgtaagctacattaagctaattcacgacttacaatcatttacctccgctcgtagctaatcaagtaataccgagttaaatatgaactaccgtgcatagtta

SEQ ID NO: 229144 - DNA, 428 bp, Glycine max
agcttgaaggagaactagatgcattgtttaacttggtaacccagctggccttgaatcagaaatctgtacctatcgcaaaggtttgtggtttgtgctcctttgctgaccaccatacagacctttgcccttccatgcagcaacctggagcaattgagcagcctgaagcttatgctgcaaatatttacaatagacctcctcaacctcagcagcagaatcaaccatagcagaacaattatgacctctccagcaacagatataaccctggatggaggaatcaccctaacctcagatggtccagccctcagcaagagaccagagcctccattcagagcttaaccaatcagatgggacaattggctacccaattgaatcaacaacagtcccaaaattctgacaagctgccttctcaagctgttcaaaatcccaaa

SEQ ID NO: 229145 - DNA, 271 bp, Glycine max
  unsure (1)..(271): unsure at all n locations
tgtactgcattctatcggcaaggttccaccaacccacaatgtcttactcgtcataacaacctcttctaccccaccagtatcacaagcctnctaataacacaagctttacgcttcatgcaaacacctactcaccaaaacacacaaagatttgataaagctgaggtacccaattcgtgctatctaactgacctatcctcatatcacggacctacccaccagtctcactcattttgagatcatcacacgtgtatggaggcctggctctaccact

SEQ ID NO: 229146 - DNA, 485 bp, Glycine max
  unsure (1)..(485): unsure at all n locations
agcttcctcggggccatgtactgcgaatgcaatcttttggaaagntagntttaccagcgggatactattcttaaaacaaaaatgacatacaacctcctcccataaatacaaacatcaatgtaaatttagaggaagcttatgcgcatattttcttacaaacgttctcttgcacaagacattctattaaccaaaaaaaaaatgcacccatatacaatcaaggcagcttcgttacctagattatttacacgtacttccaaggtgtatttgttacttacatcacacacctccttggctaaattcacatacatgcatactcaaagcattttggggtaccaaaaattgcacatgtgcacatcttggtatttctaatacctatacatacacaaacttcatgatgaatcttgactatctacacaataaggtgctacattttattgctcttttcaagttttgctacctaaagccgcatgcantatcaagtatat

SEQ ID NO: 229147 - DNA, 447 bp, Glycine max
  unsure (1)..(447): unsure at all n locations
agctttctttctcaatcaacctgtctattgactaacaattctaattgcatgttcacattcttgttctttctttgtctaacatacatactcactcaaacttatgaaaagaaacacaaactccatcataatcatgcattcaatccaaaatcaattcataacaccaattttcacaaaaaggtaaaaatgtttcactgcataatcatcaaagtcaagttaaactgttccatatgcttcaaaacaagcataccaactattcacaaaaagtataagtatataattataaacggaaaccaaaattactcaaaacaatgtgctgaaaccaatatagttataattattatccaaaaagcaaaataatcaggaatgtaaaagtcctgagatagatcctgtgtatcctaagtctgagcatcctnctcatctgtcaagtgaagtactggagtagctgga

SEQ ID NO: 229148 - DNA, 341 bp, Glycine max
agcttcacagatccacatttccttattaataggtttaactcacaaaaatagtccccagtggagtcgccaactgtcgcaatgtgcccttcgtggtcgagcgagggcgaggctcacgggtgcgctcttcaaaggaggaaaggtgcgcggagtcgccaccaacgtttatttgtggataacgtcggaaaatccgaaggaaaccggtaaaaataaaaattctaagttcgggagttgtatttatgcttgaggaaggtattagcacctctcacgtttgtctcacaggacaacaacctattttttagaattgtggagattgtgttaccttaacttttatttctttttat

SEQ ID NO: 229149 - DNA, 427 bp, Glycine max
  unsure (1)..(427): unsure at all n locations
agcttgtggcagttttggtccaacaatacgttcaaccatttcagcacctccctctgttgggattgatctacatgcagagcaaaggtatcctccatcttcacctaatgtggctttcgctatctcataaagtttatatgttaatgatcctaatttatacaaaatcttgagaacaggcgagaatgctccaatcagtgctttatgcaactgcaaaagatccgaatgattcttccaatattaataaggtaaacatttcatctttagtgttgccaactcatgcatactgaagtcaatcttgcagactgatgattntaaaatagaaaacaaaaatagtccttgccagtttctatttctttattttgaacttgtccttgtatgacaagatttgcatgcctttgaaaaatagagaagtagcatttgcaactatata

SEQ ID NO: 229150 - DNA, 431 bp, Glycine max
  unsure (1)..(431): unsure at all n locations
agcttntacagcagatttagtaatgacccactatcctagatttaaaataacttaatgtcattaacctagggaattaaaaaaaacttaatggctgagtgtaactgaaattgtggcaaccaaaagtcacccccaacagccaacaagtcagccaccatttggtctcccaaaaggctgatgcctaggntgccaattgggcccttattacaacttgaactaaacctaactaaagcccttttagttgattaacccaaaacatatttttggtcagccaactttacaaggattgggccattatttagacaaactaaacactctaaanatgaaacaaagnggngtcatttagtcctcctccatgtgggccatgatacaactcacaaccttggacttttctccttgaaacttgggcttgtattcaaacagtatggacagca

SEQ ID NO: 229151 - DNA, 224 bp, Glycine max
gtcagaattgtgtgtgatactaccctcaggtaccatatgtttttataaacattgtttacctcttcctggttagaatcaaatatggccaataaacatacatatttagaagctaaacagaaactacctaaaacgtacatgtttagccatgagaataattaaataggatcagacatcttctcacattatactaaagatttttaagtctcagctcacatcaccaattg

SEQ ID NO: 229152 - DNA, 336 bp, Glycine max
aggagattttcatgcagggatttcccatatgtctaatgcatgatatatgattttaagtgaggatattgttgtcgctctaagtcccaagtagactaggagccttgcaagattgactagccaagtatcgagaagcctttatgaagatgcatcacagtgtgataggtcaacatcaaaattgtagatgatagtgattattagcaatatgtccgaaacctatacaatcaaggccaaaaggaatgtggtctgacctcactacctaaaagactatgaggcttgaaggaattatcttactgctagctcatagacagttgcaaccaataacatattctataagaa

SEQ ID NO: 229153 - DNA, 331 bp, Glycine max
gagggaaatttgggtcggcaatagggttccatattctaagatcttacgcatgctcttatatctagttggtggtctatctccatattcttgagtgctgttggactggagaaaaaactatgaggattgttttgaaccttgttcattgcagaacatgtcatgagatgccactcgagactgccatatacgtgtgacaccaaacatactctctagctacccttcttatggagtgcaaaccatagatgaattgtcttgatccaaggcacccaggtatatagttaacttagatgtgatgctacaattataatatttcctatctactggttattatgaa

SEQ ID NO: 229154 - DNA, 475 bp, Glycine max
  unsure (1)..(475): unsure at all n locations
agctnttccattggatagaattgcaccgtgtttgtgtgcattcgtaatggnggtttagcgggtatggattggaagcagtaccgactcggacccaagaacatggattgtggcttcctgcttttgctcctcttcttccatctcttccttcctcactcctctggtttaccttcctctctctctttctaacataaaaatcttctattctattgatttgcaatttttatttgttattcattattcgatcatgatgtcaagcttaagcagggggatacacacaaataaaaaaaagggaatttcttttattccttgtgtagtttgaagagnttgttagctagttagttagttgtgtgatagtttaggatccggccaattcttaaattttgttcctttctcatactctggagtggttatgacttacgaatccccccttcctaaatgtgatctttgatctcatgtgcatgaatccatctctctc

SEQ ID NO: 229155 - DNA, 324 bp, Glycine max
  unsure (1)..(324): unsure at all n locations
tctaatgaccccctgacgaccttgatcgagctagcaactagtgaaagtcagaatcgacagaagtggcatacatattacatgccctgacctaagcacctctttccaacgatagtgctaacaaaaaacactctaacagcaanactaaaccagatctattagtagtgtgctctgtgtttgtctgcaggacagtatcgtactacttttcattctcatagaataccttggcctactccagaaatacgatgcataaactcagcaaacatgaagcagctgacagttgttgtcacctgtttgtggtggtaagatccaaagtttttttgtgta

SEQ ID NO: 229156 - DNA, 416 bp, Glycine max
  unsure (1)..(416): unsure at all n locations
agcttataagaacaaaaatgccttaatcattctttatatattcttgngatttangacgcatcaacaataatcaagccaaggctattgtgcaagcaatcaatggggcaaaacacaccaaatgattataatgatggatggctcaaattctcacaaaggtaaaatcatcactttcaaattgagctttcaaaactatcatgacatgtatagaacaatcaaggagtttaagtcacaatatgtcaagaacttttattttcaaaacaattacccatttcttgaacatatcctataattcaaagaaatacatgcaaagtcgtacgtgctcacaaaattgacccatattattaaactgaaaatccgactaaatctacaacattaacatattaacacaactaacttactaactaaaccaacaaaac

SEQ ID NO: 229157 - DNA, 454 bp, Glycine max
  unsure (1)..(454): unsure at all n locations
agctngcaagagagtattagaaggtttctcatattatgtcattattcaataaagattggtccatattttntatggtggagtgtcctcatacaaaaggtcatatttagatgtttcttatggaattaacctcatattaaacccctttgttgatgccattagaatcattgaagatatgtgctttaacccctattgaaactcagggaataaaaggattatgatggtgtcaaccaggtggagaaagatgattcccaaactgaattatgaaagcatatgcaagatctaacactaaagaatgagacaatcatgtgagctcaagctcaagtccccatcactatcgcttcattcccaacctatgatagatgtgggattgtgcataggcctagagaatgcactattgatgatgagttagttgcgaccatggatgagaacaattttgttgtgggaagaaacaact

SEQ ID NO: 229158 - DNA, 445 bp, Glycine max
  unsure (1)..(445): unsure at all n locations
ngctttaanatataggattagttctttgtatgtttagaattacacggacnaatcgcataaanattacaaagaaaatatagttcttagttgaacatattctatgagaaggtcacacttgtacatatatgtttgttatgcctcatatcttaatgggtttgttggtgggattcaatcccttcttttgtttcactagaatttaacagaaatagaatatgcatccgaaactatataagtttaaatacttgtggttctcatgggcttggttgatgtcccatgatattttatatatctcttctttggcgtgctgcaaatgatgcttgtggtgcctacctgactgggatcactctactattgagatgcctctgcatgtcatccatttgtctaaataaaaattacattaacatagtggagaaattgtattctttgtaacctctctaccacaaga

SEQ ID NO: 229159 - DNA, 394 bp, Glycine max
  unsure (1)..(394): unsure at all n locations
agagttatattagtagntacaagagtaactaacttgtaactaactaacanactctaaccaactaagatactntaactctagtacatgatacctatgctataacaggaacctttaagattattctattgcccagaggcaatgtgtcactcggagtagtgatgtagtagaaaaagaagagtggaatttgtatagggaacacagtaagtcggattagggataaaatattagagctgaattgctaactgaggaagatgttattactgattttttgatctgtaatacactttgaacttttattcgtgagacttgaggaatacttttgaattcgggacaatgtaggtgcaccagattaattggcatttactactatataacacgttttgagaaactgctg

SEQ ID NO: 229160 - DNA, 447 bp, Glycine max
  unsure (1)..(447): unsure at all n locations
agctttataagcgcgggtctaggagtctaaggttttgtggncgcgatatacgaagatgatgttccgagtacattggatttggtacgaccatgccctccttatttccggctgggaaattggcaagtggaggaacgccccgacatttacgcagcaagcataatgtaaacctttacggttttaaaagctctatagttgggcctaggctttagagtatttcttttggataaggctctgtgtattttgtttttaaaattaataatacaaggatctttcttcatctgttcctacgtctctacccattctcatccatttgcatgtttacttcttcatttctgaaacggcagatccgatgacgagtcctctgaaggtactaataccntggacccgcctatcaacttcgagcangaaacgaatcaaacggaagatgaatggacgaggatgtgggac

SEQ ID NO: 229161 - DNA, 331 bp, Glycine max
attgacatttttattctatggatgccatgcttactcttggtggaatcatgaggttttgggaaatgctattataatacaatcttgttggtggaatgaaagtgttcacatcatggttaaatacaaagagtgttttatagcctctcattgcggcaataatgtcgaaattggttaaggttcagaatgcttgaaatgagacaagacaagctgcgagtgaagcacaatctacagcttctgaaaactcttacatattacatagacttcaagacaatgcagaacagaggatatatatctctgccaaggaaactagatatctgatcgatgaacctatgga

SEQ ID NO: 229162 - DNA, 392 bp, Glycine max
  unsure (1)..(392): unsure at all n locations
agcttatactgtttgctagcgacggtttatgttgtttattcganattcatggaatggctctgtatcaaagtgttgctataatcaaaattcaatttcttaccgcagagatattaccattttcttgtacaaaactattgtaattttttttgtttntacataccaacacttgcaatgatcaaataatgatcatatatatgtgctaagaatcttctttggaaaatttaactggttcattatggcaactatttaattcaattattcacatgtggattatcataattaccttatttgatgtcgtaggcaagtccaatggaacttacatcaagcaatatggatgggtatcaacatgccatcaagggatataagatgattttgacctgccctctcacaca

SEQ ID NO: 229163 - DNA, 237 bp, Glycine max
ctttatactacaccatctcacatgtatccaatatcacaagttgtgccgcatcatgcaattaacaaacacacaaatatttgactatactggaataccatccagcatgtactgtcaattactaatcaagggcaacccacagtcttactcattcagacactaccactggtatatgaggcccagctccagatgtgactacataggagcaatacagtgtgaatagaaactataactgatcaa

SEQ ID NO: 229164 - DNA, 438 bp, Glycine max
  unsure (1)..(438): unsure at all n locations
agcttctatggaggctggatctctgttcttcatttcaatgggacncttcaccatggagattcagcggaagacaaaggataagaggtgagaagaggcaccatccactagggaataagccatggaagaaggagcttcgccaccaagaatgtgccttggataagaagcttggagaggatgcttcaatggaggaaaagaacgagagagagatagagagaggggagcacgacattgaaagaggaaaagggggagagaagttgaactttgagttgtgtctcacaagactctcattcatcaaacttaccacaagtgttacacatgcttctatntatagactaggtagcttccttgagaagctntcttgagagattccttgagaagccttcttgagaagctagagcttagctacacacacccttctaataactaagctcaccttct

SEQ ID NO: 229165 - DNA, 467 bp, Glycine max
  unsure (1)..(467): unsure at all n locations
agctccattcataagttctttgtgtgttncatgtaacgacattaatgattctgcttcactaactccagaacttatattaaacatttgtttaaagttgatttcattctcataaaaacaatttaaatcaatctttgtcagtaaacttcaatcttatcttcatcagaattttctttatctatagatgaaaatagtttttgtccgaaaacatattcattttcttcatcaatgtcatctgaatccgtttcattatttacaaaactttgtcctggacaccttttatcttcttcccattttttaactgctctaagaagctcttgggaaaggtgagtttcttctacaaaagatctttcggtttgtttgtgtccctcgtaagggatgtatgactcgacatatgaacaatgccataagttcatcatggacattctagagaggtctatttcttcttctggcggatttgatgtcttcat

SEQ ID NO: 229166 - DNA, 376 bp, Glycine max
agcttgtattcggcgaaggcagcattcttgcaatgctccacaaaagattgatccaacttatcattcatggcttcacaacaacaacatacgggcatttggaaacttgactttatatccataaaaaccacaaccaagggtgtgacatacttctccattattggtgacatttgaagagacttttaataatgctttcaacagcacacaatggatctggtgtttttcagatgacgagggatcttcttagctactctcagggctctttgattgtgaacacttcatgaggctcaaaatcattacgatggatgcaattgaatgccagttgatacacacatatgcacttatagagggctcaatatatcattggcttatgcttaat

SEQ ID NO: 229167 - DNA, 443 bp, Glycine max
  unsure (1)..(443): unsure at all n locations
agcttctccttggtttagacatgatagatacactatttgttgacttgaggattcgatttgggcaaaattggatgagggaaagtgtgattntgaaatctgcactttatgcagaattttgctgttgaaatgtgcagcagaattttgtataagtgcagaaaaatgctatgtatttgctggttgtggaaagagtagtacagaatcagttctggatgtgttcaagtagatcccaatggtcaaaatgtagacttatgtactagagacttccagtaaaattttcgagttgatccaacggttaacgaattataacgaagaanatgttactgcggtatttgtatgtgaaaagctgcgattatgagttgtgttttgggcagagtttctgcttttgccctattttgcttggttctgtggtccatgatgaatggatgtggaattacctggatgtt

SEQ ID NO: 229168 - DNA, 108 bp, Glycine max
actggacctgtgacttgattatgatttataaccactcaagtctacttccctctattctaattagctccctccttttctcctttcttctcatgaacactccactttatc

SEQ ID NO: 229169 - DNA, 475 bp, Glycine max
  unsure (1)..(475): unsure at all n locations
agcttgtaggggagtgtcattgtcagtttcagttttatctgagtacatatatatatatatatatatatatatatatatatatgtctacctgcacatccatctttgaggtttttttcacataatttaatggaattatattattattcacaccccttgtttacactaaactagaaataggccattttcaatttcttttgttgatggacaagcacaagctagtgtcattacaattaatgattaagaaattaaaatgcaaaattacttaataagaaatataatatttattatatatactatatttaatttgataccttttattttttaattntataatagtacccaaaaagcatgtcatgaaaaatataaaattataaatgtctctagcaaggtatctcttggagcttgaacaagtatttaacttctatccaataaaatagaaacatatantgtttgaggtaattgatgtagtaaatgt

SEQ ID NO: 229170 - DNA, 339 bp, Glycine max
atctactattcaggaggcactttcaaggaattgaataatgggataagtgactacttgtcagctgcacaatacccaataaatacaacttggggtctagtagctacacacatcataaatactgccactcactgcgatctcacggtgacttcctcagctctatgttttctacctctgcgactaacatgctctaactactactttctatgtggcccaaactatctcatctgacattgacacagatgtctagtatcagtctcttagaactcattcggcctggacaactattagtatatctcacactgaaattttctgcttgttacgactaaagaatttgtctgt

SEQ ID NO: 229171 - DNA, 485 bp, Glycine max
agcttgtatgaatatcgaggatgggattcagattctgcattctccaaacatcgccgttttacatggggacttagagcagctgaggtaattgcattaatctgttcattcttttctaatcagattgccaaattttcaaatttgataaaatattcaggatttcttgatatgcatttgccatggaggtgaattaaatagtgtgttttctcatagaatatactctgcttaaatgaactgttgagagagaaacaaaaaagaggcatttaccgaactgtatgtagattgtagaatcacaatatatattaatctaataataaatacatggatcattacttccctagttatatgaacttactaacttatataccatgaatttggacctaaataattatatgtagttatgtacaatgaacctggacacaaatgtaatatataaggtcaattacatatccaaccccacccacaagctagagaataaagatatatca

SEQ ID NO: 229172 - DNA, 417 bp, Glycine max
  unsure (1)..(417): unsure at all n locations
agcttctggtttaattacgagcgtctccatatattacggtactcaatcggacatccgagttaaaagttattgtcttttgacttttcttaaagcttccgttttcaattttgagcgtctcgatatgttataaggctcaatcggacttccgagttaaaagttattgtcgtttgacttttctaagagcttccgttttcaatttcgagcgtctcaatatattacagggctcaatcgaacatccgagttaaaagttattgtcgtttgatttttctgagagctctcgttttaaattacaagtgtctcgatatcctacgggacacaatcggacattcgagtcaaaagttaatgtcatttgaatttgctcagagctncagtttacaattacgagcgtctncatatattacggtactcaatccgaca

SEQ ID NO: 229173 - DNA, 491 bp, Glycine max
  unsure (1)..(491): unsure at all n locations
agctngcgccgccagcaccacatcttctgaagtctgtgcgagaataatcgccgccggggaggcacaaatggcagcagctgcgccacgactgataccaacgtttaccatcaccggaaatagggttgccatcagcaaaacacccagaccggttgcggaagagacggccagagacatcagacaggcgacaaaataggcggcaatcatcagcaggtaaggggagttaatatactgcaatggttttgacgccagcttgaccaccatatcattcgcgccgatatgggtcatgtaagcggcaaatccacacagcatcataatcatcatgccgaggtcgccgccgcggctcattagtaatattntaacgtattcaacgatatccgtggcgctgtagcctgttgaagcctggctggacggtaacactttgtgccccataatggcactgataatcagcaataacagggccaccgacaataacacaccagtggcggaatacc

SEQ ID NO: 229174 - DNA, 278 bp, Glycine max
ttatatacttggccgaacagaaatatcttcttatgactctatgggtgtgtattgggtgactcctcatataaggattcgcctgggtgattgcgggctgtatgtatatatgcctatggccaaggtacgcaccgcttacagtcaccccgattgtgaacgaaatatatatacccgcgcactcgctatatatagcggggatgcgtactaccatatgcaagaagggcactgctaacatgagatatactcctactgtaatgcccattgcgctgtgagttgcgctt

SEQ ID NO: 229175 - DNA, 411 bp, Glycine max
  unsure (1)..(411): unsure at all n locations
agcttataatgagtactacacccaaatggctttctatatggcttnnnggggcccaaaattcacacccaagcccaaacatattttgactcaaacttgaaaagagaggggtttgtgattatgctcacccattttgttttctagatcatgatagtgttggaattctatattccgataattaatatgggctaatattataaaacaattatatcattcctttgtcattagtgggttntattttatgtgatcaaattaagtgagcctgttagactatcaaattagatgatatgggcctaaattagcagatgttagtgttatcctattaagggttaatgggaatcctattaggttaacacattataagaagactatggtccccaatataccgaatgagaaaaaaaactcattctctct

SEQ ID NO: 229176 - DNA, 108 bp, Glycine max
  unsure (1)..(108): unsure at all n locations
tatactacagtcatatattgtgccttgactaagtttcaatcaatcattagtgcatatgttatactaaagtggcactacttaaaaaggctntttatgtcgacccttcac

SEQ ID NO: 229177 - DNA, 454 bp, Glycine max
agcttatccaaatgcagaagaatagtttgaatttattcatgagtccaaacagagtagcggattaagcatccacgaagagaagaagatcatatcagtattctgtctcttataaagaaatcattcctattagttgatcttaattccttcaagaagcttaccaccatcaaaagtgtgacccttaaatatgatttcattacaccagcaggtgtaatgccatattaaatatatatctccatttcttcaccttttcccctaatacaagtgaaccaaacagattgtatatggcttgcaaatcgttgggaataacaacagttatatccagtcattcaaaaactctttgtcaaattaaagaactgcacctacactgcccaaatagatgttcgtcgtctcctcaaacttgctctgcaaaataacatgattgtaaacattcaaaaagagaatcttctcttgtaag

SEQ ID NO: 229178 - DNA, 490 bp, Glycine max
  unsure (1)..(490): unsure at all n locations
agcttataatagaattaatgtatgagtaggactctggatcatccggaaggaacgtactgngtgagattgatgaatagtatgtgattntccaaatcttcttgatttggaggttcatttccttgatttttggtggatgtctagccttctgttttttagaaggtagtttatctctaaggcactcaaataaaatgtgtacccgaaaatgggaacttctttcatgtatgaaaatcaaaagatggccatgagctatagagagtagaactctgcaaattcttcccaaccctctcgaaaccatattttaccaccacgctnttccaatttcaatttccactcagtgacatttggagtcttaagaaagagagtattgngtaagccttctccatatttctccacaaacttatttaggatcatctgtcaatcacatcagacaattatgtatgataaagctgagacaggtattatatctgcataattaagctaattatctatc

SEQ ID NO: 229179 - DNA, 392 bp, Glycine max
  unsure (1)..(392): unsure at all n locations
cctcaatcattctacaacaaaagaagtgattcattattatcaagttcttagagaagctatantgaagttgaacccagccgcatatagattctaatcatacaatggcgagtaaaccatgaattggaaatacaacgtgtggtcatatgtccacacctgaataagagaagagagagatcctatccactggctggtgatgctaataaaatatattatcaataaccattacattataataagcatttatcttaatgacctatatgtactggcagtgcttaacggtatccctgttggaacgcacatggaactttccatggatcatcaagaatttttgtataaacaaaaatatctttccagtattctctgtctttaactcacaaacaaaatatgcaaaa

SEQ ID NO: 229180 - DNA, 402 bp, Glycine max
  unsure (1)..(402): unsure at all n locations
agcttgtgaacgttcacattaatcatatggacatgtctctctatcnggctntngattatgcagaacacgacctttttgtgagtatatataatcgtgaaactgtcgacatggcactctacttatgcactagagttcaagttgaaattaaagttgtttgctttcgtaattcatcaaaatgtttcccgagataatgtgtactttctgatatctgaatttccaaggcggttttagtttaatgttgccttttgacattcctatctagtgagataaggcttggttgttgcatcttgtattagacacattatggtcttcgcaatggactctatgctattgtataagtcttgcttccgagtcttataaaatgttggagaattctctctaagaagagatatcgtacgtagc

SEQ ID NO: 229181 - DNA, 349 bp, Glycine max
  unsure (1)..(349): unsure at all n locations
ctaatagctcaacgacgctgcgtgcactggcagagtttggtgngttggaggacaaacacctggttttatgcttgaaccggaaagtacaccatcttttgaatggacggagaaaaccattcctacatggtgaccgatggatgccaaactgaacataatacacgaatatgtctgtggacgtacacagtacccaagagccataagatgctgggctcccaatgagaggcagtacgacactgattggcttgaattccatatgcacacgctggaacattttgtcgatatataatttgaacattgtagacatcaaaaacctgtcagtgattgtataatgcaaaagatgattttgcta

SEQ ID NO: 229182 - DNA, 393 bp, Glycine max
  unsure (1)..(393): unsure at all n locations
agcttatagaatgtataataagagaataangtcttttgaagaatcgactcatgtttcctttgatgagtctaatgctatttctccaagaaaggatactttagatgatattgcagaatctttataacaaatgcacattcatggacaagatcctaaaggaaaaggagaaggaagcaatgaagatcctccagtagaagtcaaagcagataatgatcttccaagagagtggaaagctttaagagatcatcccattgacaaaattattggtgatatctcaaaatgggtaacaactatacactctctcaaagatctatgcaataacatggcttttgtatctatgattgaacctataaatttaaatgaagccataatagatgaaatatggataatagctat

SEQ ID NO: 229183 - DNA, 323 bp, Glycine max
tctactcttttagcgctcgcacctacgttgctgaagtggtcgtcctttaatgcaatactctcgtccatacacgttattgcgatttcacttggtcaaggagctccgccctgaacaatgaattattgccagcttgaaggtcttctttcttcaccattacaagaggagaatatgggcctctaccactaactcccttgacttattcctcctttattcagtatgcggatcaaacgcatgctctacgtatgtaatgtggtatggtattacatcaaccgaatacttcgattttctaaatggcggatccactttatgggaataagaaagct

SEQ ID NO: 229184 - DNA, 285 bp, Glycine max
  unsure (1)..(285): unsure at all n locations
caaatgtctgtcttgctgctatgacccttattgatacgagaactggagggaagattatataactgctacggctggtattaagataactttccgctgtgcaactagggatctgtgcccaacgtattgttgtgcatcacatttagtgaatgggaaatgtcttactactaagtgatcctatagtatcngacaagtatcctatagtatacaacatgtgatctgatgatatangacaagtcgtcgacaaccatcngacactgatcgatgttaatatctacgataactatc

SEQ ID NO: 229185 - DNA, 387 bp, Glycine max
ataacttggattatatgcttggaccaagctcatgcttttacaaaaaggttcatcaagtctagttgaaatatggaagtatccgtcttgctaaattggggcaaaagatgaatcgagtcacatcactgcttcttctactgccaaacgaatttaggatttgtgatgtccttgtacttccagtttcactttacaaagatgtcatggaccatgttgaaaatctaaactgatccaaccccatatcctgtgtaaaaatacgcaatacttcaactgtacaccattcgcatacatccattgctttcattgcttgattcgctcattgcattccttccttgaaaataaaaaaaatacaacatgatcttatcattgttatcataagaaaggacaacttta

SEQ ID NO: 229186 - DNA, 490 bp, Glycine max
  unsure (1)..(490): unsure at all n locations
agctnggaacgagaaaccgagagaaaatttagtttttatctgaagagnaggggtttgggaatctttaatgaagagaaataggaagttgtgactgaaagaagggttntgtgatttttttgagagaggatntttttttaggggttttgtgatttttttgagagggaatttttttttgccgggaaaaaacatgatttattttattttaaagagaaaagagtggaaaaataatatttaattagcagaggttataaacctccgcaaattaagcacaaaaaattgtagtttttaataaattaaggaggtttctaaaacctccgcaaaataacctccattatctaacatttttttttgtagtgagtgttcttcaacccattgaattagaaattaatcttgtttgcagcataaatntctcgttgacctaatgaaatattatacacgtgggtgaatatagattctttggttgaataaatcattctcacacatgtgaaca

SEQ ID NO: 229187 - DNA, 168 bp, Glycine max
aactggcttctgattatagttactgctatgacatacctgatggaagtgcctgaattctatgaagctcagtagcctgaatattctaaaggttgaaacaataatcttcttgaatgtccctagggctatgacatcgataacttgtaagattatgataatgaaacaattact

SEQ ID NO: 229188 - DNA, 456 bp, Glycine max
  unsure (1)..(456): unsure at all n locations
agcttctanattaattatgcttcatgaggtattattatttgtcaaatcncgcgcctaaattttaacataaagatatgtgcaaatcatggagattcaacccgaacataatgtctcatgtctgagagtttaattaatgctgacaggtttatcgaggaattctacccaatgggcaactcatagccataaaacgagctaaaaaagaatctattcatggagggctccagtttaaagctgaggttgagcttctatcaagggtccaccataagaatcttgtcagccttttgggtttctgtttcgagcgaggagaacaaattctggtgtatgagtatgtttcaaatggaactctaaaggatgctatcttaggtacatatgttaattaatacccttattatagcagagattagtggttataccttatagtttctttggacagctcaactagaatcattattctac

SEQ ID NO: 229189 - DNA, 162 bp, Glycine max
  unsure (1)..(162): unsure at all n locations
actgaacacagcatatatgaaataaatcaccattcatatacctatgccatgacagagagagctattagacaacctaatagtcccacagtctacgatatacgtcatgagcgacaaacaatttatatcatanccactatagtgatgtatggtccacgtacctgc

SEQ ID NO: 229190 - DNA, 495 bp, Glycine max
  unsure (1)..(495): unsure at all n locations
agcttgtangattatggggtacccatcaaatgtgtgactatgtggcggncgggcgatggngcacaacaagtttttccacatccacaatgcgcgcataaacccaccatcccctgttgcccacctccaactgagctcacgtactcccacgtagcccatatcctcgtttctctcaacaccgggtccccatcaatcctcccaagcttccacaacatccaagcaaaacaacattcacacagcacaagctatcacagccaagcaaaacaaagcaaaggcagaaaactctgccaaaacaccaaccaaaaatcacagcttttctcacttaaagaccacagtaacaattccttcgatccaattcgttaaccgttggatcgactccaaaattttactggaagtctatagtgcataagcctacattttgaccgttgtgatctactagaanacatcatgaactcattctgtactactctttccacnaccaaccacacacaagcattt

SEQ ID NO: 229191 - DNA, 365 bp, Glycine max
  unsure (1)..(365): unsure at all n locations
tcaccacagcatatacatctcagtaaagaaatagcttatgcagttggcactcacaaaagctaatcaaantatgtctaagaaacatgaataacctngagatcatcctcattctttgccacctgaccgtgaattccatcgatgatctccttcactggaacatagtcgggacctagtgtcatctaataaacttgcatcacataaagccactagatctctcaccacacaacacatgacacagatgaacattctatttcgtgtgacgataaccgataagtagaatacnggactcatcacatcaacactgtacatgcagaactttactctcattgcgctgtatggcacctcctccaacaatagctatgaat

SEQ ID NO: 229192 - DNA, 455 bp, Glycine max
agcttcctagcgggttctaattatatgtggccatttaaatctatcatatgcccgacaatacgctgagaagtccgtgtgatctctctcggtgggtggagtagtgtgtccacacatcgcttctggctcctggctagcaatctgaggaagttcttgactcccgttcaaggtaagagcaaatcggtccatccacatcgttgcctcttgatgtagcgagtcgatcacccttcctctagcctccttttccacgtacacttgggcatactcgtcttccactctatgctcatgggtcgaggctagatttagttcttcttggtacttgctgacgatagctaacatgttggtctctgtctcgcataaccgctgagacaagtttcttttggaccttgagcaaaccttcaactcatctttcaagatcaaactgtctactcgtgactggtccctttctctctccggag

SEQ ID NO: 229193 - DNA, 389 bp, Glycine max
  unsure (1)..(389): unsure at all n locations
ctctctcatggtatctatggtgggctctctacccttcttgcttcgtgattctgggaaaacataagccctgactaaatcagctctaagccccagcaattcatcatacttttagattgaaggaccataacgaggtgagtttggattcaacgctcacaacccagctacgagtactntaaaatcatgacacaactcaatnncagctttctctctatctgataacttttgctacttgacagactcatcttattgataactgactaaggcgctcgacttaccacatatgtgctacactctacaacaagctatagtatctcacaaacatgaactgcactcctagattcaggtgactccgagcttgtgttattacttaaacaaatctccactctact

SEQ ID NO: 229194 - DNA, 258 bp, Glycine max
actccgccactgatgacacataaaacctaagggcgaaaaaggattctctaatgcaagtctcaacctctttcgattatgaacccagagagacgaagtgaggaggagaattacgcgtttccataactcagggacagaggttacacatagataaacactaggagtaagacaaagttcggacgaattcccgaacctcgcaatctaagtctgttctacaacgacaactaatcattcttttctcaacaacaaaaaacatggcat

SEQ ID NO: 229195 - DNA, 477 bp, Glycine max
  unsure (1)..(477): unsure at all n locations
agctnctanactttatacagagagtgttttgctcttttccacttgnnagacaagcggcctcagatatcttaataagagggggttgaattatcatattccaaactgtttcccctaattaaaaatctatttcactttctactcaagttatgaattcccttaatgacaatcttcttaaatattaattcaaatgaaacaatttgaatatgaatataaagcaataataaataaaggagattaagggaagagaaaatgcaaactcatttttatactgcttcggccacacccttgtgcctacgtccagtccccaagcaacccgcttgagaaatcatagatcaatcaaagaacaactctagtgaatcaagaacaattctagagttcaagataagaatcaagaagaattcaagactcacgatgatacgttagagtcaagaatcaagatctaaggtcaagatctcaagaatcatgatcaagattcat

SEQ ID NO: 229196 - DNA, 385 bp, Glycine max
  unsure (1)..(385): unsure at all n locations
agctgagcctcgaatgtgcgtgataaaatttatgtttagatacatncaanttacacagtgaagcagcaccttaaaagtattatatttcaattatttttgctgcgtcatttgtattttgctagctttattctcccattattgtgattaacttgtggttaaaccaactatattatttctcattnttctaatttctcggttttgtttttcatagttgattttccattttgaggataatgacatgttaaatgagtgaggcactgtgggggctattatagcaccatggccatggcatggaacgatatttcctgttgatcttctttgtttattgttttatgagcatatcatatacataactgccaatgctgatagagagtcacatattcct

SEQ ID NO: 229197 - DNA, 431 bp, Glycine max
agcttaacacatagtgcctgctgatgttaagtcttatataggatcacacctattgatatgggtgctctctggtaacaaataacacatcaattcacatataaactctcacaaatatacctaaatcactgtcagctaaaacctaatctacgataaagagcacattgcaacaagagtataaccaacaaacaaaaagctataaccaaatgtaaatacacacaatggggacctggaaaaagacaaagaatgagagagagagagagaattacttggaattggtgttactgccaatgataattttggcaacaaatagaagaaggggagagaaagtgagatatgcgacgaggaaatctttctatgcacatatgactcaaacttagtgacgggttgacaaaccttataaggggacacacaattaatttgtataatcatat

SEQ ID NO: 229198 - DNA, 422 bp, Glycine max
  unsure (1)..(422): unsure at all n locations
agcttatcgtaatcgattacaaaattngnntgtatctngcagagntatgtctcgtatcggtttaatcaattacaaccttatcataattgattatgtcgcaacctacccttcagcgggaaggtgaggcgtgactcaagggtgagtcttcctaaaaagaaaatgcgcgggagtcgccaccaacgtttattcaaggaaaatgttagaaaaaccaacatggcgtctatgaatcttaagaataagggttcgggagttgtttacgtgcggggaaggtattagcaccccacgcatctgtcacaagggacagcagcctttaattgagtgcgataaatcatgaggtcactgtttatcttattttccctctntactgttttttacaatttgggccgacaagagcatgacctttgctcctacgtatcctcaag

SEQ ID NO: 229199 - DNA, 469 bp, Glycine max
  unsure (1)..(469): unsure at all n locations
acttgtcgacatcgttcgtgtgtcaaattcactcgacaggtttgaagtagaggagaccttcaatcctatcacgcaacgtggcggacaaaaatgggcagttaacttgaatggccattattgtcaatgtggaaggtattctgcgcttcactatccatgttcacacattattgcagcttgtggttatgtgagcatgaactactaccaatatatagatgttgtttacaccaatgaacacatcttataagcatactccgcacagtggtggcctcttgggaatgaagcggcaattcctccttctgatgaggcatggacactaatccctgacccaactacaattcgtgcgaaaggtcggccaaaatcaacaaggataaggaatgagatggattgggtcgaaccatctgaccaccgacatanatgtagtatatgtggagctgagggcacaatatgcgtcgatgtcaatgcatctgac

SEQ ID NO: 229200 - DNA, 343 bp, Glycine max
  unsure (1)..(343): unsure at all n locations
ctaagctgagagtagtcgtatagtactggacgtgcactgacgctgtataacactttaacttaatgnataacacgtacaccgggatatagtcgaaatgacatatatcatcacaataacaaattcttcatatgcgaccttctcaataagatccatattctcttttctctactaagctacatggccacttgcacccatgcatggcacaccgaaagaaacacacggcaactcagagcataccatgaccaacaagctccttcatagaccaaataaagcagcattcattgacattttccacaaacatttacacccaaccatctcacgcaagacatcagtaatatcagtt

SEQ ID NO: 229201 - DNA, 304 bp, Glycine max
  unsure (1)..(304): unsure at all n locations
agcttanggatggaacacttacttgttagtgattatcataaacgcaaatcggaatcaaaaaatgcgataaaggatgaccctagggctgcaaactcgtcaatcccgtgggtatggcttttgaaaggggggaaaagaagttttttgaatgtaaaacgtccccccttccgtcattcttataatttggtgcaggggtggcttcgccatgcgagcccaccttcgccagccgagcaaacctgcactttattttttttttttttntttttttttgaggggaacattaaccatgtcccctcccttttctgga

SEQ ID NO: 229202 - DNA, 290 bp, Glycine max
attcttaaactatacttaaagtgtacttcttcaacagccttaaagtggctctgtaatctaaacagccttaaatgacctgagttatttaacagcctgtatcatacataaggatcatccacatatggcttctgtaatgaacactaaccctgatcatcagtggatatacagcgaagtatcagggattgatgatacgtaactgatatctcctgatatctctgacgataagtggtccacatcgtagacatcaagaactgaattttaatctgcatggtactctaactttcatggtt

SEQ ID NO: 229203 - DNA, 441 bp, Glycine max
  unsure (1)..(441): unsure at all n locations
agctngactcacacccaacatgacaagtgtagttttcttttacaaatntcttcacanataactatcataaggcataaacctagtaaaactacccatcatatctcccaaacacccaatacccacgaaatttatgtgagaagaagtctacccaaacctgaaatttgaagtcccacaacgtagatgtgcgcttcaagactccgaaaatggcctcctttcgcgatttggagcagaaatggtgagcaaaggttggagctttgatggagcttcaatggtgaggaagaagaagggaatagcaacgtgagagagagagggagaaaagcttctgaactnttttggctgagtgagtgaggagacagagaacgtggctttgtgttntaagaaaaggctnttcctctctttttttttaaaaagatgtgccacatgtcttcttttgagtggagc

SEQ ID NO: 229204 - DNA, 251 bp, Glycine max
agtcaggggatctaacacctagtaaacttaagattgaacgacgagcctccggcacatcttcatctgacaatgcggctgatgtgaacatgtaaagtaacttggaaatttaaacggaactttcaacaagttcttacaatgacgcttctttcagaaacaatcggtggcctaagtcacaaaactgctgttgcaaccaacaagagttatgggcatttgcgcaagacttcaacctacaacatttatggccttataaa

SEQ ID NO: 229205 - DNA, 455 bp, Glycine max
  unsure (1)..(455): unsure at all n locations
acctgaggcatgcaagctnctacggaggcaggagctgagagcggcattgttgtttttcaatgtggaanncccaccacgcggctacagcggtagataaaggagactacgtgtcatcctctatggaatataccatggaaggaggagctttaccaccaagagagtgccttggataaaatgcttagagaggaaactctactggaggaaaataatgacatagaggggaggaggaggggcaccaaatcgaaggagaaaaagagggagagaccgtgaactttgaagtattgtctcacaagtctcacatttatcaaaattacaacagagtgtgcacatgcttctatttatagctaggaagctttcttgagaatttattttagctacatacactctttaatagctaagctcacctccttgagaggcctccttgagaagctagagcttagctatacacacccttc

SEQ ID NO: 229206 - DNA, 498 bp, Glycine max
  unsure (1)..(498): unsure at all n locations
gatcctcagagtcacctgcngctgcangcttggctctacagagcttacacagtagtttctctctatactctctagaactgggacctttctctctctggaatcactagacatgcatagcttcaactcttagccccaaactcccctcacaaaatctgatttcaggcttaaataggaggccttgttagtgctcgtgcgcttagcgcaatcctgcaccgcttatcgcacattagtgaattatggcttagcgcgcgcttttctcgcttaatggatggattgaagtggtgcacttattgagatgaagcggtgcgctcattgaacctgtacaactcatcttcttccagattcttcctcgcacttagcccatgagtgttgcgcttagaaggagaaaatcggcacttttatagccgcctaattaacctaaaattaagagaagatgattattagacacacaacattggaagtctaagtattattatctatacttatacaaaagtaata

SEQ ID NO: 229207 - DNA, 422 bp, Glycine max
  unsure (1)..(422): unsure at all n locations
agcttcgatcttccatcaccgccgcctccatcatcttagttttatattnnaatattattactactttgattttcagccttgtattttggctatattacatggtatttgaacaacttattatttccttatttgcatggtttgattgaacaagtatgttatttgactatttggattttataagtcaatctgtttatgattgttgcttcatggcttttacttcatgatatggttaatattttttatgaatgttgtatgaatgtttaagatatatttgcatactttaagtctgatacgcactttggctttttgttgatgccaaagggggagaaacatagggataaatcaacaactcacatgagtaatcaatttaattttaagataagcataaatctcaaaataaagggggagcatttataagagtg

SEQ ID NO: 229208 - DNA, 433 bp, Glycine max
  unsure (1)..(433): unsure at all n locations
agcttgngtcttgcaatacatcagattatcattatgaaatacanntgaaaccgngtgcctggtaatacatcaaaacatgaaaaaaatgtaacaatttgctaaaacatgaagaaaacaataatgtggccacaatataacaataaaatgaacaaaacatgttgggaaacttgcaaaacaaacatgaacatttaagcaattaaaagagaattaaaaaacaaacttgtagttaggtttgtgcgacagcaataacggcctttattgtgcttcacttatcgtttttgccttctttgttgttctcgaccatatcatgcaaccaaataaaaacgtgtatgtaatgagttgctataaaggtattcatgatgcagatgtaacatgaaaaggtaaattaacgaatactcatatatcctaacaaaaatgcatacaccgatataca

SEQ ID NO: 229209 - DNA, 452 bp, Glycine max
  unsure (1)..(452): unsure at all n locations
agctntactatgcagagaatatccaatagaaattccttcatctgacttagcatcaaattntcctaagttatcttttccattattcaatacaaaacatttacaaccaaagatatgaagatgtgagatgtttggttttctgccattgaacaattcatatggagttttctttaaaatgggtcttattaaagccctatttaaaatgtagcatgcagtgttaatggcttcagcccacaagtattttggaagaggagtatcatttaataaagttctagcaatctcttccaaagatctatntttcctttcaacaacaccattttgttgaggggttcttggtgcagaaaagttatgctcaatcccatgcttatcacanaataattcanattctttattttcannactcaccctatgatcactcctaatagatataatcttgagattttcttattttgatg

SEQ ID NO: 229210 - DNA, 409 bp, Glycine max
  unsure (1)..(409): unsure at all n locations
agctngctgattacattctcccctttctattcaaattcttaattcttcttgacatcatcaaaatcttcatgatttacattccaacaccgggccgatggatttgacgaggaggccattgcccagctgttatgcataccgggtcaggattttgcctggaccactgccgggaggcgggtgcggatcatgcgcaccagcatgactaccctaacccagatatggatgacgttgctgctcagcaatgtcctgcccagtgatcataactccgaccttcctttgccgaagtgtcaattggtgtatgccatcctgacacggatgagcatccatatggctcagttgattgctgacgccatctantttattgcagttatgccacccaccaggcaccctctagacccgaataagtctaaca

SEQ ID NO: 229211 - DNA, 360 bp, Glycine max
  unsure (1)..(360): unsure at all n locations
ggaccactttctataaccagaaatgtacttatgttattatctcgctgaggaaactggtgcaacctcacttggcttcttaagactggccctttgactgtctgatgctctttgagcatatctgcactactacaagcacttggtttcaaagcctcgacgtcagtaggaccagacactcccataacttttgangatgatatatttatcttggatcccattcacatcattaatgttatgctgactaatactctgagacagggtaatgggggacgcttttttgcttatgggtcggtaatgtagtagtattgattgttagtggcaatgagtcttattgtagcgaggatgttaaaatctgttgactgt

SEQ ID NO: 229212 - DNA, 457 bp, Glycine max
  unsure (1)..(457): unsure at all n locations
agcttcactccctcagttatagaggttaaatgtttatataaacancgaagataatgagaactagaaaatgacaagtactccagataataagtaacacgttggcaaagaagcaaaccgaattgacaagcaaagcacttaaatttctactatcatttttggaggaataaggagaattaccaattacttaaaggttcattaccattttataatatagtagtattaacttttcttcttacttttattcattacatataactgtaagtggtgcaacatcttgtttctttcttttaagcttgtgagatatgttactgttttactagtatgctcttaaggactctacttacggtgatgtatactatgcgttggatttctctgctagcttatccgcttataatgtgagttccaatcttgtaatttcttattggcaatcattctagctagaacccaaatggttgcg

SEQ ID NO: 229213 - DNA, 417 bp, Glycine max
  unsure (1)..(417): unsure at all n locations
atccttagagcacctgcggcatgcaagcttgattccttttcatgtggttttacttttacgaatctgantcgnncttcttcttctttaattaagttttcactttcccacaaaatataagagaaagctggtcaccccttttactttgtttttttgataaaaagttaaaaagaaaaaattggaacgcatgtactttaaccgttttccgttacttgatttcanaccgtccttaaactataatatttatttgtgtagtggattgtgaaatcattgcttatacttttaaatttgtgcaagggaatgacattctatcattgataaaacctaccatatagtttttttttttcctaactattagacggattcggatctcntgaaattctgtgcccttacagtttcaccccttagatatctcattat

SEQ ID NO: 229214 - DNA, 363 bp, Glycine max
ttactctaggccttgccaaagaagagttatattatatgtgaatatataatttattttctgtctggaaacacactacatagcaaagatattcctgatggtgaatatgatatataattttatttccggataaaaaaaaaagaactaccactttttatgcttaatgaacgaactatgctctttcttattcttttcgaaacacacattgctgatctgtggccagataattatcacaaacactgtggttctcaagaataccgtaacgatcatgttggaatgactcaaggactggctcagtttttttatttcagcttgtgccactcctatgctatatcttagattgtaaacatgcttcattatcctgga

SEQ ID NO: 229215 - DNA, 361 bp, Glycine max
  unsure (1)..(361): unsure at all n locations
agcttcacagctganagtatagaatgttcanttacaatatccagaanaagatcatactataaccaaactgcacactctactcacacgcctaagatcactggcgactagaccagttggggtagagagacccctgcttcatgtggatcctgctaccgggaaagcagatggtccctacaaaaagaagttaataacctatttggggatcgtcgctcgngataaggtgaatgtcacatacgagaattgaagcaagtccctgctgcttanaaggatttgatatgggaggatattcaggtattttagttctcatgttgcatattgtttattaaccaaaaattcaaatttagtaacaataaaacgtaat

SEQ ID NO: 229216 - DNA, 242 bp, Glycine max
atgatagcaactacatatattatgtcacagtgcaaccacacctattacacaaatatgcacatacatctataccacacattatttacagtttgcaatgaccatacttgcaccatctacatatatatatacatctatactatacacttactctatccacccaaataactgctaacaacataatatgatatattacaataactcatgtttatctagatcctaacatattaattacatcaaagaat

SEQ ID NO: 229217 - DNA, 455 bp, Glycine max
  unsure (1)..(455): unsure at all n locations
agcttcaacttacagagagtaggtcaagcttatcgcaataggcacactaagtgcacttccaagaattcgaaaactgctagagattggcgcttagcacctcctggcccgctaagcccagcttataaactcaagttacagaatggatctggggcttagtgcaggatggtgtgcttagcgctgctacaataaaaattttccagagaataagtggcggttagtgcatcatccacgctaagcccactagttaaggttcaattaccatgaagatgttgggcttagcgcagtgatgtgcgcttagctaaactattcagccaaccaatcatgggtctatgcgcttagcgagagcaaactcagcttagcgcgtgaagactgagcgcttagcgcanggtctgcgcttagcagatagacanattgcaaaaaatttctaagtccttttctgtctatatcttcacaca

SEQ ID NO: 229218 - DNA, 455 bp, Glycine max
  unsure (1)..(455): unsure at all n locations
agctttggaggcattacctttatggatctaaattttaggtgtttagtgaccataagagccttagatatttgtttgatcaaaaagagcttaacatgaggcaaaggagatggttagagttccttaaggattacgattttgaacttagttatcacctacgtaaagccaatgtagtagctgatgccttaagtaggaaatcccttcaaatgtctgtgttgatggttagagagttggacctcttatagcagtttagagacatgagtttggcatgtgagatcacctctagtagcattaagttgggtatgttgagagtcaccagcgaactcttgagcaagatccgtgagggtcagaagtctgacccattcttgtcagcccaattatagtccatagttgcacggagagagatactnttatagtgggaactgatggagtcttgaggcttcangatagggtgtgtg

SEQ ID NO: 229219 - DNA, 331 bp, Glycine max
cccacgaacaaggggtcctttgcagcctcgacaccatgagtattactagcatatgctgatgcaatatgaagcaccgacaccgacaccgacaccggacacgacacggacacggacacgtggacacctgcaatgtctaaaaaatataccgaaaaacaggtgtcaagtcaatgtcggatattgacacagacacgtgtcggacaccatacacggcaagagatgaggtgtctgtgcttcatattattgaaaaattggcatctgaagcacctttcctccacacaaaataaaaccctcccatgacatttggggaggaataccttaatggatccaaacc

SEQ ID NO: 229220 - DNA, 433 bp, Glycine max
  unsure (1)..(433): unsure at all n locations
agcttaacaaacttagagatcaagtgatcatatattccgattttagggggagtaaacgcacattttatctatatacaactgtttgttgcttgcttgaatcttaatatcaggtattgtattgtcatcatcgaaaagggggagattgtagatgcaattgcctttggtgttttgatgatgatcatgatgatatgatgcaattgatgcanatgggcttttcaagattaaattcaagacaatacttcaagattacaagtcacaacatcaagatgatcactagtatattaggaagggaattcctaattgaattatcaaaaggtttggccaagtaatttaaattaaaaaagtgtttttcaaaggatttactctctggtaatcgattaccaaaggatgtaatcgattaccaatggccaaatatgttttataacagctacta

SEQ ID NO: 229221 - DNA, 433 bp, Glycine max
agcttcaacattcaatttcgagcgtctcgatatatgacattactcaaccagacatccgagtaaaaagttattgtcgtttgaattggctcagagcttcaactttcaatttcgagcgtctagatatatgacaggactcaatcagacatccgagtaaaaagttattgtcgtttgaatttgctcagatcttcaacattcacatttgagcgtctcgatgtattacgggactcaatcagacatccaagtaaaatgttattgtcgtttggattggctcaaagattcaacattcaatttcgagcgtctcgatatacgacgggactcaatcagacatccgagtaaaaagttattgtcgtttgaattggctcagagcttaacattcaatttcgagcgtcttgatatatgacaggactcaatcagacatccgagtaaaaagata

SEQ ID NO: 229222 - DNA, 194 bp, Glycine max
catacttttactcgatgttgatgagtctgtatatacgagagctcaaactgaatgtgaactctgaccaattcaacacatacttttactcgatgtctgatgagtccgcaatatcagacctcaaatgaatgtgacttgaccattcaacacagtactttactcgatgttgatagtccgatattcgaacctaaatgatg

SEQ ID NO: 229223 - DNA, 524 bp, Glycine max
  unsure (1)..(524): unsure at all n locations
acctgcggcatgcaagcttcataaatctaaccgagtgaactaagatccaaagttatactntgagcatgattcagttagcctttactctcaagataaaacacaacatgttaaaggaggcaacattgaaggccttgtgggggaagcttgagaatatctatgtgttaaagtcgctaaccaattgcctttgtttgaagatgaagttatatcaactcaaaatgaagatgggaggaaatctccattaccacatcaacaagttcaatcagccagtaagccaattgctaaatacaaatgataaactttttgataggaatatgcgatgttgttgttggcctcactaccaaggtccttcaaagctttggttcaaacgttatttgtgggaatatcaactntgaagtgggatgaggcgaccaccgctcttatagaaaaatgagagaatgatgagagctaataatgttgatgatgaacaccatgcactagtttgggtggagtctgagtgagggagaaatcattcaatgagacatgac

SEQ ID NO: 229224 - DNA, 479 bp, Glycine max
  unsure (1)..(479): unsure at all n locations
agcttaattgtatcttaatcaagaacttaccacangaaatacaattgaagataacagtgaatggattatagggagagaantttacctttccaatatcaccgacaacagatatttcttgctcattnttactcccttcagcaaacatacaaaggtcaagcattcctcgagaaccattgtcaaattcaactataacatatgcattgtcaatgatatctggcacctgcccaaagcaaactactgaataggaataataatatgaaacaacaatgtttagagaaaaccccatgctaattactattgtcgcacagaagctcatatatgatgatatatattccacttagaactgtgacaatttaagaactgaagtccttaatcgtgaacattgtaaaacagaatataccttaatcttcatataggaaagagtcataatctctatatccttcaccaacaaggactaataacacgggaacctcattctc

SEQ ID NO: 229225 - DNA, 426 bp, Glycine max
  unsure (1)..(426): unsure at all n locations
tgtcataatatttctgaggtgtcgagatcacatatctgngaaaattacacacataacaattagactactacttaaatatactgaaataaacacaaaagaaccgtatctatactatttaagaaactttataatatatacttaaagtaatactattggcttggcatatgtcagatctattttattttatgttgaagaatctttagttcatattaatttaatctttaatttatagttagagcattttttatcatatcagatctacttttactatatttaatatgaactaagacatttaactacgactatagacacttaatatggataataaataattaattacttgacgagacttcacttgataaagaaattaatatgcaagaatactctataaatagccttttttttttaatacaaaattttttgtaa

SEQ ID NO: 229226 - DNA, 521 bp, Glycine max
  unsure (1)..(521): unsure at all n locations
ttaagtcacctgcggcatgcaagcttgtcaaactgaacatcaagaattntcttgttctacaagntacaagcaaatacaactatcagcagttggaagaacataataaaatctacaggcaacaataaaggttaaggatgaacgaaaaccaactgacacttttaattttagattataccaattagaaggtattcttaaagcagtgcagtaactaaaggaagcaaaaaagaaggtgccagattgctagattcaaaatctgtttgggtactcaaggatttgaatatgctcatcaaccatgtcacatccaaatcagcatgcactaaggcttcaatgattgtcactatgaatgagaggaaatgcatagtttatagtctattacatgccaccttgtgaatatgaactaagagtgctatttgtgcagtcaaataactgtaatcttcaattatattcgaacactnttaggaccatattctaaattaagtaatgtctatttgtcagttaacgtatctaaatctagcatatct

SEQ ID NO: 229227 - DNA, 296 bp, Glycine max
  unsure (1)..(296): unsure at all n locations
tcctactgatatcaggcatgcagtgagtgagggaatggattctgatttgattggtatatgaaagcggagcaaatccaaaatgtcccataaacagcccaatacatgttctacaccaaataggatgttactctgccactaaccaaagaataccttatttaatcaagcggcgagtanaactcaattcactgattgatatttcatgatactcatacctcaaatatgcctatcaaaagtcaatcagaatatataactattattcaactactcaacactcttgtgaatgaaatattatttcc

SEQ ID NO: 229228 - DNA, 462 bp, Glycine max
agcttgggtgattcttgtgtagttcaagaatatcatgtttctgcatccccataatgactgacaataaactaagcagttcctgactaactcgtctaacttcacttgcatatgcctctattatttccctgcattagtaggatcaatttcatcaactgatcaaaagttgtgtatacaattttcaattttgaggtgtacctacttgaatccctctggagttttaggccaaaattgaagcttcctataccgggtggggtaagtgactaacatcagtgcatctgaccagtctagtgtctgctcctcagaaactacataagcctgtccataaccttgtatgtcgcttgagtccattgcatatattatcttctcttctgctggaagttcaaaaactcagatgcacatccttattctctgcaaagctcttttgacaccatgattactatctgcaagaaagtactgcatatc

SEQ ID NO: 229229 - DNA, 399 bp, Glycine max
agcttacatatatgttgttctatattataatatatctaatttagttttatctcctttaataactttaatttttatttgtacttcttcaatatgttgatatattacaggcatggaagttcattcaatatggatctaagaaaactaactagagtgatattttaatcacatgtcacatttttatttgaattaaaaagaaaacataaaataaagtaaagaattcaatttatttatacaaacaatatagaaaaaattattgcaaaactataatgttcttttttaaaaaaaaatagtttatttttagttgtgggtccaatgtcatggtacctctttggatgatgcttaccattgacctgtcttgattggactcgttgaacgacacttatcattgaccttgcttga

SEQ ID NO: 229230 - DNA, 484 bp, Glycine max
  unsure (1)..(484): unsure at all n locations
agcttgcattatcatggaatattacttattatgttcagaaactttggataaatattgaatggtttattccgataggtactctatttgtcatcctatatttattgcacctctcctgtccctatataaataaaatatactatctaattatgaagcatttaaatttgatttaattttatttttataattatctttacaaatttaaacaatataaacagattctgaattgattaaattggctcatctttataattatctgatttaattgttattatatatgttccaatcatgtactatgttagattaactctatatattattatgtctctgtttctaaatataatactctatttttcaattntatttgtcctcttttataggaattgtttcaagctatatnttgcattaattaattttaacacaaataccttagttactttacaataaatgttatggtataaacaaatatatatattatctctcttat

SEQ ID NO: 229231 - DNA, 488 bp, Glycine max
  unsure (1)..(488): unsure at all n locations
ctgcagctaagaagaagtgtagaagcaggacattttgatngtttgatgatgccaaaggatcatgcgcttctcaagtttaattcaagaggatcatgcgcttctcaagtttaattcaagacaagaatccaagaaattcaagatatatgatcaagataatctctagagacttaggaaggaaattccaagttgaaacagcaagaggtttggccaaagaatttaatctaaaatgtttttacaaaatatttactctctggtaatcgattaccagaggatgtaatcgattaccagtggccaaaatgcttcctgaaatgcttttaaaatgattttgaatacttttgaaagcatgtaatcgattacataagtattgtaatcgattaccagcatttgaaactatntataatagctattagaaatttaaattaaattttacaatgtgtaatngattacacttggatggtaatcgattacccagcagtatttgaacattt

SEQ ID NO: 229232 - DNA, 60 bp, Glycine max
ttaactactgagaatggaccatcctgcttgcttagggtggtaaaaatgttcctaaaaatc

SEQ ID NO: 229233 - DNA, 473 bp, Glycine max
  unsure (1)..(473): unsure at all n locations
agcttcttatccaaggctcatcttggtggtgattctctttcttccatggcttattccctagnggatggtgcctcctctcacctcttctcctttgtgttccgctgcatctccatggtggaaaatcaccattaaaggacctcatcgaagctcaaagatccagcctccatagaagccccacaagcaagcttccatcatgtaccttcaccttcagaggactacacgtcctcgcctccagaggactacatgtcctcgccatcagaggactacacgtcctcgccttcagaggacttcacgtcctcaccttcagagggctacacgcctttgccttcgtaggactacgtgtcctcacctttagagggctacacgccctcacctttagaggactacacatcctcacctttagaggattagacgtcctcgccatcagaggtctgcccgccctcacctttagaggactacacatcctcaccttt

SEQ ID NO: 229234 - DNA, 509 bp, Glycine max
  unsure (1)..(509): unsure at all n locations
nnnagctttaccttattacaaaaanatattctacataatagaaaataatataaatatgaagtggttcccataaaccatagcctaaaaggaaacttcatcattaatgggaagagtagtcgctgcatgctagtatgattcatcaatgggaataggaaagatgactaacacaccataatcacaattgaaagaccaaacaaagtccactgcacaaaaaactagagataaccacaacagaaatctcaaaaaacaacccaagcctaccgaaaataactcaaatctcatgatagtactacaaagaacatactagatcacattaaacaatgcagaagcagaacacaggcaaagggaggcagacaaccacatcaagttggcaaagaagggtgatggngcttggcttaactagagatggtgtggtaggacaaatagtgtcgagatccttanaacttatggtgtggctgattctgaagtgcttcacccacaaatncgtcattcccatgaaatgttcctaa

SEQ ID NO: 229235 - DNA, 491 bp, Glycine max
  unsure (1)..(491): unsure at all n locations
agctacctgaggcatgcaagcttgaagaggatgctntaatggaggagaagttatagagattgggggagcacgaaattgaaggaataaaagagggagagaagtggaactttgaagtgtatcttataagactttcattcatcaaagttacaacaagtgttacacatgcttctatttatagactaggtagctttcttgaaaagctttcttaagaaaacttccttaagaagcttctttgagaaaacttccttgagaagctagagcttagctacacacacccatctaaaaactaagctcacctccttgagaagcttccttgagaagctagagcttaactacatacacccctctaataactaagctcacctccttaagaagagaagctagagcttagctacacacccctataatagctaagctcacccccatgacaaaatacatgagaatacaaaaaaaattctactacaaagactactcanaatgcccctgaatac

SEQ ID NO: 229236 - DNA, 420 bp, Glycine max
  unsure (1)..(420): unsure at all n locations
attaagcccaatattcacgctctagcatgtattgttaacanacaatcttatctcacattcactcctcataattgagtgtntctaanacacagacaaagaacactctttgaactacacgatagactcagaanacacttgaaaattcttggtagtttgagagatacaactgagattaattcagatgaaaattgtgacattgacggtatggtttgttcaactgaaattgtaacaaaatagtgaatagatacgaagtgcctatccacgatgatacctatgacgtccaggataacacctgatagtcaagatctacagaactaagactagtcctccatgaagataatgattatgcttctccaacagaatctatctgctaataccagtactcatattatggatatcataggctattatagcctcact

SEQ ID NO: 229237 - DNA, 411 bp, Glycine max
  unsure (1)..(411): unsure at all n locations
agctctaggttcagagctgtttntgaatatggttaggagaaaaacactctgtccatagtgggtcatggtgacctgatgatttctagtgagcccatagaactctctaagttntgtccatccagtaagtaaagttggggtcaccaaatcttggttatatgtgacaaagtgcatgtagccattatagtgtagcagatgccacgtagactctagttcatctttccatcttatagcaaatgacctactcatttaaccgtaaggttacatttaaacaaaaaattaatataagcaaaagtactgttaaatatcaagtcatgtttattntagaatagtcttcaaataatttctaacctgatcgataacatgaacagtgtngaacatttcctctgattggttgttgatcttcatcattat

SEQ ID NO: 229238 - DNA, 488 bp, Glycine max
agcttccattgttcaatttcgagcgtctcgatatcttatgcgcctgaatctgacctctgtgtgaaaagttatgaccatttgaatttctcgagagcttccgttgttcaattttgagtgtcttgatatattatacgcctgaatcggacctccgagtgaaacattatgaccatttaaatttctcgagagcttccgttgttcaatttcgagcgtctctatatgtgatgcgcctaaatctgacctccgtgagaaaagatatgaccatttgaatttctcgagagcttgcgttgttcaatttcgagcgtctcgatatattatgcgcctgaatcagacctccgagtgacaagttatgaccatttgaatatctcaagaacttccattgttcaatttcgagcgtttagatatttatgcgcctgaatctgaccttcgtgtgaaaagtatgaccatgtggatttctcgagagctttcgttggtcaatttcaagtgtcttg

SEQ ID NO: 229239 - DNA, 413 bp, Glycine max
agcttattaaattgatgttgcgactctgaatgaatttctggagacccccgcggttttggagccagtggagcgatactcggcatactctaggttctgcagcacataccctgatcctcaggagcttgctgccagactatctattccggggcggggttttgtacttaatgctgagggagctccttggaagcttctaagagaggatctcactaccttcgctcaaacctggagcgtcttctcttattctaacctcgcccccacttctcatacgttcgatcttaatatggacagggcgaggttagtctacggactagtgatgaagatggatatagatgtgggctccattaccttagaccagatttctcaggacgtggacaccacacctatgccagctcaggatgcccctagatcacctc

SEQ ID NO: 229240 - DNA, 433 bp, Glycine max
  unsure (1)..(433): unsure at all n locations
agcttttataagagtggaggaggtgtatatattatataatagcccaagttcttgcccaatgaacttttctttttatacttatcttgacgctctttcttgatgatcttacatatattgagccttctcttgaatcttcacttgaatcttcttgatttctttaatcttgtttgaatgtatttttttaaaaatctttggcgtcatcaaaataatcctggaagctctgcttctacactggcaattcgaggtgatgtttgccataacaaggatatacaattgatgtgtgattttattgtgttaattgatgtattttagctctctctagagatgtgttatattgtagactggtatattcttgctcanttttaaaaattaggagtcaatgaatggtggcttacgctcgaggtgcatcaactaaatgttaggggtttgatta

SEQ ID NO: 229241 - DNA, 392 bp, Glycine max
  unsure (1)..(392): unsure at all n locations
agcttgacgcaatgagtaagccttttgctttgcttnttatgngcgactgggacagaagattttagctgctacagttagtacatggaatgcaacacagtcacttacgttttaggaagaagaatggactaaatggaaggaacatcaatgatgagtcacccttcttctgtgttaactttgtcctttccttattatttattatttattaaaacaactaccaatatgtcaccatgactcagtacatccgttttcatttacacagtcactcacgtngattgattattgtattttacgtcaataatgttactgctccattaatcttaaaattctgaaatacttagtttaanatagagacaactaataagcactactacgtgtgttttaataataaacta

SEQ ID NO: 229242 - DNA, 431 bp, Glycine max
  unsure (1)..(431): unsure at all n locations
agcttccatcaatgccncatgtggtgtccctaatttaatgactggnttaatagtaataatttaaataagcaaaaaccatggtaaattttttttttctttttctttttcatttctttctcttttcaccaaaacaaggttttgaaggaaaatcctcactatagagtcctgaatggccagttcacaactctattcggagtcatttctttctcaccgctcataatctctaaactattttgctttttcaaaaggaagaatgtactagccattactttaggtcgtcacgtgcaaataaaagaataaaatacggtcgataaactcttttacaaataaagttgctaatgctttcttttcaaataacaagatcgatcataaatgcattcatcatttaatgctgtccaaaatatgggagttttacaaaatatatagtgtca

SEQ ID NO: 229243 - DNA, 360 bp, Glycine max
ttatctagctactcttagttgatagactctgagttcttccattcactcgctgtattggacctctgtcataagcttggtaatgctcgcttagacagagtatgggttggtgctatcactgctctgacaagttgtttggaaatgctggctgatatggatccctcaagacaattcaaatatccaattctccaagaacactatggtgttggacctctcaaagggggatgatttttgaaaaactgtgtataatgattctcaatatgcaattacattgtatacctgagactggtgaagtgctagattttacatgtcagtaaatgaccttgatacatgttctacctgttaacccaactgctgcgatgt

SEQ ID NO: 229244 - DNA, 486 bp, Glycine max
  unsure (1)..(486): unsure at all n locations
agctntactatganaagaattacctatganatttctttcatctgacttagcatcaaactttcctaagttttcttttccattgtttaatacaaaacactcgtatccaaaaacatgaagatgcgagatgtttggtttcctaccattgaacaattcatatggagttttctttaaatttggtcttattaaagccctattcatgatatagcatgcaatattaacggcttcagcccaaaaatattttggaagaggagtatcatttaataaggttctagcaatttcttccaaagacttatttttcctttcaacaactccattttgttgaggggttctaggtgcaaaanagatatgttcaatgtcatgcatatcacaacataattcaaatctcttgttaaaacatttaacttaaattctttggcccaaactctttcttgttcactttggaatttccttcctaagactctagagaatatntngatcatatatctt

SEQ ID NO: 229245 - DNA, 430 bp, Glycine max
  unsure (1)..(430): unsure at all n locations
agcttatcgatgatatataaggaatttacaacttanattntgagacacgtcaacaaatatctcacttttatcactattaattattctaatatttttattttttttctccactcttcgtgtgacttttttattcatgaaaaagttacctgtgtgacccatgatgagtatattttagttgcatgtagtagcttaattataagggtaattgtcctagaagaatttagtttttatatttttaataaattttagtttcacacccattaaaaaggtagtgttgttgcttccataagattttttttaaaaaaatgaatgtacaaatttattcaagataaaagagagtaaaattatatcatgtcaccccgagtttcttgaaggtttgaatgtaacttgtcaatgtaatttgaggcacttttcctttcttgttgcatca

SEQ ID NO: 229246 - DNA, 376 bp, Glycine max
ggagcatctcgacatgtatctggactgaatcacacatccgacgagaaagtcattgcccgctgaatatgctcacagcatcaacattcaatttcaagcctctcgatacgtgacgggactgaatcacacattcgagcaaaaagctatcgtcgcccgaactggctcagagcaggaacattcaagtccgaccgtctcgacgagtacgggactcaatcacacatccgagtaaaaagatatcgcggtcgaattgactcagagcatcaacattcaatctcgagcatctagatatgtgacgggactgaatcacacatcccagtaacaaggtattggcgccagaattgcttcacagcttcaacatgcaatctcgagcatctcgaca

SEQ ID NO: 229247 - DNA, 464 bp, Glycine max
  unsure (1)..(464): unsure at all n locations
agcttgcatctctaaatgaaatcctagaacaatgatctgtagttcacacccactatgccgcctcccaatttgtcctccactattataatcttgttgaaatcacccttgcaaagacacaacattacaatagtggctttatggagtgcatgggatcccaagtaagattcttattagaagtctctcggtagccataaataaaatcaacaagacagaatcttgtcaatttatcataccccaaatgcggtttgaccaccaaatcatgatagtcaagtcaacctcatcattccataatagggctaaaccctcatttcttttattgtcttttcctctacaatccataacaaggacgtttgatacccccatcatatctctcanaatatggatcttcgcataacttcttctggttccattaggaaaaccaaattggaccttccttgtaatagagctttcttagagctctaact

SEQ ID NO: 229248 - DNA, 203 bp, Glycine max
agaaggaaaacctttcgaaaaataaacaggctagctgctaaggaacactgagacttggacgaaccccagattttaaaacaaataacacgccgaacaagactaccatagtaatatcctacaagcgaggaaaaaaccgtgtcagcgggcccaacctccgaagaggcaaaactgaatgggaatgagaagcattccaaaaggaagac

SEQ ID NO: 229249 - DNA, 466 bp, Glycine max
  unsure (1)..(466): unsure at all n locations
ctctgagtcacctgcggcatgcaagcttctgcatgtctatagagttctagagagtatatggtccaagttccagagagtttgagagattttgttgtgtgaagatctgcagagaccagagcttgaagaagaagccgtcctgagagcttgagatgagtttgtgagtgattgtgaggtcctagaggtggaggagacatccccactacttgtatttctgcaatttctcatcttctcttctatttgttttaaaggatgcttcccaattatggaaagttaaatcctctgttggatcttccttgtaggtacttgatgtaaatatcttttttatttatttaatgatgttttgtgtgttcactgtgctatcanaacttcattctaccatgcttttgccttgatcacgtagatgcatgtgtttttaggatcattcaacagttgaaactggtctgattcttagaacttgataggacgt

SEQ ID NO: 229250 - DNA, 441 bp, Glycine max
  unsure (1)..(441): unsure at all n locations
agctncaaaagatcatccactcgatcacattattgtgtatatctcagaaggggtaacaactagacattctcttaaagatctacgcaataatatggctttcagatctatgatcgaacctaacaatataaaagaagccataatagatgataactgcatcatcgccatgcaagaagaatcgaatcaatccgaaagaaacaatgtgtggaaatcagtacaaaaacctgaaaactatcctgtcataggaacaaaatgggttcttacaaataaattagatgaacatggtataactactagaaataaagccaggctagtagcaaaagggtataatcaagaagaaggaatagactatgaacaaacatatgctcctgtcgcaaattagaagccattagaaagctgttggcatacgcatccataacggattctaaactttatcaaatggac

SEQ ID NO: 229251 - DNA, 388 bp, Glycine max
cctgcagctgcagctttaagaattcacgggtccaacagtgttgattttgaagatcctacctccgcaggagctccagaaacccttggcactctggtcttatccaaaactcgggagatatttgtgtgtattcgatagcttgaccctgtgattccatgacactttagacatgggacataacattactcaaagaaaggtacaaatgagggttccgcccagacttggccacgtcacgctgacttgaatcaaacaagcctgattactagattgttacttcatgctcgatcactgacacagggttactcacagccagactttgattaaatccttccttcaactacgtgcacctgatctatgtgagccgcaccggcttttttacactgcagggagg

SEQ ID NO: 229252 - DNA, 468 bp, Glycine max
agcttatgcattagaatgattaataaagaacattatattggttcgataaactagaaatacttgaagacattcataggccaatattaactgaaatcaaaataaccagagtaaacaaaaaattgtctaaatagaacaagttgagttagaactacagacatctaaattcatttagagaaaaataactacgcaaagactgaagctaatttgaagatgacttggcttgctgacgacatttgagttcattatgaacctcgatcaaagtagataatgcatttgttgattccacttgagtttgttctaattcttcttttccagttgttcttttaaaatttctgcattgtaagtagcggcagacaagaacatttctttttgtttctcatttgactctttagacgatcgaatgtctgtaatttgctggcgaatgcccttcaatctgttttcaataggacgaagttgagccaacaatac

SEQ ID NO: 229253 - DNA, 184 bp, Glycine max
aaaaaagtgagcaataacaaaatactaaagagtattttttttttccatagccatcgaacacccaagcatctaaaaggataagccttcatgacccaatagctcccaatcaaaagacataaaggaagacgcaggatgaacatcggaagtcgcacagattcttatcctgcttattaatgctagcact

SEQ ID NO: 229254 - DNA, 470 bp, Glycine max
  unsure (1)..(470): unsure at all n locations
agctttaatgtcctccttctctatacaccatatgtttatagacaatctcaggttcctcagcttgtttttaagggcaactcccccccaaccaccctgcagatctgtactccatgcctctttaatcatagaatgataccctttatggttaagccaccagtccaccacccgaaaaggcttaaggccccagtccaccatctttgtttcaaaatgattggacaatgatccgaataatctctttgaaggacatgttgggaggtgtcaggccacaaggatacccactgatcaaacaccaagaatctgtctagcctactctaggcactgccattgngcctaaaccaagtgaaattgctaccaaagcatctaatatcctggagctccatctcagatatccagtcattgaaatctgaggtatctgaagtaacatcagacctctgagatatactaattctctcagcctgattcctgatagt

SEQ ID NO: 229255 - DNA, 282 bp, Glycine max
caccaacctgaagcaactgaacagcccgaagctcaccgcgcaaacaaccacaacaaacagccccaaccgcaacagcaaaagccgccacaacaaaaaagatacgacctcgccagaacaggacaagcccggagggaggaaacaccccaacctgagaggggcaaagccgtcacaacagcagcagcaacaccaacaacccttatcatcaaaaagccgcaggcccaagcagaccatacatgccacaaccaagccagcaacaacaacagcaacagccacagagacaac

SEQ ID NO: 229256 - DNA, 472 bp, Glycine max
agcttcattaccgacagcactctctatttttgtattcagcctttgcgtctcgtgtcgctgaggataaacgtcatttcttcttctttctgtatgccaaaggcatttctaaaggtctgagagctttctccatcacccacaggcaccattagccaccacaaaccatcattgttctccattgaaaacccacaccgagaggaaccctctaaccgaagcagaatcttccaacttggcttgcggtttcggtagagaacgaaaaccctactctgagctttcgttttgtttcgaggtaaccatggtgctatgctagtttcttgataggtccatcttttctatgcatcgtttctagctctgcaaccgccattgcatgtgttatgcttcctttgagacaccttatagaaagagactgtgtagacgctatccttccatgacatgcatgttatcttcgtaacctacatagaacctcgatcacata

SEQ ID NO: 229257 - DNA, 462 bp, Glycine max
agcttagtgcttatttagaagtagcttgagggtattgcttgagcttgtgctagtcggactgttgcttgacctagttagtcatataaatagaacattaggttattgttttaatgtaagacattacatcctatcaataatattcagtgtcattatagttatccttttgtctcttgctttctcaccttccctaaccataaacctgttactcttaacagttataaattgtaaaaaggcatgtaatatgaaatccatttggcatatttctcacaaattctacattaactgtttgtcagtccttaagaaacattttgtttaggcatttaaggatgctgctatcacaattggatacaaagtactggatcatgttgcagttcagttactaaggaggtgtttgatttgatttcttgttttcatttttcaatataattacaataagaccaacttatgttcattctgattctc

SEQ ID NO: 229258 - DNA, 406 bp, Glycine max
aacaaagacgcactaacgagaatcaaaccaaagctatagtgcaagcaatcaatgaggcacaacacaccacatgattatcatgatggatggctccaattctcacaaaggtaaaatcatcactttcaaattgagctctcaaaactatcatgacatgtatgagaagaacaaaggatctcaagccacaaaatgtcaagaacttttatctcaaaacacacacccattcttgaacatatcctataattcaaagaaaaacatgcacagtcgtacgtgcacacgaaattgacccataatattaaactgacaattcgatgaaactaacaacattaacaaattaacacaactaacagattaacaaaaccaacaaaactagcaataccaaagaacactcgccccatactagacaaca

SEQ ID NO: 229259 - DNA, 326 bp, Glycine max
  unsure (1)..(326): unsure at all n locations
caccaggtgaggattggcgaccccccccaggccagggttgagcacgagacgcannnaaaancagagagaaagaaataaaaaagggtattgggggggaaaaggaggggcgaaggaacaggaaagaacaggtagaaaacggaaaacaagaaggcaagcaaagcgcagaaagaggacgcaaaaacaaggatcgagcgaaaacggagcaagaaaagagggaaaaggagcatgaaacaagggaacgaaaaacgaaagaaggaggaagaagagaaaggggacgaacaggagcgaaaaaggggaaaaagggaagagaggacgaaaggggagaa

SEQ ID NO: 229260 - DNA, 483 bp, Glycine max
tgcagcatgcaagctttcgatatcaattaccagcatctttatatttacgggacagaatcgaacatccgagtcaaaagttattggcgcctgaatctgctcacagctctcactctcgattacgagcgtgtcgatatcctacgggacacaatcggacatccgagtgaaaagttattgtccgtagaattctctcatagcctccgttctcaattacgagcgtctcgatatcctacgggacacaatcgaacatccgaggcaaaagttattgtcgtttgaatctgctcagagctctcagtttcaactacgagcgcctcgaaatattacgggattcaatcgcacatccgaggtaacagttattgtcgtgtgactcgtcttagagcttccgtttacaatttcgagcgtctcgatatattacagggcacaatcgcgcatccgagttaaaagtatcgtcgtttgaattgcttacagcttcacgcttcaatacca

SEQ ID NO: 229261 - DNA, 492 bp, Glycine max
  unsure (1)..(492): unsure at all n locations
catgcaagctntatccatgcaagacaaggctacaaaattataatttacataccctctcctggaaatcgcccagcatcttgatattgattctttctggatcagagcattcctgtaatatacaaaatctgtttaagaaggcccatcacttactacaagtcaaaacaagctctagcaagaccatattagttgatcatcaactaacccatttattaaaagacttccttttcttactaggcttagccctgaggcaaccatcatttttctcttcaacatcaaaaccattaagaaccaacttgttggactctaaagcgcttctagcaaaatggtctgcatccacacagccgttatagatttcttccaaggcctgagatgcaacaccgtaagcatcttcagataaagatccacattcacttaatataatggcctgcctacaaaagtcattaaaacgttgaactcgatgagcagtcctggtaataacatcaccaacatatc

SEQ ID NO: 229262 - DNA, 368 bp, Glycine max
ggagccactcccagccttgtgcccggactctcaaccactgatgatagccgtcgatgaccccatcactgcttaccctaagctctctgcccttttttcacgccgcatcccatgccccgcaaacttctagcagtacctttgcattgaggtcacagacaccccgcgtaatgaaaggcgtgatgctcttgcctaatggcgcttctctcatggagtacccaacctgccctatggcgaggacgggattataattaatacaacccgatgttctcatctagggaacattcggacatccttcgcatgaagacacagatcctgattcgttcttccttctagcgagggaaccaataacgagacgccgctccatgctagcc

SEQ ID NO: 229263 - DNA, 486 bp, Glycine max
agcttcaagttcaaccaaagatcaaacattgtgtatttatagttcttagatgttgtttccatacccaagaaagaaaggttaaataaaaaaggtatccaatgcctaactcgttgagatttttgttcttatgatgttgaaaattcttggcacatttttgttagttgttataaagccaagcatgtctggcagttgctggaatatgggaagtcataaaaaattatatgaataaatctaaaggttcctaagagcttgccttcaaaaattttgtagcatcattaaccaaatcttaaatgtcattctgctatagctctgtggcgcatttggaatcgaagaagtgaaaaattatgggacaatgttgagaagtctcaagccatctcagtatctactaccatgttaatcattcggagtggctcacagcttgcgtaacacctctacctcactcacatcaaacgatcttttcagtaaccacatggacttctcatccac

SEQ ID NO: 229264 - DNA, 153 bp, Glycine max
aaaggcggaacaatgcaaagcaccccaacacacacaaaaaaaggggccacaaccccaacacccacccaaaaacacgaaaagaaaacaacacaccaacacaggaaagccaaacaggacccacaggaaaacccgcaacgaacgggcacgaaacaa

SEQ ID NO: 229265 - DNA, 474 bp, Glycine max
  unsure (1)..(474): unsure at all n locations
gcaagcttctattttcaatntctagcgtctcgatttattatgcgcctgaatcggacctctgtgtgaaaagttatgaccatttgaatatctcgagagcttccactgttcaatttcgagtgtctcgatatgtgatgctcctgaatcggacatccaagtgcaaagttatgacccttttaatttctcgagagctctcgttgttcaatttcaagcatctcgatatattaatcgcctgaattggacatccgactgaaaagttatgaccatttgaaattttggagagcttccgttgttcaatttcgagcgtctcgatatgtgatgcgcctgaattggacctccgtgcgaaacgttctgaccatttgaatttctcgagggcttccgttgttcaattacgaacgtctcgatatataatgtgcctgaattggacctccgtgtgaaaagttttgaccatttgaatttctcgagaacttcactaga

SEQ ID NO: 229266 - DNA, 457 bp, Glycine max
agcttaagacgtatccattacagagccctgattttttgtctctcggcgcgcatggatcgatatccgggagtgtatctctcctttgctctctactccttttattcgcctaaagttgcttaatgtccatgcgacctcgcgcttagcatgggcatccaccttaaccgcacctttgggctcttcggagggccttcctcatgctaagcgacaagacgcactaggctcgtctcgcccactaagcgagttgcccacgcttcaactgatctccacatatgtgatcaattgtcctccaagcactcgagaacatctcttataacccctgccggtaaacaactacaatgatatcaataccttcattatttcattaaaaacaacactaaagcgaacaaatataatcattcctaccagacatgactatcagataactcacactcgcagcatacctacaaatcgcgacata

SEQ ID NO: 229267 - DNA, 270 bp, Glycine max
ctactgcaacactacatgggagtcgcaccctacccttcggcgggaggacgacgcgtcgctcacaccgtgctcttccaagaaaggaaaaagcacggagtcgccaccaacgttcatgtgaagaaaactccggaataaccagaaaggtgtggcctaccaactttaatggtgaaaggtccagagatcgttcttacgcacggagaatgtattaccactccacgcgtccgtcacacagaatgacagccttgaaccaagcgtgcaacatcatgtcta

SEQ ID NO: 229268 - DNA, 464 bp, Glycine max
  unsure (1)..(464): unsure at all n locations
gctttggatcaaagattaatcttatttatctacacattgatgcacttcaagctgcgagtatgtctctaatttagattatcctgagtttcaactgttcaattcttaaggggtcttctatactatcaattataggaaacaacagaatcttgaaacttatgattctcacaaacaatcaataaacaatagataatgttgtgtacctttctccatgggaagacttgtacctctctccataagagcttctctccgatgcactttgatttccttgaaagaggagagaaataataattcacttccttaagcctttctttcctgcctctctccattcgtgatgactatgagtgagagagaacactnttctggtcaagaatgggactttatttcaccttactgggtattaacccctctttataactactacctccatcaagtatctagtaaccctagaaacttcttctataaag

SEQ ID NO: 229269 - DNA, 326 bp, Glycine max
gcgatcgcctcactaagcccaaaaggcctgcttatcgcgagggcacgtgaattctaagctacctcaggcttataaaaggagtaggaagcaaaggagacatacacacagacactcacagctctcaaggaatacatcctaagcctgagcatctctaataggcgaaaccctccttctatagcatactctccttctctctcttaatccattcctctgattcttctatccacatcagcccttaaagctaaaccaccattgttgggagccacgcacccaaagatccttgcaatgcaatcttcccttactatctatataatgcaatgccaatc

SEQ ID NO: 229270 - DNA, 373 bp, Glycine max
  unsure (1)..(373): unsure at all n locations
tggatatgtgatgngttaatgtttgctagagctttaaatggatctgggtgaagataattcttccaacagcaatgtggggatatttggagctgatcacaattgggttcttgacgcagctcattttcttaagagcacgcagatggagattccttttcagttcttggggattcctttaggggctaagtcatctagctgcttggtgtgggaacctttgattaaaaaattcgaatcaaagttgtctaagtggaatcagagaactctatcaatggcagcgaaggtcacattgataaatctagttttaactgctctaccaatactctttttgtctgttcttagaattcctcaaacagtagctcataaagtgagatcccta

SEQ ID NO: 229271 - DNA, 484 bp, Glycine max
  unsure (1)..(484): unsure at all n locations
catgcaagcttgaagttgttcatgcttaagcgccanaatatataatgttgtaaatagaaataacaactggtcaggaggcattcaacattcttgtttgtgcgcttaagcgccactctaggtgctcttaagcatcagtctgcatgtgaagactttnttttttggtacatgttgaaccttatttaatggattttcgtgcaattgctatgggacttttcgattatcaccattcccaaaatattttttctctataatacctttgatagcgacctataaagctctgtcatggcttcttcttctcaattcttcattcctatatggattcattacaacttaatggctaggagtagctaaatctacagttattgcggttggatctagtgagacctgcaagtctcttgagagatgatattctcgagatactctgatatntgcacgattggctgaaatgtctctaatgaaagaatcattgagtgctacgtattga

SEQ ID NO: 229272 - DNA, 481 bp, Glycine max
  unsure (1)..(481): unsure at all n locations
agcttacatcaagtaaagccgcttctccttcaattcgtctgtctatctctactattctacctgacattatcgctgtaagcaatgtactgcgtantcaaacccacatggaaatcataagaagtggtcacgttattccgaataaatcaaggcatggaattaattggactacatgcaagaccaaatgcgacaaaccatgttatacagcaatatttgatatttgataagtactactcaacaaattgaacatcattgncaactaattctgttcccttccattcaaattcgttttaataattcttttagctgcatgtttggtgcaaaattgttgtggttcgcaagtaaatatgttctattaatcaagtcaaaagacttaaaatacaaaccagtcctaacaatatttgaaaattgtttacagatcacaaataaaacatataataacaaaagggttgccgcttatattcctaaaacaatacacaatatc

SEQ ID NO: 229273 - DNA, 346 bp, Glycine max
agaatacctctatactcactaagcgcaacaatcgggcttagcgtgaagattacgtgaaaaccaagtcgaattgctcctatcaaagactgagagagaaggaggaaaaaatcctcctaattctaagagaatataacttcttatacaacgcatagattagaacaaagagagacattcattaggactcattctttctctcaattccttttcttatctatctccttttatatcataagcctctagcattgtaaggttcctatgaaatgaaggctaacccccattgtggaactcacaccactgctctaagaattctttctactatagaaatactgttactatcattatggct

SEQ ID NO: 229274 - DNA, 402 bp, Glycine max
  unsure (1)..(402): unsure at all n locations
ctgatctactcaccagggatatatttaaataacgcgtgcagaaggtgatccttctgctcctcttgtcgagtccatacttgagtcgatgataagaacangcaccgtttcgagtttcccattgttatcgcgaagcacacacagtagctgactggttgtctaaatatgcgcatactactgctttagtcttcatgtgctcgatgttcctctcatggttgataaaatactaactgatgacctactggagttatagactccgtactgtcgtgtattgactcaagagaacatgctctccttgaagtgtgaacagtaatatggcatctaagatggtttcaagaaatcaacttgttattatgataatggtgataattttctaaccctgactatccttgataaatattgctg

SEQ ID NO: 229275 - DNA, 462 bp, Glycine max
  unsure (1)..(462): unsure at all n locations
caatcctcattccagcgatcagtttgttttttgcgtaagagtttgaacaacggctcacacatggcggtgagctgcgatatgaatctggcaatataattcaagcgttccaggaaacctcggacttgcctctctgtacggggttctggcatctcaaggatagccttcaccttttcggggtctacctctatccctttctggcttacaacgaaaccaagcaatttccctgatttgaccccaaaggtacacttagcggggttcaaccttaattgatatttcttaagcctttcgaacaacttccgctggttgacaaggtgttcttcctcggatntagatttagcaattatgtcgtccacgtagacctcgatctcttgatgcatcatatcatggaacacagctaccatggcccgttgataagttgccccggcattcttgagtcaaaggacatcaccttgtacagaacgt

SEQ ID NO: 229276 - DNA, 281 bp, Glycine max
acatcacacacatctccttggctaaatacaatacaacataccccagcatttgcggtacaaattgcacacgcgcacatctcggaattctaatacctaacataccacaccttgtgagaatttgactatctacacaataaggtgcacattcatgctcttcaagtgtggtacctaagccgatgaaattaagttatttcttcttgctaaatcgatcaataaaggatcatttttggatgatcccttaaacagcacaattatgaattgttcggaacattgacacaaat

SEQ ID NO: 229277 - DNA, 418 bp, Glycine max
atacacactcacatcggcgctattgaactcattccaccactcctctatgtcaggtgtaacagcacgttacttttcatattgacacattctatattggtgcatcacgttatctgcacccgattatgcaatctgggcatgctcaagtgggagtggatataacaatgcctcaatgctccatcttgttactgtcacactcgaagagtgaagaataccatgaccatataacacaatgtgagactccaaagcacacgatgccaccaaaattgatcttttgcttcctgtgttgaatgtcaaaagcctcacaaacacgaatagaaatcgaaataaatcaatcaataaatcaaatagaataaatgtgggtcgataaacagactagcgcggtagctgatagttaagtgtaaatagataacagttggta

SEQ ID NO: 229278 - DNA, 113 bp, Glycine max
  unsure (1)..(113): unsure at all n locations
ccccttcctcctactcccaaatcccccccccccccccgttgtatgaacctcaccccgacttaangactgagcgcactccaccaaacacaccgattttttatcggtaacaaatc

SEQ ID NO: 229279 - DNA, 459 bp, Glycine max
  unsure (1)..(459): unsure at all n locations
ntgagccaattaagacgaacatatctgtgtaggtcggatttctgtttgagtcccgncatatatcgagacgctcgaaattgaatgttgatgctctgaccaaattcaaacgacaataatattttactcggatgtttgattgagtcccgtaatatatcgagacgctcgaaattgaatgttgatgctctgagcaaatccaaacgacaataactctttactcggatgtctgattcagtcccgtcacatattgagatgctcgaaattgaatgttgaagctctcagccacttcaaacgacaacaacattttactcggatgtcttgatgagtcccgtaacatatctagacgctccaaaatgaatgttgaagctctgagccaattcaggcgaccattcacttttactcggatgtctgattgagtcccgcatatattgagacccttgacattgaatgttgaacctctga

SEQ ID NO: 229280 - DNA, 457 bp, Glycine max
aaaactaacctttaaaacacattgaactcattgagagacaagactaagtattaatagttagtcattgtgctaacaaacaaacaacaaatctgtttaatttgtatagagccaacaatggcttgataggacataaaatactgagttataacaagcttgatgtaaaacttgtgttgcacagtcagaagtgacaatgattaatacttgtaactggttgaaattaatggaacttggtggtttgtcaagaacataacgtaatttcagtagtagagctgaaccaatataaatatgtgtcttatttgttttcattattcttctgcattaaactgacctatgatttgaatttgattttgatttgaaaaactctgtctattctactgtataatctatgtccatcgtctgatagagttttgtgaaaatttgttatttgacttacaaagctatctctcaatgataactt

SEQ ID NO: 229281 - DNA, 337 bp, Glycine max
ttgtcaacaaaacaaccacgcacgactattgtatccactctgccaaagcacacccatagatatgaatattgacgagtataatccacgtgatagtaaaacaatcaaaaaaacattatgtcgatcacaaatatatatttcactgataatgaccaccttttactcgcatcgaccaagatgcgcaaattatttatttcatagctactaattccaaactaacgctcatcatgttattaaaacatgaaccacatacatatcactacaccactactcataaatcgaacactcccacatatgagtaacttacatatgcgatcttcacaactaacccttcacatcg

SEQ ID NO: 229282 - DNA, 441 bp, Glycine max
  unsure (1)..(441): unsure at all n locations
tggagcgccgtcacacaacggtatacaggcgaaggtgttttctaagcgtgatagacagaactgacgatgctgcgaaatttatatacaacgctcgcgactcaatctcaggagtatgcagcctactggtaaacgaaaacaagctattgtataagataacaaccttgatgttctgctgtaatcgattactagaaacgggacataactacctgaacatagccacggttgttattcttacaaaaaactatgcatatggcgaaacataatatcactctactaatcaaccattgaaacgagcatttaatttattccagcacatattaacatatttgatcactcacactagntaactgatgcaagcaactacgaatcacgcccaaatatatttactataattagcctttaactaactgtacacaataagttcttcttctctttatacta

SEQ ID NO: 229283 - DNA, 478 bp, Glycine max
tagagaggaagcttcaatggagaaaaagagatagaaaatgaggcataaggaggggagcatgaaattgaaggaagaaaagagggagagaagttgaactttgaagtgtgtcacacaaaactctcattcatcaaagttacaacaagtgttacacatgcttctatttatagcctaggtagcttccttgagaagatttcttgagaaacttccttgagaagcttcttcgagaagcttccttgagaagcttctttgagaagcttccttgagaaggtagagcttaactacacacacccctctaataactaagctcacctcctttagaagcttccttgagaagttccttgagaagctagagcttagctacacacacctctctaataactaagctcacctccttgagatgagaagctagagcttagctacacaccccttataatagctaagctcaccctggtgccaaatacaaaaaaaagtcttacta

SEQ ID NO: 229284 - DNA, 435 bp, Glycine max
  unsure (1)..(435): unsure at all n locations
aatacaactcanaataatgaacacgttgtcagcggttctgtatacacattctctgttgttgttctggacgtgtattttgatgttaatctttatcacattttcttgctcatttattcttcctttctgttcattcttttttcattgctttcatctagatgtctattttatccagttaatatttcatctcaaaactcaaagtattcaagccatggtggagttaagaacacagtgtgccataactgacaacaaccagaatttcagcctacaaataaacagtagtgtttatgttgtttaacgcttggatagttacaatttgtgcttgcttatgctcaattgtcttgaattacaccaattcacgagagcttacgacttatnttgatttacaaatctagccacaactccgcaccacaactcaatttcttcatatgcctcata

SEQ ID NO: 229285 - DNA, 305 bp, Glycine max
caactaccaagagtgcgagtgcacttgttggtatggtacgataacttgccaatcttaagggtcaatatgaaacctcattagtatccaagttgccccatttataatattggtgatgcctgagcaggctaatccgcttctggattaagatgatgacagaaaatcttgcaatgagacaatatgaaatgtccttcaggctgttcatacttaaatgatgtgcgaatgacatccaacttggccctataatatggacttaacactttgctgcgatagctcctatagaatattatactactgattttataacc

SEQ ID NO: 229286 - DNA, 472 bp, Glycine max
  unsure (1)..(472): unsure at all n locations
tctacttatgtggcagggcgggcttccttcactgtcttgtctctatcgcgagctntgaccaccgctctttcttcccgcgatgcttctctttatatccgcctgagtgggtttatagcctaaaccatatttcccacgatttcctttggcatttatcaggctagttatgccgccgttgtctttgcctaaacccattccgggttcgtaaccgttccccaacataactcgggccatcattactgctgcatcggacaggcaagcttgcccagagaaggagtccacagaggaaatgcttaccacctcaaaagactggaaagcggtttataatgactcctctacggcttccacataaggcatagaggatgggcagctcaccaagatgtcttccttgcctgatacgatgaccagatgcccttccactacgaattatcaactttggtggagtggtgaaggaacaactcctactgagtggatc

SEQ ID NO: 229287 - DNA, 418 bp, Glycine max
  unsure (1)..(418): unsure at all n locations
gacnnnatagaataactacgctntaacctcatcgaccctacagtgtgagagatttatttctttaacncctgagnacggactctcagccacttatgatagccgccgatgatcccattactgcttcccctaagctctctgtcctttcttcacgccgcatcccatgccttgcgaactccttggagtaccctcgcgttgtggtcactaatcacccctgcgatgaaaggcgtgatgctttcgtctaatggcgctcctctcatggggtagccaagctgtcttatggtgagaacgggattataattcatacaaccccttgtttccatcaagggaacattttggacatccttcgcatgaagatacaatcttgattcttccttccttctagcgagggcaccaatatacagacgcctccccatgctag

SEQ ID NO: 229288 - DNA, 395 bp, Glycine max
tgtaggattatgggggacccatcacatgaggcactatgtgtgtttcgcgcgacggcgcacaacaagattttccacatccacaacgcgcgcataaacccaccatcccctgttgcccacctccaactgagctcacgtaactcccacgtagcccataccctcgtatttctcaacaccgggtccgcattaatccttccaagccttcacaatatccaagcaaaacaacattcacacagcacacgctatgacagccaagcaaaacagaccaaacgccgataactctgccaaaacaccaaccaaaaatcaaagctgtatccactcaaagaccccaggaacaattccttccaaccaatacgtaaaccgctcgatcgactccaaaatttactggaagtctatat

SEQ ID NO: 229289 - DNA, 289 bp, Glycine max
agcaccaagaaacggcgaaaaaacgaacaaagaggagccaacaagccctacaaaacgcaacgctactccaccaaaaccccaacaaacgcaccaactgaaggaagaaacccgggcaagcctcccaaccccaaaaaacaacgggacccaaagaacaaacaaggagccacccgacgagaacaaccaatcgagaaacaccaatgagcggaacaaacacgcagaccggagcaccggccacccgcacccggaaagacgacgaccgaaaaccacaaacggcggggcgcgggaacgg

SEQ ID NO: 229290 - DNA, 472 bp, Glycine max
tctaaactttatacaagaatgaagctctgataccacttgttatacaagtggcctcagatatcttaagaagggggggttgaattaagatattccaaactgcttcccctaattaaaaatctatttcactttttattcaagttatgaattcccttaatgacaatcttcttaaatattaattcaaataaaacaatttgaatatgaatataaagcaataataaataaaggagattaagggaagagagaatgcaaactcagttttatactggtccggccacacccttgtgcctacgtccagtccccaagcaacccgcttgagagttccactatcttgtaaattccttttacaagttctaaacacacaaggacaatccttcctttgtgttagaattcctttacaacaagagactcacggtctcttaatcccttagagaatgagaagacgaagaagaataatctctctagaaagagatgg

SEQ ID NO: 229291 - DNA, 304 bp, Glycine max
cgacccatgattccctatccttggttggaagctccatactgcaccatcctgcaaatttctatccggaatttttcggaacgacgcattttgaatgactatatatataagcattattcaatctctatgcctatatgctcctggcagaagtacgaatagcgcggggcaagatacgcgtggtgcactaactaacgaagacacatccataactgcgacgatatgggctacatcttacttatatagttctaaaatcatccgtctgcgtgcaacttcgacattgactaaaccaccctctgcaccacgctcg

SEQ ID NO: 229292 - DNA, 408 bp, Glycine max
  unsure (1)..(408): unsure at all n locations
cataaaactaagcttgggccttggaganacaaacatcgggaaactcttttatttagcgaganctatgtcctctttgattggtcacatttatcgcgaggggaattctagtgcagaccttctagcctctcagaccaccatcttagatgggtgtttttggcgggactcttgtcctagctctattcagagagtttttgtaaatgataggaatgctagacctaacttcacaatttagatttaggtagtttttcctttgttttgcccttgggaccggtctggttcccacatggatggacttttgcactttcatcttcctgatattatatatatcacggggctgctggtctgaagctatcgacgtgcccacatagttgggatgtcaagaaccttctagccgcaccaacccacact

SEQ ID NO: 229293 - DNA, 209 bp, Glycine max
ttctgatatggctcctgaccgtactctactgcagaatatgttctagatagagggtgaaacctttatagaatatgctcagcgatggacggatttggcggcacaagtatcctcctcctatggttgagagagagatgatcaccatgatggtagacactctgccagtgctctactatgagaagctagtatggtactgttgcaacctacccttc

SEQ ID NO: 229294 - DNA, 483 bp, Glycine max
  unsure (1)..(483): unsure at all n locations
acactactagaaactcaagcttcttcttgtttctctccccatntgaaaccaacattgttgttgatcacttcattgagaggtgctgccaatgtgctaaaatccttcacaaatcgtctataaaaacttgctaagccatgaaaactcctcacctcggtcacagacttaggtgtaggccattcttgaatagccctaaccttctcctgatcaacttgcactccttttgaactcacaacaaaaccaagaaacacaacatggttagtacaaaagatgccattttcaagattggcatacaattgttcttttctaagcacagtcaagacagatnttaaatgatcaatatgcaaatcaagtgaagtgctatagataagaatatcatcatagaccacccaacaaactttctatgaacttctcagatatggttcataatctattgaaggctagagcgtagttagcaaaggctaaccaccatcatcaaacatattt

SEQ ID NO: 229295 - DNA, 456 bp, Glycine max
  unsure (1)..(456): unsure at all n locations
tgagaagagaagatatcagaatactgccgatttagttcttaacgngagcagacaacacactaaacattaaacagcaatatttttcttttcttcataatttcaacttttatttctgcatccattaaaaatatttattatatttttttctattcatgcttgtaatcgagcagtgttcttcatccaaaggaagtccttcaaatgcagacagaaatgcaaaatcgcttgagtgataaaaacagaggtacttttttttaagctcttttcgtctttcaccaaaatattcctactaggcactagcatcggagtggaattaacccaatttttttagcaaacactttcacgtaaaattttttgaaaaaaaattgacaaaattatttggcttgaatattaatctaatttatattctcacttcactgcaaaataacatatctatataaaaacattggcttggtggga

SEQ ID NO: 229296 - DNA, 301 bp, Glycine max
ttctcgagagcttcggtgctcaatatcgagcgtctcgatatatgatggcccccaatcggacatccgagtgaaacgttatgaccattcaaatctctcgagagctctcgttgttcaatctcgagcgtttagatgagttatgtccccgagctgaacatccgcgtgaaaagtattgaccatttgatattttcgagagcttccgtggtgcatattcgagcgtctcgataaattatatccccgcattcaacattctagtgaaatgtttggaccattcgaatatctcgagagcttccgttggacaatt

SEQ ID NO: 229297 - DNA, 449 bp, Glycine max
atatacttcaatcgcgaacatgggtagttgagacataatttatacaggatcgagaagcacaaaatatacctggaacatggaaactggaccacaacggaaaattttccgtagtcttccataaattgaaagctcctcgtaagtcattcccatatcaacttcatcaagctgttcaacaaagaatgaggtatttgtttataactcaattataaacgatttacagatgcatatatatagaaccaggtgcaaaaaaaggcatagaaaagtcaaatatccacaagcaaaagctaatatagcactgctaaagagagaataaatgaatataccagctctctgatttcacctagaccaccttactatgtaaataaacatgtaataaagtgtgtacacacacacgtcacacatttgctgcaagtgtattcagtagaaggagaaaacagcatagcttggta

SEQ ID NO: 229298 - DNA, 391 bp, Glycine max
gaaagagcctatacgcattatccaaatcccttaccaaaacaccccattacttcaactccaaataataacaacaacaataacaaaacacctcattctcaaacacatgtaataaacaaaaacccaaatgcactccttcaataaatattcctagaccaccataattggggccttcggatccttcgctgacactccgaggtataccataagtttcagtattctgaccgactatgaaactaatctccggctgaagactacaacacacttaaagctcttcacctcgacagctaccgctacccaaagatgtgcctacaactcaatagaatttcaatcaattggtttcttccacaagccacacgcattggaatctccataacactcaatccagcacaag

SEQ ID NO: 229299 - DNA, 414 bp, Glycine max
  unsure (1)..(414): unsure at all n locations
ttgagcaatncaaacgagagaactgtggacttgtgttgttctgacgngccccgncgcatatcgagacgctccacaattgaaactgaagctctgacaaaaatcaaacgacaattactctttactcggatgtccgattgagttccgccatatatcgagaccctcgtaattgaaaacagaagcattgagcatattcaaacgacaataactcttgactcggatgtccgattgtgtcccgtattatatcgcgacgctcgtcattgaaaaccgaagctctgagccaattcaaacgacaataacttttgactcgcatgtcccattgagtcccgcaatatatcacgacgctcgcaatgaaaactgacctctgatcaaatgacacacaaaaattttactcgatgccgatgagcccgaatatac

SEQ ID NO: 229300 - DNA, 440 bp, Glycine max
  unsure (1)..(440): unsure at all n locations
tcgaggtacttacccgcggaagagcgaggaacgattatnaacgattgaacaacgtcgaagaacggctgaaatctttgcgaaattcctcacagaaaacgctacagaaacgtttctgaagcgcctcggcttatattttcttcacggaaacaatcttttcatagcgactccccagagagagaagtgcctaaagggctgggatccttcccttcttcattttctcccctatttatagcaaaataagggagatgcttgtcgcccagctcgcccatgcgagctcatctcgcccaggcgagcagggttgcttcctccataagcaccgccttccggaggaataatctggagggccccaatgggcctgggtgttatntgcaccacccgtttactgacaccacccccctgtgttttttgggaggccttctcgaaagaccggtacctcgaat

SEQ ID NO: 229301 - DNA, 441 bp, Glycine max
  unsure (1)..(441): unsure at all n locations
ctaagctnntgataagaaccagcctgtccaatgggacgacgactgtctttggagctcggaaggattaagcgacgcctcatgaatcctcctgtgcttgtgccaccgatgcctggaagactccttatcctatacatgactgtgtcagacaagtcgatggggtgtatgttggggcagcatgacgagtctataaagagggaacgggccgtctatcatctaagcaagaagttcacggcatgtgaaatgaactactctttgctcgaagggacatgttgtgccctgttgtgggcagcccaccggctaagacaacacatgttgagctacaccacttggttggtgttcaagatggacccagtcaagtacatatttgaaaagcccgctctcaccggacggatcgctcggtggcaggttctgctattagaattcgacattgtttatgtcact

SEQ ID NO: 229302 - DNA, 447 bp, Glycine max
tatacaaactcaacctcgctctacattcacattgatgaatgtatgtatggtttgttgttgcaccacatctttgctttcagagtagtcgctcactggtcaaactaactctccaaattcttgccttcgcaggaaatggccccgatgaagcttgcctcatagaggcgcacgaatgacaatgcatccgaatgaactcactccgctccggagtatgacagtcacccgttttatgagcactgctcaccatcatcgcttctaggccatcaatggatggtcgtttttcctggagcgactctgcagctcagggacgacgagtatactaatttccatgaggaaatatggcgccggcgtggggcatccctgggtacctccactggccattctgcaccacacatattccttgagtattatgccattgcttggtcaacagatgaggacgtgcgtgacatg

SEQ ID NO: 229303 - DNA, 159 bp, Glycine max
cccacccccaaccccacaaaaaaaaaaaaaaaacgaatactgacaacccaacaaaaaaaaagaaaacaaaacaaaaacgaagaaagcaaaacaggcgcacaccccccacaacccacaacgaccccccccccccagcagaacaaacaccccacacccaca

SEQ ID NO: 229304 - DNA, 461 bp, Glycine max
  unsure (1)..(461): unsure at all n locations
gaccttagaaactaagcttcnttttagacctcgatgggtcgtctttcctggccgttttctactgtncattttttcgatcaatatcggtgaataatatttttttgccgaggtgggctaatgttttcctggccgaataaatgggaatatgctagtttcggccgaaacgacacatcggttgagctcgcacgaaaaaacctagccgaactacattgttagttttttatgcaacaccgaaacaagaaaacttcccctgccgtaagaaaaaacattataggccagcgagcgtattttaaaaaaaaaaattgcgcaatgtcggctgaagcatatcagtcggggccatttcacgaccgatgtcggctattgagttttctattcaatccctgaataacaattggatgatgtcgattangaaatgttcgatcggcatcatccggtgaagcttcttttttagacctcgatcg

SEQ ID NO: 229305 - DNA, 390 bp, Glycine max
  unsure (1)..(390): unsure at all n locations
gagagggaaagacagcaatgacactttgacagagaaaacagggacaacgacgtctgaacttcgaagtctactctctcaaaaacaaaagttgcctaatccacatacaaggtctccattcatagcataagcgttacacaaaactagaaggaaattcgcatttctatcccaacctcactcgaactcgaattcgaatttatggagccacatctggagccaagatttcactaactatcgatcagagaatctcatctacggttcaaccccccactccaagatcaaacccaagactctccactatctgtgcttatgtgcatgaggcctgtacagcatgacggacacgcacaaccgtgtaccacttgatgtgacaaccngatgtaccacgcaaatcct

SEQ ID NO: 229306 - DNA, 315 bp, Glycine max
  unsure (1)..(315): unsure at all n locations
ctcaacctcgaagatccagccnccatagaagcgacacgagcaagtctttatcagaacacaaacatcactttataagagagcatgttcaaaaagggatactggacttcgtacccactaatgatcagcttgctaacatatttacaaaacctcttactaccgagagactgattctactaagaaatcaacttgaaatggactctactaaggaatgaattgatcttcatatgtgatccaacccacactatcactccaaggacccatcatccaatgtatggctgtacttatataataaccattgtgatatttacagcaaaa

SEQ ID NO: 229307 - DNA, 443 bp, Glycine max
  unsure (1)..(443): unsure at all n locations
ngtcgcttcccttcatcgagcatataaggccacttctatttgctnacaactgatacctttgcattagtaaaaccaatcgcatgctaatatgttaaatgtaaaatataataaaagtcaagaactaaatatgtactaatggctaggcaacttctcatcttatttgtgttgacttgcggcatataacgatcattttcttctcttattgacggacatacactcactacatgaattctaattctacttgcttacgaaggtaactttgactataataatggtttaagtaaataatatataacggaaaaattataaatgttgtctttattaaagggtgacagttaccaacgtagttaattatcacaatgacacataaataagagaataatgttcgatcactatgcgtaaacgttcgttcaagatggaatcacacttgccattgatccttg

SEQ ID NO: 229308 - DNA, 323 bp, Glycine max
ttgagctaaagagccacaagaggcagagagaaagacgcgtttctcgtattagccagagacactcggcgcgcggcaaagaatctgacataatcccgccgatatcagcacttacaaaaacaattatcgcccagactttacttatctcctaccctatctccagatcaatcacaactccttccacctgatgaactacgggttcagataaacaaaaaccatatctatgatagtctgacaatcaaacaatacccatgtagagctcgacgcatctcgaaccctttatataatacagtgaaccccggctgcggccgatcaatgattcacga

SEQ ID NO: 229309 - DNA, 287 bp, Glycine max
cctgtaacctcacatactcctcttattctacaaaaaaattcatactggggcctttatgtcttgcctaccgcatgacacatatcggatacgttgcgacaatatggattatcactttatatcagctcctagagtgcctatctcattgcaattgcatactgtccatacttatatagatgaaaatttgaatatctctggcgaaagtgccagtaccgactagagtaggaactgatataaccccacaatgtaatactctgcagttgtaaatttatctaccagaaggacaactc

SEQ ID NO: 229310 - DNA, 299 bp, Glycine max
ttgaacgaggaagtgcagaacggcgagacgtcctgcttttattcgtcgaccacacagtggtacctgcagatatgtcgcggcggttatgagaccttggggacgtcaagtggggcgctattgcccacaaccaagcttgatcaatcctcatccaacccgagcatagttagtcagtgagaacctgcgatgtacctaaccaggcgagctcctagcagtctacagattaaaggaacaacgaccactcaacaatgaggcttgtgtggtggctggccagacgtgaatcatgtgtgatatatgggtta

SEQ ID NO: 229311 - DNA, 381 bp, Glycine max
gagcggaaaacgaacagtttctcttatgagatatttctaaatataaaggtttatgagaggtattttctgactctctacagtctctctatctgcacttagggttctactaagtactcttacctctctcataaatcaaaacccatcctcttaggcctaaacacaccataattcacttatacacatagaacacatgctcaacatcactaactcactaattaattaattcattcaagcacttaacttaaacttaatttctcttgtcatctaatttaatcagttgaacagtcaattaataaaacatagccgtacaacccgtcgtggcgcgtggcatcgctctgaggacaatacgctcatatatggcctgtgcttacactgtcgtgt

SEQ ID NO: 229312 - DNA, 464 bp, Glycine max
  unsure (1)..(464): unsure at all n locations
tgtttgagagagaggctatctcaagttcttgttgnntatttaagcccgccaaattacttgtcttgtgcctttnntatttgtggtcaatgatgataaatataatcccagctctatgagatcttcaccattgcaaggtctgggaatagatttgttcatatttgtctgaggcaccacctctcaaagttcatgtacattttatttaaatgttctattgccggaaatgtgatatttttaaaacaagtttgaccatttttgtttgaacctgttatgtgaaattgcaattcgtttttgttgtgtgcctcgttctaatcaagttagagcaaatccgctctaacctgcaatntgtgaaattataattatatgtaactgaattgaagacattataaagaattaccaatataattaaaaataattacttcaattcgctttaaccttcaattcatatttctctttcatttgctgaa

SEQ ID NO: 229313 - DNA, 448 bp, Glycine max
gtgtgtgatgctgcttaagctaagtgtgagatatgattgttgtattcaatagaagttgggaattaaaaggaaaaggtgatctaatgatgaatgctctcctacaacctaagttttgcatcctaaaaaaaccatgaattgtttgtagcccagccccattacaagccaagaaagtccttcagattcaatttgtgtgttgtactgacatgagatgaaatgcaaaagttaagacttgtgttggatgtggatctgaagaattaccttaaacgcttgtgcttatgagagaaacagtggtcgtgaggattaagttggatgaaccttccttgatacctgccttgcttgctagcttatttcatttgtgctgcttaatgaacatgttcatatcttcgaaatactgcatatctctgtgaagggctattggttgaagtattgttaatcacctctgttcatg

SEQ ID NO: 229314 - DNA, 456 bp, Glycine max
tataaagggagaatcttagacctagatgagtgagaagatctatatgaaggggcgaaaatacttagtactccctttggactgaaatatatatataaaaaaaactcattcaccctcaagataattagttaacataatttacatttgatagtttcaatacaaaagttaattcatttcctaaagaatcctttacattaattgcatatgacaaaaacagagagagaaggctatgggaaataaaactttaattaaataaagggtatttttgagatattaatagtatatagaaaagacttaattaaaatttgcttatattttagtccaatagatattttgttttgcttatattttaatctagagggaggtcgaatttgcataaataacaatgagaatactaaatttacgaataattaagtcgtcatgattaatttcctgaaatcccaacatatggacaggctc

SEQ ID NO: 229315 - DNA, 415 bp, Glycine max
  unsure (1)..(415): unsure at all n locations
ttgaattcactctacgcacacttaggggtacgtctatgtgttnttcacatcttcatctcattcctataccattagtgatctcatttctttgtgtaaagcgatttcaaccgattgtttgtgccgtaatctcaccttatcactgtaaaataaaatttcaattgatcgtttgtgccgtaatctctatttatcaatgtaaaataaagtttgaactgatcatttgcttcgcaagtcttcttttaatgagtttaaaagtaaataactaaaaccaaagttaaaatcaacacataaacaagcgtttattcatgaaaatcacttgaatccgttcaaaagttgaacgccttaacggtctcttttacttttatgagttaaaatgaacttttagaaagtttaaaattaaccctacgcgcaactctct

SEQ ID NO: 229316 - DNA, 57 bp, Glycine max
aaacaagattaagaaaaaaaaaaaaaagatcgagtgatcgtacctaaaacaaaaaaa

SEQ ID NO: 229317 - DNA, 466 bp, Glycine max
  unsure (1)..(466): unsure at all n locations
gtcccaagttttaagtacttcctcagaactgtcctaagctaagntcccaaagtcctattaacaacttccgtttgcccatcagtttgtgggtgacaagtggttgaaaataacaatttagtgcccaacttgctccacaaagtcctccaaaaatggcttaggaacttagagtccctatcactaacaatgctccttggcaaaccatggagtctcacaatctccttgaaaaacaaatcacgcacatgggaagcatcatcaacttttttacgtggaataaaatgagccattttagaaaacctatcaacaaccaaaaaaatggaatctctaccattgcttgtttttggcagccccaaaacacaatccatggataaatcaatccaaggatactccggaattgcaatggagatactatccatgaggcttacctatactatgcttttactacaatgaatgtcacaaattttgccat

SEQ ID NO: 229318 - DNA, 471 bp, Glycine max
  unsure (1)..(471): unsure at all n locations
ttaacgaaatgacaaccttcaagtgaggcagagtatgcctctatagaagagggttacaaatattaataaaagagacaacatcatttttatttacaaaccaatgttatctacacatttgacaacatcagttatcaaaaaccaatgtactagcaacatcttaaaaactgatgttaagtttctgctattaacatcagttttttgaaaattgatgttacgaagttccatttaattacaaaaatgccaccacaaataatttcacattagttcttcttgtaaccaatattaaattggtgatgttgattgcatattatgtagttgtgatatcatgtatcataactgaaaacaagtgctcaaagctaataaacaactgatttgtgaggacattttggtatttccactaaacaatctacgttatagtaattcaatgtatttagctcgcattatgtnttcattcactcactgtcacatacc

SEQ ID NO: 229319 - DNA, 447 bp, Glycine max
ttagggaacaacagatcatatggtactataaattattgttctatattcccgctatggacgaggacgtcctttacatggctagttaattatcctaaactatctgtgtcgctaatcttatcaaataatcataatctcgcataactcatacatctaatatgttgttgaaggcattatgatatgctttctctctctgacgctcgaagaatgcatgctttgcataatttagatatactcaaacccctatataattaatattccgatatgtcatgaatttacagttttacactgcgatgtatttatattttacttagtggctcagtacatttctacgatcgaagtagctgtcttgattcaataaagattttcttcaattacgatgtctcctttcaccaaattactcatctctgtatgaactactatctcactattcagctgcaacattcacct

SEQ ID NO: 229320 - DNA, 338 bp, Glycine max
  unsure (1)..(338): unsure at all n locations
tctacagataacttcacaaattatgagggcatgtttggatggaagagntcgacgataaagggaaaggagggtacacactctgctttatgtaagtactctcctattcgatcgttctattctcaaaaataacactctattgatatattatacttcaatttcccatcactccacattcatcctctataaacattaaataactacctcaatttcaaaaatgaacatacactctctcttcactttccatccaaacccctccataataaagttccttaaaagcctcacgcccacgagaatattctctcgttaacgatacaatcctcatccgataaagacgcctt

SEQ ID NO: 229321 - DNA, 471 bp, Glycine max
  unsure (1)..(471): unsure at all n locations
tcganagaagaaagaagactatgtcatgttcgtatttcgtttcaagctcctcaacgaaagggaggtctctactctctctctctcttcgctatttggtttccttcttcgattctatcattatttggcgtttttagcgttttgaagaataagcgtacctcgtatgcattgaatgcaagaatgatgttcaagatttcggcatcgaacagtctctgagcgaattgtcgcagttaactaacactgttggattattggttgtcggctctacttattgatctgagcttgagaattgttgggtaagtaaaggatgggtgcgggtatttccgggtcatgacatggaggagaaaaggcgagttcgcaggtagtatcattctcatccacgatgaatataaagaaacgtgcccgacaatgatgggaagtatctcatantgcatcacaactataacataagccttgctcatgtctcacagccat

SEQ ID NO: 229322 - DNA, 363 bp, Glycine max
  unsure (1)..(363): unsure at all n locations
taacacagggaccaaagaatagagacagaggttgatcattgtcccancnaccaagccgtgttaccttcttacgcttatcgcgacaaacggaacaagacgctctcatagatatcgggcaatgatctgaactaaatacaaacctaagatgtcacacctaaatcacacacgtcaacagtgaattattagtcacaccaaaaaaagagataactctaccggccaacccgccaaaccccaaataatgatatatcttcatatcatcagctgtcaaaatgccaccacacaaaacttaccactaacgcttcacttgactccaaaaacaaattgccgtaggtcacccactatggtaactgcgtcaccatctac

SEQ ID NO: 229323 - DNA, 201 bp, Glycine max
atctatataggaaaaaaaaatcgcaatgatcacggggagcacagcataggtcgggtgttggaagtggtcgacaaacattactttcgctagctctggccaaaaacattactcttgctagctctttattcctagcattgcatactattccttggcaatatttgcatatactctcccattcaactcaacttatccctgtcccac

SEQ ID NO: 229324 - DNA, 342 bp, Glycine max
  unsure (1)..(342): unsure at all n locations
cacactatngaaaactcacccntnagattacaatgcacacacatgcagacacacactcacttatttactcaaaacctcttggccgcgctcaaaacggtaaagaacatcaaagcgtacattcaccaacatcaattctcttcctatactccaaaagacaaagtactcaaaacaatgaacattcgatcctctctctcaagatacacggctccacattttgtctccttcaacaaaaatatcactcgcccaacacaaaactgcaaaaagtccagctccaatgaatgcatcaccaacggcgtgcttaaacaaacaactcactaatcctatgcactaagttacaatcca

SEQ ID NO: 229325 - DNA, 162 bp, Glycine max
acgcacttaaggatgagatgagcgctcaaaagagcggggtgtacacccgaacaaacaaccacccaccacttttctagcgaactacaaatctatcccccttgtttgaattatgtccctaaaaaagtgtactcaggatctgataatccatttctcctcttggat

SEQ ID NO: 229326 - DNA, 315 bp, Glycine max
gcaagtccactctccacactcacaaaacacacataaaaccaccatcccaaggtgcccacctccaactgagctcacgtagctccacgtagcccttaacctgattcctctcaacaccgggccccatccaaaccctccaagcttccataacatccaagcaaccaacatcaaacatctgaatatcagaacacagaaacagggcagagcggaaaacttgccaaaacacaaaccaataccacagcctctcttactcaaataccccaacaacattctcttcggccaaatcgtcaccagcggaccgaccgaaaaatcactgga

SEQ ID NO: 229327 - DNA, 307 bp, Glycine max
gacctccttgaaatccgcgcccacacccacaagacaatcaaccacgccttaaccgtcgggatctatgagaaaataatcggagggcgctaaaagcctccgcccgcgaaagcacctccaatacaagcatacgagcctctgctctcttgcagcccaagaaaaatgccatctcttcttctctctccctcccaaacccacttcaaaagggccaagaaccgcctccatcacccacatccaccattagccaccacaaacaatcattcgtcctcattgaaaacacacaccgagaggaacccttcaaccgaagctg

SEQ ID NO: 229328 - DNA, 432 bp, Glycine max
  unsure (1)..(432): unsure at all n locations
agataagtcacgacacaaactaagcgcgtcactcattgtttacccaacctaacgccantcactaccaatatgattacatatcatagcacgtcactgttaacgaaatgactcgagatgtttctttccaaaaacaaaacaaactatcttaaaacagacttagatttacactccgcacttgtgcgtctgcataccctaaagaatcgactttaacaaccaaaatcaccgtgaacgatacaaaaaatcactaaacaaccaagaatagcttcactacaaccatgaatacacaatccattatccaccaccacatcgtgcatcaactttccttatatcgctgacgcggcactataactgcactacactcaactattattaatctctcgttatccgcgctccaccccatctacactatgcggcatcggagaccccccactt

SEQ ID NO: 229329 - DNA, 364 bp, Glycine max
  unsure (1)..(364): unsure at all n locations
cgatcttaagcacctgagctgcagctttgatttatgtagaaatttttctgttttacgagtgaaatcatcaacaaaacttaggatgtacctcttgttgctgtttgattctggtttaatagtcccgcatatgtctgcatgcacaagttgtagcttgtttgatgctttctataaactcttcttaagcatagagtctctgtgntgctttccagttaaacattctatgcatatcttctttggaatcttgaccgaaggcaacccattaaccatcttcttatcaaaaagtgtcctcaatctgttgtacctaagtgaccaaaccggcaatgccaaagatgagattcattctctgatacaatttggaaacatg

SEQ ID NO: 229330 - DNA, 405 bp, Glycine max
cacaccaagagagacacactcatccaagacctatccctggcccataaggttcttgtaacactaattcacgcatcaacgaagaaataagctaactaacaacatacacataggatgatgaaggttgattaacacattatcaagtaatattaagactacttgcatcacctaatgggttgtcataatgcccaaccgtactttgcaaattatagagatggccagtctcataacttatgactcaacagtggatttatggtatatcagacactaccgatgcaaggcacatacaagcattattattaagtcctatttaattatgtaggaaaaaatactaataataatttaagcatgctcaacaaaagtactcataagttaccacacagaatgcacaccattatattggaagca

SEQ ID NO: 229331 - DNA, 369 bp, Glycine max
  unsure (1)..(369): unsure at all n locations
aagtaggtgctccttaaacctccattaatttttctgctataccttctcttccattggtgtttcttcatttttctccatgtatctcctcacatgtcttgctctaaatgctgttaacatgattctttagagtttccaccgattaaacttgctatagaagttagatttgattttctatggntcaaatctcttgttcttgttcttgaaccatgaatcgtgttgacgctagcgtcctttgagttctgtcttgttattttntgtggctgaaacctaaaccataaaattcttacacaaatattaaagtacaagaaaacctcaaaaatctacagtgacttgttcacctacttgtagtttgtcatagaagtcatgtct

SEQ ID NO: 229332 - DNA, 373 bp, Glycine max
  unsure (1)..(373): unsure at all n locations
agctngngctttcaatatcctgatgagggtgttttatatgttctcaagactggactaatacatttgctgcccaagtttcatggtcttgcaggtgaagatcctcataagcatcttaaggagttcgatattgtttgttccaccatgaagccccctgatggccaagaagatcatatctttctaaaggcttttcctcattctctggagggagtgacaaaagattggctatactaccttgctcccaggtctatttttagctgggatgaccttaagagggtgttcttggagaaattcttccctgcatctaggaccactaccatcagaaaagacatttcagacatcaggcaacttattggagaaagcttgtatgagtact

SEQ ID NO: 229333 - DNA, 442 bp, Glycine max
  unsure (1)..(442): unsure at all n locations
tgaaattgcattcgggcacatatttagaatctcctatgttgtctctacatatataaaacagtcccaccatcccaatttcgcanaatcatattcatatatcattgnggcatttcaccgagcacttcgggggcgcacgtctggacacaaattgcaagagaatggggacaatgtggcatgccccatcgcttcagaatacaacataggcctaatgccttctcacacaaaccctcaactcaacaaaacaagcatggattcagatgcgaatcgcttcacgcaatttgcaaaaaatgagcaactaaagcaccaaaacacatcaatggagagccaaataaccaagggaaaatgcacttacttgtggngagtgaattaaagcgtgaaaagggaaacaaaaactcaacaatggaagcttacgggctgctgttctcatagttcccgtgagctt

SEQ ID NO: 229334 - DNA, 409 bp, Glycine max
  unsure (1)..(409): unsure at all n locations
gcttcttagtttcagatgatgcagatggttttttatctacctcatgcactcctctaatgactatggcatcatttctggcactaaactgctgggagttggaggccatcttctcaattaaatttctggcttcagcaggagtcatgtctccaagggctccaccactggcagcatctatcatacgtctctccatattactgagtccttcataaatgtattggagaagaagttgttctgaaatctgatggtgggggcaactggcacatagtttcttaaatctctcccagtactcatacaggctctctccactgagttgtctaatacctgagatatccttcctgatggctgtggtcctggaagcagggaaaaatntttctaagaatactctcttaaggtcatcccagctcgtgat

SEQ ID NO: 229335 - DNA, 433 bp, Glycine max
actaagctatccggggaggtcatggtctacgggagttccttcttatctagttgcgtcaccgtcacacaaacgttgatgtgcttgatgggcttggggagggtgagaagcgcacagttgaggatgacgtacaaaggcctcctcgaggtcgccgaagatggagaagagagagcggagggcatcgatggtggtgtcccagccatggctgcggaggaagagcttgtgctgggagacatcgtggtccacgatggtgcgcagtggtggtgccccagccatggccgcggaggaagagcttgtgctgggagacatcatggtccacgatggtgcgcacagcagcaaggacatcgaggtggcacaccaccgcgtcctatacgatgtcaaggaactggtccggggtgaagcgctagatgagcttgccggcttcgaaggggagagc

SEQ ID NO: 229336 - DNA, 436 bp, Glycine max
  unsure (1)..(436): unsure at all n locations
agctttgagggtgcgtagcccagccatcttttattgtatagtatcggaaatgggtctaccatcacgattatcgtctcactttccatcattgggggtaccacctgngccgccagatccctccaccttttgggcctgttctttgaaagatccgtccccctttctgcacatgttctataggtgcatcctatccggaaccatatcaaaattgtactgatactgcctaacaaaggcaaccattatgtccttccaagaatggactcgggaaggttccaagttagtgtaccaggcaacagctaccccagtaagactttcttggaaggaatgtatcagcaattcctcatcttttgcgtattcgcccatcttctgacaatacatctttagatgcgtcttgcgacaagtagtcccctctgacttgtcacagtccaacaccttgaac

SEQ ID NO: 229337 - DNA, 438 bp, Glycine max
ggagatgaggaagtgtcgaagggtgaaactgcctgcttttatttcttaccacagagtggtacctggagatatgtcgaggcggatacgagaccttggggacgtcatgcggggtgctattgcccaaaaccaagcttgaccaatcccgacccaacccgggcataatcggtcagtgagaacctgcgatgtacctaagcaggcgatctcctggctggcaacagataataggaaaacaagaccacaaagcaaggaggcttgtggtggctggccagctgtgaattttgtgcaatatgtgagatatggcctctggtaatcgattaccaagggcgggtaatcgattacaaggcttatgaatgaagactggaggctaagatggtctctggtaatcgattaccagcggatgtaatcgattaccaggctttgaaacgaggtcacgaagct

SEQ ID NO: 229338 - DNA, 467 bp, Glycine max
  unsure (1)..(467): unsure at all n locations
agctntaagggacacatgtctccttaagtcatcaactctgactaatgactgtaaaggaataaataatacctgtaatatgcgcccaagtgctgcttggaacttctccaaaggaagattcacaatgtgaggaaaaatgggcattacctgtcaaaagaattgttaaaatatgtccaccaaatgaaaagcaataccattcaagaaaattagaaagcaaaagacaaagatatgcctaaagataaaaaggtcttgcataaaatccatcaatgaattcaatttttttcttgatataaataaattataattttaattgaaaaaaaaaacgcaacaaaattgacatccaattgaaagaaaaatagggagaacctcatcatgcgataggaatggtaatatcggaataagaacctctgcatcctgtatagaatcaaccagttattaaccataatcctaagtttcaatgtgaaactgat

SEQ ID NO: 229339 - DNA, 457 bp, Glycine max
  unsure (1)..(457): unsure at all n locations
aactaagcttatntaataagtggttgggattaactagcaacaacattcaattttttgtgggaacagcttaattatttctctcttcgatttaataaacaattggtacattcatatttatatgaaaaacagttaataaaagtctaatttacttatttagccaaacacttaataagagtctattgcatctgttccttttaaaaagtcttggaacgagattgcgtgcattgtgagctttagatatatgtttaagttttcaaaatcaattagtggtgtttaagatatttacaaccaaatgaatattaaaaaaaaaatcaaaactacatcagttcgagcgtaataaattttcatctaattctatccttaattattaatttaaaaagaaaattggatgagaaatagaatattgctactattataaaataataaaattgtatttctaattatcaaaatatattat

SEQ ID NO: 229340 - DNA, 426 bp, Glycine max
  unsure (1)..(426): unsure at all n locations
agctngaaccatgagcttagcgagaccaatcttcttatcgagatagcagtggcttagcgattgaggataagccagagagagttcttccacgccatcacgcgcccagcgtgtatgcagctcgctaagcgagatgattgtctcttctgcgctaagcgcgagattggcgctaagccaaatctcacttactcgcacttagcgtaagaatggcgctagccgtcccttcgtggatagaaagcccttttttaagcctgacttgcgaagaatgtggggaggtctgaatagacggcgaattgtgtgtagagaacagaggaaaaggtgagcaaggaagcaaaggccctaacttttacgtagattgtagggtaaagagtaagtcctaggtttttagaggtggaggaggaatccccattgctttgtaatctggtattt

SEQ ID NO: 229341 - DNA, 349 bp, Glycine max
  unsure (1)..(349): unsure at all n locations
aagctgtcgccagctcgccagggcagctgggacttgctgatatttttcttgagcgcacccnccaaattgattagttcactcccatcttcgtttccctcaaatcgaacatggaaatattatggtagctgtttggaagagcctccaccttgatttccttcttctttcttcctgttctcactaatttaaatgaaatatgcctgcccagcgagctagaccctttctctcaaccccctattgacattctaacaaaagagggaggggtgggagccattctccagctactggttgttcttcctgacaaaaaatgccaactttaatatggccctatggccaagctctaccccccatt

SEQ ID NO: 229342 - DNA, 435 bp, Glycine max
  unsure (1)..(435): unsure at all n locations
agcttgccaggttaaactctcagcatactttgttatatgtatnccatatagnncttcctttgcaaatagctacactaaactttggttgtgatgtgatatttattatctggtcagttatgtattctagatttggcttgtattataagtgctttccaaataaattgctgaatgtttatcatcgcgtaaatgatgttgtattaaaactctgtatatcggtgcggctaagttgcagttttaagatcctttttaattnttaatccgngattttgnttttttatctttatttttattctattggagccctatattttagaaattttttaattcagttacaattttcaatttttcaaatattaatttttattntttatattttaattaattaattatttctttatgctactctaaataaatatgtcacatctaagatttaat

SEQ ID NO: 229343 - DNA, 451 bp, Glycine max
  unsure (1)..(451): unsure at all n locations
tatgatcttcttatttgtattgataattcgagctttctttatttacaacacaaagcttagagcaacttaataaatttgtcgaaaatccatgtgatattaacaaactagtaatttttattcattattgtctcatgttgctggngcatgtcagcacgtgtatcaagcatggactaaaataggtctcgcctttttcatctcaaatttacttcgaattaattgtgtaattaacttttttatctgtgaaatcaatcaaaattaaaatttaacttttgtttatatatccgttaccaacttttgaaaaaattattatcacttaaatatactctaattttacattaattnttggttatatatccgctaccagcttttgaaaaatttattataattaaaaatatattttttcaatcaaaattacgcaccaaaaatacatacattaaaatctttctatata

SEQ ID NO: 229344 - DNA, 385 bp, Glycine max
agcttgaagagaaactacaacaaatgtgcttatattggaattggagggtccaaattgaagttcttttatggagaagataaaaaaaattgcaaagaaaaaatcagctttagccaaacagcttttggcataaactgaatttatacaaaagtgcaaaactgcaaagctgcaatatctctttaagcccaaaattttgacttaaataaaccctcgcttaagttgagatttttaggattgtataaatagatattcacgcctaattttaaggacacatgttcctcactttttaaaaacatctcctttattaaagttcttctccaactctcttcttccattgatcttccacctttcttgctttggatgctactcatggagatgggtagctagt

SEQ ID NO: 229345 - DNA, 457 bp, Glycine max
  unsure (1)..(457): unsure at all n locations
actaagcttggttctttccaccgtcgagcctaattaacaaattatttgctcttgaaaacctaaaaaatcaaataaattattcaataacaaaacacaaacatataaaagtcatgaaatataccttatcaatcatgaaattactagaaaaatcatattagttaggttgtgggtgcatatcaatgtcatcatcacccacattttcatcattatcatttcccgaaacaatatcattatgctcagctccaaataaaaggttgggttgataaaagaaaccttggcttcaaccattcatatttctncatcagttggtattataaccttatccaacataaaagtatttcaatccattgacctaaaaaatcaagaggtaaaaaattggttgttttttttaaacaaaaataaaattgtttgtgcacaattgaatccacaaatatgatntgtttatacaatgtgtaat

SEQ ID NO: 229346 - DNA, 408 bp, Glycine max
  unsure (1)..(408): unsure at all n locations
agcccagccctagaggggagggaccntttatgttttggacaggaccaataacaatgcgtataggttggacctcccacaagagtatggagtcagcaccacttttaacatttctgatttaactcctttcgccggtggagctgatatttaggacgaagaactaccagatgtgaggtcaaatcctcttccagggggaggggatgatgcaatcctccctacgaagggaccaatcactagaaccctgatcaagaggctccacgaagattgggctacagctgctgaagaaggccctaagggtctctcgaaccttagggaaaatttctgagcccatgggccaaggatgggtccaaatatctatcgtcatattagactaggatgtcattatatttggcccttgatctacgctccata

SEQ ID NO: 229347 - DNA, 87 bp, Glycine max
agatttcctcatatcacttaagaggaaggatcctacctgtagcgagacggatacagctagaatatatacagatctataagcaccctg

SEQ ID NO: 229348 - DNA, 492 bp, Glycine max
  unsure (1)..(492): unsure at all n locations
tccttagagtganctgaggcatgaagcttgaagcttatcttgatgagctcttctatctttaacaaaaacttgggggtctaagcgtgttaggatatgcacaagagaatacaatttaaataccttaagagagaagcaaaaacactcaattctatattggttcacttaatctgagctacatccagttctatttcacaatcatatgaaggattctactaatcaaaattcactcctagaaaatgataaatagaaaccaaaatgagcaaccaacaaaagtgggtgaccaatagagactaaaaatatcatttgttatttgcccaaatcagtgattgtattggcaatcaatggtttggtagcaacccgcatagttgctaatccaattgccatattgtttaaaatgtattctagaacacctaaagattgattaggtaactattacgctaattgggatagcgactgtttctaattcagtcattaatacttacgaataatgac

SEQ ID NO: 229349 - DNA, 414 bp, Glycine max
  unsure (1)..(414): unsure at all n locations
tcttatatgaatagtcaggtacagtatatataatggagatcttttctttgcatgcagnatacttcaagcagatnttggtactaataagtgtcctaacatttgttacttatggggatgataataatacgcaatgtataagtagagtattagagtatttgtatcattctcctatctattgaacagatttggctatattatttggggatgttttaaaaaaatgtatatatgagatgcttgtaatacttcttacaaagtaataaaactaaaaaatatatatctaatatttgttcatttaataataagattattagtaatatattacaggagatttattcaaacataaatatgcaaggttattattaggaattggaatttgcgtcccctgagaatgtctcctantgtatccaaatgatc

SEQ ID NO: 229350 - DNA, 298 bp, Glycine max
gaaatcccgacaagagtctaatgaagatgaactcaccttcatctcatgaaatatctctaagatgtggaagaacaaagggagatccacatacaagaacttctcaaaaatgttgttcagagaatagaaagacgaagacaaaagctccctaatatggtatgaatgcaacaaacctacacgctttaaatctaaacgccacaactagagaagtctcgggacatgaagaaatactactacgtccaacgaaaagaaaggtctctttaccacctacgaggatctataccacacattgtctaatgaa

SEQ ID NO: 229351 - DNA, 441 bp, Glycine max
  unsure (1)..(441): unsure at all n locations
actaagcttgccgtatagncagngatggacatatcgagttatttgctcatcgataacggttccagtttatacgtgatgcctaagagcactctggagaaattaccattcaatgcttcccacttaaagccgagttcaatggtggttcgtgccttcgacggcacccgccgagaggttatgggagagatcgatctctcagtacagataggccctccacctgtcagttactttccaaataatggatattaaccccccctaagctgtctgttggggtgtccctggatccactccatgggagatgttccctctacatttcaccaaaagttgaaattctattggaagggcatctggtcatcgtatcacgcgaggaagacatcttggtgagctgcccatcctctatgctttatgtggaagccgaagaggagtcattagaaaccgctttcc

SEQ ID NO: 229352 - DNA, 383 bp, Glycine max
agcttgcacagtaccctattggaggcatattcttatctaatatacaacccaatatcccactttcttttttgtttttttgaatctatttgattaaaaatactatgatgggtatgttcgatttttatatcattatggtattcaacaatccgaaaatttggtttatatcgaaggctttcttctaattaaaataaaaattgttaaacgtctttctagcatgaaaataaaaaacataaagcctgtgacactaaaagtacactacgcttttgatagatcaaatcaaattgtaaataccttcttttctatactactgtttctatatataatcgaatgattcaacaaacaaaaatgtgtatatggaattcacaataccacgttattaaaac

SEQ ID NO: 229353 - DNA, 359 bp, Glycine max
  unsure (1)..(359): unsure at all n locations
actaagcttacagactaattcagcgaaataggagtgcagagaagattttcctcatatggagatctccttgattagggctcaaattgaggagtctcaaaatgccaccatggaaaggttattgcatggtctcaatacggagatccaatacattgcacagttgcaccactatgcctctntggatgatcgcatttatcaagctatcaatgtggagcagcaattaaagaggaagcatatattcgagaagtccccctatggctcatcaaattggacagatatggatacattcaataagaaggaggactttccttttaatcttatgacaaaggtgatgcacttagtaaatataatcttaaccctac

SEQ ID NO: 229354 - DNA, 229 bp, Glycine max
cttaagtcacctgccgcatgcagcttgagcaacacaagataactaccttatttctacaagaggcacaagccagacaagctccagcctctctgatcgacgccatacccgaatcaaataaacattaaaatgtactaactaggaagtgatcctaggtcatttcccaatgagcaatgatacaccaaatgttcatgacagatacgaggaaaatagtaacgaatggggggggggg

SEQ ID NO: 229355 - DNA, 442 bp, Glycine max
ttggtcactccacccgaatcgagcctttaggttaaccattgcttgcacagctgataacctagtaaagcttttgcatccaacatacaatggcgtatgcgcatctgtttgaagagcatcgtaaatatctgcatgacattcccgaaagccctcttgcccaagatcacgtatcatgtctttcatgagatctccgctttgtacatcaaccggatgaggtggacatgttgctgtatgaccaaccaactcaccatgccatatccactttgtgtacgtcgggctaaagccatcacatatcagatgcgatctaatgtcatccaacgaatgacgcctcccgttgacacatttaacacaagggcagaaaaagttgccatctgtggttgctgaatgtatctcggcaaatgacaaaaactcttcaactccatgttcataagcttcgcttatgcga

SEQ ID NO: 229356 - DNA, 389 bp, Glycine max
  unsure (1)..(389): unsure at all n locations
agctnttgtcactccacccatatctgtctttgatattaaccagacttaaaactgccgacaacagcgtcaacgaattcttgcaccccggatacaaaggtttctttgaatcagtttgtaatgtatcatacataggggcatgtgcttgctgaaaagactcttgtccaaggtcacgaatcatatcctccaagcgatctcccatttctacatcaaacggttcggattgttgcccactctgcatgtctgtcatttcaccatgccatatccacgtcgtataattcctcttaattccatcacacaacagatgctctcgtatgtcatccagtatttgtcgtcttccattcaaacaattgatgcaaggacaataatattttccatcttcatccggttga

SEQ ID NO: 229357 - DNA, 375 bp, Glycine max
tgcaagtcattaagcactggttcctgcgtgcctccttcaaaagcattccataaagactaaattattacatgataaaaatcttcaacagcacatttctcttcctttcttttgggtcaccactccggttgatctttgaccatattaaatccaacatgataaaaagtaactcataaagatgatggcaacaattatgaaaaccaacttttatatgtgggccttcatcatcctgaggctgaggctgggtttccctcatcgtgcaaatacaatacacgaatttaataaaaatggatttcaagtgtagggtatccatcattgccacattaataaaatggatccaagtgtaggatcgataatgcgaattaatacaatgattca

SEQ ID NO: 229358 - DNA, 446 bp, Glycine max
  unsure (1)..(446): unsure at all n locations
agctntaaaccaaagcagtcagagtttatgttctaaaacccctcaatcaagcggattttcaaggtttgagaagtgaaaatgagaatggggtaaatttggagcaaactctcacctcacacaagtctataaccttaatctaaacttggtcaaactggttttacgcctaaaattccaccaaatcaaaatttgactcctcaacacccaacatttaccctagaaatggctcttgccttcactttggtcttttgtttttctctcttgcacaacccacgctttctcataagtcctaaatgacatttcaaactaggactaactcactttaacctccaatttctactgaatctagatttagccgttcaaaccctcagagcatcacacttttccactcataacactacattctcactgtctaacgctagaataactctacctttcatccctagcag

SEQ ID NO: 229359 - DNA, 337 bp, Glycine max
  unsure (1)..(337): unsure at all n locations
gacctaaaaatcagcttcttgaaaatccaacgacaggaggagcagatttctcacttctnnnaaagccaagctcacctccttgagataagaagctatagcttaactacacaccccctataacacgcaagcctacccccatgacaaaaaacatgaaaatacaaacaatgctcctactacaaagactaatcacaaagcctccgaataaaccgctacaaccctatactactagaatgtgcgaaatacacagcccaaacgaacgaaaaacctattctaatacttaccaagataagccggctcatacttagcccatgggctcgaaatgcaccctaaggctcat

SEQ ID NO: 229360 - DNA, 395 bp, Glycine max
  unsure (1)..(395): unsure at all n locations
agctnctatcaaggctgatcgaggtggtgtatctccttcctccatgcgcttattccttaatggatggcgcctcctctcacctactttcctttgtcttccgctgcatctccatggtggaaaatcaccattaaaggaccccattgaagctcaaagatccagcctccatagaagccccacaagcaagcttccatcaattgcacaaccagaagttcaagcccaaaccattacatatccaccatcattgattcagttgattcaaaataatttgtttcatggattaccaaatgaagacccatatgcacacttatgcatctacatagaaatatgcaatactatacggttggctacagtgcctgaagatgcaatccgattgagcttgttcttatttctctatc

SEQ ID NO: 229361 - DNA, 408 bp, Glycine max
tatgagacaataagctggaattttaaaaccatcaacataatggtctcaacaagaactaacaatatgtcaaattgcccatagttgagaatgatggagaagctgggatcaaagattatcaattggctattcaaattcacgttttttttaaaaaaaaattgtagttctctccatgaagtcgctgagtgactcttcctcgtcttgctgaatgtttgcaagtgccactacagtcaggtggtacaagcggcttgttgcatcttgggctccgaaacgtgtaatctgcattgcaaggagtctatcaagttcttcagtagataggtataccaatgaagtgctgctccccttggggttatcgggaatacctcggacatgatggcgcctcattcgcgaatggttcatctggtgaaaatg

SEQ ID NO: 229362 - DNA, 408 bp, Glycine max
  unsure (1)..(408): unsure at all n locations
agcttagaagagaaaagaagtttattattttactactnctaggaattgattcagaacatgttatgaactaaataaaatgcatgaatcagacccaaaattaaaatgacaggctaagaattgcaagaatacatgaacaaatgtatcaagaattcaattcataaaataaaaattgaacacaaacttagaacataatgtgacaattattatgactcaacatgactctaagacaacatgaatgaagcgattcacacttagatttttgtgttttcttttctaatcatcattttgcaacaaaattgagatttaaaggttcagaacaagacgatcatgagtgaaaagtgatagaacctaaaatcaacacaaaaacatgattcaagagttgatctataaaatcggaaccatacaaat

SEQ ID NO: 229363 - DNA, 400 bp, Glycine max
agcttcaccggatgacgccgatcgaacattttctatccgacgtcatgcaaatttcgttcagggattgaattgaaaactcgttaggcgacatctgtcgtgaagtagcgaccgatatttttcagccgacattgcacaattctttttaaaaaagctcgctggtcgataatggtctttttacggcagagtaagttttcttgttttggtgttgcataaaaaagttacaatgtacttcggctaggtttttcgtgcgagttcaaccgacattttgtttcggccaggaaaacattagcccacctctgcaaaaaaaatatttgctaaccgtcttcatgcatatttcattcaacgattgaatagaaaactcaatagccgacaacggtcgtgaaatagtcccgactgatat

SEQ ID NO: 229364 - DNA, 468 bp, Glycine max
  unsure (1)..(468): unsure at all n locations
ggacctataaaactcagcttacaagatgatgctgatcgaacttttcctcaccaacatcatgcaaatttcgntcacggattgaattgaaaacccaacagccgacatcggtcgtgaagtaagcccaactgatatttttcagcagacattgaacaattttttttgaaaaactctcgctggcagataatggtttttttaccgcacaggaagttctccttgtttggtgttgcataaaaaatttacaatttaggtcggataggtttttttgtgcgagctcaaccgacctttattttggcccgaaactggcatgttcccatttattcggccaggaaaacattagccaatcacagaataaaaaatattattcaccgatattgatcgaaaaacatgacagtcgaaattgcgcaggaaacattacagatcgacgtctatataagaagctccacaagatgatgctgatcgaacttttct

SEQ ID NO: 229365 - DNA, 440 bp, Glycine max
  unsure (1)..(440): unsure at all n locations
agcttgtagaatggctagacatgatacatgtcattgtttggnctggctcaaggataaaagggatgccccacattatttccatgacacaaatgcaaaaatgatgatttggaaactttatgcaaaactggtcatgcatgcacctatgcggacactcaagtgtcaaatttttatggtcatgtgatgctagggctcaggattcgtttcctctattttaatcaacccaatgtttccaaaatatgttcttttatcaatttgtgcattcatccgagtccatttcgggcgtccggggaaatttacagcattcacccttcaggtgtagacacattttccaaaaattggttatgatcaatgaactttttaaagaaaagtggaaatcgtctcttttacaagcatgctgttattagctagaaacctatttttcctttttctaccttttcctt

SEQ ID NO: 229366 - DNA, 460 bp, Glycine max
actcaagctgaggattatggggtacccatcacatgtggtattaggtggttgtcgggcgatggtgcacaacaaaatttccacatccacaaagcgcgcataaacccaccatcccctgttgcccacctccatctgagctcacgtacttccacgtagcccatattctcgttttttcaacaccgggtgcccatccattctcccaagcttccacaacatccaagcaaaacgacattcaaaccgcacaagctatcacagccaagcaaaacatagcataggcagaaaactctgccaaaacaccaaccaaatcacaacttttctcacttaaagaccccagtaacaattccttcgttctggttcattaaccgttggatcgactcgaacaatttactggaaggctctaatacttaatcctacattgtgacgcggggatctactagcaaacatgcagaactcattctgcact

SEQ ID NO: 229367 - DNA, 441 bp, Glycine max
  unsure (1)..(441): unsure at all n locations
agctttgagcaaaatctaatgacaagaactttttattctgatgnccgaacgggccccgtagtttatcgagtagctcgtaattgaaaaccgatgctcgtagaatattcatacaacaataactttttactccgatgtccgattgtgtcccgtagtatatcacgaccctctgaaatcagaaaagaaactctgagaaaaatcaaacgatcataacttttaactcggatgtccgatttagtgccgtgatatatcgagatgctcaaaattgaaaacagaacctctcatcaaattctaacgacaagaaccttntactcggatgtgcgattgtgtcccgaatatatcgagacgctcgaaattcataatataagctctgagcaaaaccgacgactatactctttantcgatgtgcgattcggctcgtatatattgactgctccaattgat

SEQ ID NO: 229368 - DNA, 438 bp, Glycine max
  unsure (1)..(438): unsure at all n locations
tatnngattgtcattaactgaaccctgaacttaaataattatctnctgataccttgcttagattctaggatagcatatggttcaaggcaaatttactctaaatntgggggaggaaagtcaattacaatgacaagaaaaaggttaaacatcagcacacacaacatataagtcgtatgttaaaaaaaagacaaagacaatcagttgccctgntacaaaaaggtcgaaagcaacctatgaaaatggaccactgagaaggctatttgtacaccacaagagaagatcatcgggattagcctaggattcgtgctctcttagaatctaagcctttgaatcctagaaaaaccaatgaatttctggagcgaaacctcactacaagcctgagaaagtccttctgatcctgtttatacatttctaactcgatggcctgtgatgaaatgc

SEQ ID NO: 229369 - DNA, 464 bp, Glycine max
agcttggagaggatgctctcaagtggaggatttttttatggagagaaagagagaggggggagcacgaaattgaagaaagaaaaaagggagagaagtggaactttgagttgtgtctcacaacactctcattcatcaaagttacaacaagtgttacacacgcttctatttatagactaggtagcttccttgagaagctttcttgagaaaacttccttgagaagctagagcttagctacacacacccctctcataacttagctcacctccttgagaagcttccttaacaagattcctaaagaagctagagcttagagacacatacctctctaatagctaagctcacctccttgagatgagaagctagagcttatctacacacccctataatagctaagctcacctctaagaacaaatacatgagacataaataaaattcctactacacagactactcaaaatacctc

SEQ ID NO: 229370 - DNA, 391 bp, Glycine max
  unsure (1)..(391): unsure at all n locations
gcttggttatctgcttcttcactacatcaagaatgaccgggttgagtcttctctcgggctgacttactggattagctccattctcntaaattattcgatgcattcatgtggatgggctaataccaagaatgtccgccanggtccaacctatagccttcttatgcttcttgagaactgacaacaacttctcctcttgctcatcagcaagggaggcagatataatgactggaaaactttgctatcatccaagtaagcgtattttaaatttgatggcagaggcttcaattctggtgtggtcggctggaccgtggtaaaaggcgatggtttttcacctttacctataaacaaatcacaggatgtgtacttctgaacatggttagcctatctgatc

SEQ ID NO: 229371 - DNA, 448 bp, Glycine max
  unsure (1)..(448): unsure at all n locations
agctncatcctcagatccgtctcgtgtactagatttagtttaaacagcttacgaaattttagactaatttagcctaagctttatcctcagatccctcttgttggactagacttacaccaaacaacattattgtaatagcatacttaaaaccaaaactttatccgcagatccctcttgtaagactaagtttcaattctgcttcattcaagttataaggaaacaatacatttcccaatgctaaagtcacctaactaggcacacaaatggttgatcagaccaagagcatacaaaatttaagcattgaaagaagcattgaacacaagaaacacaatcaattagatattaaaatatttacatcagctgttctttagaaatccccaacaagggtgtttagccatccattacagaagacaccntaacaataatgagcttacaaaacctacgtatc

SEQ ID NO: 229372 - DNA, 314 bp, Glycine max
  unsure (1)..(314): unsure at all n locations
agagagaatctcgatgttcaatataacctactacatgatgtaaccgattcgtcatgggaaacgcaacatgtatactcaaatacgctctgaagaatctcaccatatattcttgcacttacaactaccgagttgagtgagatgacatctgctttaaaccttaatatatcttaattcggtaaaataatagtctttgtgggaggcgtccacatatccatcgcatgtaaaatatgcaatggctatacgtatagcatacttggcgcattgacatatggggattctgacccggactcanacttttcacctgttattggtat

SEQ ID NO: 229373 - DNA, 401 bp, Glycine max
  unsure (1)..(401): unsure at all n locations
agctttcaaacaataagagaatatttatggtctatcataggctaagattcacgattntttttattattattattattacaagagctcctgtggctgtgttgttttgaatcatccttaacatggttttttgaacaagtttaaaataatgcgtcctaactccttatttgattgaatttttgcttatgtgcatataacctcatgcattctgaatgtgtaagctttttgtgcaaatgctttgcctatctctatctgaaagaaattatacaaaaaccaggtagatataatttgtcaaaatgatctttcatatgttatgggtaatatgccctgataattacagatctcacctgaggatataaaatgggaaggtgaagatcctggcattctccatagaggtggacatg

SEQ ID NO: 229374 - DNA, 446 bp, Glycine max
tagtgcgtgacgacatggcacctagcgcaagggttgtgtttatcggatcgacaaccaaaacaaattttctaagtcttttctatacatcctttcacatgagcttaaaaacccccttgttcactactaaacaagccgtctaatcaatcataaccaccagcaattatcctaactacctgcacgagataacaatgataaagagacaacggacagaaaactcgggttgcctcctaataagcgctcttttaacgccactaccttgacgcattatcctgctatccacggtccaacaaggttacaacttccagaacctttctctctaggctccttccctttatcaccattaccatcaaacaaacacttttgtcaggcaaaactttctcttcatgaaacatatcacaactgatctactggtcttctatggccatttgtaatttcctctttcccat

SEQ ID NO: 229375 - DNA, 260 bp, Glycine max
agctcgtaaatcaatcaaatgttagatacattgatggggtaatatagggaaaaagtatagcacaagctaggtcttgctctaatcgattaagccaatattgaagagcttcttcatcgccactatataccatactaacatatagtctttccattacaaggccttctcttgctctggcacactgataataccatatgttacctttgggcttgtgctaaccaaggcgcaccatactatacccctactttatgcggatctcatct

SEQ ID NO: 229376 - DNA, 381 bp, Glycine max
  unsure (1)..(381): unsure at all n locations
agctntggggctggagaactatataactgttccttngttctagtttaggccctctcttctctctctcctattttcgttttttagttttaggcttttcttggagacatctttttgttttacaattccagtagcaataaaatttcgttcttcaatttataagttcgttctctattgattaatggaaggctaagtcccaagcgttgctttctcttgaggatcaagcacagttctctttgaggttctattattactgttacattctgttcagttttttctcttcactaattactctgaatttgttgtttttaattcatgcatgcttagtgcttgattaattatctctgtgcttaatctacgctcatgcttaatgatcacttatga

SEQ ID NO: 229377 - DNA, 357 bp, Glycine max
  unsure (1)..(357): unsure at all n locations
cgaaatgaggaagtgtagaagggtgagactgtctgcttttattctttgaccacagagtggtacctggagatatgtcgcggcggttatgagaccttggggacgtcagggggggtgctattgcccaaaaccaagcttgaccaatcccgacccaacccgggcatagtcagtcagtgagaacctatgatgtacctaagtagacgagctcctgacagtccacagataaaaggaacaaagaccacaaagcaaggaggctcgtgtggtggctggccanctgtgaactctgagtgatatatgggatatggcctctggtaatcgattaccaccggcgggtaatcgattacaaggcttaatagtgaa

SEQ ID NO: 229378 - DNA, 438 bp, Glycine max
  unsure (1)..(438): unsure at all n locations
agctttgtgtgatcgattaccatatctttgttatcgattaccagngattggttttgaacaaaaatcaaaagatgtaattcttccaatggttctcaagtttttctaaaggttataactcttctaatggttttcttgaccagacatgaagagtctataaaagcaagtccttaacttgcatttttaagtacaatcattacaatcctttacaacctttgaatctctttgagcatcttcttaaatttcttcttcttcttcctttgccaaaagctttctaaagttttctggtttttccaaaccttgaaaacaaaagtgtgctattcatttttctttctcttctccctttgccaaaaagaattcgccaaggactaaccgcctaaattctttttgtatctctcttctcgcttttccaaaagaacgaaggactaaccgcctgaattc

SEQ ID NO: 229379 - DNA, 449 bp, Glycine max
agcttcgatgccaccactgcctatttgggatattgttggtggtgattttgagtgtgtttctactttggaggtaggttactgctaaatacttttttattttttattttaatttggatgtgtatcatttgatcactattatttacttttgagatatgtgtggtttttttactatagggacatgaaaatgaagtgaagtgtgtgtcttggaacgcggctgggacgttgcttgcaacttgtagtagagataagtctgtttggatatgggaagtgctgcccgggaatgagtttgagtgtgtgtcagtgctgcaaggacacacgcaggatgtgaaaatggtgaagtggcatcccacagaggatatcttgttttcatgttgctacgataataggggtaaggtattgttgccaatgctaaaagagtatctcccttcttaatttcatcttttggtcat

SEQ ID NO: 229380 - DNA, 433 bp, Glycine max
  unsure (1)..(433): unsure at all n locations
tgctctacannacatcgatggtgggaggtatgggaggttgttatacgccannctcgctctaagagcagagtcccactggtaaaattaactttctaaatgtctgccttcgcacgaatcggcccgaggaatcttgcctcaaagaggttcacgaaggacaaggcggtcgaaggaactacttccgctcccgagtacgacagttaccgctttaagagcgctgtacaccaacaactgcttctaagccatcaagggatggtcgtcttcttcgggagcgacgcgtccacctcagggacgacgagtatactgattctcacgaggaaatacggcgccggcggtgggcaccactggttacatctatggccaagtctgatccacaaatagtccttgagttttatgccaatgcttggcaacataggagggcgtgcgttacatgacg

SEQ ID NO: 229381 - DNA, 454 bp, Glycine max
agcttctaaacaagcttgaaatataaaactttatctatcaacaactttaacactccccctcaagctgtagcatataaattgtgtggttccaagcttggaacatataaagtggatccgaggaactctcaaggacttggtcaagatgtctataagctggttgttggagttaataaatttagtactaatttctttggactgcagctttttccgaacaaaatgacaatcaatctctatatgttgtgttcttttgcgaaatacaggattagaggtgatgtgaagagctgcctgattatcacaatacaactttatttgctgaacatcacaaaattgtaattattgaagttgtttaatccacaacaattcacaagtaacaagagccatagctctatattctgctttcgcacttgatcaagcaaaaacactctgtttcttgctttttcaagagacaatattt

SEQ ID NO: 229382 - DNA, 459 bp, Glycine max
  unsure (1)..(459): unsure at all n locations
agcttgcacttgataaagaggaagctagtatatttttctttccggaaccacataaaataaaatcattattcatatgacaaaagntaacaaatatcttatatctatataataaaattatgggacgttctttttaaaggtattatatatcttatcaagaatcacattcttccaaatattattatgactggaaagattattcctgagcatatttaactacatgtttggttacattctgatctttctaacaataattttttaacatcaaaaataattgaataaaaaaaattaaaaataaaagttacaaagatgttaaaaaataacttgtagcatttccgtggaaatatcactttcccaacgcctctgcatgagaatggaaatctaatanaaaatataggaaaaatagaagctacaacatccacaaagaatacataatattgcgaaataataaacatgagctca

SEQ ID NO: 229383 - DNA, 342 bp, Glycine max
  unsure (1)..(342): unsure at all n locations
cgcctcatatagcatatgcatctacaatcagcgactgtgtggagatgatgtaccacaaccncgaanacaagcataaagcgataccatgattncgcatatgccgtgcccctcatcctctagctcgcacctcacaaaatggacaatcaacggctctaccttcctagactaaaatctgaccctcacgcttcccttcctccccttggcaacactcaaacaagccaaaacacgacgcggagaacaagaacaaattcccaaagcaagtaacctntaacttcatccacaaacttcactcaaccacaacatatgtcaagcaaattctaagccacagcaaacctaaatatc

SEQ ID NO: 229384 - DNA, 406 bp, Glycine max
agctggtttcccctcagtgtggcctgatattatatagtagggggggtgggggtcacacacacaccaaacaaccagatcacgtcgtttcattacaataatcaatcttttccctctttctcatcattcccactattcttcacattcacttctcttctcttctcattcacttctcttctcttgtcgggaacaaacatatagcaaacacacacacccacacaaaagcacagttccatccattggactggctcaattcttttaattccccccaaaaaatgagccagtgtgttcctagttgggatgtcgaagacaacccaccaccctcaagagtctctcttcggtccaacatcaattcaactgcccctgatgtcccatgttagtcctctatcttctcttctatgatcctaca

SEQ ID NO: 229385 - DNA, 311 bp, Glycine max
  unsure (1)..(311): unsure at all n locations
actgaattttctaagcatctggaaataaattatacaaaaagaaacacgtgatctggataaaattaaaaaatactaacaatcacacacgttggcagaaaaatcagtatccaggaaaaataagtgaaagggaagtgtgcttgttcttttggttcaaaatctattctataattggcgcctatgatatatcaatcttagttctgaaaattcatttaaaaaatactgtgaaaacaaagttcaaagctagagcgttgttgagtctttcttctataggacttntactatactctagagccattctaaggttctctttg

SEQ ID NO: 229386 - DNA, 431 bp, Glycine max
  unsure (1)..(431): unsure at all n locations
agnctggggagcggcgcgggcctttattctgttcgctcaacaccacgcccattccgggccggtctgggaagccatgcacgcttctgcggtgcaaccagctgtcgccccaggacgagcaccgggccttcacaccggaggaggacgagaccattattcgggcccatgcccggtttgcgaacaagtgggccaccattgcgcgcgtcctctcgggccgcaccgataacgccactaagaatcactggaactcaaccctaaaacgcacgtgcgcgtccttcatgatggcgggtgatgaagccgtcgccgtgagtccgaggccgctcacgcgatccttcagcgccggcgcggcggtgcctcctccagcaagcccctccggatccgattcaacgagtccagcgctccggcgtggctcggctctcttcgcactgttacct

SEQ ID NO: 229387 - DNA, 459 bp, Glycine max
  unsure (1)..(459): unsure at all n locations
agcttgntcagaaacgtgcatttgcgtgcttatatcatttcccggtacaccacaacaaaatggtgtatcagaaaggcgaaatacaactttaatggatatggttaggagcatgttaatcaattagactttatccgtatccttgtggatatataccttgaaaactgccatgtagttgttgaacagggttcctagtaaggtaattccaaagacaccttttgaactgtggacaaataggatacctactataaggaacctgcatgtttggggttgccaggcagaaataaggatttataatccgcaagaaagaaaattggatgcaagaacaatcaatggatatttcattggttatccagaacagttaaaagggtatatattctattgttataatcatagtatgagaattgtcaaaactggaaatgcaaggttcattggaaatgatgaaatcagtgggagtacagt

SEQ ID NO: 229388 - DNA, 456 bp, Glycine max
tattaactactgattcgactgtaatttgttaagtagaataattttaagagcttaaaatgtaaaattaagagtggagaaaataatttatttttgtattaagcaaattaaattatgattcctcaatgcagcccacatgtgtgtcggtgcatgattaagtatgatcagcacagttacacatgacgcaataataatatgataatcgaaccatttaagaaggcggtcaaattatttgttgcagcactaatcaagcacaagtttaatgaccatctcttaaacatgtaatagcttcattgattaatttgtgttcatgattcctttaaaaaaatgattgagtcctggaaaggtcaataattatggggaaagttggtgaattaaaatattgcgtgaatacataaacaattacggcgaaggaagaaacaatcgcaacaagaaagatataattgcctatgtctttgc

SEQ ID NO: 229389 - DNA, 312 bp, Glycine max
  unsure (1)..(312): unsure at all n locations
aatatggcaattttgcattatttctccnctcatattggctcctaggagtgttcttaagtggaacagaaatagtacgcaaattgtatattgacatggaaacttaactgttnttgccgccgtttatctggtcctacaatgtctgaacccatttgttcggatagatcatagactaatgctgttgggtgtcatgcattactatatgtccagtttcgttgtttttctacaagatattttcacttcgtgttactgatgcactgaagaattaatgattgaataaaactaatgagaacaacaatgtatctcattgactgt

SEQ ID NO: 229390 - DNA, 247 bp, Glycine max
aaaaccagcttaaaatgctcacacctgagccgcaggctgttattatcctacagcctccatcttcaaataatctaaactcgccagccatctaccagttgagataatatctagcatgctgcacaaacaatctgccttcaacatgtgtaactataagcttttaacaaaagatatcctctcctcacaatgtggagtcatcctcttcaggcccctacttgagaaaatatcacacactgctcgctgcaaagct

SEQ ID NO: 229391 - DNA, 430 bp, Glycine max
agcttttgcaactagagactcgacttaatgttttatctttgtccgagtttctggcagaacttgtagcagtattttctgtcccaagatctagagattggcctctacaatggttagcgtcaggaaaacttggatttgtgcttaaaagagcactatttatacttgaaagagcttggaatcgttgtgttgttagcgaagaggattgtaaaccatcatatgatgaaacagaggcagattctgtaagcataaaaaacgactataattatactcagcatggtagtagattttgatgttttccatgatgcaacacaggctagaattttcagagaaaagggtaacagatctttgaaaccaggcatacaacacagttacctttattaggaatccaagtgagtaatatgaacattatacctcatagtagaactcataaata

SEQ ID NO: 229392 - DNA, 458 bp, Glycine max
  unsure (1)..(458): unsure at all n locations
nttcattntctctggaacaagcgaacttacaatattgttttacatatcatgcgccgaaaaaatttatacacagcgacagggtcattccatagagttggacttctcaaaagcttgaactccttgcttttttaattaacatcaagtatagaattgtccactaactttttttttcagtagtgttttggagatatgccatccaacttgaggggcatattacagttagctgacacttgataaatgaacaattctgtctagtgtattaacatattaatacagagtttgttaattcttagatagttctctgttcagttagttatatgttaataactgttttgacagctgttctgttaaaagagaatttgataaatgaattttgtattaattattgaaatcaatcgtacaatggttttcctttgcttaggacaacaagtacacatatgaacaagtgtattttgaca

SEQ ID NO: 229393 - DNA, 441 bp, Glycine max
  unsure (1)..(441): unsure at all n locations
ttaagcaccgcagctgcagcttaagcttaaagagacagctttgtgtattttntaagcaaaaagaccaaatatgtaagtaaaaaggccccgacccacaaataactctcttatttaaaataaaataagtctattttgaattttttgtttaggcctcgcttactattggactggtcttgtaagaaacaagtgggngtatgttactaaacctcacatatataattgacctaaatatttttggtcctttaaaatttacaagttttgctttaggtccctgataaatctttcctacgcttttggtccttgaatttctctttctattttgcatttggcatatgtcactatgctaacttgaaacataagaatttgatgggaaacatgacggaggttatgatataaacaaattcacggactaaaagaaaaatctaaaatatgtacggataa

SEQ ID NO: 229394 - DNA, 232 bp, Glycine max
  unsure (1)..(232): unsure at all n locations
nngaacaatatactnggccttnatttaattgagtgtgtgtttgtttgncacgctcaacaaagnactttcgacacctactgcacgttgatctcaccaatgccgttatgggaatgttgcgaccaccctttacaaccttattgatacattctgacaagttcgtctgcatgtggccatatcgacgtccttctctatcggaagccaccgtccttttttctttgagatgcgaccactc

SEQ ID NO: 229395 - DNA, 399 bp, Glycine max
  unsure (1)..(399): unsure at all n locations
ttaagtnacctgccgcatgcaagctngctctaaatgacattgacgggngtatttatgggaggaggctgtatgccatctatgttttaagagtagtgtcccactggtaaaactaactttccaaatatttgccttcgcaggacatggccccgaggaagcttgcctcaaagaggtccaggaaggacaaggcagccgaaggaactagttccgctccggagtatgacagtcaccgctttaggagcgctcgacaccagcagcgctttgaggccatcaagggatggtcgtttctccgggagcgacgcgttcatcttagggacgacgagtatactgatttccaggaggaaatatggcgcccgcgcggggcatcactggttactcccatggccaagattgatctagaaa

SEQ ID NO: 229396 - DNA, 423 bp, Glycine max
  unsure (1)..(423): unsure at all n locations
ttgagaaactncttgagagcgagagggggcgtcacttttccatctaanaactaagctcacctccttgagaagcttccttgagaagctagagcttagctacacacccctataatagctaagctcacccccgtgacagaaaaacatgaaaatacagaaaaaaatcctactacaaagactactcaaaatgccctgaaatacaaggctaacaccatatactactagaatggccaaaatacacggcttaaaagaagaagacaacctattctactatttacaaagaagagtagacccaaccttgggccatgggctcataaactaccctaacgttcatgagaaccctaacgccttctttatcaactctagcccaatcatnttggagtctcttggtcatggctctggcaaatggcctttcctagggaggat

SEQ ID NO: 229397 - DNA, 439 bp, Glycine max
  unsure (1)..(439): unsure at all n locations
agcttatgctgcaaacatctacaatagatcnctctaacctcagtagcaaaatcagccacaacagaacaattatgacctctccagcaataggttcaatcccgggtggaggaatcatnccaaccttagatggtcgaatccttcacaacagcagcaacaacaacaacaaccttattttcaaaatgctactggcccaagcagaccatacgttcctccaccaatccagctccntcaatatcacctaccctataaacagcaaaaagttgaggctcctccgcaaccttcccttgaagaacttgtgaggcaaatgactatgcaaaacatgcagtttcaacaagagaccacagcctccattcagagcttaactaatcagataggacaattccctacacagttaaatcaacaatactcctagaattctgatagatacattctcaatctg

SEQ ID NO: 229398 - DNA, 348 bp, Glycine max
  unsure (1)..(348): unsure at all n locations
tagcgcagnagctaagcttagccgaagtcgacatttcttatataccgaagagagntggagcttagtgcagcatggcgcgcttagctcaccctcatcagaatgacactcaggcttagcgcacagggcgcgcttagcctaaatacaaaaacttaaaagacagtgagagagttgagcttactgcaacagggcacttagctcatcacataacaagggcttagtgcacaaacacgcctagccttaatcaaaggaaaacttacaaaagcaaagtggcgcttaccctgacatgttaggcttagcgctgaatgttcgcttccgacaagtgcaccgaatcgcgcaagtagtataaaa

SEQ ID NO: 229399 - DNA, 429 bp, Glycine max
  unsure (1)..(429): unsure at all n locations
taagcacctgcagctgcagctgaataaggagcagggttgttgtttcccagagncgacatgtccaatgacgacaatgttgatgtgaaccttttccttacccatgattacttaaactagaatcaattcaaagaaatacaagtcagaactcacaatacatataaattaaactatcacaaagccaaataagaaggtaaaggtatactccaacttcacacatttatagtttaccaataacaaaatttcaacttcatattacaaaagcttcacaaggaatcaaaaaatcgcctttgctggatccagatatggtcgcatacatagtaaaagattaagcttgataacatgtgaacaaacccacaaaaaaactatcgacggttacatatctacaagacttcttcaacatgcttaagagaactttaatcctgtcaaaac

SEQ ID NO: 229400 - DNA, 470 bp, Glycine max
  unsure (1)..(470): unsure at all n locations
tcacttgcttggggatgcaatacacttcggcttcatttttatcagctatcacgaacgccgtaccttctgtaacctttgtgctagcagtaattctcacgtgacattcaattctctttttaaagcagaatatatgatactttaattactaactaaatctcaagagacaatagcaagtaatattcccaacatcacatgcatggcttttcattttgtacaaagggtggcggtaccttgtacccttctaaaatgttctcattctggcatgtatgcatgctttttcttttacgtctaaacatcacatcccttatctttcagctctatctctattatttgttaattatcttgacactttctcttacgccagcgctacacaaagaaactaanattagtaacggaagtaattatatgtaatntaaaaatcacaaaatctaatctttttgtgatcctgctactaatgatgaaaaatcaat

SEQ ID NO: 229401 - DNA, 458 bp, Glycine max
  unsure (1)..(458): unsure at all n locations
agcttttgtagtagtacgtcttcattataatttatatctacaaagncacaatgacatgaaaacactgcagctaacttagcaaatattcagtaactntggtcatacctttaactagttgcaggaagaaacacccttattagtgagttctttgtaaccttttttctacaggtagggcatttagcctgtgcagatatagcagccctgatgcaattcttgcaaaaaatatgaccacaccttgttgacatttcttcaaccaaaggggacatacatattgggcaattaaaaacaggctccttaggagcttcacgctccttgggaggttcaggtgtcttcttagcattttcactctgcaaaaggaaaaagtgtcagcaatttgaactcaagcaaatgtctgcaatcaactgcaagttctttatatgtctgatgcagtggcaaaacatcaatgactgataaaattt

SEQ ID NO: 229402 - DNA, 448 bp, Glycine max
  unsure (1)..(448): unsure at all n locations
taaacagaatatgaacatagaactgtagatcttcccagttgaacaagctcccacctactagggtagatatatcatatatgtagccttacccttacaagtggaaactgtttccatgatttcgaacctgtgacctctccggctcacaaggcagnaacctgacctgattgttgtgccaagaatcaccctcatagaactatgagtaaagatttattccttcatttcagccatgtagtgtgcaagagtttctattctgacagcaatatatcttgccattatattcacaaagaaggtacatgaaatctctgttcttctacacacacacacacacaatgttccaccggtttagagaagccaactgactctctctcacacaaaggtgctggcagctaacaataacttgttacttgtatgattcaagccattccacatacatcaaaatatgccatgc

SEQ ID NO: 229403 - DNA, 428 bp, Glycine max
  unsure (1)..(428): unsure at all n locations
agcttgggagcggacgggcccatttctgttctctcatcaccaggtccattccgggccggtctgggaagtcatgcaggcttctgtggtgcaaccagctgtcgccccaggtcgagcaccgggccttcacaccggaagaggacgagaccattattcgggcccatgcccggtttggtaacaagtgggccaccattgcgcgcctcctctcgggccgcaccgataacgccatcaagaatcactggaactcaaccctaaaacgcaagtgcgcgtccttcatgatggcgggtgatgaacccgtcgccgtgagtccgaggccgctcaagcgatccttcagcgccggcgcggcggtgcctcctcccggaagcccntccggatccgatttcagcgagtccagcgctccccgcggtggctctgtctctccttcgcacgtg

SEQ ID NO: 229404 - DNA, 338 bp, Glycine max
  unsure (1)..(338): unsure at all n locations
tgaggaangcagngcttattctatggaaaatctattggttggtgaccttgactggataattaacacccccaagcataaaaatacatagtctttagctagggcaacaaaactcatagagctagacatacatattataccaacggcgtattctgattttgcgacgtttgctgagatacttgcaggaataaatacagttaaagatctatttggttaatatgaatcttattgaaaagttctactttatactatgtcgttattcaaatgttgacttacttgttgaattttatactaattaccgatatcatgggttaggtggttagaactctggatcaaaagac

SEQ ID NO: 229405 - DNA, 335 bp, Glycine max
actgagcatcagcttgcaaaggcactgacaattgtttcttgctacctctctaaagacacaattattccttcgaaaaggcatacctccaggcctttggtacgctctgtactcaaagatgtactatcatatatgaagcacctcccccctcacctaatagtgagaccattggctgtccaacagccttttcccttccaatccttgtaagctgttcccactattaagcaaggaccccccaccccagttatacacctctcgggaccaatcaaggtacactaccatgatatatcacttttattgatccacagcccctactacccctccagatgctgggaaag

SEQ ID NO: 229406 - DNA, 386 bp, Glycine max
aaaactcaactctcgcaccttgcaatcgctaaaaaggagagaaagatgttgtcgttgataaacagatgactcaacaacacacttttgatgatgtatataatgcatatgaggcgggcttcaaccattgcctttggcacgcgatgcacttgcgtgaagtctctgacccaactcgtgctgacatcaacaaacatgcctaccctgcggggttgatgacgattaacaacattctaaaggatgctgcccctaatgccaagaggctgatgacctcaacgaacgacttacatactaaaggcgttggggctaacgatgaaaaacatgtaacgcctatacgcactgagttctttaggttacaagcacaacttctttgagtatctcttttgtaaaca

SEQ ID NO: 229407 - DNA, 399 bp, Glycine max
caagctgctctaaaattacattgatgtttgtatttatggtaggaggctgtatgtcatttttgttttaagagtagtgtcccactggtaaaactaactttccaaatgtttgccttcgtaggaaatggccccgaggaagcttgcctcacagaggtccagcaaggacaaggcacccgaaggaactagttccgctccggagtatgatagtcaccgctttaggagtgctgtacaccagcagcgcttcgaggccatcaagggatggtcgtttctccgggagcaacgcgtccagctcagggacgacgagtatactgatttccaggaggaaatagggcgccggcggtgggcatcactggctactcccatggccaagtttgatccagaaatagtccttgagttttatgc

SEQ ID NO: 229408 - DNA, 396 bp, Glycine max
agtgcctgtatattgatgcgcctgaatcggacatgcgagtgaaaagttatgaccatttgaatttctcgagagcttcctatgtttaagtttgagcgtctcgatatattatacgcctgaatcgaacctcagtgtaaaaagttatgaccatttgaatttctgtagagcatccgttgttcattttcgagcgtctctatatgtgatgaaccttaatcggacctccgtgtgaaaagttatgaccatttgaatttctcgagaagcttcgttgttcaatttcgagcgtctcgacatattatgcgcccgaatcggacatccatgggaaaagctatgactatttgaatttctcgagagcttccgttgttcaatttcgagcgtctgtatatattatgcgctcgaatc

SEQ ID NO: 229409 - DNA, 362 bp, Glycine max
  unsure (1)..(362): unsure at all n locations
tacaacatagaacataaaaccatgattgcttagacaaacatctttatacacatcacctcggcttgttagaaagacccaacacctttacctactgctgtcaatcttacttacttgcatttttactgctcttagcctacacttagtttaattatgttctaaatcatcaattatcaatgtgtctttcaacaatgcttatttctaaatctaacactatctaacactagttccctgagttcgatactcggatccacctgtgttaaatcntcaatacttgatgacccggtgcactcttcgccacaccacatttccttcaacatacttgataacgaacaactggaccacaaagatctgcatgggaaatc

SEQ ID NO: 229410 - DNA, 401 bp, Glycine max
accgaagtgtgtacaaagtacaagacaagcacaatttgttctcaattatagtttaaataataaaagcgcgcaagatcaaacctttgatcacttggtctccataacacagagaatttaactctgcactaagcctccaaaaacagatcacatttttgtgctgatcatgtaaaaaatgtccctccattttacaaattaaattttcactcaacggacatttttaaaaattgatatcataaaaaagttgaactgactctctcactagaacaaattataaaattagacactgaggaaaattttattctgtaatacatctaccctgcaactcttatgtatattgacaagaccctcttaatatccaaattcaaatgttgatagcaagggatcttcatatctaaacacag

SEQ ID NO: 229411 - DNA, 400 bp, Glycine max
  unsure (1)..(400): unsure at all n locations
agctntcaccatgtcttgcagctgttatctattggcgcaagnggtgacactgtcattgcagtgtttgcctcaaattactcaaagggctagcacctagtgcatttccagctcacgagggcactggggcagtaaagcatggtgggatggtgggatgttaggattcaattgtaaggtatgagactttgagtcccacagtgtaagtatgggattctagtgtgggatttatatgaccttggattcgccaactacaacaattagcttttgtggcatggttctcccatggttcttatcagattctttctgtcccactacatcagtaaatctatggaatgaccattgaagatccaaacctggagtttctttcctctgaagtttgagaacacataatctaatgtaattt

SEQ ID NO: 229412 - DNA, 422 bp, Glycine max
  unsure (1)..(422): unsure at all n locations
agctnggngaggttcgttgaaaaccatgatgtttttgtctaggtnacaagcctacacaggccgacaagagaagggtcgccttacataagaaagaaacaagcataacctctttaccagggtggggaccacacatggagagggtccctatctgccacattatcaaaatctttgtcaccgcgggacggatgcatgacaatcatgttgctgtgctatactacgaaatgaataattggcggatcgcggagcgacctgagatttcggtctcacatccaatgtaatccagtcagtttgaactctattgttgggcctaggttataaggtctacttctttcgttgggcatacctctttctttaattatctcgtaactataaatatgccctcatctttacttgatatgtctcctctcccactctcgtccatt

SEQ ID NO: 229413 - DNA, 366 bp, Glycine max
agcttttcaaaaattcagagaatggttttctcttgttggaaatcaacttggtacaaaattaaaagttttaagaactgacaatggcctggagtttgtttcagagcagtttaatgagttttgcaggaaaataggcatcaaaaggcataaaacagtccctcacactccacagcaaaatggtttggcagaaagaatgaatatgaccattttggaaagagtgaggtgcatgcttctaagtgcaggactgccaaagaccttttggggagaagctgcaaatacaacaacatatttgattaatagatgtccatcatcagccttagatttcaagacaccaatggaagcttggagtggtgaaccacctgattactc

SEQ ID NO: 229414 - DNA, 454 bp, Glycine max
  unsure (1)..(454): unsure at all n locations
agcttgatgcaagctccattggagcttgtattcctaggatcttcttcatcaatggattcctttgcttcttggaagataaatggcagcggaatggagaaggactatatggtaatgatgctgatgttgcacctgaattttctcctttgaaaattgttgaatttggaaatccttctcatgacactcttgacccaagagatagaggctttggaggaagactatggagatggaaatgggaaaaatgaatcaaggcaatatattgaggggttaatggatcttgaatagagattcaatggattggagatagtgactaagaaattataaagatagcaaaatttggtcactattgaacaaattattcttataaaccaaatctttagcattcgttaatatgttttacttatttcttatactagcanaattacatgtatgaatgttcagcctacaaagaaaatat

SEQ ID NO: 229415 - DNA, 347 bp, Glycine max
taatcccttgaaaatagagggtaggagatatgccctgtattcacctagggactactttccttagcacccttatgttcaatatgttgcatgacagtttcaatgctatttgccacacaaatgtattacacaaaagtatctatcacataaagagtggctatgccacttagaatgcatcaagaagcttcagattgtgtggctacattccttggaaccaaaggcattgcatataacaattactacatacccatatctaacgagaattcttattttcgcgcttggattttttgagggagatgtcaccacacgttatgcatgatggtggaagccagcaatactgtatcatcatc

SEQ ID NO: 229416 - DNA, 455 bp, Glycine max
  unsure (1)..(455): unsure at all n locations
agctntacacgagagagaganatatgtttatcccttccacacgttactaagattgctagaaaagcaaaaaccaacgacatcttcgaaaatagacggcaagatagtgaagcttggcgtcactctttccccaacacgcctcaatataaacgtgccctctaagctcctcattcttattcattccattcttgtataaaaaaaccctcttacccttaattcttgatagacactatacaacaacacaaaaaacattcacttcaaaattgcaacatataatagcatttcattaatatcatggatcgtagactttctgtgaaaatagaaggagagggaagtgttcatatacaagttgctgaactccacaggctaagcgagacaagcaaaaccagcacaatgtttgagcctcgtggactcagcaacattgagaagagagacagtgatgcagctgataactactc

SEQ ID NO: 229417 - DNA, 117 bp, Glycine max
gcttctccttagataaagacgggcagagtgtattatttaattttgacaagaaaacgtacagacaatctagcctacactatactattaccactaccacagaacggtctaaactaaatt

SEQ ID NO: 229418 - DNA, 459 bp, Glycine max
  unsure (1)..(459): unsure at all n locations
agctngtanaattatggggtacccatcactgtggtctttgtggcggccgggcgatggtgcacaacaagttttccacatccacaatgcgcgcataaacccaccattccctgttgcgcacctccaactgagctcacgtactcccacgtagccaatatcctggtttatctcaacagcgggtccccattaatactcccaagcttccacaacatccaagcaaaacaacattcacacagcacaagctatcacagccaaacaaaacaaagcaaaggcagaacactctgccaaacaccaaccaaaaatcacagcttttcccactcaaagaccccagtaacaattccttcgatccaatctgttaaccgttggatcgactccaaaattnttctggaagtgtatagtgcataaacctacattctgaccgttgggatctactagcacacatccagaactcatttacattac

SEQ ID NO: 229419 - DNA, 415 bp, Glycine max
tcaagaattatggcctcatcaaactactagtgtgccgatggatattctataaatagacctcccatctttaatggagtgggttaccactactggaaaacccgcatgcaaatctttatagaggcaatagatttaaatatttgggaagccataaaacacggaccttatgttccctctataatacccgaaagtgcaacgatagaaaaatctagagcagattggactgaggaacaaagaagattagtacaatataatctaaaggccaaagatattattacatctgccttacgaatagatgaatactctacggtttcaaaatgtaaaagagctaaggatatcgtggatacactacaagtaacacatgaaggcacaacagatgttaaaagatctatgataaacaccttaactcgtgaatatg

SEQ ID NO: 229420 - DNA, 417 bp, Glycine max
aaatatggaaaatagtaaaatattaatcatgtgaggtataagtattaataatgaagaaaacatcatagtccatgctatctattttagttttcggccgattatttatatgccaattatttaataatttagagacaaagcgtggataattgtatattattctcaaaacattggaatcaacattgaaatttttttcataaaggtctgttaaaaatgaaagaaataaattgtgatcgagaactaagaacaattgactaatgcgtttatgacaatgattgatgcagaaaatatatgcctataaccacctggagggaaacatcatcttacataaaattggcttacaaaatactagcgcttatattgagtcttttgctataatcaagaaaagcaataaatagacaccttttaacatataaatat

SEQ ID NO: 229421 - DNA, 298 bp, Glycine max
  unsure (1)..(298): unsure at all n locations
ttaatgttaatgtcacatcaaataatgtcaaaaacagtattatttatggagattgtgatatggtattgtaagtgagatccttggccagattgagtttgattgggatgacactaagcacatgatcacaattgagaatgacaatgcttggaatgaatattgcattgtaagtattctttaatatattgctatttgttattcaaagcagattgaatttgactcttnttattctagtcgcataaatcagctaaaccgtttcgattcaaggtgccttcaaactggggtgatatagtggatttgt

SEQ ID NO: 229422 - DNA, 398 bp, Glycine max
  unsure (1)..(398): unsure at all n locations
tgaggcatgcaagcttcaattgggaacaccaaaaggctgtattgtgtttgctaactgattaatgttacagtgttttataaaacttaattctattaaagcaccatatatttttttaaaaagaataatttctacattggttctatagagaatcaatgtataaactaaacaacgacgattttgngacaaaaaccaatgtcgcataatactttctactcagttatttatacaactgatgtagaatgttgacaattctatccattttaacgcattttaacacattggttttgggaaaaatgaatgtaaaaaggtgctttcgtataatttaaaaaactgtcattgaaagccttgtataatcatccttgaatgccttttgtagcagtgttccgacaatgacaatg

SEQ ID NO: 229423 - DNA, 436 bp, Glycine max
  unsure (1)..(436): unsure at all n locations
ttgcatctgacaaagatgatagcgaatgcatgttaggatatgttttctctttaatggnggtgtagtaagttggaaaagttccaagcaagctacgataacatattcaactactgaagcataatatatagtgacaagtgaagccggtaaagaagctgtttggatgaaaaggttcatatttgaacttggtgtggttccttcaatagaagagtcgtcccattattgtgcgacaataatggggctattgttcacgcaaaggaaccaagatcacaccaaaagtccaaacatatcttgcgaaagttcacttgattagagagaaaaagaacgtgggacgttaaattgaaaggtaatggaaggaaatgtacaatctttcataaggcgctgcataaagagttacaagccaatggagtaggatgaagtatgaatgatgctctagaag

SEQ ID NO: 229424 - DNA, 233 bp, Glycine max
atatattagtgatgattaatattcattctaacattaggagctaatttataccaaaaacctcatgtgctaggtcactagttgaaaattcttatattttttgtacttcaaacagagttaccaattaaccttcgcaatcagcttaataaagatttgcgttaataatatcaagccaatcattaaataaaatgtcaattctgtcagaaacaatatctaaaattcaatcattgagtatt

SEQ ID NO: 229425 - DNA, 404 bp, Glycine max
  unsure (1)..(404): unsure at all n locations
ctgatatcgaaataagagtgaatgtgaaagtgggtatattaagaacattgtgtaaggatatgttgggcgagagctgaattgttcctgaatgagtggcatgaacatattggccgctcggaagttttactgtgactgggttgattcgtctatgggagtgaaggttatgcaaggagctagtcacatgatctgtagcccctgaatctactatccaccacgtggaaagcgcactggtataaggtgacatacctaggtttatcggagtattgacggtgcatgaagaaattgatgcaacctgtntgggttgattgggtgtcgtgttctcggcggatggctcctgcattaaagcgagtagtgcctttgactgctcatgggagaagcgaacgaactcatgggactcatgatgc

SEQ ID NO: 229426 - DNA, 443 bp, Glycine max
  unsure (1)..(443): unsure at all n locations
agcttctcatcatcatatacaaaaggagtttttgtaaatgtgaatgacacatgaaaaacagattcttttagaagagggaatctatgaggaagtccaatatataaaaggaaggaaaaaggagggataaaaggtttggtataaaatggggaaatgatgggcattatcactagtaagagtcggtgatatatatttctgtcccacaagcagccatcaaggagtaagatgacccataaaaggaccaacctctggaaccctatgcaaaagctttgaaacgctattaattaattcatacacaacatggccttctatttttttccttcttttattcaactatatattatatatagctttctttcacaagttntcaaaaacttgtacattcaagaggtgactgtctaacgaacctatcttacaaaggggagacaccttgcacctctccttat

SEQ ID NO: 229427 - DNA, 441 bp, Glycine max
  unsure (1)..(441): unsure at all n locations
ctagtgatgatgatccggaactatgttattattcttttattaaancgactntctggatttttatcctgcccaattattgatctgagtcatctgacattgcttttatggctcgataggttgtccttggaattagctctttcttcattgaaccaatgtgtaaatggatgggtgcaaaattagtatgggcactgagcaattntatcgtctttgtttgcatggctagcactgctatcattagtcttatttccataagagattattctggagggatagaacacgtaattggagcaaatgaagcaaccaagaatgcttccttggttgtgtttgctcttcttggctttcctcttgcggtaagtacaaagtgtttcatttccacatttacactattttattcaatcaccacactccttttccttattgatctctcaagccatcatccta

SEQ ID NO: 229428 - DNA, 439 bp, Glycine max
  unsure (1)..(439): unsure at all n locations
agctcgcacaanctataattgtaatgatcttcttatataatatgnattgtaagacattgttcgaaggatttactgatccttgttttgtttttaactaatggagcaggttaaagagttccatataagagctggttttgaggtagcaagtgctgacaagatggctaagccatgcatggtttattttgaaatgcatttatccctaaggaaaaaaataattacaaaagcttttaatggtagttatagtatctacaaggaaactttttgtaaccaggtctattgcctttttgtttgagtaactggacatgcatgtacaataattgttgttgaagatgacaagggacctgaaagaggaatgccgagcttcaattctgagttacccaattccaactcatggtaaactttgtctctgcatagatcttggattacgctctgcatatgt

SEQ ID NO: 229429 - DNA, 252 bp, Glycine max
  unsure (1)..(252): unsure at all n locations
tataaatactcagctttacccctgagggtgcatcaagaaatggttgatagttggttccaaaaccatggtcctgtaaaaaccttgcacactgccttataaaagaaataccgtgcatttgatgggcaatgcattactttttgttttcagcttagatggctataagctntngatacattctttctaatttgtgtcacaagtttggcggcaactacttcttggtgagtttggtcgacatgatacatcaaggggatc

SEQ ID NO: 229430 - DNA, 350 bp, Glycine max
  unsure (1)..(350): unsure at all n locations
agcntcgaanataatcagggtaaatggttctttctaattaattatttaacccattattatgttttaatatataaattatattataattaaacttacaatacatcatttttgatattctcttaaaaatgaaaagaataaattcaaaaaattcagttgtttagacaattaaatatatatagataaagatgaaataagagtggtttaatacccaaaaaaatagtttgagatagtcaaaaaagaaattttttgaactaattgataagtcaaataaaatttgaaatttgaattgagagtatatttgaaatttcaaatgacaaatatgggttggtggactaaccagacgtagagag

SEQ ID NO: 229431 - DNA, 219 bp, Glycine max
aactggcagatcatctgtattctcactttctaacctcaaagagaagagtcgactttggagtgaggatgtgatacacattggtatgcctccacttggtcaacgaatgaaaacatctttcgtgacctctccagtaagggttatcttcgatttcttaatagtaacctgctgctctttcaaatcttgatgatctaacagtttcaagcgatggcaaacctaacg

SEQ ID NO: 229432 - DNA, 391 bp, Glycine max
  unsure (1)..(391): unsure at all n locations
agcttatctttcagtgtctgaaatgctgctgaacattcttcatcaaacttgaatgccacatctttattcagcaggttgcttaggggtctagcaatctttgaaaaatccttgatgaatctcctgtagaaccctgcatgccccaagaaacttcggacacctttaatattcaatggtggtggcagcttctctataacctctatctttgcccggtcaacttcaatccctctagctgagatcttgtggcccaggactatgccttctcggaccatgaaatgacacttcttccaattcaggactagattagtctctacgcacctctgaagaccatctctaggttcctcaagcaactgtcgaatgaggatccgaanaccgagaagtcatccatgaacac

SEQ ID NO: 229433 - DNA, 417 bp, Glycine max
  unsure (1)..(417): unsure at all n locations
tgtcattgtgcacaacatanaccactgtggcggaggaacttctcttatgggatcttaagcacgagacgtgcagaatatgcagtgaaaacacatgcttataataaaagggactaatttaaatgacatcatcacaacttacatgacaacacatggtaaaattttgacaatcgccacaactcgtgtttaaagagccacaagattttattactccaacgttgcaaacaaagtaatggagttaactataccatcatcaaataaattanaaacctacgagctagatttgtcaaacaatgttttcatatcaaaactcaaaacatcatcaacatatgctaaaagaaagcattgcacaactaaccttgaacacctctacttggtaacaatggcattggtgaacgatgccacgaccttaatgtgatg

SEQ ID NO: 229434 - DNA, 385 bp, Glycine max
  unsure (1)..(385): unsure at all n locations
agctttgaaagaacgtatgagtttgattgttattcatgataagcctctttaagagattcagggtcatcgagatttaccttatcctcttgatttgattcatattctttagaagttgtgtctaccattgaacatagattggcttcttcttcaccttcgtcagacgaggtgtcatccaaatcttcccaggtgctcataagacatttntttattgggtccttgagcgtttcttcttgtcttatgacttctccaactctgggcattcagattttaagtgttcaggtttcttgcattcatagcatattatggagcttttgtctttatatcttttatccttgagtactctttttaaggagctcttccatctggatctgcttttgtttttcta

SEQ ID NO: 229435 - DNA, 469 bp, Glycine max
  unsure (1)..(469): unsure at all n locations
ntataagaaacanacgcagcggagtgatgttatctaaatatatcnccaagggttaatataacattcattataacttatttaaaaatatattttacaataagacatttaaataaacatttatttttcaataaacttaattataagctctaccttatatctctttatgtaaattaacacaattaacatctaacaagacaaatacatttaagattctaaagtattataacaaatttagtataataattataaggctaaattgggattttattctttcttataatttaaatctgcgattttggttcttttatttctaaatcaataaatttaatccttgacatgacacacatgtagcacaagattaaataaagtgaaaaaaatcttaataagaattgaattcatgagtttttattctaaaataaaataataaacaaccaagacgtctattttatttggtaaacttataacacca

SEQ ID NO: 229436 - DNA, 419 bp, Glycine max
tcaatcaactatgatctctgtgaaacccctaaaataatccataacatcaaagcctcatcttcatattaattgtaacccaacttttattaacagagttagaaagggtccactgggacagtggattctcacacgaagaaccctgaaacccattgtcattataaaaaacaatttatcttaagaatatggtatatggaagcatactttaaagccaactctgtatgttggagtcgataatagaaaacagcaagatccccataacttttcatcgtatcaggatggtccagtccaagctctctttcattaatgtctagtgccttttgctgatagatagttgcctagcaaaaccacagctaaagttattacaatggtactggatggaattaactgggtaccttattcaaaaatgttacttacatagt

SEQ ID NO: 229437 - DNA, 440 bp, Glycine max
tgtacctgaactagatacaaggagagactttcaaatcctcttattcagctaaatatgcaccttcaaaacttgaactttcaaccctagtgcacatacttgatctaatagatactgtcctaccctaattgcgtccggcgattattatttgatgatatacaacctttgattggccgcttcaagatactaagcaccctcttttgcacaatatgtgaagccccgagacgtgccgaaaatcataaggaagcaggcttacgcgatctgtgaacatttcataatgtgacggaaatctaaagcaggtgcttttcgcaatccgtgagttctcataacttcttcgaacgctaacaagagaaatacataattccgaaggatttgtaaccttgcggaacgaaaataagtatccgtactatattcgtaaagtttctatcgttactgaaaagaat

SEQ ID NO: 229438 - DNA, 424 bp, Glycine max
  unsure (1)..(424): unsure at all n locations
ggatcttaagtcacctgagctgcaagctgatgtattgcgatcaggctagtattcaccttcctttgatcatcgnctgctggttcaaaatcttactacacaggtaataagttgctgaatatccaaataaaacgcggctatttatttgtcatcaagaattatgcggcctgtattattggaaaggatttattatgctttgataacaaatgataatgattctaaagaatttagaaccaatactaggaatatgttaattatttattctaaaaagaaaatttaaaatattgaaaatagtttgggcagtaaactgtttagtatgtgttgtctaggtgccgaagactgggttttaaaatactatcactggtaatcttcatatggcaatgattattttatttgccttctatattggcaatgacttttaagcata

SEQ ID NO: 229439 - DNA, 122 bp, Glycine max
cactatctttgttccgaaggacactataatcttgttacacacatcagcaacgaatatctggaaatggataatacgcatacatctacaaacaattctacttcatctgaatctggacgaagtga

SEQ ID NO: 229440 - DNA, 261 bp, Glycine max
gcgatggtgcacaacaagctttccacatccacaatgcgcgcataaacccaccatcccctgttgcccacctccaactgagctcacgtactcccacgtagcccatatacttcgttctctcaacaccgggtccccatcaatcctcttaagctttcacaacattcaagcaaaacaacatttaaacagcacaagctatcacagccaagcaaaacagggcaaaggcagaaaaactctgctcaacacactaaccaaaatcacaggttt

SEQ ID NO: 229441 - DNA, 425 bp, Glycine max
  unsure (1)..(425): unsure at all n locations
ctgcagcatgcaacttcaggcaacccttctatgatgaagattacttctgcctttgnnccaaangcataatttcctacttcaactgctactgtcaataatacctctaatgttgtttcaaattctgttgttaacacttccagtagtgctaatctttggcatgctaagttagggcaccctaatgatcatgtaatgaaaattgttctcaaatagtgtaatatttctcaactaaataaaaacatcacagagatttgttcttcttgttgtatgggtaaaagttcataagtcacctactcacagctctgcttctgtttattcacctttggaacttattattactgacttgtggggacccgcccatgttacctcatatgctggctatacatattatgtttccttcattgatgctgtctctaagtacacatgga

SEQ ID NO: 229442 - DNA, 467 bp, Glycine max
  unsure (1)..(467): unsure at all n locations
agcttattgttacatgtcaaacagggaacccttttactttccaagctaatataacttgtgttgggtgggtacatgttgaaaattgtcattcctaaaaaggggaaaaaaccaaaaatttatcaggctatgcctaatattgtaggtattatgacaggttcaaacttcaaaagaaaagatgattgtggtcagcatattaaaattntatttctaaatagcaaccatcataagttatcaattatgctcaaaacaatctctcataccttccttcagacaaccgttgaggattactaggagtggatgaatctaaaggactattgggactgctatcctccaaaagtctagcttgaagggttgaatctgaatgaagatgagaagcagtttgaccttaacagcacaatggtcctttccctcccaggaacctactgtcctcagttgactgcaggtatcgcataatacatcaatgtcat

SEQ ID NO: 229443 - DNA, 346 bp, Glycine max
  unsure (1)..(346): unsure at all n locations
tcaagcaccgcaggctgcagctcttagnccagatgagaagagatttcttgcttttctgcctcctctaatgacaattcatccttctggactaaatgctgggagttgaaaccattttcttaattaaattctggcttcatatgagtcatgtttcagggctccaccctggcagcattatatacttctctccagatactaagcccttcataaaaattggaaaagagctgctataaatttgggggaggcaactggacatagttctaaacactccagagtcatagaaacctctccctgagtaccaatcccaaaatttttttgacggcgcgcctaaatcatgaaaactttttaa

SEQ ID NO: 229444 - DNA, 275 bp, Glycine max
catgttttaaacatggaatggcgaatgaacaaacgtatcgcggacattcagcacgaggaatacctatgataagtccaaaagatattcaaactctaataacaagggctaacaagaagaagaatgcttgcaaactcacacaactaacatattctaaggatgaatcacagccacagacagatgaggacactcacatgcaatgcaaactaagacaagagctaaaacggatatccagaattcttacacatgggttcggcctaacttaaccctcaaaaact

SEQ ID NO: 229445 - DNA, 388 bp, Glycine max
  unsure (1)..(388): unsure at all n locations
gcttctttgagaaaactggcatgagaagcttgagcttanctacacacacccctctaataactaagctcacctccttgagaagattcctaaagaagctagagcttagctacacacacctttctaatagttaagctcacctccttgagatgagaagctagagcttaactacaccccccttataatagctaagctcacccccatgatgaaatacatgaaaatacaaaaaagtccctacttcaaagactacttaaaatgcctcaaaaacaaggctaaaaccctatactactagaatgggcgaaatataaggcccagacgaaggagaaacctattctaatatttacaaagataagcgggctcatacttagcccatggacgtcaaatctaccct

SEQ ID NO: 229446 - DNA, 277 bp, Glycine max
  unsure (1)..(277): unsure at all n locations
accttggagccagcatcacttttgtgaaatcacatattttgatgtcggaaatttcactcagctcgaaacatctgcctgcaatagtngagaagccagatgtactacatctcatgaacacaattctttactcacaaagataataatttcatcaatgattcccaatcgatcgacatatttattattatatataatgatgaaacatcaatgtgatcaaggtagcaattaatggctgtctaagaaccatatctacccataaacttaatgaggtcataatttt

SEQ ID NO: 229447 - DNA, 319 bp, Glycine max
  unsure (1)..(319): unsure at all n locations
agctncttctagaagcgaagtgagatttcttacctcancaancaaatnaggtgccgaggctagatttgcattgataagagcttcttcaaagaggactcttcttcccgagggttcactgaccttcactggaatcatagcgtctgtaccataagtcaaactgaaatgagtttcttttgtttctgggccacaggaaacacaaattcctccctccattccctctggatcattgttctcatcagaggaacaacgtatatggtacacaaacctcttttcatcttgttccaatgtagacccaaattcatagatatggagttcttct

SEQ ID NO: 229448 - DNA, 423 bp, Glycine max
  unsure (1)..(423): unsure at all n locations
tatccatcacatgtggtaccaggtggcggtccggcgatggtgcacattaagtttttcacatccacaatgcgcgcataaacccaccatcccctgttgcccacctccaactgagctcacgtactcccacgtagcccatatccttgtttctctaataccgngtccccatcaatcctcccaagacttcacaacatccaagcaaaacaacatacaaacagcacaagctatctcagccaagcaaatcagaacatggcagagaactctgcttaacacaccaactaaaatcatagcttgtctcacttaaagacccgaagaacatatccttcgatccaatcactaaccgttggatcgactccaaaattacttgaagttatagngcattacctaattttgaccgttggatcacagcaacattccaactactat

SEQ ID NO: 229449 - DNA, 237 bp, Glycine max
  unsure (1)..(237): unsure at all n locations
ctaaaccttatacaataatgaaacttcttttctcacttgnnggacaaatggccctcaatatcttataaaaggggggggtgggcggctatatcaacaaattactaactattctctcccttaccactttttttcaccctcaacttactatttacactctccttaatatcaaccttttatcctatgtccaaaaaaaaccattctaatcttaattttaaccactaataacacattcattta

SEQ ID NO: 229450 - DNA, 380 bp, Glycine max
  unsure (1)..(380): unsure at all n locations
agcttttcacanagcttacggtgaaatctggtacttatccatggnagaagtctccacagaggccattgcctccctcacccagtattatgatcagctgttgaggtgcttgacctttggggacttccagctatcacctatggtagaagaatttgaagagatcctaggatgccctctaaggggaaggaaaccatacctcttctcagggttctatccctcattagctagaatatccaagatagtccaaatctcggcgcaggaattaggccacagaaaacaagtcaaaaatggggtggttggaataccgagaaaatatttggaggcataagcaagaatcttggcaggtaaaggtgagtgggccccgctcatagatattctcgcac

SEQ ID NO: 229451 - DNA, 426 bp, Glycine max
  unsure (1)..(426): unsure at all n locations
agctntataatcagacgatgatgctatggttcaaatgaaaaagcttttgaaaatttctaaagtcacaatttaacccccccccccccccctcgcgttttgtgatatttgcctttataacaagcttcacaggtatgatgggttttccaactaatcttaggcaatccttttactaaattctttttggataattttgaaatatgttctaaattgacatgcccaagttttttatgccaaatctatctttcatcttctctagatagtagacatatgacatnttgttttacaagacctattagatcaatcttatacagaatggtgtgtcatcttacagtaaaaaggaattgccgtcttctgtcttgactatacactgggtctttgaaagacacaatataaccattgttacaaaaatgacttatgctcaacaaa

SEQ ID NO: 229452 - DNA, 463 bp, Glycine max
atctctaagtcacctgaggcatgcaagcttgaattccgatcttataaacattgtttaaatgttgggactgaaacgagtcaccaatggctttcttgaggagagagacatggaagactggatgaattttactgtgagatggaagatccaacttgtaagcaacaacacccaccttgtttaatacctggaaaggatcataaaactgagggaagagcttctcattaatccttttagccaaggatcttgtcctgtaaggttgcatcttcaagaacacccaattaccgactacatattctatgtcccggcggcgtttgtggcatttgctccatgatatcttgagacttaacaaatttttttagagagccaataattcattctgagcaattggtagtttattgacttcttcaaggcgggaaggaatggtggatcccttgagaatgtgagggggatcatttccatacataac

SEQ ID NO: 229453 - DNA, 290 bp, Glycine max
  unsure (1)..(290): unsure at all n locations
accaaaaccgggcactgttaatgttaacattttgcaaatatgtctctctctctggtggtgctgcatatatttaggaaggataacagaatgatgtatattntgtaccatagccattttcccaagtattttgccaacaagctttagaagcttggaacattttgattgaatggctgcacaagtaactgatctgatatgtacacaaagtggatgtggtggtgatggcgggaacaaaggctgaataatttatcgagcaaaggtgtttgttcctcttaatctttgctatttttgca

SEQ ID NO: 229454 - DNA, 338 bp, Glycine max
  unsure (1)..(338): unsure at all n locations
agccttgagagatgagcattggttgttatttatgcatgaagaattaaatcaatttaaaatgaatgaagtatgggacttatctcctaaacttgcctctcacaagtcaatcgaaaccaaatgggtgttttgaaataaacttgatgaatcaggcatcatatcatggaataaagccttatnggttgcaaaaggatacatccaagaggaaggcattgactattatgaaacctatgcacctgttggaaggttaaaaaccattangctactgctggcttttgcatgcattatggatttcatgttattccaaatggatgtgaagattgtttatctcaatggagaca

SEQ ID NO: 229455 - DNA, 343 bp, Glycine max
agcttgcagggatgatgtttcactacccactgcacgtgtctcaagatgcatattctttgcggtgttatttgcactacatgcagaaagcagaaccgctactgcaatcgcgggaatcccgcgcaagatatatctcaaaatcggttgagatttgaccatgttgtttgttttcccttgaagtccttaacgacaaatatcgttataaaaaaatgccaagcgacacgagactaattaccttggcatgttgaaacaattccttaaggccaaatctgtggactaacgcacaaaattatatgctgtgaggataatctaccgccgaggcaaaacgagttcgagataccccgat

SEQ ID NO: 229456 - DNA, 408 bp, Glycine max
  unsure (1)..(408): unsure at all n locations
agcttacaaattcagagagacatggttttcttttatgcttcttttttcatatgtctctcccatcaccaatttttacacataacgtatttgtaatgttgtgctatttttgctttattcttcttccctccattttctggatatatgatctgtttgtgtgcagcaaaagtttttgaagagatatctgtttgtatttaatttaaaaagaaaaaaagtatataaacaagtaaaagttgtgtaatacataatttggaattgtctttggttacatctaanatctgctggtttcccattactgatattattaggtatccatgacctgttgatgtataatgataaacctagaatactcttctagggcatataatataacacgctgaagaaagggaatcttattctttatttattatg

SEQ ID NO: 229457 - DNA, 263 bp, Glycine max
  unsure (1)..(263): unsure at all n locations
aactcagctgattactcatcacaagattacctactggatggaagtataatatatcttgttctgctncacangcaggatatgaacagcgtgcctttggtcttttattacaaaacaataataacaatacgtatcattcgcatttataaggcaaagcactttgccctcatgtgaatctgacaaatttccgaaaaaaatacaattactccaaggaaaatgaacataacgctgtactctttgaccaaaaaaactcacgacaaaaaaat

SEQ ID NO: 229458 - DNA, 387 bp, Glycine max
  unsure (1)..(387): unsure at all n locations
atgacatcataatttacttttagnaagctaaaagtgtttttttttatcggcaaatatttgtttttaattattagntttttggtagcaggggaaatcgaacccatgacctttccctccctcccttctccttttaccacccacccaaccttataactcctagtaagctaaaagttataaaagggtcataagccattttcacaagctcagcctttcaaaataattttattgaatataagaggctaattatgccccttatatcatgtgtgtatggaccacaaaaatgaagtcagtattgaacgtgacattcactgaaaagttattactgaatatatttcaggtgctaagnttcaaaggaagcactggtatatcttaaaataaattggaggg

SEQ ID NO: 229459 - DNA, 408 bp, Glycine max
  unsure (1)..(408): unsure at all n locations
nactncctaagcggagcaattgagaccatttattatttatctttttggcgtagatgattcatatgatttgatcactgacaaagtagacaacaatcatgcatgttaagaaataccaaagaaaaaatgtacttccattccaaatcagctgaggccgagtattgtccataacaaccacaatatatgattttggcgacgactaattcgatccacaatatgcttgagattaagcattaatacatatcaaatcaaatttgtagggtatctttttcagttagagtactatctataccagccaacctactttccttccttagttgatcgtgcatatagatttgctatcattaattatttcgtaactatcttgctcccattatatccgaataggtgttaacgcggttcaagcttttt

SEQ ID NO: 229460 - DNA, 331 bp, Glycine max
catgcaagcttgcacaacaagaaactaaatcgtggtttttacttatatgaagaactaactcactaactaactaacactaatatatacagtgactactcagaaggaatggatgatccttgattaggcccatccaatctacttaattaaactaattgcacaaaataatgcccaaactcgcagtctaattatttaagtgcagaggttctgacttccaagctcaatttgacccccaaaatgatagaattgaccaaagcttatttgtaacaaaattgaaaatctttttctcagctttccagagactattcacacgttccatttggagttctgtagt

SEQ ID NO: 229461 - DNA, 322 bp, Glycine max
cttgaaggtgtttacttcctacaacctgtacacgcgtacctcctctgcaaccagaattgaaaatacgcatcctaccctgttctctaccacctatctcctacaaagcccaccaatatagcctacgccatgcctatgcaccacagcctatactaaaattgaagatgctgacacttctgtaataaaaaagcatcaattaaatgtgtaactaaatactgaaacgctgactaagatgaggagaactagtagagtcccctgtttcattatgtttctgtaaagtccgttgacaactggactctagccggaaactatctaagttgggctg

SEQ ID NO: 229462 - DNA, 455 bp, Glycine max
  unsure (1)..(455): unsure at all n locations
agcttcatccaatgagagatggaggatggtgttttttgtgntgggcttgaacggaagaaggagaaaagggctgactcgtgtcaaaattggccattctttgaaggtcatccagtttatcagacataatgttctaagtaatggtgaaggcaacttggttggaagtgactcttgcaattgcatcctcaaaatggtccatgttggacttaaaacatgtggaatcagccatagagctcaatgaaagcaccaagatgttaggctcataaaagcaaatccttaacatttgaggctaacgaaacctccaagaataaggtgagaaaagaggaatgcgtttctttattgcctctcttaattcatataggagatatatatatcanatgcagaatgcccaatgacnagaataacactatgcattaacaaactagcagataagttatgtccttatatgtgctaacaat

SEQ ID NO: 229463 - DNA, 400 bp, Glycine max
  unsure (1)..(400): unsure at all n locations
agctngttatccaaggctcatctatggggtttagctccttcttccatggcttattccctaggggatggcgcctcctctcacctcttctcctttgtcatccgctgcatctccatggtggaaaatcaccattaaaggacctcattgaagctcaaagatccaacctccatagaagccccacaagcaagcttccatcaactggtatcagagcttcaatgaagaacctcaagatttgaggtcaaatcctttccaaggtggagggaatgatgcaatcctaccccacaaggtcattggatagaagactccaagtagattgggtcagagatccaagggaaggccctagggttctcatgagccttagggtagaatttgagcccataggctaagtatgagccctcttatg

SEQ ID NO: 229464 - DNA, 308 bp, Glycine max
gcccaagcgagccataggctatcttgtgtgagctacgcgtcacaaaaagtgtgcagatgaccctttagccctccttgatgagtatattccgaaaacttctctgaaacatcaaaaaacccttggaattgcatgacaactggagacaagcaaaccaattcgcgttacaagaatcaaaacggtaaccaaagaggcgccccaaacgaaataagggtatgacatatgtttaatcaatcacacagttgattcaagaaaccaaaggaagactcgagcgggttatcaactccggtataaaaaatcgacaaaacttg

SEQ ID NO: 229465 - DNA, 364 bp, Glycine max
  unsure (1)..(364): unsure at all n locations
agctntaagcaaattaaacgagaattattttttactggacgtctgaacgagccccgcaatatatcgagacgctcaaaattgaatgttgaagctgtgagtccaattcaaccactataactttttactcggatgattgattgaggcccgaattatatcgagaccctcgaaattgaatgttgaagctctgagccaattcaaacgacaataactttttactcggatggactattcagtgacctattatattgggacgctcgaaattgattgttgaagctttaagcaaattcaaacaacaataactttttactgggagtgctgattgagtcccgtatatatcgagacgctcaaaatgactgttaagctt

SEQ ID NO: 229466 - DNA, 435 bp, Glycine max
  unsure (1)..(435): unsure at all n locations
agcttgngaagctcctgagtagctttattttantttactcaaccatttgaagttgaatgtgatgctagtggagttggcattggggctgttttgatacaaaacaaaaggcctatagcttatttcttggagaaatcgggaggagccaaattgaactattgcacctatgacaaagagttctatgccattgtgagagctcttgatcattggaatcattatttgcgttctaatcactttatattgcattcagatcatgagtcattgaagtatatcaatgggcagcagaagttgagtccaacgcatgctaaatgtgttgaatctcttcaatctcttatgtttcttaaaatacaggatggaagagaacgtggggctgatgcactttcagaggatgcttaattcaattctgaactcgttcttggtttgaacttgaagatatat

SEQ ID NO: 229467 - DNA, 348 bp, Glycine max
  unsure (1)..(348): unsure at all n locations
agctntctgaagtgttctgggattcttaaccttgaaaacttgggctattcatcttttcattctcttctccctttgccaaaaagaattcgccaaggactaaccgcctgaattctttttgngtctctcttctgccttttccaaaagaacaaaggactaaccgccttaattcttttgtgtctcccttctcccttgtcaaagaattcaaaaccacacagtctgagaattcttttgattcttcccattcccttatacaaaagtgttcaaaggactaaccgcttgagaattctttngtatccccattcacaaagtatcaaagaattaacaacctgagatctttgtcttaacaca

SEQ ID NO: 229468 - DNA, 234 bp, Glycine max
  unsure (1)..(234): unsure at all n locations
tgcattacctgggtgagcacaagacaacncttgcttgtcaagaaaactactacgccctgtctactttcctgctttctacactttgactaaatggagccttgaagggagtggactgatgttcaagggccctatttttttaggaaaattatatgcccctaaacccactatataaagttatgctataaagctcaactggacatacttgttcagattgcttacaggacatcacctagt

SEQ ID NO: 229469 - DNA, 287 bp, Glycine max
ttatttcacgcacttcaccaaaagaatgcaagctttgaattttttaaacaactaatcgctaatgcaaaattttgcttttcctctgtttctaagccacattatacacaattatttcaggtgatctaatgtcatgtgttggatcaaccggcctcaaagaaattaataatgggaagttgaattaattatgaacgtgtcttgactaattaacaatctatctttcttaatgttactagattcaattacgcttttactactaaggtacgaacgtgatgaatagaaatataaac

SEQ ID NO: 229470 - DNA, 130 bp, Glycine max
tttctatctcgattttcgtctcggactatactactaaagctgtctttgtcaacctagtgaatttaacatgcttaagcaaggaccatgagttctgtaaattcactctattttgaatacattatatataatg

SEQ ID NO: 229471 - DNA, 310 bp, Glycine max
agcttcaaggaagttctttctttaactatttttgcaagttcaactagaagaggatctaaccaacactaaaataagctctaatcaaatttggatctaccactcaaaactttgtcatacccatctgctagcctcttggtggaaagagagaaatgaaataagagatcaaaagagaaaaataaaggtgttcgcctagcaataattagttaaaatgctcttggagggagaaaacaagtctcctattgtgtagaacttcaagcctctatctcaagagatgagagaaacttggagagaaagaaggaaagaggaaatg

SEQ ID NO: 229472 - DNA, 444 bp, Glycine max
  unsure (1)..(444): unsure at all n locations
agcttgtctaattaccactattagtgttgattacttatttctgggactgggttgttattaatgtttacttttttttttggacattncttactgcttgtattaccttntatgttgtcagtagtgctgcgttgtgatatagatttttcaattgttatttttctcaattctgtttttgagttctgcaggtatgtggccttttggttggtggtacttgccggcaaatttacttttgcttactttctccaggtaaggcaatacgtttcatatatatatatatagacacagacgttgtatgtatctaggtgaggctattgaccctccagtatgctgatttccgctatttagatgtttacttttgatatactttctatactttcccttatttgagtgtttcttctatatagaaattgacataatttaagattacttccttcgtacattgga

SEQ ID NO: 229473 - DNA, 417 bp, Glycine max
  unsure (1)..(417): unsure at all n locations
ttaagcgactgcggcatgcagcttccaaaggggggctggtgcggtatctgtcataattnttgttttctccaccgaatttataagaatataatgtatgtttattttgaagcccaatagcggctaagttgcaggatgtggtgagccaagtgacgcataatatggcaacattattgttcgttaatgtatatgcttcctcccttaatttacgtctgatatgttttaatgacaagtaaatctaaacacatagacacttataaaaatgactgtaatgaaaatggtatttagtctttcatttggtatgtgctgaaggaagagtattcaacccttacaccaatataattacttgttgatttatattaaaattacaattctaacatctttaaaataagtaaagaaatattgcatacttatatttga

SEQ ID NO: 229474 - DNA, 435 bp, Glycine max
cgcaagcttgatgatatggtcttcaccgacgatttgatcaaagtaggtctaaaaagaggcaaatctgatcattatgctttgatacatgccaaaaaaaacaagggctaatgaagagggtcagaatgagggagaagcccatgctgtgactgccattcctatacaaccaagtttcccaccaacccaacaatgtcattactcagccaataacaaaccttctccttacccaccccccagttatccataaaggcaatccctaaatcaaccacaaagtctgtctaccgcacttccaatgacgaacaccacctttagcataaaccaaaaacaccaaccaagaaatgaattttgcagcgagaaagcctgtaaaaatcaccccaattccagtgtcctatgctgacttgctcccatatctacttgataattcaatggtagccataa

SEQ ID NO: 229475 - DNA, 477 bp, Glycine max
  unsure (1)..(477): unsure at all n locations
agcttcaagaaaaagatggcctcagtatatttcttgtttccagaagggaattctataaatagacctccaatctttaatggagagggttaccactactggaaaacccgaatgcaaatttttatcgaggcaatagatctaaatatctgggaagccattgaaatagggccttatatacccaccacagtagaaagagnttcaatagatggtagttcatcaagtgaaagcataaccatagaaaaacctatagatagatggtctgaagaggatagaaaacgtgtacaatacaacctaaaagccaaaaacataataacatctgccctaggaatggatgaatatttcagagtttcaaattgcaagagtgctaaggaaatgtgggacactcttcgattaacacatgaaggaactacagatgttaaaagatcaacgataaatgcactaactcatgagtatgaatattttaaatgatacacatgaaat

SEQ ID NO: 229476 - DNA, 431 bp, Glycine max
  unsure (1)..(431): unsure at all n locations
agctnggngcatccccttcttggttgttcatttctgtgctactgacagctataagttccccagatgtgggtttgtatgcttcagagaccatctttgcaggacattctgattctaagtgctcaatcatatttccatgttcggctgatttgtcattagcatgcagataaaatagctcatgtgcacctcgttcagaattactgttttcagcatcccaagatgactcttcgacttcagtaacagttagttcacattctagggccagagattctgaagttaaattcaactcatcatcataatttaaaatcagcctcgcaaattgttcatgagcaactgctcgtactgccttgtcagcaaaacaatatcagaaatgcagtaatctcaaaagaaaataaatggaaaccccaccgaaaatgggggtgggggaatacatc

SEQ ID NO: 229477 - DNA, 183 bp, Glycine max
atacacttgtacaaagattaaatgtccaacacttaatgatctagaaattgtagatcatttgcagatgaagttatctacattgagatgcattatgtaggttttatgctcccttattttcaactcattatggtttatgtgagtctgtaggctaataatggataaactttcatgtgtaatgtgcct

SEQ ID NO: 229478 - DNA, 322 bp, Glycine max
accatgaatgacaaattccttgggataaaggtagtgttgccatgttttcaaagcccgtactaaggcatacaacttcttatcataacttgaatagattagggtatgaccacttaacttttcactaaaataagaaattggatggccttcttgcatcaacacaacccagatcccaacatttgaagcatcacacttctattcaaaagatttttgcaaagttggcaacccatgtatgggggcattagttatctttcgcttaataacattgaaaacttattcttgattctcttcccatttggaaccaaccatttttttgagcacttca

SEQ ID NO: 229479 - DNA, 126 bp, Glycine max
ccactgatcaaacaattcttggtactgtctgaagacacaacttctatgctgcttatattacctgcatctatagctttagcacacaagcgtagttaatatctgctgaaatatcacttatacatgttc

SEQ ID NO: 229480 - DNA, 415 bp, Glycine max
  unsure (1)..(415): unsure at all n locations
agcttataacactgctagtgctatttattgatgaccaatcctctntagctgtcttcttcaactcgtaattcaacaaaattctctgattacaattgaataattataatcatgcaattaattggctgattaggctaaaaacaaatattaagcatctaaagaagtttcaacataacttcaatagttcaaacccaaacacaaaacaccaaatttctcgaaaccaaaccaaatgaaatttcgaaaaccatacacacataaaagggattgatggaatttgtgtgatttactgatggaattcgtgatagacatttgtagatcttggttaaactaaaggattacgccgtgcgttaagtagggttgttgccaaaggtttggggagaggaagggatggtgattatactgacngtgcctcccatcg

SEQ ID NO: 229481 - DNA, 232 bp, Glycine max
tggagaggatcaataacaatgcttatatgttagacctcccagaagagtatggagtcagcaccacttttaacatttctgatttaattccttgggcacggagagttgatattgaggaggaggaactgacagatttgaggtcaaatcctcttcaagggggagaggatgatgcaatcctccctaggaagggaccagtcactagagccatgagcaagaggctccaagaggattgagc

SEQ ID NO: 229482 - DNA, 335 bp, Glycine max
  unsure (1)..(335): unsure at all n locations
agcttctacttatgtggattggcgggctttcttcactttcttggctccaatgcgagctctgaccactgttcttccttcccgcgatgcttcttttcatgtccgcctgagtgggcttatagcctaaaccatactctccacgatttccttgggtttttatcaagctagttatgccgccattgtctttgcctaaacccatcccgggttcataaccgttccccaacataactcgggccatcattactgccgcatcagacagacaaggttgcccagaaagggagtccacggaggaaatgctgaccacctcaaaagactggannagcggttctaacgattct

SEQ ID NO: 229483 - DNA, 361 bp, Glycine max
agcttgacgagagggtggtttcagatactcatgcttttaaagatattggcgtggattatggagtcacttttatgacaaaggaagtcagtgtggatgtgcatgatgagttgtcaggtatgcaaaacaagtgtgatgaagataacaatgaaaagaaacaacttccttcaagctcaaagccagtgggagatacaggtgtaccaaagcaaaaaactaaagaacaagaaccacatggttttcaggcaaaacaagcaaaacccaatgcaacaactaggtggattccttctaataagggttcttatcaagagtcaatgcacgtctcatatccaccatcaagaaataataattcaccagctaacctttc

SEQ ID NO: 229484 - DNA, 289 bp, Glycine max
gcttatatacctctcacctcattctcatcaatagttaatgatgtcaatccaatatacataatataaggccaagaccataggtgactatactatagcttccaacctgagcaagtcacactacagacaattgtaccttcaatagctaaaaaaaagcactcactacactatatataagactgattaatatcacaccaacccaaccacacaaataaacccttggcttgacaataccaactatgtaagaaaaaaggaaacgaaaataatattaatgtggacgcattaaatctga

SEQ ID NO: 229485 - DNA, 453 bp, Glycine max
agcttctatgtcatcatttatgtatagcagttcattatttgctcctgcagggcattattgtggagtcacaaaacgcagaggaactcctaaatcttaattaaagtttacttataccgtgtgacgcaacaaagagagcatttcaagcactatccgaaaggagataatataaataaaaagaagcaacttaagatgaagtcactttgttcaaatttatcgtgcatgctggacccttccatagtagaaaaagcgtcagggaaaagaaattaatgttatacagtgaaatgtagataaaacattgcttttggaagatacaggtgaaaaaacagaactttgtttccatcgggatgtgtgggatttataaatggagggttaaagcttaatgtgaagtgggaactttgttttgattttcttgaaagaaatgctgatgttgattcacctaactcttccgactga

SEQ ID NO: 229486 - DNA, 373 bp, Glycine max
  unsure (1)..(373): unsure at all n locations
cctagctgtacgtatcaacgaacanctgctgcttatcgcagacaaatagtagctaccgcgccacactagatgcggcgatatgccaatataccgaaaagagctaagaaggtgatcactttacccaaagcaccattgatggacngtgctctactgaacgagcagacttccgatgtaccaagcaagcatggaacactactcgccgaaaatatgcttcgttgcgctaaaactatgcctataaatgcagacttgtggttcaactgctaacattctttgataatgatgccatgtcactcaaagtttcaaaagcatccatttcttacacatgtgtgcttcttgacgaacgagtcttacttatgtcctgcgcgcccatcca

SEQ ID NO: 229487 - DNA, 471 bp, Glycine max
  unsure (1)..(471): unsure at all n locations
agcttgttgggggtgaccggcactccatatatttgtgcaaggtctatgatcagagnagaaaaccccaaggccttgtatgacttctccgagtccattgggtgtctcagatgcgcaatccctacaaactgatagatagcatctataatcagttgggcaacatggacactcacctgagtcaggatggcgtagaccagctgacacttcatcaggggaaggtatgaattatggtcgctggggagaatgttgctaagcaacatcgtcatccaaatctgcttgagggtggtcatgctggtgcgtatgatccgtacacgtcttcccgctacacttcgggcaaagtcctgccctggaacaacaaccgggtgatagccttctcatcgaaaccggaggcctgactcctcctttggctaaactcacaatgctggcctctcttccagaccagtggataccccaggaactggttaatggcatcct

SEQ ID NO: 229488 - DNA, 438 bp, Glycine max
  unsure (1)..(438): unsure at all n locations
agcttctcgatatattatgcgcctgaatcgtactttcgtgngaaaagttatgaccattggaatttcgcgagagcttccgatgttcaatttccagcttctcgatatattatgcggctgaattggacatccgtgtgataagttatgaccattttagtttctcgagagcttccgttgttcaatttccagcttctcgatatattatgcgcctgaatcggacttccgtttgaaaagttatgaccatttgaatttctcgagagctttggttggtcaattgcgagcgtcttgatatattatgcgcctgaatcggacttctttgtgacaatgtatgaccatttgaatttctgagagcttgcggtttcaattcgaacatctcgatattgatgcgccaaatcggactccggtgagaattatgaccattgaattctcgagagtttcgat

SEQ ID NO: 229489 - DNA, 434 bp, Glycine max
  unsure (1)..(434): unsure at all n locations
ttaagtcacctgcggcatgcaagctnnttgtaaaatttgttaagtcatggatttccttaaatttttcttacacttagtggagcgggccactcaggaatgacttttattctcttaggggtcatgggaaccccttgatcacaatttaaaaaattaagaaaagtaaagcaatagaacatacctttttctgtattttcatgttgattattcctaccaaaaagtatgacaaacctaaggtttcccatatgagtacctaagtttgtattgaaactaaaaataagaacaaacctacctaatgagtccctatgtacacaaatcatgaagatgttgggtgcacgagtgagtntacaaatgagtgttgcaccacccaaagcattcatcataccacctatgttagggatttggtccaaaaatacctatttgggcaccaacaagca

SEQ ID NO: 229490 - DNA, 456 bp, Glycine max
  unsure (1)..(456): unsure at all n locations
agctntaaatcaacatagatagttgtgtctttatttcatgcacttcaccaaaagaatgcaagctttgaattttttaaataactaatcgctaatgctaaatttttctttttctttttttttaatccatttatacacaattctttcaagtatctcaatggcatgtgttggatcaagtggcctcgaaataattaagaaggggaagttgaattaattatgaacgtgtcttgactaattaaaaatctatctttcttaatgttactagattcaattaggtttttactactaagttacgaaagtaaagaatagaaatagaaacttaaccataaagtaaaagcgataattaaaagtacacagcggaaattaaagagtgtagggaagaagaagacaaacacaagaattatattggttcagtcacaaaccgngcctacatncagtccccaaacaacctgcggttct

SEQ ID NO: 229491 - DNA, 254 bp, Glycine max
gctttaaggctgttctcgtgcataccatagtgatatttaacttgtttaaacaaagaccatgagttgatgtacatcaactatattatctaataactaataataatagagttagggtaaattctggcttctcaaatggatgaccctcacactgtcacaattttggacatgtaatttgatgggcctacataaaacattatgtatattaataacaactgttccatgaagaaaataaattcaaatcacggtctatgaca

SEQ ID NO: 229492 - DNA, 436 bp, Glycine max
  unsure (1)..(436): unsure at all n locations
agcttctcaatgaggttaattgatcttactgttctacatgttccctctcctgctacaaatatacaaaatatgaagacacccacctactgccctcatgagaatatgctattctttatgcaactcactgttaatttaatttatgaatcagcttgtgtttgaggacctgaaagcagctttagaggcagcacgagcggtatgttaaactaaattttaagcttctgatcttttacttttggttttccccaccgggactaaatatttngtttacttttgttttcctttctgctatcctacttcagttgattacttctttcatatgataataaaaggaccatcatgcgcgctagtatttgtatgggagagaaactaaagatattttttaatgctaatgtaaagtctgggtatggtatatgacttgatcactatttagctaatc

SEQ ID NO: 229493 - DNA, 466 bp, Glycine max
  unsure (1)..(466): unsure at all n locations
agcttcctgaaaattgtcattttagttagtaaatttggaatgcaaagacgagtctagtgacattttcaaattatggcacctttcattcaaagaacacgtcgatgttgcttgctatggttgtaaagccatatttatttattttttaattttattagtacatcttcatcttaatgtggtttcattgatctaaatgttccaaacttggagcacatttgtgcttgattccacattgctttatagattgagactgagtaaaccatgataaaaatataacccaaacgttagcatgtcatgattcattacacatnttgggctatcgaatttaggagacgactgagaaagaaaagaatatgtaattggctttttaggatgttacttgagaatgacgtacagagacaccaatatggatattcatgaaaacatgcagaanactcacctttgcttaaaattaaatttctacatataa

SEQ ID NO: 229494 - DNA, 279 bp, Glycine max
cggaattaatcccggatattactttgtaaaccccctttgacggctaaaccatatatttagcatttctcgctaacctaaaaaaaataaatcccaccgagcgttgaatcgattatccattaactactgcaaaaagaatccgatcgtcagtcgaccgtgccacgtggaaatcaggagaggtatcgaataagataacataaaaaacacggcttttgtaaagaagcgaaaataatggacgtcttattgggatttcattctaagcaatgctaatactaagggaac

SEQ ID NO: 229495 - DNA, 225 bp, Glycine max
ctacccacatgatgccaggctagacagcagagtatgcctaaccatcaaaagttaatttctttttaaaccaaaggccctaccaatactgacctcaaacattcacaaaactcaattaaacaaattcttaccacaaattgttaacaaaatgccaaagcatacaaaaactttaaaaaagaaaaccggtgacatgggtcacaccaacagaaataaaagccctttaaaagc

SEQ ID NO: 229496 - DNA, 337 bp, Glycine max
  unsure (1)..(337): unsure at all n locations
agcttttctccttacgtatggactcttcatttatcttacaagcngngacattatccatgctaagctttccatctagtgcaaagctgttgagagagaccaccaatgtgttccaactctcaggcagagaactgagtataaaagtttgtaattcatcatctatattcatatctaccttctttagaggattaacaatacctctgaaggagtgtagatgttcaatcatgttctaaccgttcatatactccagcttgaccaaacgtctgccgagatgaactatattctctgggtcctcttttgaatacaagatgcaagctttgtccataactcatacgcattg

SEQ ID NO: 229497 - DNA, 421 bp, Glycine max
  unsure (1)..(421): unsure at all n locations
agctnctccttccatggattattccctaattatggttcctcctctaacctcttctcctttatcgtctgctacatctccatagtggaaaatcaccattgaaggacatcattgaagctcaaagatccagcctccataaaagcttttcaagcaagcttccatcacaacataccttcacaaaccaaattcaatctcaattctatgacattcttgggagaaaaaagcacttagaccattgctaacttgaaattagcattcatttttccaaatggatcaataaaaaacaaccaaattggtgtttattttcaatgtcctactccaataccaatgcgagttcttattgagttgtcttctgagacacttaagagtagaatgcacaacnaccctcgactaactaatgaccagtttgtacatgaaatctatt

SEQ ID NO: 229498 - DNA, 426 bp, Glycine max
  unsure (1)..(426): unsure at all n locations
agcttagcaaagaaaagcaattgattaagtgaaacctgncttgcttatcgcttggaagtttatttttcaaataactgatataaaagtcaatgatagtatcattaaggcatttctcaggctgtaaaagctcaatatcgctctttttgatacaaacagcatcagggtccccctttggatacgcctttttaaatgcagcagaatcatgctccactatctggtctcccaagttaatttcatcttctgagggaatgaagttgaagtacaaatcaaagaaaatgttagacttgaatttttttttttgtatgagggaggaaagaaataaaaataagtaactactgtctaacataagtaacactgcacctaaagaatcttgatctagacatcttgtataaaatacttttaataagtaataggaatgtaattttt

SEQ ID NO: 229499 - DNA, 226 bp, Glycine max
  unsure (1)..(226): unsure at all n locations
agctnngaatagtggtagggacgcatgaatctacaagaaaaacactaaaatgcgggggggggggggggagtgattaatgtgtgctccttggactattacttttgacatctgacagggtaggtgtgaaccctacatatattagcatggcctctccacttgaagtcacacatgctgtaatgtagaatagaaagcttgccttgttccaactggaacttctaaaactgat

SEQ ID NO: 229500 - DNA, 371 bp, Glycine max
  unsure (1)..(371): unsure at all n locations
agctnnganggtgtcgagaagaaatcaatctttgttgttgctcctaacctacaggtggttgtcatcatcaaaaagggggagaacgtaaatcatgaatgactttgatgatatcatgaagagtttgcttgagaaagggggaaatgtaaatcatgcaagctttgatggtgtcgagaagaaatcacatgtttgtcatcatcaaaaagggggagaatgttaatgcctgtatacatgatnttgatgatgtcaaagaataatctacaaggctgcttaaatgatagtatttgcttaagaataattaagattgcttaacaaacaaagcctttgttcagaatcactaaagaccaagccttgccttaaaacaaagtgctttc

SEQ ID NO: 229501 - DNA, 405 bp, Glycine max
  unsure (1)..(405): unsure at all n locations
cagcttgactatgaaataagctaaacaatgcttttaggaaggtcatcggtcattttcattggcctaaattaaatcagacttatttgatatttactcttgtattttcaatcatgtgttgctgactaatgtttttttgtctgcactctgcagatttctgttgacctcactatctagtgtagacgtacctgtcttatgctctcctgtgccatttcaaaattctgctttgtcttctcttgacgtatgtccttggctcaatatagattttgtttatttgtatggtaactnttaaaaacctttgaccaactntgtgcatgtggtgactagctagatcaagtttatattgagctcaagttagactgtctcttctgctctcatgtttgctttgttggatggaactcttaacta

SEQ ID NO: 229502 - DNA, 196 bp, Glycine max
agcttcccagatggttcctaatgaagaatctttatgagaattatgaaaaagaattattcaagaaacttacatgaactatctctgcaaaagcgtttttcgacgtcacggtatctacgtcgattatcaaaaaccggtgcagtacataatgctgtggcatttttgtaattaatgccaattatattatgctgttaacgac

SEQ ID NO: 229503 - DNA, 390 bp, Glycine max
  unsure (1)..(390): unsure at all n locations
cccctttcttttatttaacannacaccggtctctaggcttaactacttaatatcgacaattgtaataagacaaaatacttacctgcaaatgacattctgcctgctaagatagagtcaactgaacatatgtatatgtgttcttgtacatcgcttcagtgagtatgactgatacattatgctatacaatatcgacaaataacttggaantatatatatcttctacttcattacatactctcctgaaaactgatatatcttcttattcatctactcganttatatatttccataatattgtgcgtatatcttccacacccttgcctagttgtagacatctgttgattctgagtgatactgttgagtgtactaatctactcatactatatatca

SEQ ID NO: 229504 - DNA, 419 bp, Glycine max
  unsure (1)..(419): unsure at all n locations
taagtactgcagctgcaactngaggataaggggaaccatacatgtgttctaagcggccgacgggcgatggtgcacaattatatttccacatccacaaatcgcgcataaacccaccattccttgttgcccacctacaactgagctcacgtactcccacgtagcccatatcctcgttcctctcaacgccgggtccccatcaatcctcccaagctttcccaacatgcaagtaaaacaacattcagacagcacaaactattcagccaataaaacagagcaaaggcagaaactctgccaaaacaccaaccaaaatcacagcttttctcacttaaagaccccagtaacaattccttcgttccaactcggtaaccggtggatcgactccaaaattntactggaagtctctagtacatatacctaca

SEQ ID NO: 229505 - DNA, 401 bp, Glycine max
  unsure (1)..(401): unsure at all n locations
agctnngacgcaagacactctagcttgttttatttnggatccaaagaaatagaaaggaaatctttttttattttattttcccgaatatcctttttcctaaagccaatctttatcttaagaattatcttatttgaaatattgtcatatactcaataagcacaatgtttttntaacaaagattcaaatttgatttatcacagtaaattaattccttatgctgaattactaattccttctgttagacttaactctccttggttggagagaaattttttggcatgagttgtatgacagaaaatgtttattaccatcataaaatatttattaacgaattaaaaaatatatattcttattaaaatatataaaattatgttattcataatttcttatacctcttttat

SEQ ID NO: 229506 - DNA, 340 bp, Glycine max
agagctgaccggtagcgagctaagcttaacgtctacgcagagcgttttgtctttatttcacgctcttcaccaaatgactgcaagctttgaatttattaactgaccaatcgctaacgcaaaatttgtgtttttctcttgaggctactccattaatacagaattatgaaaggtgtctgaatgtcacgtgaaggagcaagcggcctcgaagaaatgaatagcgggacgttgaacgaatcatgagcgcgtctcgactagttaaccatcgtccttgcgtagggatactactaccacctacgtgattagatactaagggctgatcgcgtatagtacaaatataaac

SEQ ID NO: 229507 - DNA, 242 bp, Glycine max
  unsure (1)..(242): unsure at all n locations
tttattatttttnnnatctggagtcgctaggcagaacagctgagaagcgacactgctcaaactgacggaatgtaaagtttccggagacctggagccgataaaggtcacgtgtccgacatatgcgcaacttaaactgctatcacgaagaccggagggcacacgtatggctagaaaacacatgtgcctgggaacccaggggctgccaatgctatgataaggtggtacccgagccccgacctgct

SEQ ID NO: 229508 - DNA, 171 bp, Glycine max
tatacttccttcatacaacatcacaatcatttcttttcacaacgcatgccaatagaaacctcatttaacttagaacctcggttcaaaacttatctaaagcatataaaatgagaccttctccacggatattccttatccgacccgacccaacccggtgttattaataataag

SEQ ID NO: 229509 - DNA, 362 bp, Glycine max
  unsure (1)..(362): unsure at all n locations
agctctaccggatgacgcgcgatcgaatattttctatccgacggcatgcaaatttcgttcagggattgaattgaaaacttctctggcgacatctgtcgtgaagtatcgaccgatatttttcagccgacattgcacaattctttntagaaaagctcgctggtcgataatggtctttatacggcagagtaagtgttcttgttttggtgttgcataaaaaagttacaatgcacttcggctatgtttttcgtgcgagttcaaccgacatattgtttcggccaggaaaacattaccccacctctgcaaaaaaataatttgctaaccggcttcatgcatatttctttcaacgattgaatagaaaactc

SEQ ID NO: 229510 - DNA, 420 bp, Glycine max
  unsure (1)..(420): unsure at all n locations
agcttcttatatagaacatcgaatttatttatgttcatcgctacatcaatgaatcgcattttagcaacgagaacccccaattgtggacgagattggatggaatcatctccctttgtttgatctttgcaattggattgatcactatcatcatttgtctatgtcatagaagaagagaagcagcggtggctccccaaccactaggagaggtggatcttcaaccgttgtagccgccataatatactaggtttttaatgtgggtttcagtccccttaagatatgcatctgggtggggcccaattcagacctctatccctttatttctttttgttgttactttgcngttgtgattcttcatgtatcattcttctttctgtattatcgatatatgattcttggtaccttcataaatccaaaatactg

SEQ ID NO: 229511 - DNA, 380 bp, Glycine max
  unsure (1)..(380): unsure at all n locations
ttaactagcttatatttgcgctacaaatcatctattgagcgattgattcaactgnctcgtctaaaaaaaataatattctaattatatgtaatgtatttagtctgtaactacagattcaatagttgaatttaatgttattacatcatgagaaaaaatctatttgatctaactatttatattatccagtctcgattaacacaaataagaatagtatcttagggattaatgagattactatttaggctattaagttttttgaactaatgcaacagaagaactaattgatatttccacaaaatcttaccctatgacatattcattaacaaataagggatggattataccgctacatagggatgacgttacattaaaaaaatatt

SEQ ID NO: 229512 - DNA, 386 bp, Glycine max
  unsure (1)..(386): unsure at all n locations
agctttctagcaagagagagcagatatcttttatcttagtnaanatgccatatagcttttcctatacctttcttgtggtaattgctttcgttgtatcaatgctgacgccctcaaattattgggtcacgaaatggaagcaaagcataatcgaggattatgctggtcacccattgtctctgtctcaccacaatgtgataacaatactgcctacaagctgtatggtggaaaatcatactgtgtttcacgacgtggccgccgggggaaatttgttcccgcgattaaaatcaatgggaacaatgctggaaatacaagcacacgcattgctggagaatgtgatgattctttaaatgactctactaagaaatggttacttgtacaatcatcat

SEQ ID NO: 229513 - DNA, 444 bp, Glycine max
  unsure (1)..(444): unsure at all n locations
agctntatcctcacgaccactatttctcttatacgcacaagtgttttaggtgttttttttttcatataaacaactaaaaaaattcccaacttctgcattttatctcatttcatacacctatgtacacacaatgtggatctaaaggactttattcagctcgtaatgaggctgggctaagaacaattcatggtttttctaggatgcaaaacttaagttctaggagagcattcacccattaaaccacctttctttgacctcccaacctttattgacatgccacaattaccaattcacagagtggttttttcttcaaattcttgaggttctctctctcttctcttttttagcagatgataggactacaacataatgnagttctgagtctctgtgtatctggtacttatatncctggaacataatttacccacaacacttccccaaatt

SEQ ID NO: 229514 - DNA, 408 bp, Glycine max
  unsure (1)..(408): unsure at all n locations
nagcttgacaagccggatagtgttatttattattataataatgaattagaggatgaagtgacataaaatgttacagagttcactcgcatggagaaaattttcaaaaagaaaaagactcatgttaaaaggataatgcaactagattaatacttccaaagaaaagaatgttttgcaaaaagattttcagacaatttaaatatttttatttggctatattaatataaatcatctctaattcatatatttgttaatattatgctctctcttttcattttctttcgatatactttgcggtttaataacttgaattcaatatgagtttggttatcaattatttttggattatagggtattataccaaatttataagtttcttttttagttagatttctaagttaaaacaataat

SEQ ID NO: 229515 - DNA, 369 bp, Glycine max
agcttaatgctgatggttatccgttgaagatattgagaaagaacatgaccaccctagcgcagacatggagtgttctatccttctctaacctaattcctacctcctatacttctgatgtcaccctagatagagccaaactcatttatggcatcatcatgaagatggatatgaatttggggtacctcatttcccaccagatctccctcatagcacaacatgacaatccagacttggatatcgtgccttgatcacagctttatataaggctagggtagttcagtcatattcgaggtccctagagagcctgagtttgaccattaatttggcatatattaagaaagaactgttgaatcttgatgatctagcagt

SEQ ID NO: 229516 - DNA, 454 bp, Glycine max
  unsure (1)..(454): unsure at all n locations
agctggaatcggacatccgtgagaaaagttatgactatntgaatttctcaagatcttccgttggtcaattatgaccttctcgacatattatgcgcccgaatcggacatccgtgtgaaaagttatgactatttgaatttcctgagagtttccgatgtttaacttcgagcgtatcgatatattataagcttgaatcggacatccgtgtgaaaaggtatgaccatttgaatttctcaagagcttccgttgttcaatttctagcctctcgacatattatgcgaccgaatcggacatccgtgtgaaaagttatacccattgaaattttcacgagctttcggtggtcaattttgagcgtctcgactgtgatttcctgaaacggacatccgtgtgaaaagtgataccaccttgaatattcacgagcgtcctgtgttcaatattagatcctcgaatattatg

SEQ ID NO: 229517 - DNA, 391 bp, Glycine max
  unsure (1)..(391): unsure at all n locations
agctngatgaaccttccttgatacctgtcttgcttgctagcttatttcatttgggctgcttaatgaacatgtttatatctttgaaataaaacatgacttgtgaagggctgttggttgaaatattgctagttatctctcttcatgtgaatgaatattttcgaacaaacacacttttggttaacaactgtgaattctgtcacttgaggacaagtaaactattatttctttgcttgaggacaaacaaaattgtaaatttggggaaagttattagttgttattcatgagttagtttgatgttgaatatatgtaaggaattagtggtttacctccaaattatgggtctttttgtaggaantgcacatatttttctcgttagtgtgattttataaag

SEQ ID NO: 229518 - DNA, 386 bp, Glycine max
  unsure (1)..(386): unsure at all n locations
aactagctctatcacgctatctnggtggtgaagctcttctttcatggctattccctagtggatggcgcctcctctcacctcttctcctttgatnccactacatcncatggtggaaatcaccataaaggacctcatgaactcaacatcaacctcataaagcccacaacaagctccatangtggaatagagccaagagctaagaaggctcttaacctcattaatatatgcttacctctcttcattgtcgttcttattttttctcatgtatctcctcacatgtcttgtgaaaaatgtttaacatgaatattagagtttcaccgataaacttgtatagaactagattgacttctatgttaaattcatgtctgtcttgacatgaatggtag

SEQ ID NO: 229519 - DNA, 438 bp, Glycine max
  unsure (1)..(438): unsure at all n locations
agctnggatgaagattcccgaccgagacatgttttcttccctggcaacaagagtgctattgatccaaatattctcctccgttatgatatgttggggtaaattttagatttttaatatgtcttgaccctgtttgatattatttgaaaattcatttttttttacttgaatatatgtcctgttgtgctatagccagtgatcaaatacattcattttcttttttgatataggtttgtgcaagttaaatttttttaaaagaaaatgtggactttcatatccttttatagatcttttcttatacttgagaacaagttgttgtgttgttctttattaagttgcttctacanaatttgtggctaatttattggtcttaaactcgatttatttttttcaaggagtatgaatcatgactattgcatcttttttgcaagttttaattct

SEQ ID NO: 229520 - DNA, 197 bp, Glycine max
acatttgcaacaagtcggtacaatactcgctgtgctttcttcatgctatatgagcaagtcatgatcagcatgttgatgaaaggaaatgcgccgcattatctggccagtggaatgtatttccctgcttcttgacatatgatcactgattggcttggcaagaataatgtgggtctgttattacgggtgcccgtgacatc

SEQ ID NO: 229521 - DNA, 438 bp, Glycine max
  unsure (1)..(438): unsure at all n locations
agcttccatcaagtggtaatcagagttcattatcttcaagtaggtgctccttaaacctccattaattntttttctttaccttctcttccattgttgtttcttcatttttctccatgtatctcctcacatgtcttggtctaaatgttgttaacatgattctttatagtttccaccgattaaacttgctatagaaactagatttgattttctatggttcaaatttcttgttcttgttcttgaaccatgaattgtgttgagtttaagtccctttgagttttgtcttgttattttttgtggctgaaacctaaaccataaaattcttacaaaaatattaaagtagaagaaaacctcacaaatctaaagtgacttgttcacctattgtagtttcttcatagaagtcatgtctagtcatgaaatttgtcacataagatttcttat

SEQ ID NO: 229522 - DNA, 303 bp, Glycine max
  unsure (1)..(303): unsure at all n locations
agatccaacggcagacatggagcggtttggaagtgcaaccaaattcgagacatcaacggtaatgaagctcgaacgttntaccgagcactcatgtacttctctagagcttattagaggctcctctgagcttctcgggcttttgaaagttctcaaagctcttgaaactcatcttatctatcccctctttactaattaactcttaaatatacggtgaataccacaatatcaactcacatattctatatttagatttttccgtgtccatcttttgacccgaatacatgagctcaaataattgctatt

SEQ ID NO: 229523 - DNA, 408 bp, Glycine max
  unsure (1)..(408): unsure at all n locations
ngcttaagacaacatacgaatcatgtatattttgtcatcangtaaaaaaatagctccatttgaaaaacaagaaagttttcaaaccagaataatttttcctattgatgaagaacatatcgtcttcaccatgttggtttccaagttccatctgaggatcgacattaaagagctttctcccaacacttccaaagctggcaaggacctgctcaaagtgagataacatccaccaaaacttatcaaaagagagggaaatggggagtatagctaagtataccatgacatctcatatagctacgatacagcaacaacacaacaacattatcgagaataactactagagattcggagccaanagtacatgatttcttctgcagagtataaagtaaatgtggctccactcatgaactg

SEQ ID NO: 229524 - DNA, 376 bp, Glycine max
  unsure (1)..(376): unsure at all n locations
agctncccgctaagcgaatatatggttatgtgctaagcngagggaggctagcacttaacgcttaacccttacatttgaagctgacttggtccgctaagcccatttcaattcgatctgaattgggctaagcgacggcctgctcgctaagcgtgacatgtcgcgactaagctcatttccttgcggccagaattgggtttcattgagctaagctaaactcatgctagctaagcacaatttcttgcggccatagcagcactaagcgatccataattcactaagcgcctacccctctaaatcaagatgcattattttagctaagtcggcccagagccaggcttagtgagaagtgcaggtattttggtctgtagaactcgct

SEQ ID NO: 229525 - DNA, 395 bp, Glycine max
  unsure (1)..(395): unsure at all n locations
agcttcattaagaggcttctagcacactctctacatcttctcaaagatcccaatgatcagatgattgacaagtgtcttgtgaagtttaaggccgaatttcgagaagatccaacaattgatgaaggctgggcagcgtttttaccgagacagcttcatgtagctttctctagaagcttcattaagaggctttctctagaagcttgctcgtagcttctttgagaagctttctcaagaggcttctttgagaagctttcttaagaggcttctttgagaagctagatccttatctatccacccctntattaactaaattaactttccttacaaataattacggatgaatataacgcaacagataatcaaacatcgaacatattactaataatatatatata

SEQ ID NO: 229526 - DNA, 147 bp, Glycine max
ctatgccttaccttggataaacaactatggtgatgactgaatgtgcaacaagtacccacagcacagtagcacattggctccaaaggtgagctaagtgcaattggccctatacacttgactaagccctttgttgataaccaaacatat

SEQ ID NO: 229527 - DNA, 335 bp, Glycine max
  unsure (1)..(335): unsure at all n locations
agcttgtaatgatgcataatgatgatcgcttaangggacagggagcaccaaggaagttaatgctgggtcaaattcacactcattgaatgcctgtgccgtgacaatgtggcgccctctggccatcaaaaactatgtttggtgacacgcataatcactactggggagagtctttgtgcttctgcctatgagcattaatctttttgttaaatatgcaccaataacgttacataactaaacgcaacagagaaagcaattacatgtagggatctttttcgtttggtcaccaccaacaatatgagacgtattctcagttccacccacgctgttatgcctac

SEQ ID NO: 229528 - DNA, 468 bp, Glycine max
  unsure (1)..(468): unsure at all n locations
agctcgaagaggatgctgttatgattgaaattaaagagagaagaaacgagaacgaaattaaaggaataaaagagagagagaagtggaactttgatgcaagggatgattgcatcacctcacaaggaaaataaagttaagatcgttagtaaaataaacatccttgtacatgagtacaagtaacttctctctagccatcaaagcactctcaacctctcttttctttgcaaatacactcattttcttatttttctcctttgatgtcttttttattctttcctttctttttctcactcttattttcttttcttttctcactttttcttgaatgctcaattgttcttctctcaacttacactctcttacaattccgatttgattgacataggccttagtgggccgaagaggtgtcaacacaatggngcaactgttcaaaacaaaagcatatctatttttcgaaccatcatgtgt

SEQ ID NO: 229529 - DNA, 272 bp, Glycine max
agcttgttatactctgacatgcgctctgttttcaataagcataacaagatatatgggagcaagtcagcataggacaccggaattggggtgaattctacaggcttttttgctgcaaaattcatttcttggttggtgttttggtttgtgctaaaggtggtgttcgtcattggaagtgcagtagactggctttgtggttgatttagggatggcctttgtggataactgggtggtgggtaaggagaaggtttgtcattggctgagtaatgacattg

SEQ ID NO: 229530 - DNA, 446 bp, Glycine max
  unsure (1)..(446): unsure at all n locations
agcttaccaccataggaggccatggataagatctcggaggattatagagatgaatgaagggagagaaagagaagagcatgaaattctgtggtctaaaagagctctgaaatctgaattttaattttcaaatgatcaaagttggaaaaatgtacacacatagcttctatttattacctaagtgtcacacaaanatggaggaaaatttgaatttctattcaaatttcacttgaatttgaaattgaatatgtggagccaaaatttcactaattatgattagtgaatttcagatatggttcagccgactaatccaagatcaagtccaagattctccactaaatgtgtcatgaggcatgtaaagcatgaaagacatgcacaaagtgtgactatatgatgtggcaatggggtgtagcaagcanatgctcacctnnccctntaaaaattaattg

SEQ ID NO: 229531 - DNA, 404 bp, Glycine max
ctaatcttcattacccaactcccggttcctcctacccatatcaactatgcagcttgcgatcaacatgaatggccttcctaatattacaagaatgtcagtatcttcacagatatccattaccacaaaatgtgtcgagaagataaaatgtttcactctgaccaacacatcttcaattactccatatggcctggtaatggagcgatcagctagttgtaaagtcattctagttggcattatctccaattctcccaatcttctgcacatggagagtggcattagattaatgttggctcccaggtcaataagtgtttttcccacagtgacttctccaattgaataaggaatagttacactcctaggatctttatgcttgggtagaaggatcttttgaatcactgcactac

SEQ ID NO: 229532 - DNA, 478 bp, Glycine max
  unsure (1)..(478): unsure at all n locations
tagtcacctgcggcatgcaagcttcaagaaattgtgaagacaagtaggtattatacatatacataaagttcaaatngatgtagctttacacactactgtatgattgtgataattaaaaaagaaaaagaaaaacagttttcttctagtaggaaactaaattcatacctaggtaaagtttttagaatatctagttacccatgcaaaatttcagcaaccaaggcaagatagaaacattgtattttaaggataattagccactgaatgtgtccttattcttcgcacagcaatgaggaacaaatccaaatgatatcagaaaatgggataacaccagtgacaaatatacaatagtactaacagcaatcaactacggaaagttaacgaatattggtatttaagaataattagacacaccatgtgtccttattcttcacagaacagaggaactaaaccaaataacatgaaagcggaaagaatgaat

SEQ ID NO: 229533 - DNA, 468 bp, Glycine max
  unsure (1)..(468): unsure at all n locations
gatgcaagatgcaggtgatcatgttcgataatggaattgaatatacctctganaaatttaacaagttttgtgtagatgcaagcattgaacatcaattgacagcaccatacactccgcaacagaatggtgttgtcgagaggaaaaaccgaacaattatggagatgacaaggtgcttacttcatgacaaagggctaccaaaggaattttgggcagaggctgcacacacaacagtttttttgctgaataggttaccaacaaaagctntgcagaaaaagacttccattgaagcatggcatgactacaaaccanagctaacaaatctgaagacatttggctgcctatgtttctcttacatacctcaagtaaagagagacaagcttgaanagaaagcagaacctggaatttttgaggttatagctcaacttcaaggcctacagaatctacctaccatagagcaacagagtaatc

SEQ ID NO: 229534 - DNA, 361 bp, Glycine max
ccaaaaggaaggacataccactagtcatatatcattaaagtaattaagtttaaaacacataatcataaacaaccaagagctagtcaatataatcatcatgttcagtcatactaagcaagttttaaaagaaatactaagtattcaaatttcataaaaacatagccaaatacaaggcttaaaaacaaaatataattataatctaaatctattatcagagaatcaaaacttaattctaagttacaaaaattagttatgaacacatacatggtaactcattacttatctcaattattttagcatatcaatatagatttgacaaaaatgcaatcatgtcatatcataaatgaatggatatacatac

SEQ ID NO: 229535 - DNA, 393 bp, Glycine max
  unsure (1)..(393): unsure at all n locations
actcagctgagnagtccttcgattctggtatacatttctgactgtatggcatgagatgaaattcaaagattggacctcttgctagttgttattaatgaatagcttaaacacttgtgcttgagtgaaacagtagcagtgagactgtggtttaagctactttccttgatatctgtcttatgcctaactccatctatttgttcatgttacattttattcttctctttggataactgcataccttgtgaaagacaagtgatgagggcattttactccattatcttattatgcaatcagtaactattgttgcatacacctttgtatatagtcactgcatgtcattgtcacttgaggacaagtgagttgttctctttatgctcgaggacaagaaaaact

SEQ ID NO: 229536 - DNA, 383 bp, Glycine max
tgttttaacatgagaaatgaaataaggtggaacaatgcagtgaattggttagtttggacacgaaaataaggttaaagctaaaacttggtatgtaaagaacatcaatgtgagagtttcttaaagaattttgtagttctagagatattagctattacttggaaaccatttattaacatgacgaaaatgagttttgattatgaaactctaatatggagtaacaaacaagcaaacatgaatggttgctaatgtatcaaggatctagttttgttgggtttttcgaattggtcaaatttctaacattacctgaagattgtgagaattcgatttagatgtcataaaagatatttgatttgtgctttgactttcttatttgtataacaata

SEQ ID NO: 229537 - DNA, 418 bp, Glycine max
  unsure (1)..(418): unsure at all n locations
catgtccaccaaatgcttcacaatttttcctttgctcaacagtagtaactgacacatcatatgttggaaattttgaatatatgaaaatattaagttttaccacatcaaactctcgggcaatcaatgatgttcaggaaaattatggtttccgcaaccacacactccaatattccaaatggacacaaccatgtcacgcaatggtttccttgagaaacaccaattggtgttttgattatgacttcattgactatgtacgaattttcttttggccagccattattgtgccttcaaaataggtcttatttgattattacaacacatcaaggttgacataggttnttagccccccctcccacttaatatagaagttcatatacttaacttgttaattgtcaatgaaggcaaatcaatatcatgt

SEQ ID NO: 229538 - DNA, 375 bp, Glycine max
  unsure (1)..(375): unsure at all n locations
taataatcataatattaatcttactattatctatatcatctttatggcattatgaatgacaggatgaaatgacatanagtgcttacaaagttcacttgcatgtggaatttttttttaaaaaaaaaactcaagttagacggataatgtaaccagattaatactttcaaagaaaataacgttctgtaaagacatttctagacaattcacatattcttatttggctctattagtataaatcatccctaatccatatattgtttaatatcatgttctttcttttttcattttcttttgatatactctgtcgcttaataacttgaattaatatcgatttgttatcaatattntcgatttgacattctaatacaaatttat

SEQ ID NO: 229539 - DNA, 451 bp, Glycine max
  unsure (1)..(451): unsure at all n locations
ggatccttaagtcacctgcggcatgcagctatagccaaggacttatctgaattattnccttgaagcccctttgacctatgacccctttctctgtttgaagctcatacaagccttaagtggaaaaccataatatcaccttacccttaatgatatttggagctttggaatctgtttgggaataagtgtggggggtatgtttcataggaaaatataattttttgccatgctaaatattttattttggccatgcttgatgtatatatatatcgcctagttcttgctttaatcgtcacatttgtattgtgtaataaaaatgatataacaaatttcaattgctgcaaattccgcaaattcctattgttaagaataaganaaaagagagagaagtgatgttgaattaatgacgtctcgttatgatgactttatctgtgaccttcgtgatttgttgata

SEQ ID NO: 229540 - DNA, 435 bp, Glycine max
  unsure (1)..(435): unsure at all n locations
ttggttgtattcacctagaatgcagctaataccctanattctagnntagaaaggaagaacttgttaatgcaaatgaacacacagagctttgctggggttctttgttgatatcaagccattactagagtaaggaatgagatgccacctgtaaaggaagagagaaagagtagtccatgactttttctgcaggaaatggaatgcctaagttctatgtggggggaccgcggggtggtagcaacatgttctgcccacaatacgacttccatacaactttcatacaaacctttgatacaactggatcagacaaaataagaaaatgaaaaatttattcaaatcaatccccccttctgaacttattggagatgaattcataaacagggatggacaagacaaattactgagacagataatataacccacgtattagagacacct

SEQ ID NO: 229541 - DNA, 270 bp, Glycine max
agctagcacgatccgagaatattccgaatgatgcttatttctaaaagaggggttattgcgcaatccgtgagtttccgtaacttcttggaaagctaaaaaagagttaattcataatccgtaaggattcgtagccttgcggaaaggaaataagtatcgttacaaatatcttaaatgttcttaacgtttcgaaaataaattttccggaatattgataggggggtgcattcagtaaagagtggggcaaatagtaactatgcccacttgggcctt

SEQ ID NO: 229542 - DNA, 133 bp, Glycine max
tcaggattgaaaattaattttgctcagagtatctttggcgcttctggagtatcaactcaatggaagctacttgcggtcaattatatgaactgttacttgatgactttctcttttgtttacctgggtattccca

SEQ ID NO: 229543 - DNA, 304 bp, Glycine max
tactaacaaattgcctttatttatatacacaattaatatattccctttaatcatttaacacgaaaaatatattggttatttaactaaaacgcactatattttagaaaaatactaatacgatattttcttatcaaaaaaatagagaatgccttatatcaacttagtacattaaaaaatatataaatagtttctcttatattattaaaatacataatttaatattatcaactaaaataataatattttaaatataagtttaaaatattattataaaaatcaataattctcaaatgcattatagtga

SEQ ID NO: 229544 - DNA, 326 bp, Glycine max
  unsure (1)..(326): unsure at all n locations
catgataccattaggatatcgctagctattgcagtacataaaggaaggaaaatctgcctacttgacgactcaagtcaactttcttaaatggatatctggaagaagaaatctatgttgagcaacctaaaggcttccttgtgaaaggacttgaggacaaagtctatctattaaagaagactctgatggtctgaaatagaccccaagagcttagtacaacaggatngatgaatacttatcataactaggctttggtaaaagccttagcgaatccactttatacatcnaaggtgatcaagctaacttcattgagacctctttgatgctgt

SEQ ID NO: 229545 - DNA, 410 bp, Glycine max
  unsure (1)..(410): unsure at all n locations
tgacggagtttaccatgttgcctcatatacacggaaatgtaagaagaacctggggtggataccgctaatcacgctggctacctggtgagggtgaatcacacagtcgatggctcaataatgatngttcagcacaaggaccataagatctctatatttaactgatattaagcttctcagaactcattaattatacgtaatctattcttccttttggaacgcgtacagaagatcactaaaagggtgaagacaggagaaccatttacttttgtataccgacctgctaggaacttctactccaatgaagcaaacttgtctttcactcatcattcttggataagaacacgtctttaatgttgttagaaccgatactagcggttattttcagtaacactaaggttcactgtttcatg

SEQ ID NO: 229546 - DNA, 383 bp, Glycine max
aatgctcagtttgttatacacactcacgtttatactccatacacggaaatggagcttattatcaggacacaataagccagatatctatcacatgccaatgtaaatgctcgactaattctcctagatagcattaagcctttatgcttcactacgtaatatatctctattttacttacggattgtgataattgactgctttatgagcctatggagggagcggatgaaaaatgagagaaactgcgacatacatgtggtacacaatgaccgtacgtgacattgagagtcagacatatgaatgccataaagcctacacgacgttgtcgtgtccatcacagtgactattcttctatcgcattgactttgctaagtgtgtatatgcgata

SEQ ID NO: 229547 - DNA, 423 bp, Glycine max
  unsure (1)..(423): unsure at all n locations
tataggnagcatggaccctctgtcagtatgggactcaaaagagcaaggaagaagtggctgaccgtcttttgtctccggcatagcatattggtgaaccatcgatgagtattggctccttctggaaaactcaaaagcagttctgtctaatggcttccacctcaggtttcttgtggattctaaagagataaatgatgcagtagataaattgcattcactgctgtggaaatctggtgaagatgagcaaacaccatgtgagctataaatgtactggaaatgcttcaaatctatgcgattgtcttgtgacatagctccagcattctcatcacaaaaatcatcgcttttatctgcaagttgcaagatatctctaccaatttctgacacattanaactatcagtctttccaaaatgggcacatttgatact

SEQ ID NO: 229548 - DNA, 386 bp, Glycine max
actcaacctgtgcttgaggcaaaaaatatgctctaagaagggagtgatgtttattaaaaaacacggcgcataagatagtcacagaatatatctgggactatactctctacgctttgatgagatttatgctcaattatatactctcggtgtcatgcactctttccatccgactcaatgatttagctgcttaattccaattatctgcctctagtttcctggctgcaatcattctattttggcttatgcacggtgtgcagactgtttcatgcctacacaagattagctatattgaatgggcccttgacactgaatataatctgttgcggcctctactaatagccaatgatacacgctcggtcactgacaccaccagaatggacatgcaa

SEQ ID NO: 229549 - DNA, 453 bp, Glycine max
  unsure (1)..(453): unsure at all n locations
agcttttcgattcattctatgtacccgtagtggtccacattgtgtttcgttgcattttattctcgntttgtttactttttataccccctgttgacgtgcttaagccattntacttaagtcgtttctcgcttaacttaaaaataaaataaatttccaccgaacgtttgaattgtattatccattaacttcggttaaaataaattccgaccgttcggtcatgccgtaaccacgttggaaatcaaaaaagaggtaaaaaataatataaataataaaaaaaaaaacatcttttagtaaaataaagcggaaaatcaatcggacgttttctctttgggatttctcattcttaatcgaattgattaataactaaagtgaaactaaggctaaaatcaactcgcctagtcaagctcgtccacaaaaataggcttttgaagttcgtcatttcaatttcccact

SEQ ID NO: 229550 - DNA, 212 bp, Glycine max
tctcttcgcctaaatcactgtctggttccagagaggggtcgtggtgttcaacccagaacattagggaagctcatgacagtatttgtgcagaaacacgggatatagtgaggtgacatatgcatatgtgctatagatagagtgggataacaagtatgttgataagtaagaagccattgaatctaaattttacaaactccatttctcaaaaaagt

SEQ ID NO: 229551 - DNA, 462 bp, Glycine max
cgcttcacataaagtggagatgaaggaagttttagtacaagttcttttaactagtgcttgtacttcaagaattgatgtttcttatactgttgaaccacacaacaattaataagaacatcagattaacgatcatgatgttaacaacgaacctatagtaaaacaatcatcagaaatagtattaagaagatttcaaagagaaaggagatctactatttcaaatgactatgttgattatctacatgagtcagaaactaactccagcattgataatgatccagttttattttcagaagccattaatggtgatgattctggataatgtgtagatgctatgaaagatgagcttatattaatggcacataatggtgtatgggaccttgtggaattgccagaatgatgcaagagagtatggtggaaatgggtcttaatactaagcatgactctcaaggcaatattgaacga

SEQ ID NO: 229552 - DNA, 283 bp, Glycine max
acacgggaggcgcaactagcaactatcgagctgacttactattacctaacacaattaaacacacgctcatgaatggacaacgccatcgaaaatttggaaacactccttgcaatataagactgccaattgtgattgaacatcaaagaacatctttatctgaagacccacaaataattactatttcacattaaccactgaatctattctcactatgtcctctttgagaactataacgaaaagcaaactgaaatattgttttctaagatgaccgaaaacgaaactc

SEQ ID NO: 229553 - DNA, 434 bp, Glycine max
  unsure (1)..(434): unsure at all n locations
catcaagcttncccacncgcagtgttgaagcaaatttttaagaggtgttcaatcctacgaaagaaaaacagtgactatgatgaaggtcacccatttgatgtcctcaaatggcactttgctgtctatgttcgcgaaaacccaactatgtatactgtgccaatctccttcttggctcacccgtagttccaatcactccttcgacangccgaataaaatattggataccatcactaaatgggcctcacaatctcttgtgatgaagatgtcttcaggtctctaacatcctcgttaagatgaacataaaacatctacaacaaccatggacgaggtttatttattatatatgatggacgggtctgactgaagaagatggtctagatgaagcacaaccacttttgcttcttttttctaccttcgtcattgccattttcatt

SEQ ID NO: 229554 - DNA, 383 bp, Glycine max
gcgaccactatcaatatatgactttctgcacctactatatgttgacttcaccaacgcttgtattggaatgctgcgacaatctttcaacaccttatttacacattctgataaagtgggtgtcatgtgaccatatcgtccgtcagatgtatcgtaagccatgctccattttttctttgagattcgatcaatccatcttgctatagctggactcaattgacgaaattctctaagttttgatcatacacattgcttgacaggagtgtacgctgcatcaaaatttgtattatcaacaggtgcacgtagacatgaaactcaaattaaattagtgtataaaatagaccttagccaatttcttgaacatctcgttttggttcgctgtgttg

SEQ ID NO: 229555 - DNA, 460 bp, Glycine max
  unsure (1)..(460): unsure at all n locations
agctngaaatgaggaagtgtataagggngatacttcctgtttttattcgttgaccacagagtggtacctggagatatgtcgcggnggtcaggggccttggggacgtcaggtggggtgctattgcccaaaaccaagcttgaccaatcccgacccaacccgagcatagtcagtcagtgagaacctgtgatgtacctaagcaggcgagctccgggcagtcaacagataaaaggaacaaagaccacaaagcaaggaagcttgtgtggtggctggccagctgtgaatcttatgtgatatgggttatggcctctggtaatcgattaccaagggtgggtaatcaattacaaggcttaaaaatgaagacaagaggctaagatggtctctgataatcgattaccaaggggtgtaatcgattaccaggcttgaaaacgagattangaagctaggagagcttctggtaatc

SEQ ID NO: 229556 - DNA, 487 bp, Glycine max
  unsure (1)..(487): unsure at all n locations
cgcctaattaactgganantgagagagaatgattattaaacacactatatgaaaatactaagtatttattacctatacttaacagaaaatacttataacactacaaaataaccataaattgggagagtttgatacaatttatataagttttatacaaaaaagttagtcgttttcatcgactaacaggtacctgcaattacacttcgacgctcaagttagtggcgtatctctatgaaggtgcaagtaataattaggttaataatagaatgaatacttttaatgcatgctagctatatatataggtattacttgtgggcctttgnggcgtaatatatgtggataaatacaaggagaatcttaagagataaagatgttattctatctcttatttcccttatctttgtttataattatcttgtgcaaattctgccaatatatcttttccctgatttcaagaagatagtatgatggctacatatacttagtc

SEQ ID NO: 229557 - DNA, 439 bp, Glycine max
  unsure (1)..(439): unsure at all n locations
agcttatgctgcaaacatttatcttagatcttttctacctcacnagcaaaataaaccacgacaaaccaattatgacttctccagctataaacaccatcttggatggaggaatcaccctaatctcatatggtctaaccctctacaacaacaacaacaacctgctccttccttccaaaatgctgctggcccaagtaaaccatacatttctccaccaatccaacaacaacaacagccccagaaatagcaaacagatgaggctccttcacaaccttccctcgaagaacttgtgaggcaaatgactatgcacaacatgcagtttcaacaagagaccagagcctccattcagagcttaactaatcagatgggacaattggctacacaattaaatcaacaacagtcccagaattcagacaagctatcttctcaatntgtccaaaat

SEQ ID NO: 229558 - DNA, 195 bp, Glycine max
aacaggacgagaactaattgaaaacgtcggacaacatcagtcaaaaccattaattacaaccaaaagcgaatcttcgttaacctaaagttcattcgaaactggaaagcaaaaacaaataaaatcatcaaaaatagaagtcccaatcaactcgaacaaaaaaatcaaaacgaaaccattaaatataactagtaaaaa

SEQ ID NO: 229559 - DNA, 451 bp, Glycine max
  unsure (1)..(451): unsure at all n locations
agcttgtcggcgaattcatctactgcggcctttagaagggggnnttcatcagctatggtgttcacaacacatatcggaattcgttcttttccctaggaaatatcatcaacacatacaccttctcttgttttgaactttttatatttcttcacttccctcatagcaagctctggttgaccagggattcttcgcagacaaaacttaaaaaccagcttcccatgtggtcccacatccggccgataagactcaaccacatacaatccatcataaacatatatcctgcactntccatccattgattcagaatcatgtatcaacctaatagaattttnttcctcactactgttcttcagagcaagattgccctgcttgagcttctgatcttcaagttctttatcagtgttcttcacattcccaccctgccctgtatatatcaagacatctgggatac

SEQ ID NO: 229560 - DNA, 364 bp, Glycine max
  unsure (1)..(364): unsure at all n locations
ngtagaggctacaccaagaaagagggtctagagaatgtattctgtttatatagcaaaataggccatggtaaacaattacactatcataagcgtgttgctctattcctcattgcttttagtcttcatgagtgtccaacaacatcatcatcgtattactttgcttttaacaaaggccagacagctgcttctgcaaataagttgacatttgataataaaatcctgtgatgtacatcatgccactctattcatgtgaatacttaaatacacccatgcttngtttgcaaatctcttggtagagggttgactgggtagctgtcaaaggctcttgaaatattattttgacatcccaaatcataaatattta

SEQ ID NO: 229561 - DNA, 447 bp, Glycine max
  unsure (1)..(447): unsure at all n locations
agctngaagagactcttaatanattcatacttgtatctatgnccaaccatatgagcatagaagccgccatcaaaaacctggagatacaagtggggcaattagccaaacaagcgtctgaaagacccactagcagctttggggtcaaaattgagatgaagcccaaagaggagtgcaaagtaattttcactgagagagaaaagatggaaaagataactgaggaagatgttcatgatgaggaaggagaaaagaatgaaaagagagaatgagataaggagaaagcacaacaatgggagaagtgctcacaagtaaaagttcaacaaataattattctccatgtcaatacccctcttcatcaatngantggcaaggaagaaagacatggagaacatgatatatctttaagtgtcattcttttcttgatcaccaacacttctcttgcaatgatat

SEQ ID NO: 229562 - DNA, 471 bp, Glycine max
  unsure (1)..(471): unsure at all n locations
tggctgcgcacgagctccgatatcgtgagtatttatatattatgacgcattgtaatcgattacaggtattggtaatcgattacaggcccaataagccttctggtaatcgattacaggatgttgtaatcgattataggctgcctgttcaagtgtaatcgattacattgagtggtaatcgattaccagagcctatcctatgctagcttctaagagaatatctatatttatgctcaaatacatcttatatgactaattntcactactaatacactaaattcaatcattcaattactatatacacaagaaatcataaattctatcataaagacaagaattcaaacaagatcaaacaaaataatctacaatcaaaaggtaaaaagtatatcaaccaatcaatcaaccaatcaattcctattnttctaaatctcttacatctaagagacctaattctcttctaatagagaaaaacac

SEQ ID NO: 229563 - DNA, 446 bp, Glycine max
  unsure (1)..(446): unsure at all n locations
agcttgtgcgaatcanaatcactcctgcattttatctctagcatgcattctttctttctttacccactcctcacgtttggttntttagggaaaaacaccataactaaacgcgccacaaggcatccctatcgcaccagatccaaatctagaacggtgggtgatcaagaggagacacaggaacagatgaaagccgacatgtcggctctaaaagaacaaatggcctccatgatggaggccatgttaggaatgaggcagctcatggagaaaaacgcggccaccgctgccgctgtcagttcggctgccgaagcagacccaactctcttggcaactgcgcaccatcctccctcaaacatagtaggacggngaagggacacaatggggcacgatggcaaccctcacctgtgatacaaccgagcggcttacccttatggattgccgccaactac

SEQ ID NO: 229564 - DNA, 478 bp, Glycine max
  unsure (1)..(478): unsure at all n locations
ntctcataagtcctaaatgacatttcaaactaggattaactccctttaacctccaaataccattaaatccagatttggccttccaactctcaaagtctcactctttttccactcataacactacattatcactttctaaccctaggttaactctacccttcatccctagcagttttccatccacaatttcagcacataaacatcacaagcatcatcataaaaaccctaaaactgaatgggtaagcttgactcacaccaaacatggcaagttcaacacgctntcaacaaatctcttcacaattaactatcacaaagcataaaccaagtaaaactacccatcatatctcccaaagccccatacccacgaaaatntatgtgagaagaagtctacccaaacctgagaatntgaggtcccacacgtagagatgcgcttcacgactcccaaaatgcgttcctttcgcgattnggagcagaaatg

SEQ ID NO: 229565 - DNA, 454 bp, Glycine max
  unsure (1)..(454): unsure at all n locations
catgcaagcttttatatctcctgagatggagatatatcataatcagttgtgtactatcatattctaactaattctagaatattctacaatctctaacagaagtagttatatgcttcccactccatgcatagctctacccgattcgcacgtaatcttccatgtacgttggagctttcgttttcctcttaggcctctcttcatgttgctgcccacttactacctgcaaccccactccattcataagtttaaccaagttgtcatggctagggtctgcagtttttttttttttttttttgcatatatgaatactctntttaaaagagggatgtatgcacaaaatggtaagcgacaaagaagacgtcggaactgaagtaggaggagaccgctgagagctcattacagatgaagatgatagagcaactgtgggtggcaatgtcgacgaaagtgacaaagc

SEQ ID NO: 229566 - DNA, 464 bp, Glycine max
  unsure (1)..(464): unsure at all n locations
ggatgataagaactntcttctatggtgccagcagttggaacctgttatcaaagcgtaccatcttcaacacttgacagttagcttagatcttaaaaataggctctagacacgactgtactctgtactgagagagtcagttaaaagaccactctacttgcacttgtaatgagatatgtaactaactcagtgctgagaaattcagttaaaagaccactctctgtacaacacttgcacttctaatgaaatatgtattcccattcattcctggaatctggatccgaggctaacttgtgttntgtattcaatcagttaccgcttgtcatgggaccaaattcggcatctttgtcagtgtcgacgtcgatatattcagttctatgtggcttctcttcaacattcatcacatgtcaatcaaacagaaatcagagaaatagagaaagatcttgattcaaaagtgattcttctat

SEQ ID NO: 229567 - DNA, 186 bp, Glycine max
aacaacatccacttgcaaggtatacacttgtagcgtgcttatcggaccttactccaatgaactagctccatgtgtgaacagacctgatgatccaatgctgatgaagtgatctttgccttccctggcgaaaggacatgaatggatattgacttttattcattcacacttgactggtctcgaactcca

SEQ ID NO: 229568 - DNA, 311 bp, Glycine max
acagcaaccacccgatagtgtaccaatgtacaagacaaattatcttaagtttaggtataccccaattgatcttcggaacaccaattcgcccaaaagttatatatcctttgatcctcaacaacatgtgtatcataaaatttgcagcacagtatgtggaccctccggtgcagtaataaccaaatgtccttaagcacaatttaagcactaatctatgacagaaaatcattaatttttcatgacaattggaattatcgataattaatatatttcatctcgtagaaatatattggatcaattggacctaatttcaa

SEQ ID NO: 229569 - DNA, 202 bp, Glycine max
cttgatcacccactgaccagccaagcacaaaaactgaaccctaccacataccaccataccaacaatggaaacagaggaagagtgtaattacagaagcaacccactcagatgaacccataattgaatcacgaaatgacacacatcctaccacacaatcaagggcggcgggttggtattacgaagccatattagatatggtcac

SEQ ID NO: 229570 - DNA, 261 bp, Glycine max
agcttcaggttaccgatgtaaggctagtagtctgtctaaattttacggttggacactatgcacgttgtgaagaccgctgagtgctccgacatggggctctgtgcggttgctgaaaggtgtaagatatttaagaatgttacattgatgggtggacgactaatatgatcggtgatgatgggttggttgccattgccaaacactgtcttaactagcaggagcttgtgctgatcggtgtttatcccactttttcgagcttggcag

SEQ ID NO: 229571 - DNA, 407 bp, Glycine max
tactacaaacgatttttgtttttgttttgcttctcatcaaataatcaccgcactgttatttatttcacgttttatgtgactaattaataaataacaacgccagtggtaaaaatggggggaataaaagaaaggaaagaccaaaaccgattatactaaccaataagcatcaagcatctctttcttataaaacttttccacgttaacgaaatcgataaagcatctcctatctatctcgggtggctgtccttctctctcatgcagtaatggaaatagacagcgcgcgcgaggagtccataagaaaaaaattactcggaattaccttctgttatgcgtaatgatgagttacgagtggggcagctcatccatgttgtgatgatccaacattttatttttaggatatgactagt

SEQ ID NO: 229572 - DNA, 415 bp, Glycine max
  unsure (1)..(415): unsure at all n locations
agctgggacgaatataagagaacagcacttctacctttgtgtttcttgactccaccacatggaagcgcatgtccacttgtaattccaaagtatcaaacctttcaccaacaaaagtttgaagacgatcgaacctatccaaaattctttgaagaagagaggaatcttctccaccatgtccttcttcatcaataggtcgagcaccctttttcacccaagagccatcatgctcttnttgataatcaaatgatgcaatgacagccgcgcctattagaaaggatctcttgattggaacataanggtcataatcaagagggatgtttaagtgttgaatgaagatggtgactagatgtggatattgcaattgagaatttaattgcaatgccttatgcatgcgatatcgaactaagcgtgccca

SEQ ID NO: 229573 - DNA, 395 bp, Glycine max
ttaacctccaatctttaaaggagagggtttccactactggaaacctgaatgcaaatttttattgattgcatatatacttaaatattcgggaagccatttaaatatggctcctttttcccaccacattagaaaaaaccactgtagatgggaacacaactagtgaaagccatacaatagagaaaccttcaaatatatggtctgataatgatataatacgagttcatttcattttaacagctcaaatcataatttcatctgccctgtgaatggatgaatatattaaggtgtcaaatagtatagtgctaaagaaattgtggacactcttcaattaacacattatatgtccaccgatgttataaaatctacgataaacacattatctcattaatattaac

SEQ ID NO: 229574 - DNA, 414 bp, Glycine max
  unsure (1)..(414): unsure at all n locations
agcttaagaaatctatgtatggacttaaaactagcacctcataaatggtatgagaggcttancaacttccttcttgaacaaaatnttgagaaagaaatatttgataaaaacttctctcattaacaagtcctcttatagcattttacttgtgcaagattatgtggatgacatcatatttggttccactaacaaatctctttgtgaagatattgtgcacaagatgtanggggagtgtgaaatgtcaataatgaaggagttaaattactttcttggtctccaagtgaagcaaatggaccatggaacatatctccaacacaaaaatactgcaaggaacttctcatgaagtttaagattgacaaaagcaaggatgctacaactcatatggctattaatntcaaccttagtgcagatgaa

SEQ ID NO: 229575 - DNA, 498 bp, Glycine max
  unsure (1)..(498): unsure at all n locations
tattacgtgacctatgaatctcagcttaacatcagaccacttccagggactggaactacttcacatggacttgatggggcctatgcaagttgaaagccttggaggaaagaggtatgcctatgttgttgtggatgatntctccagatttacctaggtcaactttatcagagagaaatcagacacctttgaagtattcaaagagttgagtctaagacttcaaagagaaaaagactgtgtcatcaagagaattatgagtgaccatggcagagagnttgaaaaccgcaagtttactgaattctgcacatctgaaggcatcactcatgagttctctgcagccattacaccacaacaaaatggcatagttganaggaanaacaggactntgcaagaagctgctanggtcatgcttcatgccaaagaacttccctataatctctgggctgaagccatgaacacagcatgctatatccacaacagagtcacacttagaagagggac

SEQ ID NO: 229576 - DNA, 406 bp, Glycine max
  unsure (1)..(406): unsure at all n locations
agctttaactcgtttttcanaatcatgctttctactcgcgactgatccctttcggctcttcggagcttaagctcgttgatgctgccccataaagctcctcggaacttgttctgactgtgttcttccttttgggccctcttggtttctcgttctaaggcttcggtggtggccatattgacgtctcttaattcatcgtactcttttcgaactttgatggccattaactcgaacttctctttgactactcgggctctttcaagctccacctttaaggctggtacttcctcactttcttccggagctatagcctcttactctccttgcagcttttgagttgggagccaattcaacccttatgtttagactctcagccacttatgatagccaccgatgaccccattactgc

SEQ ID NO: 229577 - DNA, 435 bp, Glycine max
  unsure (1)..(435): unsure at all n locations
agcttgaattcattctatgcacccttatgttgtccattcttgcttggatgtttttatcttcattcttctactttcgatattctttttcttcgttttaagtgggtttcgactgatcgtttaagctgtaacctcacttaattaatgtttaaatgaatttgaactgatcgtttgtgttgtaatctcatttaatcgcctttaaaataaaattcaattgatcgttcatgtcgtaacctcagttaaataaaaaaataaaaaaataagtgtcaaccggacattttactttgaaagtcctctttaatgagttgagaaataaccaagtgaaactaaggctaatatcaactcacaaatcaagcatttgcccgcaaaaagggtcattgaaaccatttcaagttccaacgccttaatggtccctttnntactttatcnggtgaaaat

SEQ ID NO: 229578 - DNA, 456 bp, Glycine max
agcttatgcgcatatttccctacgaacgttctcttgcacaagacatcctattaactaagaaaaatgcacccatatacaatcaaggtagcttcattacctagattatttacatgtacttccaaggtgtatttgttatttacatcacacacgcctccttggctaaatttacatacatgcatactcaaagcatttcggggtaccaaaaattgcacatgcgctcatcttggtatttctaatacctatacatataaaaacttcatgatgaatcttgactacctacgcaataaggtgctacatttcatgcttttttttttcaagtttttgctacctaaagccacatgaaaattcaagcatattttcctttgctgactaaaattgtattcaaaatagaaggtatatatttttttgtaatatgttttcttcacataacatgcaacacatttatatatatttttt

SEQ ID NO: 229579 - DNA, 453 bp, Glycine max
cactatagatactaagcttatatatatcacgcgctcgaaatgaacggaagctcttgagaaattctaatggtcataacttttaactcggatgtccaattcatgcgcatcacatatagagacgctaaaaaatgaacaacggaagctctccagacgttaaaatggtcataagttttcacactgatgtccgattcaggcttatgttatatcgagacgctcaaaattaaacatcgaaagctctcgagaaattcaaatggtcataacttttcactcggatgtccgattcaggcgcatcacatatacagacgctcggaaatgaataaaggaagctcttgagaaattcaaatggtcataacttattacactgaggtccgattcaggctgataatatatcgagactctcatattaaacatcggaagctttgagaattcaatggcatacttttacacgatgtc

SEQ ID NO: 229580 - DNA, 364 bp, Glycine max
ctgagctgcagctgccacaagaatattttgatttgtcaagtttttcttgaaccccatatatatcagtactactaaaagaatgatggccttgataggccagctatcacctgattaaaccaattacacaaagcaagccaattgctgccattattcaatgcagaggtttgacttcaaccaatttgaccctgaaatgataattggccagctattttgaaaattaagatattttttactttcaggatgacacatgctcattaagttgaaattcttaggccgctaattaaaggcaagtacaaaaaaatctaaatagtaaatctaatagctaatattgctagacaaatgagtaagtgaaaattgagtcaaa

SEQ ID NO: 229581 - DNA, 193 bp, Glycine max
ttagggaagaacaaaatacaaactcgagttatactggttcgggcacttcccgtgcctaccgccagtccttaagcaacccacttgagactatccactgctcttgacagaagtcctttacaaagtgctgagccacacaggtacaactcatgccttacggcaagaatcctcacacttaagagaaccttcggccctt

SEQ ID NO: 229582 - DNA, 436 bp, Glycine max
  unsure (1)..(436): unsure at all n locations
catgcaagcttctagcanagcaactagagaccttgacttacacccttatcaaactttcccaacaactacattcaggtaatcatgctaatgtttctataatataagtagaaggatgtgttgtgtgcaaaagagctcatgtgttatgcacttgcacgactcaagaggaagcctcaaaagaggtcaattatatggccaaccagaaccaccaagggtataatcaaggagacaatgtgagttaccatctgagaggcaattcaggttatcatcaacaaggaggaaatttctctcagaaccaaggttagccttggaggttccacccaggtaataacttcaatatagaccaaagggatccatttaattgcccccttaatcanggtctaaatctgtatgaaagaaccaccaagccggaggacactcttggctcagttatgcaagc

SEQ ID NO: 229583 - DNA, 469 bp, Glycine max
  unsure (1)..(469): unsure at all n locations
atgccactgatcatccaactgttctataaatattaaatttctctttaaggcaagaatatggttgacattgtgcaatgtccatagggatccactggaggtcttgatgtctatatcacctctttcacaagtcaatagattttccatctgcaatgtatactntcccaaactttccagaaatatagttagacaataaatatttatagggagtggtgtggaatgacgcacctaagtccataatccatgaatcaacaggactatccaagctgcaaattaatgcatcatcaaattcataagttgctgcatttgcagattcatcatcatcgtgcttcttggttttgtgagtcttgttcttctttggtgccttgcactgactggtaaagtgacctctcttatcacaattccagcagataatgtcacttcgaaatnttgtctgacctttccaccttgactttgatctacctcgaccatt

SEQ ID NO: 229584 - DNA, 445 bp, Glycine max
  unsure (1)..(445): unsure at all n locations
agctntgagccanaatcccaacttaccaaataaccttgccctctgaagaaaacanaaaaagaaagcataagaagaaaattcccaatcaaggagtgagagaaagcaagaacacaaaagaaagaaaattcccgatcaaggattggaagaaaacagaagaaatatgcagaaaggtctttgaaccagacaatatctgaacaatacgggattgtcaccaagtaaacaagaaaagaaaggaaaccatgacctaaagtggtcctctccctttgattgccaaccaaaatcctgtgcgtcggtggcttgttcacctcactaaacaaaaacagaaaaccttggcagatatcatgtccagccgttctacaagccttgagccaaaatcccaacttactcaaaaaccttgccctcggaagaaaacaaaanaagaaagcataagaagaaaaatcccaat

SEQ ID NO: 229585 - DNA, 255 bp, Glycine max
gagctaagaaatgattgcctttctggaagctctttgctttcatatggctccttgcatcagaaaagacacttctctatagagatacatccttcgacaggataaaccacaagtttatatatatcacattaacaccatgatccagacttaccgttactggtgagtactgtgagtgaaaacaggaaccttttgaaatataataataaaggggaaaccagggctcaaatttttgactcatctgccaaaatgaatggcatg

SEQ ID NO: 229586 - DNA, 456 bp, Glycine max
  unsure (1)..(456): unsure at all n locations
agctngctcgtcttgctgatatttatcatgctctctattctgatgatgaccgangaacaattagggatcaacttgaaacttatgtgcttcaagtgagaagaaatgcttctttttccacttgtgaagatgttcaaagtttggctatgaagatggttcaaactgagaaacatttggtatttccattggtttataaacttattgagctagctctgatattgccggtgtcgacagcatccgttgaaagagctctttcagcaatgaagattatcaagtctaaattgcgcaataagatcaacgatgtgtggttcaatgacttgatggtatgttacaccgagcgggagatattcaagtcgcttgatgatattgatattattcgaacatttaccgcanagaagtctcggaaaggacacttgcctcgtaatttatttaacccgctattgtaagaatatgnttatc

SEQ ID NO: 229587 - DNA, 453 bp, Glycine max
actcagctttacctctaaaggctcattcgactgtgatattcattagagtcaattaatttattattcattgattgaactttcgaaatctcttagtcaaagagctgcaaggtgagattgtagcaatattttcatggaaccttacaagttggaacaatcattcataattttcaatgtgggaaaaataaatataaagtttcaaactaacaaagtaaatcctaattttattgttacaaggagaaaggcatatgaaacttttcattatatgagaaaagataatatttcagtgagtggtcacggtgaatgtgtgtttcaaagtgtttagagggcatgcacaattgctgaaacagcatgacaatatctctcccacatacttcgaaaccttcattgacctttgaaggtctattaatttataggtacattccctctagtacacttttcatattaatcctacta

SEQ ID NO: 229588 - DNA, 386 bp, Glycine max
agcacacccgcatacttttggtaagtaaacaacatatccattacaaaaccggaagaggtagaggcatagtgttacagaatgattttttcttatcagataagctaataatacattgttaatattattatactacaacaaaaaaatggatatggcagcattatgttagttaatgccttgacgggcctaaatggatctaaaagaaattgaaaaatgatggtaatgatttgacagggtcctgctagtgcgtttctttctcttttatctctgtgaactaaggcaagccttggatctcttccaaagtttttacttcggtttctgtgactaattctgctacaaatagaataggtaagagggaacatccagcatacaaaaacaattgtctctgt

SEQ ID NO: 229589 - DNA, 268 bp, Glycine max
catagaatgggagcatccattctctctccagaacatcttcctctggtcactgaatctgcacgagccttaagaaccggaaccgcactcacatgatctacctgctgacgaacgaagatgtgctgaatccaccgcggtgatgacccgtgattcaaccgtgaacatgcaagcagtctattggatgcaaatcggtgatctatgataatcatgcatataacatgcacgtattattatactacccctgcatcaccgcatgcgatgagattgaaga

SEQ ID NO: 229590 - DNA, 453 bp, Glycine max
  unsure (1)..(453): unsure at all n locations
agcttactggtgcaaataatactcctctgtttactcttccattcacagctgcagtcatgagtaaacctgaatcaaaggctccatcaactttcccccgaacttcagcaccaatctaagatgcaaaatccaaagtgaaaaatgattaactacaaataataagagaaaaatatttcagcagagtgaaattccaaaatatgaaagcaaatatccaccagatgttgagtatgtcgagctccttttcgatcctcatcaacatgaagatactgctcatcttttggttgattttctatgagatgaacacttctttgtgtaatattcttcaaaactgtgttattactcgcgatattgtcaagctggcaatagcttggacttttattgatctgttngaaccaatgatacctctgagaatccatgacaggaaaaattgctttntgtacctgggtctgttcttga

SEQ ID NO: 229591 - DNA, 427 bp, Glycine max
ctcctattcttaatggcgtgggttccaatattggacaacctgcatgcaatattttatagaagcagtatatctgaatatctatgaagccatagaaaacggccctacattcccactatggtggcaggaaatacaaccatagaaaaacctatggaagaatggagtgaatacgaaaaaaaattagatcaatataatttaaaagccgaaaatataactacatctgctttaaggatgaatgagtactctaggatatcaaattataaaagtgcagaagatatgtgggataccctacaggtaacatatgaatgtacaatacgtgtataaagatctaggataaatatattacctactgaatatgaattatttagaatgaatccaaatgaaagcattcaggacatgttacagagactcacacacataattaatcatc

SEQ ID NO: 229592 - DNA, 457 bp, Glycine max
tggaagcgaacgtactgatgagtttaaggttgctcgtgagtggatgctgacattcctttctagttgcacctattactaatatttatgtttgaatttgcagattctatattgattttaacatgacttatgtgggagcacggatgatttgcccccaccttggaaatttgtctttgctccttggagccattctctccttcggagtgatatggccgctcattgatcgttccaagggagattggttccctaccaatttagatgagagcaacatgaaagctatgtacggctacaaggtctttctaacagttgctctcatgctcggtgatggcttatacaactgtgtcaagattatagtttcctcaatccttagcgtacatgcaaaaattaagaaccgtgaaaatggtatgacgtacatgtcaatatccactttctttgtggatatttagtcatgaacattaca

SEQ ID NO: 229593 - DNA, 437 bp, Glycine max
  unsure (1)..(437): unsure at all n locations
tgaaactngctaacttagtaatgctgagattcactctattcgctcaagtttccttcgtccggtggactaacagtgttacaatgcttgtttgttttgtctatgaatattctcttattttttgaccaccttaacatgaacatcttcaggcattatacacttgtttgttttgtcttcgtatattctcttgttttttcaaccaccttaacatgaacatcttcagacattatagactctagagctttgatccgttgagagatcccaactagccattgtttaatagctctggcgcttgacacgaggtcaatactgtgcagagagagtgtgtggcgaccacaaatgcttttcgcaacatatctttatagaagtatagcttgtcagtgtcaccaagtgctcagagttgactttcacagtacagatcgaaagcaacgttaacatca

SEQ ID NO: 229594 - DNA, 406 bp, Glycine max
  unsure (1)..(406): unsure at all n locations
gagcttttttctctgtacacctacgttcctatacacgaaaaanaaacttttttctctatatacacacgcattgaaaaactctttctctctgtaccgacatggtctatataaaacctctattccttttcaaagatttatttttcctttttcaatatacactcgttgtttatacaaaaaaatcctttatatacactcattgctcatatacaagaatnttttttcacacattgtttatatacaaaaactcttttcacacattgtttatatacaaaaattttttttctttcctttatatacagatatgacattntggtcacaatgcctctttctttntttattcttggcgttatcacaacgtttgttcattntaatttaggatgacattcctaaatgaaaactctacacg

SEQ ID NO: 229595 - DNA, 475 bp, Glycine max
  unsure (1)..(475): unsure at all n locations
tattacgtgacctataaaactanagctgctgattacattctccccctttctcaagcaaattcttaattcttcttgacatcatcaaaatcttcatgatttacagctataagtctaggtatacccaccccaaaacacagaanagtggtaaacctaagactcatagcagttacctatatccaaacctctattgtacaaaaaaagtattgttggatgtcagagggcctcctagctggaaccctctaaagaatcacatgaggagtcctccttcattggctttggtgtcctcattactatgtcctcttcatccataaactagttgtcctccatagatggatcatcctcttacatggacgggtccttctcttgggatatatccttctcggaattctctttttcatcatcagactaaaggttaaccaaatccaccactgatggtgccaccctctaagcacccatccagtcaaagacaatcgac

SEQ ID NO: 229596 - DNA, 403 bp, Glycine max
  unsure (1)..(403): unsure at all n locations
ttcttacctctttcggaagcccaaaaaaaagggtggagaagggataaattctccaatcaaaagagggaagcanaaaaggaagagaaaggaaaatttccaatcaaaggaaaaaaagagaggaaagggaattcccaatcaaagagtgggagaaagcaaaaagaaaagaaagaaaattcccaatcaaagaatgggagaaagaaaaaagagaaggagaagaaggaaagaaagctcctgatcaaggatcgaaagaaaacagaagaaatgtgcaaagaggtctctggaccagacaatatctgaacaaatacagaattgtcgccaaatgaacaaaagaaagaaaaggaaaccataacctanaagtggtcttctcccttngattaccaaccaaaatcctgtgcgtcggtga

SEQ ID NO: 229597 - DNA, 449 bp, Glycine max
  unsure (1)..(449): unsure at all n locations
ngagaaaagccttctgattctatttatacattgtttttactttatggcatgagatgaagtacaaagattggagcttttgcaaatttttattaatgaatagcttaaacactgtggtttaagctactttccttgatatttgtcttatgcctaacttcatctaattgtacaggttacattttattcttctctttggataactgcatgccttgtaaaagacaagtgaagagggcatttttgcttcattctcttatgatgcaatcagtaacttttgttgcatacaccttttgtacatagtcacagcatgttattgtcacttgnggaccagtgaactgttctttatttgcttaaggacaagcaaaactgtacatttggtggaagttgtagtcgatgaatacgactaactnttgtgtataaaacttgtgtanattgtatcaaactccctccaatta

SEQ ID NO: 229598 - DNA, 447 bp, Glycine max
  unsure (1)..(447): unsure at all n locations
tcagtcacctgangcatgcaagcttccatgaccactgagacacacaaaacatctagtaaacttttcatgtcacnaatttgaaacccaattctgcactccatctagctacatccaaattataacaaaatgaagaaaagaaaaatagttattagtaccaatcatgaccaagaacaaacagagcccagaacatagtgccttgagcagcccaatagagaggccaaaccaaccaattatggagatacgcagcagcagcagccaaaccaaagacagcaatcacatccctcaccacatagctcatggacctccaagggtccttcacccagcaatgctttggaatggctgctctaatatcagccaagttgaatggtggcggagcaccagggtcaaattctggaagcttctcatgctcaaccccattagtcccatggtgtaaatcaacactctttt

SEQ ID NO: 229599 - DNA, 367 bp, Glycine max
  unsure (1)..(367): unsure at all n locations
catctccaatcttaactgcatttgctgctggacaagctactacctttaaaatgttcgaaacgattaagatgcagccaaatattgatgcttattacactggtgttcgatgactatatgatatttctggagatatagagcttaagaaggtatgctttagttatacttctagaccttatgagcaaatattcaatggattttcaatttcaataccaagtggcactactgcagctctggtagggcaaagtggatgtgagaaataacaaattattagcntaattgagagattctatgatccacaagctggtgaagttctaattgacggtatcaatcttagagaacttcaactgaaatggatcagacagataat

SEQ ID NO: 229600 - DNA, 464 bp, Glycine max
  unsure (1)..(464): unsure at all n locations
agcttgaattacaaaacactgaagagactttattgcttgatgaagaactcatgaattttgatttgcaaccaacataattcattaccaaaccccaatataacaaaacaaacgtaactggtgaaggtagtcaatatgtataccagtttgccaacatttcatagcattaagtagtcagagcttaatatttcagatagtcagcttcaaataaaaaataatttgcaagccaaataacagaacgtgttgcacgtattaattacttatgggatgagacttgtctcactaaaatgcattgaaccacctaaattggatgctaataaaataaaaataaaaaaacaaaatcaacatatctgatacatatttaataaaccaaacttcattggagtaatgccaaacntttttaatttgactactactctaactngaccctattaaagatagtaaatgcatttcttcaactatagtaa

SEQ ID NO: 229601 - DNA, 458 bp, Glycine max
  unsure (1)..(458): unsure at all n locations
ntaccgccccatcagcatctccccctctttttagagctaataatatctttttgccctgtaactctgaggatggcttcagtgaagattttttgttcttgatagggcaattttttccaataatcaatttcttatctgaagaatccttaggtggccctttgaccttgagagaagagataactctcttccttgatatatcagtgccagcattttttgtgtgagattttgatcccactttcactttttccttcttcccttggcccttcttacgcacctctcaaggactggattctttagatccttttttggttaacttcttctcactatcccgcatactgatatattatgtaccaatcctgaaaattaagcacaaaatgggatcaagttacattcaagttaatcctatagtgatagtctagattgaaccattccaacacaaacacaaattctgcataaaagga

SEQ ID NO: 229602 - DNA, 372 bp, Glycine max
agtgttgatagatttaataaaagtcggaagtcggtgaagggtgaagcaatgttttagtgacaacacgaagtaagtaactcaactgcttcgatgctggacactgttccctcatatgctttagaaagtctttctctggagcattatttatctctatttgcaaaatgggaatttaaggaaggtgaagaaataaaatccaaatctaatggatatcggaaaagaaattgtggtaaaatgccgagggcttccgttagctgtgcgaactttatgaagttccctatatttaaattctgatttacaaagatgggaatttgcaagggatcatgagatatggaacttaagaccaaagacagatgactttttccatcccttaag

SEQ ID NO: 229603 - DNA, 410 bp, Glycine max
tcactatatatatatatatatatgagatttgctaatgcacttacatgtaatttaacatttagtttaagtgcatttacaacttaacatataaatttttgataaaataaccaataatctcttcacttataataagaatatatcggtaatttaatatcaatttttttaaaacaattaaaagagtcataatagtgctcataagtcacttctttcttatctttcctttctcctcacatgcgaataatcatgagtcataattcacactctacatatataagtcttctcaagctaacccacttcatccatatgaagaaatcttaaactcaaagtgaatatcatctgcatattgtcttcaaagttcatggaaccttggcttctaaccaagcatataccttgatccttcgtatctgcta

SEQ ID NO: 229604 - DNA, 383 bp, Glycine max
ctgcagcttgtaaccttaccttatcacctttttaatttacccgcccacatcattaaaccttattaattttctagctccttctctaacaagcccaccgagttattcgccttctttaccttagcctcccatcctaactctttattctcaaaaagttgaacttgagattttagagtggtcacttcagtagtcaacttagtattagaattgatggtactctgaaggtcctcgacaaactcaactactttctttttcaaactctccacctcttcgacttgtgaagggacttatgaatgttctataacccaatgctgaataatcatcaaaaagtgagtctgcatgtcaacaaacgtctccgaacctaaaagaataccagtataagcaat

SEQ ID NO: 229605 - DNA, 376 bp, Glycine max
  unsure (1)..(376): unsure at all n locations
ctcatctgaagcgcacgtccacttgtaatttcaaagtaataaaccttttcccaacaaaggtttgaagaccatcaaacctatccaaaatcttttgaagaagagaagaatcttctccaccatgtccttcttcatcaacaggtcaagcacctttttcacctaagagccatcatgctctttntgatagccaaaggatgcaatgacagccgcgcctattagaaaggatctcttgattggaacataaggttcagaatcaagagggatgctaaagtgttgaatgtaacatcctgcacatctctacccggaatttttggagacgatgtatttcgaatgattatatatatacgtattattcagacgatatgcatatatgttcttg

SEQ ID NO: 229606 - DNA, 410 bp, Glycine max
  unsure (1)..(410): unsure at all n locations
atggaacgagtgaatgctctatcttgtatcttgatctcaggaattaaattatcatcatcaaaaagagggagattgtacaagcaaagactttgatgttttgatgatcccaaaggatcatgcgcttctcaagtttaattcaagaggatcatacgcttctcatggttaattcatgacaagaatccaagaaattcaagatatatgatcaagataatctctagagacttatgaatgtgaatccaangtgaaacaacaagaggtttggccaaagaatatgagttaaaatgtttntacaagagaattactctctggtaatagattactagaggatgtaatcgattaccagtggccacaatacttactgatatgctgttaaaatggttttagattgttttgcaacatgtaatcgatta

SEQ ID NO: 229607 - DNA, 238 bp, Glycine max
  unsure (1)..(238): unsure at all n locations
gtgtgacgaccatgcaactggctgctttatcacgagtagatacgcactagtgttaatctatatttgattgcttcctctgtggcatacctgaacctgggtgtgaaatcgctgtcacatatggcaatatgtgccgtgctatacnaatactttctgcatacagtctggtgcggtattcgatgatctatcatgtgtcatttatagattttgatgcttagatcaactatcttttgttatacaa

SEQ ID NO: 229608 - DNA, 453 bp, Glycine max
  unsure (1)..(453): unsure at all n locations
agctntgagaatggaacttatgccatttcatctttttgtatntagcggatctcatcaattgttttctggagaaagagagctcaccaaagcaagtaagtgacaactacactttttctgattgtttaaaatttaatctttacctgttgcaaaatttatttagaactttgtcttgttatttatgggtggtttactaaagagggagtgaaatcaggcataattcatcactcctatattatagtgggctgggatagtcaaagtattgagtgcatttaacacaaaaatcaggtagggttatgacgataataggattcctgggagaaggagaaagaagtagggattccatggcgggtgtaagggagaagggtagggttaagtaacgaatcttaaagtggatggngtaggagaaaaggttggtgggggtaaaaactgaataangaataatgagaatagaga

SEQ ID NO: 229609 - DNA, 455 bp, Glycine max
  unsure (1)..(455): unsure at all n locations
tgtaggattatgggggacccatcacatgtggtactatgtggttgtcgggcgatggtgcacaacagatttccacattcacaaaatcgcgcataaacccaccatcccctgctgcccacctccaactgagctcacgtacgcccacgtagcccatatcctcgtttctctcaacaccgggtccccatcaatcctcccaagctttccccaacatccaagtaattcaacattcaaacaacacaaactatcacagccaagaaaacagggcaaaggcagaaaactctgcccaaaacaccgaccaaaatcacagctnttctcacttaaagaccccagtaacaattccttcgttccggttcattaaccgctggatcgactcgaaaantttactggaagtctctagtacataagcctacattttgacctttgggatctactagcanacatccagaacttattctgca

SEQ ID NO: 229610 - DNA, 427 bp, Glycine max
  unsure (1)..(427): unsure at all n locations
agcttcatcctcagaaggaaacaacaccagttatttattcttccataatttcaaccaaaagcagaacatgcanatgaagctaaaggcagaaacgtaaatgaaactgaaaatggaaacgagaatgaaactaaagcagaaatgtaaatgaaactaaaggcagaagaagaaataaaaatgaaattgcaattagaagcaaagaatggaaaagtgcattacgtgaacagtaacaataagctcaaaaacgtaaaaccctaaaccctatgctctgaataatggcttaacaaaatagcctttacacgaatcccaaggctaatatttatatgggtcacgcagagtcactgggccctattacattattctggcccaaaacgaaatanacactgaacaacgtanaataagattgttatctcctaattaaaaattaact

SEQ ID NO: 229611 - DNA, 402 bp, Glycine max
  unsure (1)..(402): unsure at all n locations
tcctcttttcttcagntgccggaggcggatgatctaggccttaccctaatcaaataaacatgaaaatgcagttactatgaagtgatcctatgtcgtttcccaacgagcagtgacaagccaaatgttcataatatactcgcagtaacagtaacgatgggggggggggggtttgttattttctattctccactccatctttcttctattacatgcatatctcttctccttccttcctattacttttcactttatttatcttactctatacactttgtctttcttcttccttttattttctttttttactgataaccttttaattacttattcctattaacctatctttctgacttcctatatttcttctttacactttcttctttccaccctatctttctattt

SEQ ID NO: 229612 - DNA, 438 bp, Glycine max
  unsure (1)..(438): unsure at all n locations
agctntcagatgaccatcacatcgatgatgttaatctgaacctgcatatgttnttggataacatttgtgtcttctttttgcatagcttgcagggtcctttggtcagtaagagttctagaagttggatgatcacttcagtaatcgattacttccatgtgcttccatactctgaaataatctcaaagtggatttctaggttggcatggctctcctttgtaaaaatctttatttagattgacttagcagtattttgaatccatattccataaccaatgttattttcactctatgcttcatgacttcatcaagtatgcttgacttgaggtcataagtttggcaacctacaagaataagaaaaaagtacaactaatgtcttccctctaaatttatttctgtgaccatgattgtgcctaaaccacaagcacatctatgattagt

SEQ ID NO: 229613 - DNA, 409 bp, Glycine max
  unsure (1)..(409): unsure at all n locations
tggaaccttgaatcaacanatgatacattgcaagatcctgttctcttgatagaacaaccaacacaagtgtgtactgtaagtagtactcaacaccaaggcccaagtgaccaagctgctctaccaccccaagactccaaagtgcactcatattaaaaacaagatgaataacactaatatgagaaaaagcagaagtaattatcctccaatgatgcccttctacagcggtctcataactcagacccacatgtgaatacccaatatttntcttctgtatgtagaaccaaatcatgctgcatattcctatgatgcaacttgtggcagggttttccaagatcttatataacaaaggctttcccatatcccaaaaccccttcttatatgctacaatcaaacaacacaacacagtcaa

SEQ ID NO: 229614 - DNA, 429 bp, Glycine max
agcttatctgactcacctattaacagggctttcatctagaagtactgcatgcccaggcaggcacaatgctaggcaccacagtagccagaggatggccagcagcaggcagctgcaaacgcaccaccatcatctctagagtccacctctactcacctacagaggttagaacgttgtatacgacatgtggctgaccagaaggcggccaaccataggggtcaggtacagctgaatgagagcttctattaatacaccctacatcaacagagccaggatcccagcccttacgcgtggcctactcccaagtagttcgaagccacagtggcatggcttggagattggcccgatttttagacaggagcaaggcccacagggacctctggagatggagacgaagctcaagaagacaaagacatggccgatgtgatggac

SEQ ID NO: 229615 - DNA, 448 bp, Glycine max
  unsure (1)..(448): unsure at all n locations
tntaagctaggttattaagaaccagattgtttaatcttatttgttgaaataagtgtttgttttaataaaataacactactaaaaaatagggtttcaacatcagttattaaggactttaaacatcggttattaaccgatattgaaagtaccaatgatgaaagtaataccattaacatcgattttccaaaaccgatgttaacataaaattacaacatcggttatttaaataaccgatgttatatagtaagaattatcacaaaaaagtcatatatcttcttaacaacatctatttttaccaaaaccgatgttaatatatgtagacaacatcggttagtaaaaattgatgttgtctgcatatgttnaacatcaattttccaaaaaccgatgttgctagtaacaaaataacatcgattnttaaaaatcgatgttattttctgataacagacat

SEQ ID NO: 229616 - DNA, 429 bp, Glycine max
  unsure (1)..(429): unsure at all n locations
agctntttatccaaggctcatcttggtggttattctccttcttccatggcttattccctagtggatggcgccgcctcttacctcttctcctttgtcttccgctgcatctctatggtggaaaatcaccattaaaggacctcattgaagctcanagatccagcctccattgaagccccacaagcaagcttccatcaagtggtaatcagagcataagagcttcaagtaggtgcttccttaaacctccattaatttttgctttaccttctcttccattgttggttcttcattttttctccatgtatctcctcacatgtcttgtcttaaattttgttaacatgattatttagagtttccaccgattaaacttgctatagaagctagattcgattttctatggttcanatttcttcttgttgttcttgaaccatg

SEQ ID NO: 229617 - DNA, 422 bp, Glycine max
  unsure (1)..(422): unsure at all n locations
tctanactntatacaagaatgaagctctaataccacttgttatacaagnggactcagatatcttaagaaggggggttgaattaagatactgcatactatttccccaattaaaattctatttcaatttcaatgcaagttacaagttcccttaaaaatgaactcttatataatgattcaaatagaacaatttgaatataaatgtaaaaaaataataaataaaagattctaagggaagagaaagtgcaaactcaaatttatactggttcggccacacccttgtgcctacgtccagtccccaagcaacctgcttgagagtttcactatcttgtaaaatccctttacaagttctgaacacacaaggacaatccttcctttgtgttcagatttctntacaacaagagaccctcggtctctcaatcccc

SEQ ID NO: 229618 - DNA, 462 bp, Glycine max
  unsure (1)..(462): unsure at all n locations
tgcaagcttccaacttcatttatgattcttcttttgctaataccttangttattttacattaagttagcaatttgatttttaggtttagattgtaaacataatagataaaagttaggactttgttagaagttgttaggggtagataattgtgattatgttgcatgtctgataggggcctattacaggcctaaaagaggaagtcgaaagacttcctcgtctgcgttgtttctgcaaaatgcgacaaactcactaagcacgactggtgcgctaaacgagttcatcaattaagccttgaacatatacatttgctaatgaactcgcttagccagcatacatgctgtcataccctaattatgtccggagaccatctgtatggtgggatgcgaccctcgcttgaccgcttcgaggtactagacacccatcgttaggcaatctgtgaagntccgtgacatgtcatgaat

SEQ ID NO: 229619 - DNA, 467 bp, Glycine max
tatggtggtgagcttcttctagactcatcttctccttgaagaggcgtctcctctctctcttccttctacattccgctgacattcatcttccaagaagcaaaggaatccattgatgaagaggatcctaggcctacaagctccaatggagcatacatcatgtggtatcaagagcatcttcatctaggtgacgttcttttgcttcctctatctttctggtccgagaattctctttaattacctgttcttcatcttactctccatgtatatcctccattggcttgaggcttggtgctgtttagagtagattcaaaaaaaataaaccgattaaatcttagatctacacttgttcatgcatttctatggctcaaagtttgtagatctactcttgaatcatgtccttgtgctgattataagttctatcattgatctctcataatattctcgtgatgaacattagatctaaattt

SEQ ID NO: 229620 - DNA, 432 bp, Glycine max
  unsure (1)..(432): unsure at all n locations
agctntagcttcttaggaatcttttaaggaagcttctcaaggaggtgttcttaantatgagaggggtgtgtgtagctaagctctagcttctcaaggaagttttctcaaagaagcttctcaaggaagttttctcaagaaagcttctcaaggaagctacctagtctataaatagaagcatgtgtaacacttgttgtaactttgatgaatgagagtcttgtgagacatacttcaaagttccacttctctccctcttttattccttcaatttcgtgctccccccttctctctttcttttcctccattagagcatcctctncaagcttcttatctcaggcaattcttggtggtgaagctccttcttccttggcttattccctagaggatggtgcctcccctctcctcttctcctttgccttccgctgcatctctatg

SEQ ID NO: 229621 - DNA, 469 bp, Glycine max
  unsure (1)..(469): unsure at all n locations
ggtgctngttntatntaaattccaaggatcatgagcaactatgtgtgttctgctatgacttgaaaaacaagagtgatcaaataacaagcagagatttaaaaggtactaggttgcctcctagtagcgcttctttaacgtcttgagctggacgcgtcatggcttgtcagtcacggacctagtactttgcttacctttggctttggacttggtcgcctattggtcggccatgggtcgtaagcaacgctctaacctctttatggatgagctgaggtgaactttaaaggtgatggcggtgcgtctgttgtccgctgccggccatccccaggccgctgtggtgtttcgccctgcgcctgcctgtggacgcagtacttcttgatgaaagctcaattagtaaggtgcctgatgaccttgctggaggtgacagacactccgtagaactgacagagacccgtaattagagcttgacaac

SEQ ID NO: 229622 - DNA, 384 bp, Glycine max
  unsure (1)..(384): unsure at all n locations
gctaccagagaagattttgggattaattaagttaaaactcgaaacaattacactccatatccacacgcccaatagttgactaataaagcatagaattgttattttaattctttagtttattttaaaaaaggaaaaatttaattaaacattatattaaaagaatcttaanataaaaaatatatttggaagagttatggaaacaattaaaaatcctcttaaatatgccttcttaaagtagctattattagaagcttatattaattaaaaaagctatacaatattttatttatgaaaaatgctatatattattagagaatactcgtgttanatctagaaaaattatgaagagaaaacgcattaataatagagtctccagttgtcttc

SEQ ID NO: 229623 - DNA, 420 bp, Glycine max
  unsure (1)..(420): unsure at all n locations
agcttgcatgtgcatgctgttcggacatgcatattacaattggcttaagtgaccacacgctaagcctccaaatgcgcgctnaacgcacatccacgataaatctgacttccagcttggcttcttgcactaagcatgcactggcgcgctgagtgtgctgctccaattcttatacatcttccattcttctgttgatgcatctaacaattctacaaaataaaacaaaacattgtaaaagtaccaactttagcattcttaagataaaaactcaaaaaaaatctaaattcctatctttttaagtcaaaagaagtatcaaaagagaagaaattagataattcctatgtaatttaagtgcacacactaagtatgaataacaattatcagtgaggaatgaaaatagaaatatatataaaaaagaaaatg

SEQ ID NO: 229624 - DNA, 484 bp, Glycine max
tgacctactctctggaagtcgaaacttgatggacgctaattctcacatctctggctaagcgcatattgcagaagaatttttgtgttgtagaaagtgctaagcatagcctgtcgcgctaagccctagatgcttacgggactttacaacttcaagttgggcttattgcgaggctaggctaagcgcttgggttttaaactcaaacgtcacgttggcacgttaagtgtagctgtgcactaagcgcaccatacgaatttcagtttttaagataatcaaaggcagaggccctttgggtgttacctttgcacccaaacctctgcaccttcttacccttgagcacttgtgaactatctgctgcgtgtgtactgtttctctgcatcttcattgcttcatctcaagaacactccaagtaagttagcacatttctaattttattcttcattcttcacaccttaagatagatgaactctctgtttcttagttgtat

SEQ ID NO: 229625 - DNA, 299 bp, Glycine max
acgaccatgcaacttgctgctttatcaagagattagaccccctagtgttttactatattagattgcttcctgattggctcacctgaacctaggtgggaaaatgcttttaccaatgcctgatgtgccgtgctattctgaaacacattgtatacagtatcgtgcgggatctgaagaagcatccagtgtctactattgatattgatgcgaggatagacttgcttctatgatacaatggctctaaaatttctaagtcagcatctaatcctctgcgtcatcgatttttttttacaaagacaccc

SEQ ID NO: 229626 - DNA, 445 bp, Glycine max
  unsure (1)..(445): unsure at all n locations
agcttccttaaaaagattcctattatagctatagcttagctacacacacctctataatagctaagctcacctccatgagatgagaagctagagctcagctacacaccccctataatagctaagctcacccccatgacaaaatacatgaaaatacaaaaaatgccctactacaaagactactcaaaatgcctcgaaatacaaggctaaaaccctatactactagaatggcaaaaaatacaaggcccaaacgaaggaaaaacctattctaatatttacaaagataagtgggctcatacttagcccatgggctcgaaatctaccctaaggctcatgagaatcctagggccttcccttggatctctagcccaatctacttggagtcttctatcgaatgcccttgcggngtaggattacatcaggcccgtgatcagagccgaaaacccca

SEQ ID NO: 229627 - DNA, 438 bp, Glycine max
  unsure (1)..(438): unsure at all n locations
ttatgtgaaaggatgcgaatcttcacagttgaattttaatttcaacgntcaaaggcactggaaatcgattaccaaaactttgtaatccgttacatctttttgaaattaattggaacgttgtaaattcaatttgaaaactttttcaaaataattttgctactggtaatcgattacaacaatctggtaatcgattaccagagagtaaaaactctttggtaaacgattttgtcaaaaaatcatgtgctattcaaagttgtaaaaaaactttttaatacttatcttgattgagtcttctcttgattcttgaatcttgagtcttgaatcttgatcttgattcttgagatcttgaaccttgaatcttgattcttgactctagactntattcttgagtcttgaattcttcttgattcttatcttgaactcttgaattgttcttga

SEQ ID NO: 229628 - DNA, 442 bp, Glycine max
  unsure (1)..(442): unsure at all n locations
agctgtagcaactctatctatatagttagtttttacttttaatgctcttaatctctcctcatctaaatcaaccaactcatctgacatcattttccaataatggtcgattggaatgtccatattgttttgtaccctggctgattgcaaatgtatttcgaccggaagtacagcatcatgcccataagtcaatcgaaatggggtagtattagttgattccttaagagaatntctacatgcccatagaacttgatctaacgttttattccaatttcttggttnttgggcaatgtgttttttaatcaagttaattacaattttattggctgcttcgacctgaccatttgcttgcgcgtaatatggtgttgaggttaataatcgaaagccagtttctttggcaaattcttgcatttttcgtccagtaaaaactgaacctcgatcagtg

SEQ ID NO: 229629 - DNA, 484 bp, Glycine max
  unsure (1)..(484): unsure at all n locations
tgtctcagcgtttatgcgagacggagaccaacatgctatctatcatcgccaagtaccaagaagagttaggtctagccacagcccacgagcatagaatcgcggatgagtatgcccaagtatacgcggaaaaagaggctagaggaagggtgatcgactctntacaccaagaggcaaccatgtggatggatcggtttgcccttaccttgaacgggagtcaagaacttccccgattgttagccaaggccaaggcgatggcagacacctactccgccctcgaagagattcatgggcttctcggctattgtcagcatatgatagacttaatggcccacataattagaaatcgttaggaaacttgtatggtctctcaaaccttgactagatatgactctctctttgaaataaaatgagttggtcccatgtttctactctcaaaagcttgtgcanatcanatcactcctacatctcatctctagcatgcatt

SEQ ID NO: 229630 - DNA, 453 bp, Glycine max
  unsure (1)..(453): unsure at all n locations
agctttagaggggcttctgaacccatatctattattttttcttctctgatttggttacaaggttggaggataatgattaatttaagctgggtttgaagccatttatataacaggtatgctctattgctctatactgtaatgacatttataatattaaaatttttgtttttgttctatggtgtgattgagaatgcattgtcacgtaaagaaaagattcttccaacttcacttgaacaaccaagcagatagtgttgggacagcaaacaaaattagttcgggttgggcttcaggctctcttttgggtttattttatatttcctataatttgatgtttgaggcataaaaaagaataataacaagagtaactgtagtataatcaataactganaaagactaacagcttgtgaataaagtctaaagcctttagttaattaatataanaatcgatataaa

SEQ ID NO: 229631 - DNA, 467 bp, Glycine max
  unsure (1)..(467): unsure at all n locations
tcactttctgtcactcacaaagtatatagatgtattatctgttgaggataaaataaattactcgatctttgttaggacaaaacgaactttatatacttttgatgggaaaggtagtaaaggcaccatcagaaaaaattgattcttctcgattcactcatacatatattttctttcattaacaaaattcgttgtttttttacagtttacttgtaaacatatgaaaaaaagagtataaataagcactccatgttaatacacccagagaaagaaaaataaaagagagataactgttcatataataaaagatatcatgtaacaaanaagcaatttgatgtcaataaaatgtttacactctaacatgattaatggattttgaactagatgtcataagtcaaatacccttttaaaaagccgcaaccccctgtcatataaatctacataaaattgcacaaaacacacactagtga

SEQ ID NO: 229632 - DNA, 226 bp, Glycine max
cgctcattcaactccccacctgcgggccctaaccccacatctcaacccaaaacatctagcttgcaaaattaccacaaaggagccttcaaaggagcgatgaaataaactaaactactctgaccgctaccatgacgcttaaataaccttcaactccaaatagtacgatatgatgcatcatataaaaaagatcagtccttgctcccgcgaaaacacacatcatcctaac

SEQ ID NO: 229633 - DNA, 466 bp, Glycine max
  unsure (1)..(466): unsure at all n locations
agctntagataatttcaaaacatcgaagctgtggtttggtggagaatattagctttcttgattctttttatttgatatatgtatatcttttggtacaaatttatttttcatatataggtattgactttttatgtttgaaaaattttaaatttaaatttttaaaaattgtgttcaataaaatttaaatagaaaatatatatttataaatcttattatcttttaataaatttttatttaaaattataaaatgaaaaatattacattttgtttggagttgtatatattatatggtgactccaactcgttcaagatagtttaatcttactattcttccattgagcaatgagtgattntgagaagaggaaagcgagagatcaaggtgtataagtaacaccgatgtgatcatgatacaacttacaagtatggggagggaaaggcttcaggttgaaacaaggaaataatgaag

SEQ ID NO: 229634 - DNA, 435 bp, Glycine max
  unsure (1)..(435): unsure at all n locations
attttatgacattatgaatgacaggatgaagtgatataaagtgcttagagagtttacttgcctgtgacaaagtttccaaaagaaaaagactaaaaggataatgccttcagattaatactttcacagaaaagaatgttttgtacagacattttcagacaatctagatatttctatttgactatattagtataaatcatctctaatccatatatcttttaatattatgctcctttcattttctttcgatatactctgtgttntaataattcgaattcaatatgatcttgtctataaatactttggattttattataagctactctctttagctagcatctcattacgttataaaacaattaattggtcaaagacgtcttgcatgcttataaatagtctcgaaagtcaagtcagacttctatataatggagtcgagcc

SEQ ID NO: 229635 - DNA, 479 bp, Glycine max
  unsure (1)..(479): unsure at all n locations
gtcacctgcggcatgcacgctncattcccactntcagtctattattcatgctaagaagcttcttcnnaacgatatccataacattccactggataatcgtttgatctctatatatctccttcgaattcagattatgattgattcgcttgcttcgattggagattttgttccagcaactgagcatgttgataacattcttgatggactacccgatgagttcgagtctctggccacgctcatcagttgtagatttgagtctctcacaattgatgaagtcgaaactctccttgctcgtgagactcgcattgaatagtcttgcacgaaatcaattgcttttgtcaatctcactgagacatccaaacctaatttagccccaattcctcgcagtatatgtcttccaccaccactatatagcctcaagctaatgttgctcaggctaacactgattcaacctactacaactacgatggaggtaatcg

SEQ ID NO: 229636 - DNA, 391 bp, Glycine max
agcttgagatgcggaagtatagaagggtgaaacttcctgcttttattctttgaccacagagtggtacctggagatatgtcgcgggggtcaagagaccttggggacgtcaggtggggtgctattgcccaaaaccaagcttgaccaatcccgacccaacccgggcatagtctgtcagtgagaacctgtgatgtacctaagcaggcgagctcctggcagtcaacagataaaaggaacaaagaccacaaagcaaggaggcttgtggtggctcgccagctgtgaatcttgtgtgatatatagggtatggcctctggtaatcgattaccaagggtgggtaatcgattacaaggcttaaaaatgaagacagaaggctaagatggtctctggtaatcta

SEQ ID NO: 229637 - DNA, 363 bp, Glycine max
  unsure (1)..(363): unsure at all n locations
tatgcatgtgaattatgtagcatcaacaagaatcaagccaaggctattgtgcaagcaatcaatggggcaaaacacaccaaaagattatgatgatggattgctcanattctcacaaaggtaaacttatcactttcaaattgagctttcanaactatcatgacatgtagaggaaaaacaaggattggaaatcacaaaattgtaagagacttttattntcggaacaattacccatttcttgaacatatcctataattcanagaaaaatatgcaaagttgtacatgcaaacagaatttgacctaaatattnaactagaaacccacaaacttaacaattaacacaacaaactaacaaacttgcaaacc

SEQ ID NO: 229638 - DNA, 453 bp, Glycine max
  unsure (1)..(453): unsure at all n locations
ctgagctgcactgcaatacttaactcaccattttaattttttagcgnaaaggctaggcttcttcgttgtgtcaagttgtcaaaaggtggactcttaagaacaaagaggataggctcaaactccaactgttcctcaccttagaagtgcttgacacccaaatgctcttcctagtcattggtgagactcttgtagaaagcagaatactcctcctttgtgatctcctcaggctttgtcatccaaatggccttgtgcttgttcaccaaagagcattcatgtgacacttncttaatcttctttttattttggtcttgcttggacttctcttcgacaacatccttccacctattggttgttttcactccattcatcccattttggtgttgcagaaaatggtacctagggattatggcgaatgccccaactattccagtccacgctaaggattcccaccat

SEQ ID NO: 229639 - DNA, 359 bp, Glycine max
ctaagcttgaccgtggtgtacccaccatttttataatagaacactggttatgtgtctactatcattgctatcattactttctccgccattgagggaaccacttaagctgccagacccctttggcatatgctctgtagctgcatcctatctggagccatatcaaaattgtactgagactggctaatgaaagcaaccattatgcccttccaagaatggactggggaaagatccaaagatgagtaccacgtaacagctaccccagtaaaactctcatggaagaaatgtatcagcagttcctcatcttttacgtatgcccctatctttcgacaatacatctttagatggttcttggggcaagt

SEQ ID NO: 229640 - DNA, 193 bp, Glycine max
  unsure (1)..(193): unsure at all n locations
agcttacacaatacatcacaattctctacacatcatctcaacaaaagncgatcatcagtccatgaggttcaatcaactcatgcttcagtatgatgcattgcacgttgacactcaaactctcataatgcatatgtgtgtacacatcacccataagaagatagacctatatcgtggtccacaccgacacgtctca

SEQ ID NO: 229641 - DNA, 277 bp, Glycine max
  unsure (1)..(277): unsure at all n locations
ngtgtatngattgatattgattggttgagtgacattgtgttttacccttgagtacatgaatgatgtgaaaataaatgaagcctcttgtgttgaggtgtggtgttacgcgacaagtggtggaatgagaataaatatgtttaaataagttgtatttcatttatatgatatgtatatctatgttcgcctgtttctctctattagttaggaatgtgataactcactcctcttgtgctatttgngtttgtatcttgggaagatctcnaactttgtgttctta

SEQ ID NO: 229642 - DNA, 361 bp, Glycine max
  unsure (1)..(361): unsure at all n locations
ngtattgcaacaaatggcaagaagcacaggaagcggaaattatatttatgacgaacaaccaactatggactctagttgaggctacaaaggatataaaacctcatggctgtgaatgggcttacaaaaaaaagaacgcagcatatggaaaagtcaacacctaataagctcgccttggtgctaaaggatatcgtcaacacgaaggaatatattatgacgaaacattttctcctatggcaatgctcagatcaatacggattctacttgcaatagcagcatagtatgattatgagaaatggcaaatcgatgtgaaacaactttccttaatggtgagttgaaagaggaagagacatgacacacctga

SEQ ID NO: 229643 - DNA, 377 bp, Glycine max
  unsure (1)..(377): unsure at all n locations
agcttgagcttgtgactgattgtngnnanatttttctatggcanaaggtatgccatatttgcatattagatgtttccaagtgatatttttgaccatattggctacgattgttcattagcacctctcttttgtccacttggagaaataatctattgcgactatataaaacttaacctatctctgggcctttggcaacagtcactggatgtccattcctcgcatggcaaaacgccaatgggagtctaagctttggaggctgacgggaggggtatgtggaacatctatgagatttttaacattgtctctgtctgcttgtaaaggtgaaggtgtcatccaataatgtttgtacacaccacttttgttgctagggagcgtcc

SEQ ID NO: 229644 - DNA, 477 bp, Glycine max
  unsure (1)..(477): unsure at all n locations
actcagctgtacagatattaaatttttgtgaagcattnttttactttcattatacacacttatgagagagagagagagacagagaanaccaacgaacctgagtaagactactaacaagtatgtgtgtgttagagagagaaagatgaatcgggagagggtgtcatcttgttgttgttctccatataaaaattccccgtatttcgttcacttaaaaccctagtttcgatgttgctgctctataacaacacaatagatcaggaagaaccctaaccaaacaagaaaccaatggttgtggagttagggcaacaaatggtggagctctccacccttgtcactgtagaagcaagcttcatgatgatgaaccaagcaattttgctgatgccaacagcccaagtgattgattcaagattgatttaagacttcanaatcaagcatcaagaatccaatccaagaatcaagagtcaagagaagaaatca

SEQ ID NO: 229645 - DNA, 226 bp, Glycine max
ccaaacacaagcccacgaagcaagagaggcttactcacaccaaatcgactgtcccaggaaggccctgaaagaagaaaagggaacaggaaacccaaggaatacacctcaccggacggtgaaaaaacgagaaccccgcaagaactaaagaaaacaggaacctcagccgagacaaaatgaaaggtaagcgctaacaataagaccggacgcacgccaaccacgcagcagg

SEQ ID NO: 229646 - DNA, 441 bp, Glycine max
  unsure (1)..(441): unsure at all n locations
agctnttgcgtaagaaccagtctgtccaatgggacgatgactgccaagtggcgttcagaaggatcaagcgatgcctcatgaatcctcctatgcttgtgccactggtgcccggaaagaccctttatcttatatatgaccatgttggatgagtcaatggggtgtatgttggggcagcatgacgagtccaaaaagagggaacgggtcgtctattacttgagcaagaagttcacagcatgtgaaataaactactctttgctcgagaggacatgttgtgccctggtgtgggcagtccaccgtctaaggcagtacatgctaagctacanccacttggtggtgtccaagtggacctagtcaagcacatattngaaaagcccactctcaccagacgaatcgctcggtggcaggttctgctgtcagaatncaacattgtgtatgtcactc

SEQ ID NO: 229647 - DNA, 466 bp, Glycine max
tgcggactataccttcgaccgaacacggccgtgtttgttatacaagtggcctcagatatcttaagaagggggggggttgaattaacatattcgaaactttttcccctaattaaaaatctatcttactttttacttaagttatgaattcccttaatgacaatcttcttaaatattaattcaaatgaagcaacttgaatatgaatataaagcaataataaataaaggagattaagggaagagaaaatgcaaactcacgtttatactggttcggccacacccttgtgcctacgtccagtccccaagcaacccgcttgagagttccactaacttgtaaattccttttacaagttctaaacacacaaggacaacccttcctttgtgttagagatctttacacaagagactcacagctcttaatccttagagatgagaagaaaagagaacaatctctttgaagagaggattt

SEQ ID NO: 229648 - DNA, 444 bp, Glycine max
  unsure (1)..(444): unsure at all n locations
tagagatagaccaaagctnttgtttttgttacaagatccaccaatatgtgtgcggnacgacaggataagctagtggaggcataccttaaaatctgaatcaatataaggaactaatgttacaatctacaaataatatgtttccttttatggtcacaattatttaggagtaaccacgcgtaaaataggaaacttaatacattctcctctcacaaatagaaggtggtagaacataaaaactcgaattacattttaagtgctatatagattacctcaaaaaatataaacctacagcgaaccatataacttggaatatcaaatgcataaatcagtgcataatgtaattcatataaaaattacttgattacagtttaacatttatatttaaagaatccgagcatcgcttcattaacactataataaggttagttctatttctagaagctc

SEQ ID NO: 229649 - DNA, 430 bp, Glycine max
  unsure (1)..(430): unsure at all n locations
ttcattaaaaaacataatagttgggcacattttatttttccaggaagcctcactacaaagccgaaactaccaacttaattattttaaataagatcgttggtctaatcattaacacgttatgtataattttcctttcattggcgatgctaatgaatcaatcatctaaacaccaacctataaggatagaaataaatgagaaccaatgcagcaagtagcatcacgtctatcccattcctctgtagacaagactatgccattataaacaaatcctatattttggatctttngatcctactaactactatcctaaagtgactntatagttaaacttcaaagttcanatggttgacttgttnnttttttttctttgtagacaggctntgtcaatataacaaatccaacatcttgactcatttgatcctactatcct

SEQ ID NO: 229650 - DNA, 462 bp, Glycine max
cacctgcagcatgcccctaggctattcagatagtaatatatttttaacctttttgcttccttcacaccttcagctagggccatgtattatgtttcagttgttgaaagagcaacaactgattggtgattcgctttccaactgattgatgtaccaaacaaagtaaacacatatcctggttaggaacttctttgtgtctacatttcttgcaaaatctgcatctgcatagcctgtgactactgcttcatgtgtggtcttcttgtactttaaaccagctttcaaagatccatttatataccttagtgttcacttcacagcttcccaatgtgcgctgccaggatcgtccatgaatttgcttataatacttataacatgagccaaatcatgtctgctgcgaaccattccatacattatgctttcaacaccactagcatagggtgtttgatccattttagacctttcttc

SEQ ID NO: 229651 - DNA, 433 bp, Glycine max
  unsure (1)..(433): unsure at all n locations
tgaatctcacattagagtcatatgtccttgcatactttgctgggctaacaaaacaattattacttaattcttgcgctaagaaaaaaaattaattggtgcaactaaaactaaagtatgccatgtatgaataaatcatctgccatgagtttgacaactacacttggtgaacatgcattgcatgttatacatattagcagtgaccaggactattgtaaagacttngacctacaccattcctgatctatatgcaacgatacaagcatgtcatcatctgttggtgtatgttgacaacacacacagacaccatgtgcacgcgtatgtatntattttaacaacattgaagcaatgatactgaaactcatctatatatatgacacagccgaaccattgttaaaatcacacattctctcctacaccattcataaaccaatat

SEQ ID NO: 229652 - DNA, 467 bp, Glycine max
  unsure (1)..(467): unsure at all n locations
agctntagtcttgcaagaagtaaagcttcactctgagggtgattctgttctgcacaatgaggatgaaggttgcactcttcctcagggattgtagatataggaatcagataaggtgttttcggttcttaattttaggatataaaaagtaatagggttattctatctactgattattagtgtcttcagttaatgacatttccaataaaaacaaattatgtgcagacttttgaggttagtggaaatctgacatccaagccctctagcaatcctcaataaatagcttgtactgatactaattacacaaaagtggaattagtggcaaattcagagagtctaaagactaatgtacaacaagttgttcctgacattgatgcaatccaaaataccgatattcaaaatccatgtcttccaagcgaacataaaanaaagcttatgtcaaaagaccgcgacacttggaactagcattg

SEQ ID NO: 229653 - DNA, 436 bp, Glycine max
  unsure (1)..(436): unsure at all n locations
atagaggctggaaaatgatttgatgtgttgtctatgtgtaaanatgggcttgctggtccagaaaaagaagtgtatgtatacttaaaacatgataggctagaggagggtcctattaatgaaactgggctagagactgaagtagatgtgttccaaatgctgaaacggaagttattggagttgaaactcaagttaataatggtgcagatgatgatgaagttaaagaacatgatgaggatgttcgactttttaatctttctgaaagtgacctagactatgtatttgtgtctctagaagatgatggacaatcaagtgacacaagtaatgatagttaccactctgaagaaattgagtctcttcccaacagtgatgatgaagggtgatgaaagctccatttggagcttgangcctacgatcttcttcatcaatggattccttt

SEQ ID NO: 229654 - DNA, 445 bp, Glycine max
  unsure (1)..(445): unsure at all n locations
agcttaacatgtgtctcaaataacgccatattgtgcattnggacttactgaaactcataggatatgaactttctatcttaaagtaatggctattgaacaactatgatgcataagtacttggtaccagtatccatgcaacacaattagccaagcctctttacataaacttcttcataaacactaataagaagttaaagaaaagaaactgaacttctcttgcatactaaanatccacttatgcatctaacatttataggataaacttaatttatgtattctcttacgatagaagcactagttctcatgtatactaagatcaacttgtgcccttgacatttatagaagctctctcactttaacttctctaaaagctgaagtgcatatcttagcatacaggagaaactctcattttttcttctttgcttttctcttacatagaacacta

SEQ ID NO: 229655 - DNA, 422 bp, Glycine max
  unsure (1)..(422): unsure at all n locations
nngggagctcgttggctgaaacagggtgtgtgattatagctttggttattaattgggcatgggtctgcttaatttgttgcactatgcaagtttcaatcaaagagacaagtctactatagtgatcagaatgaaaaggttttccagaggtcgagttatagaaccgcatcatgttatgaaaaggcgttggttctgttgctttggtaaaaaatcttaaataaatggtaaataaccactttgtcctttaatgtgtaacttattaacaaataaaaatatacaatttagttgttataagtctaaaaagtgcgatcaatatatcccgtctataaagtaacctacctggtacagagagacaaatatgtcaagcgtgagtatcagcataaggacactatttgccgaatatttttgtttttttacttttcgta

SEQ ID NO: 229656 - DNA, 454 bp, Glycine max
  unsure (1)..(454): unsure at all n locations
agctntagaggcattatctttatggatctatttttgaggtgtntagggaccataagagccttatataccttgttgataagagagaacttaacatgagacagacgagatggttatagttccttaagggttacgattttgagcttagctatcacccaggtaaagccaacgtagtagttgataccttcaataagaaatccctttaggtggttgctttgatggttaaagagttagatatcttagagtgatttatagacatgagtttagcatgtgagatcacctttggtagcattaagttgggtatgttgatagtcactagtgagctcttgagcgagatccangagggtagaagtctgacccattcttgttagcccagttagagtctatagctatagggagagagagtagttttagagtgcgacttgatggagtcttgagattcaacgatagggtgtgt

SEQ ID NO: 229657 - DNA, 478 bp, Glycine max
  unsure (1)..(478): unsure at all n locations
taatccagattaacattcgtcaacgaaattaggtgttgtctgttgttcctacaacgattgatggtgattcgaaggttgagtggcaaatttttttgttatttgctgcaaggtgagcttaattgatctctctatttaaattctaactatgttcgggcttatcttatgctagagttccttatgcatgcctttnttttaatagtaaccatacttttgcaccaccctcaacaatttgatcaaactttaatattctaacaagacttcttanatttgatttgttgtaatgcttaaactaatgcaacaagcctgctttaaatagcagtgattgttgactaggatggactattctctgatatgaaagagattgacaaacatacctattattataaacctcttaagtcatcttctattcattntgcagtatggaaattttcagaatacacagtactcaactactcactgagtttcaagccttatatat

SEQ ID NO: 229658 - DNA, 386 bp, Glycine max
  unsure (1)..(386): unsure at all n locations
tgtctcagcgnntatgcgagacggagaccaacatgctatctatcatcgccaagtaccaagaagagttaggtctatccacagcccacgagcatagaatcgcggatgagtatgcccaagtatacgcggaaaaagaggctagaggaagggtgatcgactctttacaccaagaggcaaccatgtggatggatcggtttgcccttaccttgaacgggagtcaagaacttccccgattgttagccaaggccaaggcgatggcagacacctactccgcccccgaagagattcatgggcttctcggctattgtcagcatatgatagacttaatggcccacataattagaaatcgttaggaaacttgtatggtctctcagaccttgactagatat

SEQ ID NO: 229659 - DNA, 483 bp, Glycine max
  unsure (1)..(483): unsure at all n locations
gtgcacaataganaacactacagagaagtaataaatgcattatattttattcctcgtaagagtaacaacaatcatggcaattcaaagatatgaaatgttagattttcacacaatcattgtgcacaaaggcaatcaaacagttaacaaacacaaattcgtacatagttgaaccaaaatgtaaaccattatgcttctcttggagagagaatgagtgaggaagggtttatggagatggaatcactcgattatgccactttctacgaccacaactatgttggccacccttgcacacatggggacctccaacaataaggaatcgtgcaagattggcctcattggtgttgtggactaatgtatggaagacaatagtgacgccaagtgaaactacaatggcctcaacaacaaactcgttggtggccatggtagactcttttacatgtatgataaggagcttgagctctttagatgcacacacctatggag

SEQ ID NO: 229660 - DNA, 376 bp, Glycine max
gagcataaaccatacagtctggcgacagttgcagattttttattcaagtccagctgggttaccaagttaaccaaggcatctagtttaccttcaagcttcttagcctcggctgatgaagataaattcgtggctacttcatgcactcctctaatgacaatagcatcatttctggcactaaattgttgggagttggaagccatcttctcaattaaatttctggcttcagcaggggtcatgtctccaagggctccaccattggcagcatctatcatatttctctccatgttactgagtccttcataaaaatattagaggagaagttgctcagaaatctggtggtgagggcaactggcacatagttttttaaatctctccc

SEQ ID NO: 229661 - DNA, 437 bp, Glycine max
gtgcgaacatgcacgatagactcggatgactgccgacattgatgtacgaacatactttggacacgctgggttgacttaaatagaggagatgaatcctgcgccataacatcacatgagcataagagtttgacacttgagtgggcccataggtgcatgcatgactagttttgcataaagcctgcagatcatcattgttgcatgtgaggcatggacataatgtgggacattcccttatatccctgaaccatatctgcaccctgacatatatcatgtgcatccgctctacgagccttgatccataggcccaactcaccataaaccttgccctgaaaagagaacgaagtaagaatatgaatagaagatagaaggagagaattcccgatcaaaagaatcaaaagacagcactatgagaatatctccaatcagagaatgggaga

SEQ ID NO: 229662 - DNA, 369 bp, Glycine max
  unsure (1)..(369): unsure at all n locations
tgaacttaagaaaatatctactgataccttgcttagatactaggatagcatatgggtcagaaaaaatataccctaaacatggggtgagtaagacatntacaactgctagaaaaaggataagcatcagcacacacgaaaaatatgttggttgtctaaaaagataataacaaagaatataatttgttgatgtaacaagtcaaaacatatgtaaattgcaaaaggaatgaaaggaaaactattagcagccattgtttaaaagacattggataagctaggataggctctctaaatctaacctgaatcacgaaaacataattttgtgcagcctactaacgctgaaaaactttgatctgtatacatctacttatg

SEQ ID NO: 229663 - DNA, 403 bp, Glycine max
caaatgtcgaagtaattttctctctcttaactaactctacatatgagatatcgtgcaattgaccccaacacgcctctcttaagaaggatgtggataacatattactgccgatatgagaaatatattggtcaatagtctataatacatcttgaaaaacaagatatacattttttaagctttgaggactaattcagataactcgataagattcacatcatcaaatgtttaaaacaaaaatcctacatataaaagcgccacaacatataaattatatcaacatacgaatgataagtagtaacgcaacacatacttttaagaatatcttatccgacagtgggttatatattcgaccacacaaattaaaataggctacgttcaccattgactaagtatattcttcaag

SEQ ID NO: 229664 - DNA, 339 bp, Glycine max
accattcattaaggaataagccatggaagaaggagcttcaccaccaagatgagccttggattacaagcttggagaggatgcttcaatggaggaaaagaaagagagaaagagggagcacgaaattgaaggaataaaagagggagagaagtggaactttgaagtatgtctcataagactttcattcatcaaagttacaacaagtgttacacatgcttctatttatagactaggtagcttccttgagaaaacttccttgagaagcttctttgagaacacttccttgagaagctagagcttagctacacacacgcgctctaataactaagctcaccttcttga

SEQ ID NO: 229665 - DNA, 399 bp, Glycine max
taagcttctggtggcttattttaaattgagagaaaaggctatttatactctaatgctactcaaatggcattaaccaaagctagagtcacgttgaatgtgagagccagttgacctttgaacacctaacagctgcgtaaaaccaaagactcaattgttctgaatgtgagaatatatatgcagtaataggagaaaagttaggcccttctgcactttgatataataaccctacatgtacgcatcttctagtgttcccacttggccatgaagccatcacataatgttgaaataaaaagcatgaataatatcaatcaaatctaggtaatctgtttcaaggtacatattatagggggacacaatgcacaagaaggagcagactcccttcagttccttggaaggaca

SEQ ID NO: 229666 - DNA, 412 bp, Glycine max
  unsure (1)..(412): unsure at all n locations
tttctcatagatggcgatggatgtatagtcttngcaaacgttattaatgaatcacaaagaataagacagaaagacctcgaaggtcgacatgttatggtcataggaagcataaatcattcgtagagagcaaacatatctcatggaaacaagagactgacgctaagagtttattttccggaataaccaagatgagaatggatggattcattgaaccgatgaaagaacataatttggacatattgngtctacttgagtaatcccaaccttagtatacaatgccataaactggatgctagagtacccacctaactgtagccatgactaattttacacgttgttttcaaatcatcattggtacacgtgcctcgtggaaatgatatgaaattcaacccgagaccgacgccttgacaca

SEQ ID NO: 229667 - DNA, 429 bp, Glycine max
  unsure (1)..(429): unsure at all n locations
ttggaaaatgttattntcaccttctcgctaagccaatttgctggcttagcgagcatctgctaagcgcaacactcctgtgctaagcgcgaggaagaatccaaaagaagatgagttgtataggtttgctaagcgcaccgcttcatctctctaagcgcactcgcttagttcatccgctaagcgagaaaggcgcactaagccaaaaattactaacgtgcgctaagcggtccatacgtgcgataagcgcacgagcacgaacaaggccacctatttaagcctgaaatcagattttgtgaagggagtttggactacgattcagagctttgcatgtctagggtttctagagagagaaaggtccaagttctagagagttntgagagatattgctgtgtgaaatctacagagaccatagcttgagcacgagctggttga

SEQ ID NO: 229668 - DNA, 470 bp, Glycine max
  unsure (1)..(470): unsure at all n locations
ttgatcttncaccaccgccgccaccatcatcttatatttttattttaatattattagntctttgagtttcagccttgtactttggctatattattattatatttgaacaatttgttatttccttatttgcatggtatgtttgagcaaatatttagtatgttatttgactatgtggattttataattaatctattcatgattgttgcttcatggntcttgcttcatgatttggctgatatttttccatgaatgttgtatggatgtttagttatatttgaatacttcaaatttgttacgcactctggatttttgttgatgccaaagggggagagatatatggattaaatcaagaactcacatgagtaatcaacttaattttaagagaagcattaattcatatacaaaggcggagaatggaaatctatgagagtgatcgactaggaaaaagtgtgtgtgtgtgtgtgtgtgtg

SEQ ID NO: 229669 - DNA, 347 bp, Glycine max
  unsure (1)..(347): unsure at all n locations
ataccgaaacgctgagcaaattcacacgacaatcactntttactcggatgtatgaccgagtcccgtaatatatagaaaagctcgaatgtgaatgtagaagctctaagcatattcaaacgacaataactctttactcggatgtctgaatgagtcccgcaatatatcgagatgctcgaaatggaataccgaagttctgatcaaatacaaacaataataacttgttactccgatgtccgattgagtcccggattatatcggaacactngaaatcgactgttggagctctgagcaaaatcaaacgacaataaacttgtactcggatgactgatngagtcccgtaatatatc

SEQ ID NO: 229670 - DNA, 474 bp, Glycine max
  unsure (1)..(474): unsure at all n locations
ntcaacanatgtcttcacaaataatcatcacatagcagatccctagcaggattacccatcatatctccccaaaaccccatacccacgaaatttaagagagaaagaagtccacccaaacctggattttcgaagtcccactcgtagccacgcacttcacgaccccgaaaatgccctcctttcgcgatttggagcagaaatgagcaccaaaggttggagctttgttggggtttcaatggagaatggaggagaaggaaaaagcaacgtgaggaagagggagagcttctgaattttctgctttggctgagtgaggagagagaaaagctnnttggtcttaaataaaaaggggtttctctttttctatttatttattcaagctctgccacatgtccctatntgatgggagcaaaaagggcccactttctctntttgactgtgacccatactcagtcacaaaagtgagaaaaatctgacctt

SEQ ID NO: 229671 - DNA, 390 bp, Glycine max
gattagcatattaaaccagatgaaagcttgatgatgggtggatcaaatacaaatacatacctgacgctagaagggtaaacacaagtaccgccagagcctgctcatctagaaaaagagaaacagataaaagggtcagctacgattattgtttcaaggaataaatgcttagagagataataaagaacaagaaagagagattgaaggatttactggtgtcagatgcagtaacagtggctgttcccgcaaagtcgcaggacccttgacccttctttggaagagctgtcacggcgtatttacagggccctaacgagttggctggaacatacccgtttacggaagggtatattagcacagctcacaacatatccatgtttctgcagtcgctacttt

SEQ ID NO: 229672 - DNA, 370 bp, Glycine max
  unsure (1)..(370): unsure at all n locations
aagttatacctagatattgtcttaaaatacaccaataatatacctagatattttaattaatatataattagagttatattattattattattattattattattattaccaaatactccaatatttctatgataaaagcaaatgcactntgacaattaaaaagttacatttcttataaaatatgaattttctatgagtctagcatattctgattaatatataggaaaaaataaaaaaatattagtcaattcaattgacaactgatgaaaaccataattttagtttttggaaaacacatgaattgtccatgtcattggtcaagaaaacccaagaagaagnaaaaaagaaattgatgatgaacacgtcaagt

SEQ ID NO: 229673 - DNA, 454 bp, Glycine max
  unsure (1)..(454): unsure at all n locations
cttcgcaaaattatttttctggaagaccaattactaagtctcttctttcttatgattgagatgatgcatgtttatgtgtgctgtcctacaatgccacaaccaagaatcatttatcttacttaccaaacaactcagctcatgaaatgatgcatgctcaatgtttaacatatagatattacctattctcttgccaatatggacaacctcactagacgtagattcaccaataagataacaattcttattgaattcaatnttgaagcctttgtcacatagttgactaatgctcaggaggttatgttgtagtccatccacatatagaacattttatatctatgttgtgtactaatttccaatatttccttctccattatctttccttattggtgctcgaaagtgacatatcttcttctttacacaaagcagtgagttggacttgcacctatatgtgcta

SEQ ID NO: 229674 - DNA, 442 bp, Glycine max
  unsure (1)..(442): unsure at all n locations
tactcaagcttggctacctctcattatgtgtctctctcagtagaactgaatgataatttcccatgttcccttcctttcggacatattctgctacttcttcttgatacaccacagtgttgactacactgtggttttagcccaaattgttgaggatcaacaacaatcattgctcaaactgaagttgattaacatgtcttcacaacttttagacaacaaaacagaattaatccaatgcaaagatcaagcaactttatttaataatgaaaaccagccaaaaggatgggaacatacaaacaattaatacacgtgctgtcataccctaatttcattctgagaccatctcgttgttgggatgcgaccctcgcttgatcacttcgagatacttgacactcatcgttaggcaatccgagaagttcncgacatgtcatgagttgaaagaaca

SEQ ID NO: 229675 - DNA, 478 bp, Glycine max
  unsure (1)..(478): unsure at all n locations
tgactcacccaaacatggcaagttaacatgctttcaacttatttcttcacaataaccatcatgaagcagaaacctagcaaaactacccatcatatctcccaaaacccaatacccacgaaaatttaggtgagaagaagtctacccaaacctgaaatttcgaggtcccacacgtagagatgcgcttcacgactccgaanatgccttcctttcgcgatttcgagcagaaatggtgaccaaaggttggagctttgttgggcaacaatggtggatgagggaaaagaggaagaaggctgcgtgagagagagggagagagcttctgaaatttgtgctgagtgaggagagagaaagttgcttcttggtttttaaaaaaagagcttttctcgtttcctattactttattataaactatgccacatgtctccatttgagtggagcanaagggcccactttttcttcttgatgtgactcttactcagtc

SEQ ID NO: 229676 - DNA, 476 bp, Glycine max
  unsure (1)..(476): unsure at all n locations
tgtggttatgttttgtgaggttgagctaagcgcgncggtcgtgctatgctcaaatatctctctgttttcaaaaattgtggatttaggctaagcccagcttgctgcgctaagcctaatctgcaaaaaaatattttttgagtactcacgctaagcgtgtggctatcgcgcttagcccatgagtgaattttcataaggcgtgctaagcccagccttctgcgctaagctcccagtcctattttcagttctatttttctgtttttgttgagaataatcctgttttaaccctgttgtttgatctaattcttttcagatggcttctangaagagaaaggccnctgcctcagcatcccaggcctctatgattgctctagattcacatctcaggaggcctgngatcgctattctgatattgtgattggcnggaagattcttcctganagaaatgtcatgacttaccacacagaaattgatgagtt

SEQ ID NO: 229677 - DNA, 475 bp, Glycine max
  unsure (1)..(475): unsure at all n locations
tcaagaattatggnctcattacactacttgtttcccgaatgcaattcaatgaataggcctcccatttttaatggagtgggttaccattattggaaaacccgcatgcaaatcttcatagaggctatatatttaaatatttgggaagccatataaataaggccttatattcctagcatggttgctggaaatacaactatagaaaagcttagagaagagtggagtgaggaagaaagaagattagtgcaatataaattaaaagccaaaaacataattacatttgccctaggaatagatgaatactttagggtatcaaactgtaaaactgcaaaggatatgtgggataccctacaagtaacacatgaaggcacaacagatgttaaaagatctacgataaacacattaactcatgaatatgaactatttangatgaatacgaatgaaagcatacaagacatgcaaaagaggttcacacata

SEQ ID NO: 229678 - DNA, 461 bp, Glycine max
tgcccagagaaggaatacatggaggaaatgcttaccacctctaaagactataaagcggtttctaatgactcctctgcggcctccacataatgcatacaggatgggctactcaccaagatgtcttcctcacctgatacgaagaccagatgcccttccactacgaatctcaacttttggtggagtgtagagggaacaactcccactgaggggatccacggacgccccaacagacagctgtagggggggataatgtccattatttggaacgtaacttggcatgtgtgagggcctatctgtactgggaggtcgatctctcccctaacctctcaccgggtgccgtccaatgcactaaccaccattgaactaggtttacgtggaggcataaatggacattctccaagtgctctaggcttacgttagactggaacattatgaatacaacctgctacgattggccataa

SEQ ID NO: 229679 - DNA, 203 bp, Glycine max
  unsure (1)..(203): unsure at all n locations
aatatcactcggtcttcagcggtgtaatctctgatagtcactgatcgaacagaatctatccgtaaattgacattgtaatctccggtgaacctaaacaagaacaggtggtggtaaagacttcgaaatggttttgaatatcataatgacggcataatcactccgatgtttttctttggaggtatccttganagaatagactaata

SEQ ID NO: 229680 - DNA, 434 bp, Glycine max
  unsure (1)..(434): unsure at all n locations
tgcctcanagaggtccaggaaggacaaggcagccgaatgatctagttccgctccggagtatgatagtcaccgctttatgagtgctgtacaccagcagcgcttcgaggccatcaagggatggtcgtttctctgggagcgacgcgtccagctcagggacgacgagtatactgatttctatgaggaaatagggcgccggcggtgggcatcactggttactcccatggccaagtttgatccagaaatagtccttgagttttatgccaatgcttggccaacagaggagggcgtgcgtgacatgagatcctgngtaaggggtcagtggatcccgtttgatgccgacgctatcggccaactcctaggatatccgttggtgttggaagagggccaagaatgtgagtatggccagaggaggaaccggtctgacgggttcgatg

SEQ ID NO: 229681 - DNA, 464 bp, Glycine max
  unsure (1)..(464): unsure at all n locations
agctttaccanatcaacacatgattcacaaccagaattcaattctacatatgaatacaataacagacctcattcacccagtaagaaatgaggaccctaagtccacccagctttcgtccagctcgctcctcggcaactgacctcttgctacgctgaaatttcagttgggtaactacctggtttgagggccttccataaacaataccttcgggaactggtctctttcggccacccctcctaacacgaacaccggaaatcacatagccctagcttgtcataatcacaatcaacaatgtactgaaacaaacaagggaatgtgcaacagctttacaaggacagacacacttggcacaataatacactactgagtaaaatgaagtaatataactaatgcatttccctaatcgaattaagtgaatgaaatgaaccaattaatgctatagtctcacaactcacaaggacaca

SEQ ID NO: 229682 - DNA, 472 bp, Glycine max
tcagcttgggatttatagacaatctcaagaggagtgttacaattattatatttcgctttattaacacttcaagatataacaagtcctagataacgatcttgccattggtgacgattatatctcttatattctgttctcactcattcattcatcataacatcacatgcaacatctattacgttttttagcatttctagattgattgcaaacctatacgcaattctcattgtctgaattttgtcggctattttcctccattgctaatatctctatcttctctgcaaggtctccctatttctatatcttattctacaaaatacttccaataactctctctctaaatctattatatgagaatgagacctttgggactaaatgctaagcatgaacaattgctatctacacattgaaagaatcccaatataaataactcatatacccctctttctctattcatcttataaccaatacc

SEQ ID NO: 229683 - DNA, 454 bp, Glycine max
  unsure (1)..(454): unsure at all n locations
ttactcttggggaccccgctggtgaacttgagtttctcttttaatgntgcacttcctctgacacattacaatattctggctcatttgatgcaacgctcactccctcatgggtctctggaactctatgctcagcctgattttcacgtttccttgcttcaacacttttcgcgccataagcaacatttttatctaggctagcataaaaatcaagcaaaaagtccttcttcttggtaacctatgcaaatattaaatacataatatgtccataattcataatagagggataggaattacaccatacacaagcacgtcaggttaattaaaaaactttataatatacactaatatgaagaagaaaggaaaacctttataatccattactaatctatgttgacaaccagatgagatatgataacatgataaaaataatacagaacagaagcatacatcgtct

SEQ ID NO: 229684 - DNA, 443 bp, Glycine max
  unsure (1)..(443): unsure at all n locations
tgagaatggagaatagcactaagcaatcactacgcatagctcctaactcgaaggtggaggacacatgaacgaaaacacaattcatggggctccgaaaaaggggttgagaatggagaattacactaagcaatcactacgcatagctccaaactcgaaggtggaggacacatgaacgataacgcaattcatggggctccgaaaagattgagaatggagaattgcactacgcaatcactacgcatagctccaaacgcgaaggtggaggacacatgaatgaaaacgcaattcatggngctccgaaaagattgagaatggagaattgcactaagcaatcactacgcatagctccaaactcgaaggtggaggacacatgaatgaaaacgcaattcatggtgctccgaaaagattccgaatggagaattgactatacaatcactacgcat

SEQ ID NO: 229685 - DNA, 351 bp, Glycine max
  unsure (1)..(351): unsure at all n locations
atgaagctttaccccgccctctctttntaacgtctctggttcagacatgctcgcccaggcgagctaacctcaaccatttttagttnttgcaaaaatttaaatatccccttgttatgcttgtatatttacttaattcctaggattgcaaataaactaggcatattcgaatataacttaagaaaatagacgagtgaataaaaagcagaaatttaaaaggtactaggctgcctcctagtagcgcttctttaacgtcttgagtcggacacaggatgatggttgattgaccatgggcctagcacctgcacgtacctgcccctatgcttttgaataaaggaaatggcatcacgcgat

SEQ ID NO: 229686 - DNA, 471 bp, Glycine max
  unsure (1)..(471): unsure at all n locations
cggagaaacataacaccttagtaccataacagattaatatatcatcaccaataacaaagcatccttacaatccccttgtctctctcctcatgtaaccctcttctggaaaataaattgcacaacaatagttatataaccctcttataaaaacaaaataccccattttatatatgctcttaagctcatcctttgaaatttcatgccaacaatgaaaatttaggatgcaaaatcaaatttatcaacattgaaatttgaccattttagaaaaacttctccaaccttgaaaaaatgtctattcgtcctaattatccncagaaactaanataacaaccacaacaataaacaatagagataaacctggaggccaagtaacacgcaacctatatatatatatatatatatatatataaatatatatatatatatggagacatgtaaattgacatatactacacatacatantcatccgt

SEQ ID NO: 229687 - DNA, 412 bp, Glycine max
  unsure (1)..(412): unsure at all n locations
tcntccctattntgctataattagggggagaagtgaatatataaaggttctttcccttaagcacttctgtctctctctgaattgctgaggaaaattatttccgtgaagaatatccaagccgaggcgcttccgtaacgtttctgtgagaaattacgtgaagattctcgactgttcttcaagattcatcgttcgttcttcgttttcttcagtcttcaacgggtaagtacctcacaccaagctgttcaattcattatatgtacctgtggcggtccacattttgtttcatgtatttttattctcgttttcatatgctgtttatacccccttttacatgcttaagccatttattaagtcattctcgcttaatctaaatgaaataacttcaccatcgttgattgttcgtcattcattt

SEQ ID NO: 229688 - DNA, 406 bp, Glycine max
  unsure (1)..(406): unsure at all n locations
tgctaaccactccatacctaataccatatctacgcctcttagctttactataagaactgctgctatacaggatcttcttgcactatcaggggaacttctctacatactcccttgcatctaagtttgggtccatctcaaacttctaccacatatcgcgaagtgtatccacctttnatatgaatgtttccaccatgcccttagaaatgaagttatgggtggcaccgcaatctatcaatactttgactttgtaatcatcaatatttccccaaatctttaacgatcgtcgagaagtaaataccacaatactattcatggataattgtggtgtgtctgcaattcttgggtcggttccctttcggacacttcacatcatgctcatctgaactaacattatcccaaatgttat

SEQ ID NO: 229689 - DNA, 255 bp, Glycine max
gagagcgaatctcctaaatactcgagtgagtcaagaacaccctgcgtgtatcaaaggacatacacaacccttgtgcggtgccctcgctggagagagtgattctgtcctatctatcatcaccaccctgggtcgttcgaaccacaattccagaatatccacctctgcccaacataatttgagaccataactcccatgtcacacactcaaagtaagagatccttgagcctaaattgaatctcagaacgagacctctca

SEQ ID NO: 229690 - DNA, 409 bp, Glycine max
tgccttgccccttgtatattagagggactcatggtctctatgattgacaaattccttgggataaaggcagtgtagccatgtcttcaaagcacctactaaggcgtacatctccttatcataaggtgaatagcataagggtacgaccacttaactgttcactaaaataagcaattggatggccttctatgcatcaacacagccccaatcacaacatattgaagcatcacactcaatttcaaaagattattgaaagtatggcaactcacgtatgggggcattagctagcttatgcttaagaacattgaaagcttcttcttgtttctctccccatttgaaaccaccaattgtcttgagcacttcattgagacgcgctgccaatgtgctaaactccttctcaaatcgcctatta

SEQ ID NO: 229691 - DNA, 464 bp, Glycine max
tgtcgagctgttatcttagccctactctctatatgcctttgtttcttccttaaggcattgggtcttctacaagttctttgaatctcttgatccaaagggactatatcttcttaagatactctacctcacatacatggaacaaagcatctatagaacatgttagcaaagtactcaagagtaatacaaaaacagaatttaaaagcgaagaattgaagaataatgaatcattgcatagaatatgaaattagcatacgttacctaatacgagaaacaagtccccgacaacgatgccggaatacttattacatcatcgacaaaagtaccaattaggtgatgattctcaatagtaagtagaaagactgtctcctcaaggactagtttgtactaacgcttttagtgtacactcaacaactaagcaatggtaattcttctttgagatatgttgcaataaatgaagtcactct

SEQ ID NO: 229692 - DNA, 431 bp, Glycine max
  unsure (1)..(431): unsure at all n locations
tatcgtcatttattacacaattatttttgaggcattgattgtatttntcaggagtctctactattatcaattacgaggtgatatgatcgattacttctcttttataagtgtttcagaagtgattaagaacactttaattgattacatcaagaatctaatcgatttcattgttcttgatagccttgcagtttttgggaagaatacttcattcaattgaaatgataatataactgatcacattgtatatttaattgattaaagatggttataactggtttctctataaatagccaccttgtgttctcacttctaataagttctaacaacttttgaatgagctagaattacgagctgataataatgatacaaanaacaagaagaaaacgtgcttagacatattgngaatcataacttctaatattcgattatga

SEQ ID NO: 229693 - DNA, 442 bp, Glycine max
tcatgatgaatcaagattgattcacagagtcttgatgattactaagatgatgaccaaaaactcaaaagtcaagaacacttcatgataacaaagatgatgatctcaagaatcaaagaatgagttcaagattgaatcaagaacacttcaaggttcaaaaggaaatttgatttcaagaatcaagaatcaagtttcaagattcaagactaaagattcaagaatcaagagaagactcaatcaagataagtattaaaaagttttttcaaaaactgagtagcacatgaatttttctcacaaaccttttaccgaagagtttttactctctggtaatcgattaccagaatgttataatcgattactagtagcagaatgggtttcaaaaagtcttcaactgaatttacaacgttccaattggattaaaaaatggttgaatctattacaatga

SEQ ID NO: 229694 - DNA, 311 bp, Glycine max
  unsure (1)..(311): unsure at all n locations
ctaagagttcaggacccgatcaatacaactttaaattcattataagaattntggcatttagtgagggtggatgtgatcaaatttcttgaagattttcactcatttagaaacttctttagaggatccaacggttccttcatcactttcaccctaaaatagatgagtcacaaggatggggaggttataggccttattctttgattggttgtatgtataaaattgtggcaaaaatcttggcaaagagactacagaaggtactacatggaatcattgatgaaaggaaaagtgccttctttttggggggggggggg

SEQ ID NO: 229695 - DNA, 217 bp, Glycine max
gatataggatactagcatttcgtttagacgatcatcctcaggaaacactggggctagctgaattacaagaacatcactcaaatcgtataatctcacacaggcaactgtacatcctaattcacaaccatagacatgacatgacttgattctgcaaatcatttcctatcaaagcagagattacatgcgcgatcatgcgatcaatatgactctctggaga

SEQ ID NO: 229696 - DNA, 498 bp, Glycine max
  unsure (1)..(498): unsure at all n locations
ctatanaatactaagcttgcttctacaatntctccgtttattatgatgacacatcttgtattcataagaatatatgcgatattggatctatcgctcacttatatctttcctcccctttcttttagaatgtatgcttaatttacaacttagcaaatataatatcttgatttctaaaatacctatttttctctccccctttggcacatcaaaaagccaaagtgcgtggaaaaataaaatcatacataaataattttaaaacatacataaaacataatgttaataacacattcacaaatgtcagtcatagtcatatatcaacaaaataaccaagtttaaacacatcaacttaataaccaagttcagtcataattaactaagtaccaaatatataaacaaggtaaccaagcttagaaaacacacaactaacataatgtcataataaatagccagatatgtaacgacccgcgctcgcgctacgatatcaacactctaatatac

SEQ ID NO: 229697 - DNA, 415 bp, Glycine max
tggcacgaaacaccactgtcgttgtgaacaatggatccattttgtattattaaacctaatgaggagctcacaactgtctgactgcttgtctctcccaaaaatgccatagatttttgtaagacttgggttgatactgaaacttgtgctttcttaaaggttacgttgtgccaaatatatagatgaagtttagtattagggctacattttttaaagattagaaatacgcatgcacattgcttctgtatgtgttgtcaactacacgaatgacatgacatgctttagttagcatcagatctgcatgtgtagtcatgctgtgcaaggtcctctcacgcactttatgtaatgcagacaacaattatcatacacggcttctcacatgtgtagtcaagtcaacaacgatatatcattacatgct

SEQ ID NO: 229698 - DNA, 349 bp, Glycine max
  unsure (1)..(349): unsure at all n locations
ggcatcttggagtcaattttattatttattcttgtcttatggttaacgttgtctctataacatttccattggatttaatgacgaaatgtgtgcatttttagcgaaaaaaaaggctaagttttgaattgcacaaagtancagctgggctaagctcaacagttgggctaagcgcataaccactgctaaccgcagcttcagcgcacttagcgcataggagaatctggtagagcatcagcatcaaagtcacgcgctaagcgcaagatcagtgtgttaagcgcagaggtgccttcagccaggctaagctcgagactggcgctaagcccaatgtcacttactcgtgctaagcgcg

SEQ ID NO: 229699 - DNA, 375 bp, Glycine max
tgaatgacagttatcacattgagcagaacttatgttgagaatcacgccaattaccagtgtgaggagaaaaacacacgaggagcttaaactgaccttaaagggcgataagtggatgccttgccaatctatgtatggggcgtgtgagatagcctatatgacacataggagtattgtaacttatgaccttgctcttaacgacttatagctctgctgtataaaattgtgccactaagttgtttgcatgttataatggagaaatttgttatatgccaattgtgtgaatacgaatgcttcacagatttaaaatacatctctatatggctaccgagctacaaggtaaagtacctcatagaactatcttacaggccatgattg

SEQ ID NO: 229700 - DNA, 416 bp, Glycine max
  unsure (1)..(416): unsure at all n locations
tggggattttanggatagaggactgctctggcttgtgtttatgtttgagttcgcgtatgaggtctgcgttttggaagaaaaactcgaagaaaaactttgggtttatgtgtatgtttctcttcatagagtttggccaacgaaattgttctgaggagtcatgtatgtgattgtgcaacgacatcccttctgatatcatgttttaatcctcccacaaagcaatccaatatagcttcttgtgtaattccttgtactcgattagctaaagccgtgaactgcacgtattatgactgaactgaaccaatttgagctagtttaaacaactgagatctaggacattcatacggtgatgggccaaattctgtctctaacgctcgcgtaaagcagaccatctttngaatgaatttcacgagtcatca

SEQ ID NO: 229701 - DNA, 448 bp, Glycine max
  unsure (1)..(448): unsure at all n locations
ctcactgttggggctcttggagctggattttactttatgaggtcctttaatggtgattttccaccatggagatgcagcggaagacaaaggagaagagatgataggaggcgccatccactatggaataagccatggaagaaggagccttaccaccaagatgagccttggataagaagcttggagaggatgcttcaatggaggaaaagaaagagggagagaaagagggagagaaagagagaggtgggagcacgaaattgaaggaagaaaaagggagagaagttgaactttgagttgtgtctcacaagactctcattcatcattagtacaacaagtgttatacatgcttctatttatagactangtagcttccttgagaagcttctntgagagaactttcttgagaagctagagcttatctacacacacccttctcatactaagctcacct

SEQ ID NO: 229702 - DNA, 405 bp, Glycine max
attatggggtacccattacatgaggtactatgtgttggtctgtcgatggtgaaaaacgattctccacatcaacaaatcacgtataacccaccatcccttgttgcccacctacaactgagctcacgtactcccacgtagcccttatcctcgttcctctcaacgccgggtccccatcaaacctcccaagcttgcacaacatccaagtaattgcacatccaatcatcatggactaacaaaatcaagcaaaacagggcagaggcagataactcttcccataacacaactcagaatcacagcttttcacatacaaataccgcaataacatctgcttcgttccaatatgttaaccgttggattgactcgaaaattttactggaagtctctagtacataagtctacattttg

SEQ ID NO: 229703 - DNA, 429 bp, Glycine max
tgtaagaatatggggtacccatcacatgtggtactaggtgtctgtcgggcaatggtgcacaacacgattttcacattcacaaatcgcgcataaacccaccatcccctgttgcccacctccaactgagctcacatactcccacgtagcccatatcctcgtttctctcaacaccgggtccccatcaatccttccaatctttccccaacatccaagtaactcaacattcaaacaacacaaaccatcacagcctagaaaacatggcaaaggcagaatattctgcccaaaacaccaaccaaaatcacagactgtttcacttaaaggccccagtaacaattccttcgttccaattctttaaccgttggatcgactccatacttttactggaagtctctagtacataagcctacattttgaccgttgggatctact

SEQ ID NO: 229704 - DNA, 466 bp, Glycine max
  unsure (1)..(466): unsure at all n locations
ttgagggtggaggatagacgaacagcgctatgctatcttttcttgggtctccgaataagaatttatgtttgaggatagatgaatagtgctaggcaatcaattcatgggactccgaataagatttgagggtggacgataaacgaacaacgctaggcaaccaattcgtggggctccatactcaatggtggaggacgcatgaacaaaactagggaataaatcgatgggtctccgaataagaattgagggtggaggatagacgaacaactctangcaatcaatccatggggttctagactcgatggtggagaacgcatgaacagcgctatgcaatcaagtcatgggtctccgaataagatttgagggtggaggatagacaaacaacgctaggcaatcaattcgtggggctccagacttgattgtggagaatgcatgaactgnctaggcaatcaattatgggtctccgata

SEQ ID NO: 229705 - DNA, 367 bp, Glycine max
  unsure (1)..(367): unsure at all n locations
aacaatttctggtacttcaactattagaagctttgatcagcagtcaagatttcatgaaacaaatatgaaactgactgatggatattctcggccaaagatcaatattgctggtgccatggaatggttgtgtttccgcttggatatgttgtcttctatcacatttgccttttccttaatattcttaatatctattccacagggattcatagatccaggcgagttattcctatctgttacaaatcaaaatttaatctgctaatctaatatggaattgaacataattgnttctcttttataactatattgagattttgagagccttgctggtttagctgttacatatggacctacattgaacatggtacaa

SEQ ID NO: 229706 - DNA, 129 bp, Glycine max
ctcaagcttcttccggaagacaatggaattcttccggaagaagcttcttctctggtaacattccggatgacgctcttccggaaatagtctgtgagtatttccggaagacacaaattattcttccggaag

SEQ ID NO: 229707 - DNA, 404 bp, Glycine max
tatatgtctaagtatgagtatatgaccgacacataattacatgcactggagaagccgctgtggtgaacataacatacactaacaccataatccggagtgagagagaggaaaacacatgaaccatacgatggtcgtgattgaaccatcatcctgctcacgatgtgacataagatgaagaacaacaacactgcgagcataagtctccttgaatacaaaaaactgctgtctttggccagatagaaataataataagtaaagatacgaagcatatgttctcatccatctagcgctctatcaataaccaacgtactaagaaaaaaccatgctaatcaaatacagcctccttcctacaaaaaataattaacaatgcatgtatcgaaaaatacaaaaataccttgatctaa

SEQ ID NO: 229708 - DNA, 468 bp, Glycine max
  unsure (1)..(468): unsure at all n locations
ntctaaccaanattntcatgcatgtggaccttcttctaataattctgacttgtagcagccccctatccctcttccattcccacctagaacaattccaaacaaaaagatagaagaagtggaaaaggagatcttggagaccttcaggaaagtagaggtgaacatacctctactagatgccatcaagcagattccaagatatgccaagtttctaaaggaactatgcacccacaataggaagctcataggcaatgaaaggattagcatgggcagaaatgtgtcagcattgataggtaaatctgttcctcatattcctgagaaatgtaaggacccaggtactttctgtataccttgcattattgggaacaataaatttgagaatgccatgctagatctaggagcatcagttagtgtcatgcctctgtccattntcaattctttatctcttggacctttgcaatctacagatgt

SEQ ID NO: 229709 - DNA, 474 bp, Glycine max
  unsure (1)..(474): unsure at all n locations
tctgaggagtgaaacaatattttgacatagtaatatgaatatgacatggctactctccaaagaaagtgggccacaagggacaatggttcatagaatatcacaagatcctgctatgttaatacaaattcaattcaatcattaacacccggacagaattactagaaacagtctacattgtaactgataaaagaaaaaaccactgttgcggagtcaacaaaatatggagtctcaatntccccttcctgttttctttccacaactatagccctctaatgcttacaatggcatgggtgataggagatcctctagggttcatcacgtaggtggaagttaattcatctggttcttctcttgaacaaaagatgaagatgttgtctagacagatggagactatgatgaaggctcacgtgtatatgatgacacccacgcctccacactcctccatatatatgtattgaatacaataacagaatg

SEQ ID NO: 229710 - DNA, 442 bp, Glycine max
taacggattctgattccttgagctgcatatatccttattctataaaaaccatagtattaatatatgtaaataaatacaagcaacgggaatgagaaatgagaattatcttttgagctttttcttcgttttggaggtccctgagtcctcgaaaaccagattcctttcccaaccccgtatcagaggtcaagtcgagagtgagaatctgagagaccgatgagagagagagtgtgcgcgacgcaagcacaacagaagagaagtaatgaagcactgcactacacacacttgctattttaaatttaggtttactatacacacccctgatgttcggttcagttaaaccggtttcgttacttaaaccgaaataaaccaattcttggttactaacaaaaattcaaacatttaatttgattgttatgatttttgaacaatttttatatatttt

SEQ ID NO: 229711 - DNA, 473 bp, Glycine max
  unsure (1)..(473): unsure at all n locations
gaaactcagctccgaagaaatattggcacatggcattgatcaaaattaaatcnggtggaaatgaaacaagcttaagccatatgaagttaagaaccttacaactaataattaagccaagagctacaatatccctagctagataggtagctatgagaagcacaatgctaaacaagattaacaaattcaattgcatttcttctaatattacaaaataaaccaaaactacaaacgaaaaaattcattataaactgatcactaattaatcaactatgaaccgttctaatcggaagcacaggcaacccaaaaatgttacacgttggacctgttctcacactactgcagttcaaacacttgactctaccaccaccaactacaacaacatcactatcatgttccatagagagctcatcattaacaactagccatattctcttcaactcatcaaacctatcattactagtaacaatattagt

SEQ ID NO: 229712 - DNA, 470 bp, Glycine max
tggggactatacctgcgaccacacactgacgagattctgtctctgtccatatttaaggcggactgaagcaccggctccggcttcttagctgtactggaagcggatgccgcggctttatcctctatcggtttctggaggttaacatgaccttctagatggaagccatttgatctcttaaggccgatagatcggccttcatctgatcctgcacgcactctacattatccatattattggatcgcagtgtatacgggtgcctttgtgctttcttagttattatgatattcctaaagatataaacaacggcgagtatgccaccaaaacatgaatatgcaaatgaatgatcagagcacttggatccaccccaaggttatttagataatgcgatgagtgtagaacttctcatatataaaaagaaatagctttcatctaccaagttatacacacgtgttacaagatacctaacagtt

SEQ ID NO: 229713 - DNA, 476 bp, Glycine max
  unsure (1)..(476): unsure at all n locations
cttgcagtatcactgatatcaggaatcgggatgctaccatttacgaatcccaatntgttctgaccatcgagagccaagatcatagagcaccaccaggtgagatagttcaagccgtcgaggggctaggaaacgagcaccaatgctgggttatctgtatggtggatgtataaaggatccgtggggtcgaccggagaataaagagtcatctccggattggagcgagaggtggtggtcatgatggggtttcttcttctgataccatattataacaaaaggtaaaagcaattgaaaattgaatccttattactttatctcattgcacaatgtacaatatatacaataacagaaacagaatagactatctataagactaacttaaccaactaatcatagtagactaatagctaagctcactatgggaataatcctaactagagatggttggaatagntccatctatcataactaaattaatt

SEQ ID NO: 229714 - DNA, 368 bp, Glycine max
  unsure (1)..(368): unsure at all n locations
tgtgttgcctntcaattgtagaagatgaatatatagctgcttgaagttgttgtgctcaaagtctctagatgaagcaacaactagaagatattgaagtaaaccttgatcacattcctctaaaatgtgacaacacaagtgctatcagcctaacaaaaaaaaccttgtcatgcattctaggactaagcacatataaataaggcatcattttcttaatgatcatgtgttaaaaggtgatttttgcattgagttcattgatagtaagcataaactagcagacattntcactaaacctcttgctagagataagttatttttcatttgagatgaactatgcatattggatgcatctagcataaaataaactggtt

SEQ ID NO: 229715 - DNA, 440 bp, Glycine max
  unsure (1)..(440): unsure at all n locations
tgtgtaatcgattacacttattcggtatcgattaccagtgactgtttctgaataatcaaaagatgtcactcttcacaaggctttgactntttcaaatgggttctaaagtcttctaaaagttataattcttctgaatggccttcttgaccagacatgaagagtctataaaagcaaggctttgttttgcattctcaattaatctcttacaatcctttacaagccttgaatctctttgaacttcttcttcttctttgtaccacaagttttgtgaagttttctggttttctaaaccttgaaaacttgagttattcatcctttatcattctcttctccctttgccaaaaagaattcgccaaggactaaccgcctgaattcttttttgtctctctctctctttccaaaagacaaggactaaccgctgaatcctttgatctccttct

SEQ ID NO: 229716 - DNA, 390 bp, Glycine max
  unsure (1)..(390): unsure at all n locations
tgaagganatactgatgcctcggtcaactctattactcatctngccatgaataagaaatctacacatgttgcaagagtctgtggtctatgttcttctgcagatcaccggaaaaatctttgtccttctttgtagcaatctggagtcaatgagcaacctacagcttatgctacaaacatttataatagttacacctcctcagcagcaaaaccaacaacagcagaataattatgacctttcaagcaatagatacaatccaggttggacgaatcatccaaatctgaaatggacaagttctccacaacaacaacagcatgtgcctcctttccacaatgctgctgctccaagcaagccatatgttcctcctgcaatataacagcattcacaacaag

SEQ ID NO: 229717 - DNA, 327 bp, Glycine max
acctcaaagagctgtccgcacatgaactaccccaaccgaacatagtccgacttatctagacctcacccacacgcagtaaagaatctgttcacttccggaagataacggatagattgaggcgctcgacaaaaggttaagagcagtcgatggcctcggcattacccattctcgtatttaacggatttatgtctcgtgcccaacatcgtgcattcctcccaagtccaaaggtccacacattgataattactcagggacgacatgtccgacagggcatcttcggatgtattgctgaaagatgggggcgcattctgcggacgagagaatgtt

SEQ ID NO: 229718 - DNA, 429 bp, Glycine max
tattcgattagctttttgagttatagtttgaatatcatgttacagttgtgttcaaattatgtaattctgatttcaagcttgggctcctatcaagactgcagcaagtctgatctggaacctatcgcttgatatcaatatttgtaagcttactacctctggtactcatttaacactacttatactttggctgagcaaaaaaaaaactaaacagttgcttacactaggagctagatctagatcctaactaactcaagcttgtcataaccagaatgacaactgataaataattatgctgagtcagaatgctggctcagcttatactctatttaaatggaggctgttaacacacatgtccaatacttaatatgttttatgacaaacccttataagtgcacacattacattagataggatgaaatgcctaatctt

SEQ ID NO: 229719 - DNA, 473 bp, Glycine max
  unsure (1)..(473): unsure at all n locations
tgactaactcccaagtcccatttttctaatggactgcagctcttctttcattgcttctacccatttcctctctttgacagcttgagtaaaggaaaggggctcgacatcagcaaacaacgcaacatgcacttcttcacagggtaggaattcaccttcatcagtcaccctatcatctgtgtatacttcaaagtgctgaagccttgaaggagggaccctggttcttttggccctactgtctgttgccccttcttgattctgattgacctgaaccagtgtctcatggtctgcatcttcatagttatcagctgattctgaagcagacttattcacttcaatcttgaggtcctgctgccttggattagtttctgtagcaatgttttcccaattcaggcttctactttcatcanaggttacatcactgctgatcaccactttctttgagttgcaatcataaagcctgtacccaccagtgt

SEQ ID NO: 229720 - DNA, 472 bp, Glycine max
caaaggacaagaatgcaaacttcgttacgacaacaaatactcatcatacccatctggctagaacagatgcgactgacacgacgtggcatgaaggaaccctcttcatcacacaaccaatccaaggaccatcaaactctgacactcaaccacatccctttgttgatgggattatggaggaaaaaactctcacctagatggaagatgttgaccatcgattgttacgatggactcttggacctggatgaacacgtggactgattcttcacatagatgaacctgttcacgaatgacgatgcaatcatgtgccaagtgtctcctacaatgttgaagggtacatcgttccattggtatactcgattaccacaaaactccatagactcattcgtgatgcttatcatgcaatttggagctaagtgcgcgacgagaaaaccatactatcaatcttacttcaatgaatatgaccctgaactct

SEQ ID NO: 229721 - DNA, 473 bp, Glycine max
  unsure (1)..(473): unsure at all n locations
tagtcttttctatcttactagatgtgctttggttgtttatgaatcaagttattgtcaagattgctacatggacaaatgaaaatgttataaatgtttcatggtgcttcaatctattcttgcaactcatgaaagcttcccaatttctcattgagcctggtcaatgcatgttgaggagcaatttagtcattgggaaccacttgaccaaggggaggtcgtggttaattagtggccgatcagcttacaatttgtgcagatttgttgtgtgtggaatagttcgagctgaagattttatttatggttgatatgttaagctcgatcaatgctcggttttaattgcacgcggagctggagcatcctatntagtctctaagttacctcgggagagagggtaccacaaaattaaaatgtattcagatactcaaatagcaattaatctttcgataaaagctgttgtctatctcaccattgtataa

SEQ ID NO: 229722 - DNA, 438 bp, Glycine max
tcaggctgctcaactgttccacgatgctgcatggaagggtttatgtctgtatgggggccaacagaggagcataaaccacagactcttgcgacaggtacatatttatgattcaaggccagctgggttaccaagttaaccaatgcatctagtttgccttcaagcttcttagtttcagatgatgcaaatgagtttgtagctacctcatgcactcctctaatgactatagcatcatttctggcgctaaactgctgggagttggaagccatcttctcaattaacattttggcttcagctggagtcatgtctccaagggctccatattactgagtcgttcataaaaatattggagaagaagctgcttcgaaatctgacggtgagggcaattggcacataagtttttaaatctctctcagtattcatataagctctctccactga

SEQ ID NO: 229723 - DNA, 299 bp, Glycine max
ggcaatctgactcggtctaacaccgactcgactctgtcatcatcaatttctcttttatttcttcttgggttctcttgaccaatgacatggacaatccatgtgctattccaaaaataaaatcatggtcttcatcaggtctcaatcgaatcgactaatatgctattattctctcctatatattaaccagaatatgctagactcatagaaaattcatattctacaagaaacgcaactctttaatagccacagcgcatctgcttcatcatacacaatcggagcatctggaataatactcacaa

SEQ ID NO: 229724 - DNA, 401 bp, Glycine max
atagcatccctgttccaataatatgaccagcctctgacatgcttcacattccgagactcccaaacgggaccaaccatcgaagaaatccaagaaaatctacgcatgcctctcgggggaagaaaaccataccattcctccgggtgactaccctctatgagtagaattgcacctgcgcgcaaggattcaacacgaggttcggaccgcataaaacagactccgaacggcatagcgggcctaccacggaagtacctagaagacaaggcgagggcgatggccagtcgaggagatcgcgacccgtttatggatgagatacgctagctaactttaggggccgacctcttctcacacgtggatggtctggcggacctagcagcaaacgacgctatacttgcaacacacca

SEQ ID NO: 229725 - DNA, 413 bp, Glycine max
ctgctgtcagcacaaatgaggccagtatgtttttactttctaacccggaatgggtctacgcaaagacaatggcgcgctaaccagcccgataaatgccatcggaaatcgtgggaaggatggtttaggctaatagcccactcacgcagatataaagaaaagcatcgcgggaaggaagagcggtggcaaagctcgcggctgagacaagaaagtgaacgaagcccgccctggcacataagtagaagctttataagcgtgggtctgggagacgaaggtcaagtggtcgcgatatacgaagatgatgttccgagtacattggatttggtacgaccataccctcctgattatcagctgggaaattggtgagtggaggaacgctccggcatctacgcaacgagcataatggaaacctttac

SEQ ID NO: 229726 - DNA, 376 bp, Glycine max
  unsure (1)..(376): unsure at all n locations
actacggacctataaaactcagctattacatttgttacacttaagagagccacattctgtatgttcttgtatgtcatgaatggaatatgctatacaaacaattggtattcttatgttagattcattcgttaaggttatttttattttgatgacgtataaaggatcatggcttctncacctacctcgcctcctcctcctactgcttacgacgcatcagctttgccgtctgccgtgaagtggacacgcaaagcttcacgtctatgatccttgtctactggaccacctggtgctaagagaccagtggtccgcgttgatcctgctatcggcaaggccgacggtccctacaagaagaaattaagaacatatttgaggattg

SEQ ID NO: 229727 - DNA, 318 bp, Glycine max
ccaaggaaacatctacctcttgtcccatagtccacgaacctttgccaggccacataccatggtacatcgccttcccaaagatgacccaaccaaccagaggaacgccactctctatgataacatacctaaaattgctggaacttccatgagggtggaagcaaatgtcagcccctctatttaaagcaatatataactctaccttgagcctcattgtccaagcaattcacaaaaaaaaaaccaagccaatttcaaagcactgaaccataacatcatatgtcggcacaaagaaattataatataacaatcactaaacgccat

SEQ ID NO: 229728 - DNA, 351 bp, Glycine max
  unsure (1)..(351): unsure at all n locations
tgtagttctcgtcggagaggaaaccgacgcgttttttcttgtctagcaacattgncatggagcacaggcattcaatgcttggcttgaagcatgcaaaatccaccaagtaaattttgctgcgtgttctaattataaactggtatgctagggttgcaaccatgcacaaaggtattgtaattgaaagactaggcttcaaatggggaacatagaaactagctaaggtgacaactataaacaacgtgaagaaaatgttcatgttgaaatgcttcagcattggtattaagcgttgttattgcgtgagatatattttgtagctcgggttataccgatgagtcacatgtggcaatatat

SEQ ID NO: 229729 - DNA, 380 bp, Glycine max
  unsure (1)..(380): unsure at all n locations
nnttgtatcagtagtagactacattgttacgagcctattttttgtatatttcatagtanatctatatccatacactggctccctttcagaatatgaatgtctgaatgtggaaccatttgtatgatcctttatgtactattcagtacctctggtactccaattaatatatagcttacctttgctgataaaaaaaaaaaaattaataattcaagcaaacatatatctattgatgtcctgcactactttcttggcaactcaaaaagacctatacaacatatgtttctaggtcaattacaaaaagaactgaatgaaaataattatggcaaatatggcttatatagagtaataaagtatacaccaattgcacaaagcaacagttc

SEQ ID NO: 229730 - DNA, 414 bp, Glycine max
gctactcaaatggcattaaccaaagctagagtcaagttgaatgtgagagccagttgacctttgaacacctaacagctgcgtaaaaccaaagactcaattgttctgaatgtgagaatatatatgcagtaataggagaaaagttaggcccttctgcactttgatataataaccctacatgtaggcatcttctagtgttcccacttggccatgaagccatcacataatgttgaaataaaaagcatgaataatatcaatcaaatttaggtaatttgtttcaaggtacatattatagggggacacaatgcaaaagaaggagcagactcccttcagttccttggaaggacaagaaaacgaaatggctgaggttcctctccatggttccatatagcacctttgtaattacacggtcatatc

SEQ ID NO: 229731 - DNA, 409 bp, Glycine max
aggtttgaatggtgaaattgagaatggggtaaatttgaagcaaactctcacctcacacaagtctataacatcaatttaaacttgttcaaactggatttacacctaaaatttcaccgaatcaaaatttgactcctcaccacccaattttaccctagaaatggctcttgccttcactttggtcatttgtttttctctcttgcatagcccaagctttctcataagtcctaaatgacatttcgaactaggattaactcattttaacctctatttaccactgaatccagatttagccttccaactctcaaagcctcactctttttccactcataacaccacattctcactttctaaccctaggttaactctacccttcatctctcacagatttccataagcaacttcagcacat

SEQ ID NO: 229732 - DNA, 439 bp, Glycine max
  unsure (1)..(439): unsure at all n locations
ctcaagctctcgctcatgctgagaacgcctctaggtcaacacccgtgcattctttgttctccaccagagggaagctccccaagttacaactccgaacacggctcgaccggtcggtaattccaacacgacaaggaacttccctccaaggccattgccggaattcaccccgctcccaatgacgtacgaagatcttctaccatccctcatcgccaatcaattggccgtggtaactcccggaagggtcctcgaaccccctctcccaaagtggtatgaccctaatgcaactngcaagtaccatgggggtgccccggggcattccgacgaaaaatgctcggcccttanatacaaggtccaacatctaatggatgccgaatggctgactatccaagacgatcggcccaatgtgaggaccaacccgctcgccaatcatggaggggga

SEQ ID NO: 229733 - DNA, 197 bp, Glycine max
tctctcaaggaattatgcctcggagctctctagaaacacaaagagtataataacgaataaaataaaagcagacacaagcgagcgagagagagagaacagaccaacgacatcccatataactaataactataataacataccctcagaaatgtcaagcaccaaacttccatccataaagccgaaaaccctaacagcaa

SEQ ID NO: 229734 - DNA, 286 bp, Glycine max
tggcggaagggattccagcgcttcactatccaaggtcacacaatatcgccacttgagggaaccggaacctgaactaccaccaaaacagagatgttggtacaccaatgaacacacttaaaagcacactccgcagtaggcgggcctcttgggaaagaagcggcacttcctccttcagatgaggcatggacactaatgcctgacccaactacaaatcagcgccaaaggccggccaccatcaacaaagcaaaagaatgaaatggatagggtcgaaccatccgaccaccga

SEQ ID NO: 229735 - DNA, 430 bp, Glycine max
ttctttaaaaggaaaattacctatacgaccaattttcattctttatctagcaagggctcgaagagctgattgagcaccaggacccggtgttttggtcttggtttccccagtagcacggagcttgatatgaagagcagttatgcccagttcctgctccaaaataatttgaaatgatacatcaagctcgacagcttcacagaaaataacatcctactgctacagcaatttcaaagagcaaaaacactgaaacagattaagcggtgatactagctaaaaaacaggatgatcaaattggaattctatcaaattcgtgaagaaagcagaaagataatcatgaaagttaacatggttaacagaaagaaactatgttaaagagaaggccactgaccttgcatctggcagcaacatcctgagctgaagcatagcagca

SEQ ID NO: 229736 - DNA, 462 bp, Glycine max
  unsure (1)..(462): unsure at all n locations
tctagccaaatggacttaccttgacttaattccttngatttcctctttgaaccttgtttccctttccttgtnttgaagctcactacaagccttaagtgaaaaaccatgatatcactatatccttaaggaattttggagctttggaattgttttgggaataagagtgggggagtttgtttcattggataacatgttttgttggccatgcttcattatatattttgagccatacttgatacacattgcatattggttaaatgttggacatgctgaatatgatgctgtttctcataaggctacagaaaaaaaaaatattataaataaaaatcgaacaagaaaaagacaaacagtcaagttgagtgaataagacaagaatgatgagactcttggttctactctttatgataaaatttatctctactttcttttaatttcttaatgctttctaatatgcaactattc

SEQ ID NO: 229737 - DNA, 344 bp, Glycine max
cgtagttctcgtcggagaggaaaccgacgcgtttttctctttgatcaacatttccttggagcacaggcattcaaggcttggcttgaagcatgcaaaatccaccaagctaatattgttgggtgttctcattataaattggtatgctagggttgcaaccatgcaaagggtattgaattaaagacatgcctcaaatggcgaacatagaaactagctaaggtgacaactataaacaacgtgaagaaaatgttcatgtcgaaatgcttcagcattggtattaaggtttgatattgctagagataatttatgtagctggggttatacagaggagcaacatgtggcaatat

SEQ ID NO: 229738 - DNA, 472 bp, Glycine max
  unsure (1)..(472): unsure at all n locations
tcacaaaccctgcactctcacacctgatgaggttactgctcttgtcacctgacaacacttgtcctcacttgngggctcaacaagcttgtcaccctcgtacttgtcaaggctactaccctggacaccagacttcaacactagacaacctctttttcctgcaagccaactcaaagcttggggggcttatgtactatccaaggtccaaaaaatacatgtggcatcctacatggcggcactctaagacacctgtccaccctctatgttagccctaacataggagcacagatgtctgacccttagtagtcgggctctccaatattatccctaacctcttaattatttgaatataccgtaaccactttatctcttgacaggtattcaattatctacaagttacacattatctgtaagtacaaaattatctactagaattcatctctaagctctatattactctatctataagcctacc

SEQ ID NO: 229739 - DNA, 487 bp, Glycine max
  unsure (1)..(487): unsure at all n locations
acctataaatctcagctcgatggnttacttctctgatcatctggtaataaagccaattttgtaaatntctngggactcactatctcaagtttctcagtaatttccttgaatgctggaacaaggccacgccttatgaagcacccttctataagccgcatcgaatttaactcggggagactaggagcatcttttaactccagatccaagcaaaatggggagtcttttagccacatcctgagagagtgagccttggccacaaggatgccttgtcgtgtcttacaaggaagaaaaggcgatcccatttcccaaaggcatgccttcaatgtgctgtcaagagataccatgttatactctgctgttcccgttataagtacaactgattttggtgactctggataaccctgcaaggaggcatcctgccatgcaaccaaagtccaaatgttaaggtcaaacagagagaatctagagctaattaaatggtgaatat

SEQ ID NO: 229740 - DNA, 399 bp, Glycine max
gagtggaacagataacggcaatgcatggtagggacagtattattgattatctcggcagctcattcaatcgaaagagatggcatttcggagcactcaacatgtatattttgagacatggaggactaacttaacccttagaatctcttgctggcgcttctatatatcactaggggaaaggagacatattcattgcaacttcgaagagatgcagttgatggggtagtgcagaagagggttgatacatggctgcatccggatcaatgtcaacacgtctataatggtagagaagttagatccgtaaatgtaccacaaccagagtcctttactataatgatgcagatcctatcttgggatctgcatatattgcggctgctatagcatgctcaggaatctgttctc

SEQ ID NO: 229741 - DNA, 317 bp, Glycine max
gaagaaagagcacaggtttgacgcggcccaaaaccagaaggcggatcaactggagacaaaccctctagcggagcaccgcggaaccaaaaccctaatggcaccccgaagaaacggagcaggaccaccgcggggggagaacgcgaaaccacatgagaggacaaagacaggccacacaactgaagaggcggagaaaaaagacacccgagaccgaaaagaacctgaacccaagaagcaaaaaggctctcaaaacccacaagttcagatgcaaagggcacaccgtcaccacgggacaaaaccgcccaagaacaccggccaaa

SEQ ID NO: 229742 - DNA, 317 bp, Glycine max
  unsure (1)..(317): unsure at all n locations
tataaagcacatgncattaatcatagacaacaacatttatatctttggcacacttactagcagcagacgctgatgaaaaactcacatacctatgatgatgaccaccataatggccaacaaccaatgtcatgaagatgacgcaaacaagaacacagatactgcataaaaatcaaatatttgaattagaattggaattgaatgagcaacaaaacatatgatggcacaattaacttatttcatgctattgcagaaaaggagacagactcaatctaatgcaccaaatgagtgatgagaagatgaattcgtcggagtagcga

SEQ ID NO: 229743 - DNA, 446 bp, Glycine max
  unsure (1)..(446): unsure at all n locations
accataaaactcagcttggctgctctgggcttcttggcgtcaaactatttgattttatggctatacaggagatctctgaaccagaacctttgtcatctctaagatgataaagttcatggggacttcgaatcttataactcataggagcagcacctttccatgggctctttagctcgaacgagctcatcaaatgttaaagatagctttcctttcaacacatccaatacaccttgaaaagatactcccagctgcttttgtcatcaaaatccacttcacactgtaagagtgtaccaccaggaaaacaaagactaaatattaggccatcaagcaatcgtgcatcattaactcaacacaagttatgcagcatagataagaaagnttagcatacctttgcgttatttccctgggcactgttctcaatcatcagtatagtcctcatgcatatt

SEQ ID NO: 229744 - DNA, 340 bp, Glycine max
gaccaaaaaccagctgacctgaactgatctgatcacttcctttattttgtaggcctcaccttcctctggctcgaatgccctgatccttctgacatcttgaactcatcttgattgacctttgagctttttgtcatcacctttgccttcatcttttgctatcatcattttccttaacctcttgcttactttcatagcttactctcttcttgcttatcacatttatcttgagttcttttggaaccctagcttttaccttttgcaaaccctcatcaagaaagaaccactatataggaaccaacattagttatcattcatcttgtgctaatggcgaaggtactag

SEQ ID NO: 229745 - DNA, 288 bp, Glycine max
  unsure (1)..(288): unsure at all n locations
agctgactggctcccccagagggccgcagagagaataatgcatgcctangcaggcacaacaacgggggcgggcacaagaagagcgggaagagggcccacaacangcagccgcagaagcactaacgccacccctataggagccaccatcccgggacactatcctcgcccactcgaagaggaaagagctccagaagcacgtgtacatgcagcatgggaccagccaacaagtggctaaacacagggccaggcgaagctgaatgagaacttccatcggcacactatgcacca

SEQ ID NO: 229746 - DNA, 302 bp, Glycine max
ctctgggcaatccacataccagcgaacagcatgggttttgctttatagttcgaacaacggctcacaaacggcggtgagctgcgatatgaacccggcaatatacctcaagcggcccaggaaacctcggacatgcctatctgaacggggttatcgcatctcaaggatagcctccaccttttcggggtctacccgcatccctatctggcctaaaacgaaaccaacaaagctccctgatgccaccccaaaggtacactcaacgggggccaaccttaattgatataacgtaagcctagcgaacaact

SEQ ID NO: 229747 - DNA, 361 bp, Glycine max
acctctagaacctcacaatttctcacaaactcatctcatgctctcagaatggcttcctcttgtcgcttaattctctgccagtcttcttacaacaaaagctctcaaaactctctggaacatggaccttcctctctctagagatctctaaacatgcaaaagcttcaagaattgcccaaactcccttccaaaatctgatttcacgctcacaaaggagactttgcttatgctagtgtgcttagcgcagctatggattgctcagtgcgcattatggatttcgactcaacccgtgctttcctcgctcaagggatggactgaacggtgcgcttagcggcatgacacttgctcagccaaatgcacaact

SEQ ID NO: 229748 - DNA, 358 bp, Glycine max
  unsure (1)..(358): unsure at all n locations
aattcaagatcaagcttttgcctcaaaacaaagtgtttccaagagatcaaagctctggtaatcgattactaggcagtgtaatcgattaccaaaagatatattaattcaagatcaagttttttcctcaaaacaaagtgtttccaagatatccaaggctctggtaattgattaccaggcaatgtaatcgattactagaagacaattttgaaaaatcagcttttagaagggttttgaaatttaaatttaaaagctgtaatcgattaccggcaacggaactcttgaaattcaatntgaaaagncatgttccttcaaaatataactgtgtaatcgattactagaaacctgcaatcgattaccg

SEQ ID NO: 229749 - DNA, 462 bp, Glycine max
  unsure (1)..(462): unsure at all n locations
tctggtgggacatctcgacttgctttccaatctgacatttatcatttattctgcctgcttctatnttcagattgggaatgcctctaacagcacctttgtcaatgattatcttcatgcctcttaagtgcagatgtccaaatctttgatgccatattttgacttcatcttctttggaggatagacatgtggaggagtcactggattcttgatgtgtacatacgtaacagtagaccttcgatctgctgcccttcattagaacttcagtcttctcatttgtcaccaggcattctgactttgtgaagtttacattgaatccttcatcacacaactgactgatgctgatcaagtttgcagtcagtcccttcaccagcagtactttgttcagactacgaagtccatcatggactagctgtcccattctagcgatctttctcttagagccatctccacatgtcacatatc

SEQ ID NO: 229750 - DNA, 473 bp, Glycine max
  unsure (1)..(473): unsure at all n locations
caaaaactagctgctttacagtcaaagtatgacaaattaatcgaagttttggttttggttngaacaagtaaaacaacttagagaaaagaatagtgaatataacataattatggaaataacaaagatacgaaattcagtgcggcggaaatacgtcaattatggaaatgacttaaattaattcaagaaaacataggattggatttcatcgtttatacccttagtatcctaataagattaacatatataaatcattttctaacattactgatgcacacatagttattccaaggtgatccctcgcacttggaacctaagaatatttactacatatcgatccctcgcataagcagtacataccccagcattataattatattctcgtgctgtttgcaatcaagacggtatgctctattcctagcaacgtaacgtaaaatgagaaagcattcagctcatattctaagattactttctag

SEQ ID NO: 229751 - DNA, 462 bp, Glycine max
  unsure (1)..(462): unsure at all n locations
tatatgagtatgtgtaggggtatctttggacctaattcatactatatatattgtgagcattacagtagtcacgtggctacatgtaagcattaaaatttcctcatgccacatgattaatgggtttgtgtctgtcttacccattaccattaccattacccacgtatgggtggacagagcaccaataggaattgcaacatagtcctatgttgaattccttgattgaattccaagcaccaattcttgatgaatcctcaccaaatcaagacagacaccacgaggtgcaaagaccgaactcaccctacttgatatgaaccctcatggcacaagggctgacttangatcgtctaggaataagccctgatggaaaatgtggaaattgattaaggaaaggatgacgaataaggggttaatttcgtgggtcttaaaaaggtggtcttggcataaatggaatatgaatgagaa

SEQ ID NO: 229752 - DNA, 465 bp, Glycine max
  unsure (1)..(465): unsure at all n locations
tcgttttcttcgctcacgatgctgacgtggatgcgtccgtgtttacgtttggcaatgtcaagagccttcattcccgcccaaaaacgtcggtgtcaacctccatttattatttttattaattaattaatattaatgatttttattaattttaattttattgcgcatttaatactttntgtcttttgcattgcttttgctctggttacgatgtgtctattcatttatttccattgtaaatgtaaatatgtaacaattaattatttatatcttggtcccaagacgtgtgccttttcaatgcgtttttatgttcccaagacttggntttccaatgcgtatttctttgcctttccaatgcgattttctgttccccagacttgtctttccaatgcacttttctgtcataatgcctttagtcattattataataaattaattatttaacaattaaatataacattagataat

SEQ ID NO: 229753 - DNA, 467 bp, Glycine max
  unsure (1)..(467): unsure at all n locations
tggagaggatgcttcaatggaggaaaagaaagacggttatttatatagaggngggagcacgaaattgaaggaagataaagggagagaagctgaactttgagttgtgtctcacaagactttcattcatcaaagttaccacaagtgttacacatgcttctatttatagactaggtagctttcttgagaaactttcttgagaaaacttccttgagaagcttctttgagaaaacttccttgagaagctagagcttagctacacacacccctctcataactaagctcacctccttgagaagcttctttaagaagattcctaaagaagctagagcttagctacacatacctctctaatagctaagctcacctccttgagatgagaagctagagcttagctacacaccctctataatagctaagctcacccccatgacaaanaagacatgaaaatacanataataattccttac

SEQ ID NO: 229754 - DNA, 466 bp, Glycine max
  unsure (1)..(466): unsure at all n locations
taccatctttggcccataaggagcaggaccctaagagtgctatctattgagcccgccttcattactcattgtagggtgttgctaggtgcaccctatgccattacttgtgcaccctgntaattaagtgaagtggcaaaaatatccttcacttaaatgttaaaaaccagcctccctcgaggtgcccatacaatgccgcagaccaagctttctcctcctacacctatctatgttctctgccgcactgccaccatcctcagcttccattgctaccatttaggctgtctccaccatcattgctccgtttccacagccgtcaaggtaagtgtttgacgttttatttgagtggttgtgatgcatttcgaattcgtataacgcatacggatttgataatctatatgagttatacgaattaattaattcatataatgcatactgattgactaatccgtatgagttatacggattg

SEQ ID NO: 229755 - DNA, 466 bp, Glycine max
  unsure (1)..(466): unsure at all n locations
aagctacacacgacatangaaacgcaccgacatacgacacacttatttatggccatatncacaccactacaccctcaaagaactcatatacagcgtcttcgtcacacagccaaatctagaacgagccattagaatatgacatgctataccaggtcctaactattatccctccgccgctgaggttcagatcctagagtacgaaccggaagaactaacgtctcatgtgagagacacgcgactcatatagggactaacaagcaaataattaacgaccaaaggctaaactcgaatagagctcaacagaagaagattctacaactatctgctacttgatgggagaagtgcgtacaaaagacacttaatactcactaacgtgaaataagggccccttgcagaccagagagtgtcccctctcacccatagccatcaccaacggagagaggcaaaaaagaaaaggctaagacag

SEQ ID NO: 229756 - DNA, 308 bp, Glycine max
cgcaaaggatttactttctgtcctgagtaagagcttccgcggtttaagagtgatcggcaccacctgcgcttcgacgcgcatcaagggatgcgtgggaaatgctggaaccactcgaacatctcagggaccaccagtgtactgattctcacgaggaaatatggcacccgccgtaggcatacatgcgtacgaacagggacgaccatgatacaaaaataggacctgacgttatgccaatgcatgcccaacagatgatggcgcgcgtgacatgacatcctgggtaaagagtcagagcatcccgattgatgccg

SEQ ID NO: 229757 - DNA, 468 bp, Glycine max
  unsure (1)..(468): unsure at all n locations
tacggacctataaatctaagctttcatcatgttgctttaattatgtgcctagtcatgcatcttacttaccttcgggtagaagacaatgttggatgacttatttgctgtaattttgtcatcattaacggaaagatgtgtatggtttatgcttaatttataattttatatgttgattggctgtattgttataatgacttgcaggttcaaagctgccaacaccgcaacaatgcccatgtcgtaataccggtaaatataaaaattaagttgaacacatatcattgaaattcttgcggattaagcaacaatggttatccatttaatgagtagactgtcaaaggttacctttactggacaactacttcatagtaggcgcagtttttcgaggtgtaatcatcagtattgagtagcagactaaccttgacgaanatcttcataatgtgggtatagtataataaataaatattatta

SEQ ID NO: 229758 - DNA, 436 bp, Glycine max
  unsure (1)..(436): unsure at all n locations
tcaaagacagggttgggatacataaataatgcactcttgtatttgtaatccaggaaatttatacaaaccagcaatatnctagatttatagccttacacataaacaggaaccagttgccttcatagccatacaatcaatatactgttttgcggaactaacaacaaaataggatttgaaatgagtctgccaggcaaacaactaagaatagttatatctactaaatgtctagttaaaagactagtcttcactgcaaaacaaaaatgagaaaatgttagaatttaatatacctgaaaactatatctgctgtgcctggttgcaatggtaaatcattcttcttcagacgcttcattacttctcaccaacagttagtatcattggggttcttaacattcgtctgcagcaaattgacagaaacttaccaataaaaatggaacag

SEQ ID NO: 229759 - DNA, 243 bp, Glycine max
tcttctcaatcaaaattcttagcttccccaggagtcatggctccaagggccccaccacatgcaacatctaacatacttctccacataactactgagttctttcatacaaatactggagaagaagctgctctgaaatctgatggcgggagccactgccacaaaactcgtacatctccctaggactatacaggctctctccactgagaagctaaacctgagaatccttctgatggctgggcctga

SEQ ID NO: 229760 - DNA, 457 bp, Glycine max
  unsure (1)..(457): unsure at all n locations
acggacacatgaaactcagcttgaggattatggngtacccatcacatgtggtactatgtgttggtttgtcgatggtgcacaaaaagtntttcacatccacaaagcgcgcatagacccaccatccnctgttgcccacctccaactgagctcacgtactcccacgtagcccatatcctcatttctctcaacaccgggtccccatcaatcctcccaagcttccccaacatcaaagtaatacaacattcaatcatcatggactaacaaaatcaagcaaaacagggcaaaggcagaaaactctgtccaaaacacaactcaaaatcacagcttttctcacttagagaccccagtaaaaattccttcgttccagattgttaaccgttggatcgactcgaaaattctactggaagtctctagtacataaacctacattctgaccgtgggatctactagaaaatat

SEQ ID NO: 229761 - DNA, 230 bp, Glycine max
  unsure (1)..(230): unsure at all n locations
gctacccattaaagcaccaaacaagctcatcactcctaccccaaagcgcaaaaggaagccacattcagagtcgagaagcacacctccacgcggagggacttcgaatttcaggcacgggcggacctcttctcacatgaaaccctcgggcattgcgctcacgggagacacgaaggngagatccacaacgctcatcgcccatgggagtacccgcgaaggaatacgccgaaagc

SEQ ID NO: 229762 - DNA, 317 bp, Glycine max
aaaccgaaaccaaaaccagaccaatggaaagccacccgccccaagaaacaagaaagaaggcccgaccaaaacggagaaacaaagaaacccagacaagggggagaagcaaaagggaaaaacccgacaagacgaaaaacaaggagtaagaaggcccggacaacgaacgaacaacaatcgcaccagaaaacgaagaaggaaaccacaccaaagggccctccgcgacgccacaaaccggcggggacaggcgcccccaaacgaacgaaagaaagccaaaaccagccaaacccaaaaacacatccaggcaggcacaagcagac

SEQ ID NO: 229763 - DNA, 407 bp, Glycine max
  unsure (1)..(407): unsure at all n locations
tttagcataaataaatcattaattcaacataaacacataaaagtcaagaaggaaaagtaatggtatattattatacatgttaataatttattaggcttattctccaaagccaactttgntgtttcatatttttgaaatattggtgaaagtctacatctatgacttcagtattcccgttgtgaaaagaataacatctttagtgtgctctgcatcaacaccatcaacatcaaaagtatcttgtacatgataaataaggtaaactaattaatgtcaggttaggctaatgacatggaaaaaaatatgtacaaaaagtaaatttaccaacacttttgtaactatctaattcttttgaacttccagaacttgcttccacttatcaatgtataaacgagcaagcttttcaacaa

SEQ ID NO: 229764 - DNA, 398 bp, Glycine max
  unsure (1)..(398): unsure at all n locations
tattccctagnggatggcgccacctcttacctcttctcctttgtcttccgctgcatctccatggtggaaaatcaccattaaaggacctcattgaagctcaaagatccagccctccatagaagccccacaagcaagcttccatcacgttgcgttcgagtcgtatccttggagaaatggaggttgaggaaccttggttggggttatggctaccattgaattatcgagtggatataggagcaagtcatcataggacaccggaattagggtggattctataggctntttcgttgcacaactcatttcttggttggtgtcttggtttgtgatgaaggtggtgttcatcattggaagtgcggtagacaggctttgtggttgatttatggatggcctttgtggat

SEQ ID NO: 229765 - DNA, 174 bp, Glycine max
gcaggaggaaggccaccccacaagaaacccagaacaccaacgggcgaccacgccccccgcgccccggcgcaaaaggcacacgggacggccccgagagccaccagcaaaaacgaggcagacacccagcgccgaccggcggccaagcggacggacacaggccgccccagcggaacc

SEQ ID NO: 229766 - DNA, 435 bp, Glycine max
  unsure (1)..(435): unsure at all n locations
ttgacaacagnttgtattttattgtctccaaataaagagatgacgatttacagagtgatccaagactttcaaatggatttccactgaatttattagtacacagatcaagatatcctaatgatgaaagttttccaaacgatctatgaagagcaccaccaactgagctgttggaaaaaagtaacgggtcaatattcctaaatgccccaatatgatctgtcagatggcctgaaagtcgngaactctgaactgcaagtcttgtgagtccatgggaaatacaaagagcaagaatttctaaaagctcattaacctgttggttgagtttgagatttgagatatcaatgtcccgtacgctgcagagactactcaaagaagtcggaacgttctcttaagccgattatctgatacatcaggttcaacaagagaagtcaaattccc

SEQ ID NO: 229767 - DNA, 105 bp, Glycine max
aaacacggcaccacccggcggggcaggttcctgccccaggagagcccaagcacacacaaaaaacccacagagcggggggggcacataaccggaaacgaaaacccc

SEQ ID NO: 229768 - DNA, 233 bp, Glycine max
gaccattcggttttatttaaaccaagcccctactatggaggggcaactcccaccttatgaagactatcccgggcaagacgaaggggaacgagatacccacacttggccccctgctccacctcaaagatccatccccgcatgaactaccccaggcgaacatagctcaccatactctggcctcacgcacgccccgaaaagaaactggtcgctccgcagaacataggggaaagatt

SEQ ID NO: 229769 - DNA, 421 bp, Glycine max
  unsure (1)..(421): unsure at all n locations
tgcccttgttcatgaatactttcttcnctgtttcctctntttttttctttatncactaagagaggatgcttttctgactaggtcttgtagtcacccatattcattgataaaaaataaatgtgatgatttcaatatatgtgatgttagtatcacccttttttcaatgttcttttgttaaacttgtgttcttacgacttgctgtttgacttattatcattactagttgtgggtaatattatcttcaatcgacttatggcttatatttttctctaagctgtggagcaatgacacataatgtaaagtcatgcacggagaggcctcgaaagataggatcagaataaacaaacatgcatattgctcctaatgagaggattgcacatttgaacttgattatgatgacaagcgagatcgattgaatggt

SEQ ID NO: 229770 - DNA, 444 bp, Glycine max
  unsure (1)..(444): unsure at all n locations
taagttcttctntactctaataagagtagatggctttttgttataagacatgacatgtngcagcggattattnttggacaagcaacttgcttagtggatccccaacatgtgatgaactaaatgtaaactaaaatgtgtcttcaccataatagacatccatggacaagttcggaggtatgcttatatgcacatccataatgtgtttgtgaagttcaaaaatgtattgtttggcacaaaactctttgcatagtcttattgaattatgttgttaaataggaaaataaatctacgcaaaatggtcatatgtttcaacataacaaaatgaaattttaagattctaatctaagaacacaggccagttattatggctctggcatcaaaagggggacaggtcagttctggtcttctagtccctcattgcctcaaaattgggtgatggttcat

SEQ ID NO: 229771 - DNA, 363 bp, Glycine max
  unsure (1)..(363): unsure at all n locations
tcttaacatccacaaccaagcaacataatcagactaattaatgatttaatggacacatgnctcggcaaaaggtaacacttgtcaacattacgatggatctggtaaaagaacaaacgggaccaaattgaataaagacattaacataagggactgaaagagcaatctcctccggtctctttattgatgtaagaatcggaagcgacaatgggatataattggctgctcagaaataatctcgcgatgacgtctttctcgtcattcggtgctcaattattactattagggctatagggtgaaccctggcacaacggtaaggttctatacttgtgacctctttctaggttcaaacattggaacaaacct

SEQ ID NO: 229772 - DNA, 391 bp, Glycine max
ttcctgaaatattccttctagaatcacatgaaatgaaaatagaaacatgtgtaacacttgtcacagttctgatgaatgaaaaacttgcgagagacacttcaaatgataacctctcctccctatttctccttcaatattccacgcgcaacaaacatacaccactctctttctctcattcttcccctattgaagctgtctttctgagattcttatacaagacactctcttcggtggcgaaacatatccttccatggctattctctagtgaatggcgcctcatctacctgttctctttaatctttgctgcaacacacggctgaaatcaccattgaaagaccctattaagcttaaagatcaccctcataaagctttcaagcaactccataacact

SEQ ID NO: 229773 - DNA, 310 bp, Glycine max
  unsure (1)..(310): unsure at all n locations
gccacacacgacgcttaaccacgcaagacagcaacatacccaaaacagcgctcaaccaccatagagggagaagcaacatagccgaaccagcgagagcagaagcaaaccacggtgcggaaccactaacacagaagcaaaacaaaactggaacgcgcaaccaccacagaggcagaggcgacacacccaggcccaaccaaaggccgaagaccgacaccaacacctaaccaccacggacagaagcaaatgaccagtccngtccacaaaagaaaacaaacacccaaacaccccgcgacgaatggaggggaccgca

SEQ ID NO: 229774 - DNA, 469 bp, Glycine max
  unsure (1)..(469): unsure at all n locations
nggcccattcctcaattatggtgttcaatactaaaatgagtgtatccttttcgctactaaatacaaccacttttttctgctttacactgttaacttttccttatcaaacccccatcatctaattcaaaattttcatgttctgtctacttctggcggttaagcaaatggagtgaaagcatgaaagaggaaagtatctttaactttaaatttgtggttaattaaatgttaccaatatgatatcatnggatttagcaaatacgtatctcagtgtgacaatcaagacaaaaggaagactagtgtagtgggtagtatagtatatagatgggtcacaacacaatagctaattagctaccaacccctttcattaaataatttcagaataaacaaagcaattctcttttgatgtccaaagtttctctcacatctatagaaaaacgcctttcaaaatcctatctacaaaaattgaaat

SEQ ID NO: 229775 - DNA, 391 bp, Glycine max
tcagatatagagctttcaaagaagcctcaaatgccatctctaatgtcatatcgaactatgactacatcttactactcgataaaacatcaaatacaaaatacatgaaatatgtcttgttagcgcataagacacacactttaacctctcgacttatttacatttaatcaaaattaggaaagattctaacttatcctaagacataaatatcttctgacttaataacgttgcttatcaatatactcgaaactgatatcacaatcgatcttttattaatcaaaacatcgaatcaatgctattaggtcccacctttgactattatcttaatcatgccgacttacaaacttggtctgatggccgaatgtgaactaaaagcacaattctgtatatctct

SEQ ID NO: 229776 - DNA, 391 bp, Glycine max
  unsure (1)..(391): unsure at all n locations
caaccaaccttctcctttttttctttcccttccgacaaaacatctatcccttttggatttatgcatgactcacttgaaccaaggtacctagaagatagacattaatagacctcttactaaaatcaacaataactctcgtaacattctgggaagggtcttaaagggggaggggggggtacaaggccatgcacgaatatctgatctcacacacgatttccaccacagagtctacatatgcaccatgattaggtgcaccacgattgactccgactgcttttttccttacgaagatctcacccttgactccttcacctaccttntttttatcacgcacattacttccaactctatggaatgccttctaatgagactttgtaccatcaactctatg

SEQ ID NO: 229777 - DNA, 441 bp, Glycine max
  unsure (1)..(441): unsure at all n locations
ctntattctaatcttgaaattcaagaaagtaccttgattttttaagtttatgggataaagatggtcattgaccaatccctcatctatgatttgacccaattgactaatgacggcgtaccatttgaaggtgcactggacgatgattggaagtttgatttttctgtgcatgatgcctgccgattggtctgcaccaaccaagcggatatgaccagaaggcttcttgccggttcattggctcttgaaagccacatccttcactatcttattggtcgtattttactcccaagatcttcaaaccttgcataggtttctgaagaagatcttatagtcatgtgggcctttcataccggccgacaaattgattgggcacacctaggtcgatatcgcatgcataaggcattgcgaataaatgctcctttatcatatccatacttagcactc

SEQ ID NO: 229778 - DNA, 374 bp, Glycine max
taattaaagaaactatctttagaagtctacttaatatatttatctttagggatctaatcataatattcatctataatgcacctaattaaagcaattatctttacaaaccatattagaatatctatctatagtgtgtctaatcaatgtaattatctttagagatcatatcagaatatctatctatattgcgcctaattaatgtacatatctttagaagtctataaataagaagctggagtctatacttatgagattggaaactcattatttagttttgagagctttgagagctgtttgagtggttctgaggagtggacaacaccgtgaggaacaatccggtcattgttcttccctactcgatgttatgctatttc

SEQ ID NO: 229779 - DNA, 452 bp, Glycine max
  unsure (1)..(452): unsure at all n locations
cttgagaagcttctatgagaaagctttcttggcttgctagagcttatctacacacacccctctcataactaaactcacctccttgagaagcttccttgagaaagatcctaaagaagctagagcttagctacacacacctttctaatagctaagctcacctccttgagatgaaaagctagagcttagctacacaccccctataatagctaagctcacccccatgacaaaatacatgaaaaaacaaaaaatgtccctactacaaagactactcaaaatgcctcgaaatacaaggctaaaaccctatactactagaatggccaaaatacaaggcctaaacgaagggaaaacctattctaatatctacaaagaagagtggatccaaccttgacccatgggcttaaaaatctaccctaaggttcatgagaaccctanggccttctntagtagctcta

SEQ ID NO: 229780 - DNA, 460 bp, Glycine max
  unsure (1)..(460): unsure at all n locations
tgcaggtatttgtatgcgcaaagnatcatttattttcttatcaattacctncacaaactcgaatatttgtgtaagtatcattttttttcttatcaattatctgcataaactcatctgtttgtccttcagaggctcaacgtctccactcgtttactctgatcccgacggggataaagccataaacagacacattttcaagctacaacttttatcaaccaggatagcgttaaaagaacaaaactgccagctagtagatcgatccccaagtattcttgaaagagaaatgttcttttcacaaatagaagtactgacacaataagaaagaaagaaagaaagaaaaactgagagtaattaanaatggaggggaaacaatgtcaaataataaaaaatgagagaaaaatttctgaataccagggggattttttgtgcaaataacaaaactgttattggaaagacaagt

SEQ ID NO: 229781 - DNA, 463 bp, Glycine max
  unsure (1)..(463): unsure at all n locations
ntgagggtgcgcagcccaccatcttttcatagtagagaaccgattatgtgtctaccatcacgattatcgnctccctttccattattgggggtaccacctgggccgccagatccctccaccttttgggcgtgtttcttgaatgatccgtccccctttttgcacatgttctgtaattgcatcctatccagaaccatatcaaaattgtactgatactgcctaacaaaggcaaccattaggtccttccaagaatggactcgggaaggttccaagttagtgtaccaggtaacagctaccccagtaagactttcttggaaggaatgtatcagcaattcctcatcttttgcgtattccaccatcttctgacaatacatctttagatggttcttgagacaagtagtcccctcgtacttgtaaagtccagcaccttgaacttgggaatgaccatgttccggtattaagaaca

SEQ ID NO: 229782 - DNA, 383 bp, Glycine max
  unsure (1)..(383): unsure at all n locations
tcttagtttcagatgatgcagatgagtttgtagctacctcatgctctcttctaatgactatggcatcatttctggcgctaaactgctgggagttggaagccatcttcttaatcaagtttttggcttcagcaggagtcatatctccaagggctccaccactggcagcatctatcatacttttctccatatcactgagtccttcataaaaatattggagaagaagttgctccgaaatctgatggtgaaggcaactagcacatagttttttaaatctctcccagtattcatataggctctctccactgagttgtctaatacctgagatatccttcctgatggctgcggtcctgggtgcanggaaatgtgtttctaagaatactctc

SEQ ID NO: 229783 - DNA, 445 bp, Glycine max
  unsure (1)..(445): unsure at all n locations
ntctttggaaaataaatgaatctgaaaacgatcagactntacattatttntcaaaactacattgaatagcttctaaaacagtctctacaaaaactcacatttttcagaatcttaaaatcacttttcttaaagcttttgactaacaatagttataaagactttaagcacagacaatggaaccaagtcaagggagtacctttntaatcttctaagaccttttttggttttcttagttatcaccactgtcataccctaatttcgtccggggacctttgctcgatgacgtgcgaccattctttggtcctcgtgaggtgcttggcacccatcattaggcaatttgtgaaattccaggatatgccgaanaaccaaaaaaatattgatgcacaatccgtaagtttccgtgacacaccggaaatcaaatggaaagcatcgtgcataattaagt

SEQ ID NO: 229784 - DNA, 457 bp, Glycine max
  unsure (1)..(457): unsure at all n locations
gtaccctccactngccagaaccacttgtcataacaacatttctctctcttctgctagggtncacaacaatctccttagtccaaaagaaatcataatactggtgtatctagctcttctaaactgtggcatcaaagactaagccatcctaacaaggatgcactagcaattgtactaaataaatgtaatataccctttatcaataaaactagcagagatttttgtaattcttgctctatagccaaatctcacaaactaccctcttctccctcttctactggttatactgcacctcttgaatcactattctttgatgtttgggggccctctttcagagagtcatcttggggactcttgtatttcctaacttgtgttgatgcctattccaaatancacctgcatctatctgcttaatcataaatctgacgtatctaacgagnttcagctgtttaaagctatg

SEQ ID NO: 229785 - DNA, 362 bp, Glycine max
  unsure (1)..(362): unsure at all n locations
tactcaagctttatagcgccggtctgggagacaaggacaagttgtcgctttatgctaanatgatgntccgagtacattggatttggtacgaccatgccctcctgagttccagttgggaaattggcgagtggaggaacgccccggcatttacgcaacgagcataatgtaaacctttacgggtttaaaagctctatagttgggcctaggctttaaagttttccttttgtaaggctttgcgcttttgttttgatttatatacaagggctttcttcattgtcctacgctctaccattctattctttgctgttacttcttttctgaacggagatcgagacagtccccgaggactatactggaccgct

SEQ ID NO: 229786 - DNA, 336 bp, Glycine max
  unsure (1)..(336): unsure at all n locations
ttagcttggggcctggtggaagatctacgaaatatttcattatgtcatgttngatctcagaatcattttgagtatcttagatgctcttgacactaagattcaaaatttttaattgtttggttgttatctgttagtcgccttatacaactaattttttgtatagaaatcattttccaaaacttgtatagttccccaatttatgggtattttggaataatcttgttttatggttaagttcgtccccagaacatttccattggatttaatgatgaaatctatgcattttcaggtgaaaaagaggctaagttttgaagtgcaaaaagtggcagttgggct

SEQ ID NO: 229787 - DNA, 343 bp, Glycine max
tctagccaaatggacttaccttgaattaattccttttatttttcttttgagcctatgttcccctttctttgttttgaagctcattacaagccttaagtgaaaaaccatgatatcaccttacccttaaggaatttggagctttggaattgttttgggaataagtgtgggggagtatgtttcattggaagatatgatttttggccatgcttgatttatatatatattgcctagttcttgctttaatcttcaaattcgtactgtttaaaaaaaaagaaaagaaatgaaaaaaaatttcaattgctgcaaattcgtactgtttcaaaaaaaaccaaacattaatgag

SEQ ID NO: 229788 - DNA, 402 bp, Glycine max
cttaacatcaatatgcattaaagattagatgaaggcctaataatattaatactgactgttcgaagctaattctcaacatcaactctgcagccatgataggacgaatgaattctcatttacaataatgtgaatcatcactcgctccaaacaccttaataagacatcaagatagataaccgcctcgttaatgtatgtatcaaatatctacattcatcttatacagaatctaactgttaaagagaacatataacatgctgctaaactatgctcgcgtgggaaagatacatgaaatataacaatatcatgtttgaaactactcttcaaacttcatccaaccctattaacatgaatctaaacacactatataactttatatacttatctagaccgacaacacacttt

SEQ ID NO: 229789 - DNA, 487 bp, Glycine max
  unsure (1)..(487): unsure at all n locations
ngganaccatggaagatgacgcagcgattgaggttatgaactatgtttccncagaaccagagccagagtcggaggaggattccagntgttgttgcccaatctgcttgggaccattccttcaactttcctacctcgacaaatgttttcgtatgccctcaccctattttctgttgctcaattttctgtgttttttaatcctatagtttataaatttgttgcatatgctatagaccctttattgcgtttcattcatgaattgcgttgcatgctctaatttgtagtcttgggaaaccttcttgcttgaaagtaactctcggtaattatatatcaacacaagatctgttttattagaggatcattacttgagagttcagattctagcagcaattagaggtaattgtactatatcattcttctatatatctttgctagtaaccattaagcttgttcttatgtcgcagataagtcttgcttcaattgtcattta

SEQ ID NO: 229790 - DNA, 316 bp, Glycine max
  unsure (1)..(316): unsure at all n locations
gacacgaggcatgcaagctggaaccattctgtgtggagtgaagcttttatttgcactaagacctgacatactaggctaagagcgtattgcataaatgtctattgctgctgattgcgctaagaatagcctactacaataagcaccagatgtactttgaaacttgaaactcatagaagggcataactagaggtcatgataagtgcanggtatctaacaacccaaacgttatgttggaacgctggtgacccccatggaagtcgctttgtcgctcgaatttgatggaagagaatttcgatagtgggattactggaaagcg

SEQ ID NO: 229791 - DNA, 282 bp, Glycine max
ccatagcaatctctggagagtttccagcgtctaattataagaggctcgatatattagaatcctggagaggacatctgagtgaatagatatgaccatagtatatctatggtaaacttccagcgtatagttataagcgtatcctgatttgatgctccctgagacagacatatgagcgtaaggatatgaccatagcattcgctggagaatttccgatgttaacttatgtgaggctccatatatgaacatcctgaatatgagctctgagcgaacaggattgaccat

SEQ ID NO: 229792 - DNA, 307 bp, Glycine max
ttaaaccatcattgaatctttattatatttccaaagctaaaaggtgttacatactgacatgctatttaagtaacaaatccctggattatctccgctacattgagactacttggcaattgagccttgcgatgacaaacaattttgggcctttcaagaattattccactagatgtataatagtagaaacatttatcttatttgattgtatgcaaatttcatcaatttatttgattgtaacgtctgttacttgttttatgctggaaactccaggatatctcttgattgagatactctccgaaacacttaa

SEQ ID NO: 229793 - DNA, 386 bp, Glycine max
  unsure (1)..(386): unsure at all n locations
agcttatcaaatggacctgtgtgttgcccattttcatcatatcttccgtaatactcatcacctctatcatatttaataattctcacatttatgtataattgcccttttacttcattgtagtaaatttctaagacattcattgcctaagaaatctcgggcagtaagtagacataaccgtnccatgaataatcatcaataatggtgataaagtatcattccttttcgaaagaactaacatcaaaaggtccacaaatatcagtatgtgttggatcgagtgacctcagaataactaagaaggggaggttgaattaattattcctaacactttaccaaataaaattttactcttttagggctttactaaattgttaagagaaagaggagta

SEQ ID NO: 229794 - DNA, 480 bp, Glycine max
  unsure (1)..(480): unsure at all n locations
ngaaggcaaactggatgcattggttaacttggtaacccagctggccttgaatcagaaatctgtacctgtcgcaagggtttgtggtttgtgctcctctgctgaccaccatacagacctttgcccttccatgcagcaacctggagcaattgagcagcctgaagcttatgctgcaaatatttacaatggacctcctcaacctcagcagcaaaatcaaccacagcagagcaattatgacctttccagcaacagatacaaccctggatggaggaatcaccctaacctcagatggtccagccctcagcaacaacaacagcagcctgctccttccttccaaaatgctgctggcccaagcagaccatacattcctccaccaatccaacaacagcaacaaccccagaaacagccaacagttgaggcctctccacaaccttccctcgaagaacttgtgaggcaaatgactatgcagaaacatgcagttca

SEQ ID NO: 229795 - DNA, 335 bp, Glycine max
tagtcactcagcttgtgctgtatcactatatccgcactgcccctgttgcaagagtctgtggtctatgttcttctgcagatcatcatatagatctctgttcttctttgcaacaatctggagtcactgagcaacctgaagcttatgctgcaaacatctataatacagcccctcagcagcaacatcaacaacggctaaataatcatgatctttctagcaccagatacaatccaggctggaggaatcatccaaatcttagatggacaagtcctccatagaaacaacagcctgtccatactttccagaatgttgccggtccaagcaagccatatgttcct

SEQ ID NO: 229796 - DNA, 468 bp, Glycine max
  unsure (1)..(468): unsure at all n locations
agcttgtctcagcatttatgcgagacggagtctatcatgctagctatcatcgccaagtaccaagaagagttaggtctagccatggcccacgagcatagaatcgcggatgagtatgctcaagtatatgcggaaaaagaggctagaggaagggtgatcgactctttacaccaagaggcaaccatgtggatggaccggtttgctcttaccttgaacgggagtcaagaacttccccgcttgttagccaaggccaaggcaatggcagacacctactccacccccgaagagattcatgggcttctcggctattgtcagcatatgatagacttaatggcccacataattagaaatcgttaggaaacttgtatggtctctcagaccttgactagatacgacttcctcttttttgaataaaatgagttggcccatgtnctactccaaaagcttggcaaatcaatcactcctacttta

SEQ ID NO: 229797 - DNA, 476 bp, Glycine max
  unsure (1)..(476): unsure at all n locations
tgagttcactggtgctaccccacagagctccgcgaaatttgttacggccatactcttccttgcgagccctcttggtctcttgttcaagggctcttgcggtagttgcattctcttcccgtaatccggcacattccttccagatgtgtgtagcggctaacttgaacttctccttggcaagtttcgcctttcctatactcgttttgagatcttggacttcttcgtcctctttcggtgcttcgaaactctcttcgttgacaacttttaacttggcgagccaatctaaacctcgtatatgaacttttagccattcatggtaaccaccaatgatgccattgcgaatgcccctaagttcttgatctttccttaacggngtttcccatgccttatggattctttgtatagccttgaagttttgcgcgccgaaatctctcacaaggaaaggagacatgctttcttccatcgggtgctccctcatg

SEQ ID NO: 229798 - DNA, 477 bp, Glycine max
agctcgacaaactcatttatgtgtaaaaatgagaacacatacattatttaaatttaaataaaaagcacatgaatcacaaaacagtaactaatcatttttctttttgatataaaaactttttgtagctttgaatagatgccaatcctaagcataaagtattataagagcaaatggtttactatcaagttaaagaattgcagtaccacttacccatgtgatagttgttagcctagtgaattcatctggagaacctgccctatgtaccaggatttcagccatgctaccataatctacagacttcaagagtagcactgctcgagtcagaaaatgataaatgaacaaaaaactctgcttttgtgtcaaagtagtagtagaaaatgaacctacactcttgtaattaatcaatactagcacaagcttacatggttatcaaccctgatagatggattacgggaaagattaagatatggacaatgg

SEQ ID NO: 229799 - DNA, 467 bp, Glycine max
  unsure (1)..(467): unsure at all n locations
gacctatgatactcagcttgtaatttcacatttcagggtgaaacatactgattctgaatctatgattcttagagnatgtttagattntataggaatatataaattgatatgcttgaaaaaataggagaagtatcactgaattgctagcctgttattacattaataccttcatataatgaaatctaactatcttgagggttttgaagagcctgttagtgctactntattggtatctttcttaattttttaaccacttagctattttggttaaaaataactttatattaaaaattaaattattaattaaaaattcaaaatatattttatatacttagatgaattattttcttataatttagttacaatattctataaatctaaaaatacatgcttattataaattataatttacgtataatatcttatatacttanaacttgttgttgtggtattgcataccaatggat

SEQ ID NO: 229800 - DNA, 331 bp, Glycine max
  unsure (1)..(331): unsure at all n locations
agcttgatgatgctctgtgtgcacatcngatttcctacatagcactcttatgaatgactccttattctgatgtctttggaaaggcatgtcactctaccagaggaaaatgaacacaaagcatactgggcagtgaagacttgtaacatctatatggatcaagctggcgacgtaaaaaagtagcatctgagtgagtgtaatgaaatccgcctttattcctactagaatgcctagtttacaaagataaaacctacaagtaccatgatatcacgatagttaagaaggacttcttggttgtgctaatagtgttattgtattatactatgcttggact

SEQ ID NO: 229801 - DNA, 437 bp, Glycine max
  unsure (1)..(437): unsure at all n locations
cttctccccattntcctatanatagggngagaagtgaagggaataatatgttcanccctcctggaaattcgagattacttgaaattagtgaaaaaaattgttttcgtgaagaanatccaagccgaggcgctttcgtaacatttccgtggttgatttcgcgaagattttcaaccgttcttcgacgttgttcgttcgttcttcgtcgttcttcggtcttcaaccggtaagttcccgaaatcgaacttttcaattcattctatgtacccttagtggtcctcatttgttttcacgtgcttttattttcattttgtttactttccgtaccctcttttgacgtgctttagtcatttgcttaagtcatttcctcgcctaataaaaaaatataataaatttccaccgatcattcgaattgaacatccnggtattctgtaaaatga

SEQ ID NO: 229802 - DNA, 408 bp, Glycine max
atctccttcgaggctctaaattgtgggaatgtgctcaaatatatggcgcaattatggtgtgatttcttgcttgattaggttgaattaagggattgtatgggatggccctacgcctattatgcactttgagacaatgggacatgccacattgtccccgttctcttgctattgttacctaaacgcgcgcccaccaagtattcggtgaaatgcctcaatggcattaactcgtgacttttgcaaggaaacaacccatggggcattgtggtttgtactgatttccaagaggaaatatggcgccagcgatgggcatcactggttactcccatggccaagttttatccacaaatattccttgagttatatgccaatgcttggccacagaggatggcgtgcgtgacatgagatcct

SEQ ID NO: 229803 - DNA, 329 bp, Glycine max
  unsure (1)..(329): unsure at all n locations
gacactatagatactgatgcgtgtaggatcatggcgtaccgatgacatgtggttctatgtgtttttcnggcganggngcacaacaagtttttcacatccacgaatcgtgcgtaaacctaccatcgcctgttgtccacctgcaacatgatctacgtactctcacgtagccattaatcgtcgtgtgttttgaacaccgggctctatcaattcaccgaagagtgcacatcgaccaagtgatgcaacatccgggtcatcacaaacgtactatccaagaaaaatatggtagagacataaaactctgcccagaactcaaaccaatatcacaactt

SEQ ID NO: 229804 - DNA, 461 bp, Glycine max
  unsure (1)..(461): unsure at all n locations
ntagccaaactgntaaactcggcaataataccatattggctgttgtgggaaaaggtatcattcgtatgcaagtgaatggatttactcaggcaatttctggtgtctattatgttcctgaacttaagaataatctattgagcatagggcaacttcaagaaaaaggcttaactattttgattcaacatgggaagtgtagggtatatcattatgagaaaggattaattatgcagtcagatatgagtggaaatagaatgttttctgtgttggctaccatgataccaanagcttccttgtgtttccaaattgtatcagaaaatgaatctcatctttggcattgccgctttggtcacttaggctataacggattgaggacactctttgataagaagatggtaattgggttgccttcagtcaagattccaaagaagatatgcatagaatgtctaactgganagcaacac

SEQ ID NO: 229805 - DNA, 372 bp, Glycine max
tagctgtgcgacgacggtttttaatgaagcattagctcctctggcgaacgagccattgatgtcaaattcatccatgaacctgatgaaatctggtttcaaaacctcccacaaatggtcaacgaaattgaaatttaatccatccggggcaagacatttgacctcccactcccccaccataatactcatactgttgatgtgatctccattctagaaaatctagacacaacgctttctttatctcttaagttaagagaagaaaattgcactccattcaaggttggtctactacataattgctcgcgaaatcatgccttgatataaaggatagctgcattattacactgcaatgttattgctccccacaccatctat

SEQ ID NO: 229806 - DNA, 484 bp, Glycine max
  unsure (1)..(484): unsure at all n locations
ntgaatatgtagaacctattctagtatacatgttgccatttgtctatatatgcagnccctaattatgcaaaanaaggttatttatctcatactntagtgtgaccaagctaagaagtgagaacaaaataagaattaatttaaaattaagtattagtcacatgttacattctataatgcaaccttatcattccctcactaacatagtaccaaccttacctaccaatcaccactaatccttataaacttagaattatgcagaaaaatggtatctagtgccttgattcagtaccatacgttgattatagaaagatacactaagtccctgtggcttttgcttacacttactaatatctaaccatgtcatactcatcctaaatgacaccatatgtggccctatagttctatttgttntaagacccaccattatgaagaanacaagtgataacaccacaagctgagaaaaatacacatccttgggttgaac

SEQ ID NO: 229807 - DNA, 462 bp, Glycine max
  unsure (1)..(462): unsure at all n locations
agcttcangntgctcattgactacagattgctgcaaagtatgacaaagatctagatagagatctgtagataaacatagaccaccgactctatcaacaggtgtagattctgattatgacaagctgagttactacgttgaccaacgcatcatgtcttacctcaagcttattattttcagcataggaagacgaatttgtggccacctcatggacacctataaggacaactaacatcattcctctgtattaaattgctgagagtaggaagtcatcttctcaatcaaatttctatccccagcaggagtcatattccacaagagctccacacattggcaacatcaaatcatacgtactctccatgttgcttaatccctcatagaataatcgacgaatgagatgctcacatatcttggtggtgatgacatctctgacacaattccatgattattcccagtactcataca

SEQ ID NO: 229808 - DNA, 172 bp, Glycine max
  unsure (1)..(172): unsure at all n locations
tctagccaaatggacttaccttgaattaattcctttgatagttctctttgagcctatgatcctctttctgtgttntgaagctcattacaagccttaagtgaaaaaccgtgatatcaccttacccttaaggaattttggagctttggaattgttttgggaataagtgtgtggg

SEQ ID NO: 229809 - DNA, 412 bp, Glycine max
  unsure (1)..(412): unsure at all n locations
tagctggcagctagttatatattaaggagaaatagctcttagacactcatgttatagcaagacaacgttgaggagggctaattgcaatgccaaggtgcatccctagttaccaagcaagtcatagcctttctagctaggctctcaaattggcaccctagaattgtcttcttattagaggtgttcaggtttaacatatttacctacagttgaagatgataggtacatattaaagacatttacctacagctaggagatgtaagtagaagttaatgacttttacctacacattatacataataggtaaaacctatagtgatagacaattagtcatcaatatacgtctcctcaaagttgacgganataacagtcctaggacaaagtctatcatacatttacctacggatttttttat

SEQ ID NO: 229810 - DNA, 450 bp, Glycine max
agcttgttggatatgaagtgtttgaacaatttaatgtaaaagggcgattgaatttgtaaaacctctatttttgaaaactttaaaattgttaaaaataaagaaatagcctcagcttcggtcaattggatatcaacccggtacccatgtgagtatactctgctaattaggtctcgcattagaaaattaaatgtcacctttcaccttttctttctctataaggatgggccttaagtatttgaatcattttgtaaataattcggaaatgaagagacccactttaaagtttgtagtctctatgtcttgtattatagagagtaccgaggtcgcttctacttaactatagatatctttacttttctcctccaatgttcttttagagacctcattctactctgcaatagcaaagaacttaagatgagtcatgagtcactactatccactctctcatgg

SEQ ID NO: 229811 - DNA, 459 bp, Glycine max
  unsure (1)..(459): unsure at all n locations
tagcctatctattgtgcacaggattgtttaaactgcanaagtctctgccttttatgttgctcaatcagtagcaagtgtacttcattcgatatgaaattntgcttgggatatattaaacttaaagttgtttttatgttgtcatgtcaaacagctctgtaaccaggaatccatctctcacatgaaaccagagcagacagtagaatgtgttgcattcagacttggcacttgctggcattgtggagacaaagcagatgggacagactgtttggtttgtgattcatgtgaggagatgtatcatctgtcctgtattgagcctgctgtgaaggaaataccctacaaaagctggttctgtgccaattgtactgctaatggaattggatgtcgacacaagaattgtgtggtgtgtgaacggntgaatgccctgaagaccctggatgatattgttggtgaggaaaacat

SEQ ID NO: 229812 - DNA, 437 bp, Glycine max
  unsure (1)..(437): unsure at all n locations
agcttgttagatacnatcttatgatccatgtgttngacacaaatggtcaacaatagatgagaggtgtcatctagagcttaaaactaatactatatgatatatagaatgattagagaaaaacgctcacaaaaaatacactactatatgaaatgcgtcaaggctacctgattctgctagaatggactgcatatacatcaaagcacattacgcaacataaatcggcctaagcacttcccatgaatactaaggcatcgaaattgctaggaaaataacacgtgttaacattcttctactcaaccatttcaacttaggtcattctatagatgatatttcatagacacattcgattctacaccctaaaataattagtccgcatctcattatatggaacatctctgcctctctctactctatcttctcttataatacaatatata

SEQ ID NO: 229813 - DNA, 450 bp, Glycine max
  unsure (1)..(450): unsure at all n locations
tgctngnngggcattcatggaggctgtattcgttgttcttttttacgacctgtaatggtgatcttccaccatggcgatgtcatacattacagatgacataaggtgagaggaggcgtcttacactagggaatatgccatggaagaatgtgcttcacctcaatatgatcctcggataataagcttggataggatgcttcaatggacgaacagatacagagagagaatgaaagatggggatcacgaatttgtatgaataatatatggacagaagtggaacttcgaagattgtctcacaatactctcattcatcaaagttacaacaggtgttagacatgcttctttttatagactatgtaagcttcttgataagctttcttgagataacttccctgataagtatagcttagctcacacactcgtctataactanctcacctccttgaaaggttc

SEQ ID NO: 229814 - DNA, 464 bp, Glycine max
  unsure (1)..(464): unsure at all n locations
accttaaaactagctttatctgattcaaattacatcagaatgagaattgtacttgatttatcaatatgaccattggtaanaactcaattctgttagttatagatttacacattgcttttcagcagcaagtctgctctttatggattggttgtcatcaactaattagctttggtagcggtcagatctgatgcattcttcatttgatagatcatagtgccaagacaaggtgcaatgagctggaaatacatctatacctatgaacaaaaatgaacccggacatgaaaggcaaagccagacaacatgtgaagcccaggcaataggatcttgatcttctatgcctatctctctgttggttaaacttcattaacaggggttagtgcttcatttgaaactggcaaacttgcaacaagcagcaagaaatataacatgtctaagtgaacagataccacttataagtgaacaga

SEQ ID NO: 229815 - DNA, 409 bp, Glycine max
  unsure (1)..(409): unsure at all n locations
agcttccattgccgtgtgataagtgattcctatattggngtggtgtttcttnttctctttacctcggaatcatcgagaagtcgtgtttggatgaacttgagaataattgaagttgtataacgcttcaggaaagttaaactagaagacccggagttagaaattgaatgaatatagagatatagttaaagggttttgtgaagagagagagaactcactcgaggaaaataatgagaaagttggggttgtcggaggcgtgaagagaacatacgagtggactcagcgagttggaacgagaaataaaggatgtgagaatctgaatctgtggtttcaatgagagagaacaccctaacgaagaatacaatagtgaatgaagagtgtctgaattgagagagagatagagagagaaaaa

SEQ ID NO: 229816 - DNA, 478 bp, Glycine max
  unsure (1)..(478): unsure at all n locations
actcagcttggtataatgtcgttctcagatttgtgtcattattgtttactgcacttgttagttctgaaatttcttgattttggatgtaaattgctagattaggcatactggattgttctttcttttagaatgggtggaattgagcaattaattattctagataaaacatccgcagttgaattaatgacattatgcctcacgaaatctgtgattntttccttctgcaggtttttacatntttggagtagctaaatcaaatgaggcaaggtggtcttttgttaattacttcaacttangtaaacgaatctgccttggtgaatctgtcaagattgaagaataggtttgtatatattaattaataattaatgttagtgctgaagctattttgttttgtgattgtgtgcttcattgtctttgcatttattcttctaatattaattgccttgaattcactatgtagattgcacactacttgtct

SEQ ID NO: 229817 - DNA, 443 bp, Glycine max
  unsure (1)..(443): unsure at all n locations
agctngccaacccatggaagctcctaatatcttccacactntgtgtggtgggccattcttggatgaccttgattttctcagggtccacttggaccccatttctaccaactacaaaccctaaggaaactatattatctacacaaaaagtacacttctctatatttgcatagagggtgtttttcctacggactgaaagaacttgcctgagatgtcctaagtgatcatctaggctcctactgtacactaaaatatcatcaaagtaaacaactacaaatctacctatgaaatcccttaagacatgatgcataagcctcaaaaaggtgcttggtgcattagtgagtccaaaaggcatcactagccattcatacaaaccaaacttggtcttgaaaacggttttccactcatcaccctgtttcatcctgatttggtgatacccactttta

SEQ ID NO: 229818 - DNA, 496 bp, Glycine max
  unsure (1)..(496): unsure at all n locations
ntgaataatgaatggcataatagaatgccctgcatgaatcccaaggctgctatttaaaaagagtcactcaaagtcgctgggccctattacaatactctggcccaaaacgaaataaacactaaaccacataaaataaaattgcgaaatttcctaattaaaaattaactaaggtaagcgctgctttattttccctcttcaagtccacaaccaaaatccggattaagcccaatgtttcattaattcctgaaattagattaaaaacatcaaattagctaaatgagaccaaataataaaactgcctaattaattgacaattaagaccaatcagtaattaaaatggtgcaaaaagggtttagaaaatagaagaaaatgatggcacatcanaaccccccatacttagccttttgcactcctgngcaaaatgaaacanagaacataatccaaggatatcaaagagaggcaaacaaaaacattcacatatttctcaatgaacatc

SEQ ID NO: 229819 - DNA, 255 bp, Glycine max
tgcagcttcgcctagttcagcatacacccactatcagatgggcaatctgaggttgttaaccgcatcatacaacagtacctgagagcattcgttcaccgaaaaccatcgctgtggggtcgttatttgttgagggccgaatggttctataatacttcatgccactcaactaccagcgtcagtccgtttgaagtaactttcgacaaaaaacctcctaatcttcctcactacatcacagggaccaccaacgttgatgcc

SEQ ID NO: 229820 - DNA, 477 bp, Glycine max
  unsure (1)..(477): unsure at all n locations
ngcacgtacactactaatctntcagtatcatatattattaaatatgtgtattatggctacacactactaatctnttcatttgtttaatgtacgtacctcacaatcttataaaatatataaattttaaatgataagaagaaaaaaatgttaaaaaattgtatttgataatatattaataatctcctcttttctaattaagaaagtaaacaagattattttaaagttaatgatgacaagtaacaacctggcaaaatagttgcaagttgagccaaaagacaaaacaaaagcaactaccggacttggcgttggtacagttacacacctatgagtagcaaatgcatccacttgcacctgaagtggagaatgcctcttgtatattcacaataatatactttgattctgatgcagacaaattggaatgttatgatgatcacattngagtcagtcagtccaatcacaacctatgatattctttac

SEQ ID NO: 229821 - DNA, 431 bp, Glycine max
cgacatgccacagcaaggggaaccgtctggcgaggttccaccacgtatgcctcagagctatgcgtcaggggcataggccatgcagcacgccatgcatgttttgcagaagcagcaggctaaaatcgccatcctcattggcgggatgcgcttcacgggaatcgtcaagctggctggcaattttctttgtttcaaatttctccattataaaagcagaaggtgtatatggaactcagctacgcttgcattgctttcttcttcttcttcttcatattactccagttcttcatattactccagtacattgcagttcttcttgttatctttctagtaagtattttatactgggaaatatttgatgtattatatatatatatactatcttaaactctaatttagtgaaaattatacgacaatgcttgttcctgttacta

SEQ ID NO: 229822 - DNA, 466 bp, Glycine max
  unsure (1)..(466): unsure at all n locations
tacggacactataaaactcagcttttatccaggctcatcttggtggtgaagctccttcttctatggcttattccctagnggatggcgcctcctctcacctcttctcctttgtcttccgcttcatctccttggtggaaaatcaccattaaaggacctcattgaagctcatagatccaacctccatagaaacctcacaagcaagcttccatcagctcgcgcctgtcatttcatgaggcttcaataagaccaatgtggagacacttcagaaggtccgcaaggcatgggaggtgttgcaaaagaaggacaaggaactcaggggcagtaacaatgggcccatctgtggctatcgtaagtggttaaaagcccacgtgcaaggtttggattggctcctaagtttgagaaccgctataagagaggaagttgacgcaccacaggaagatgaagaggtgcatgcccttanggcaag

SEQ ID NO: 229823 - DNA, 460 bp, Glycine max
  unsure (1)..(460): unsure at all n locations
agcgtgtctcatgaatctgtgatgggctatcataaataggatccatctgtctaaacttttttgttaaaaaaagtgtttttttaataaaataagcaactttctatattctgatgtgtttgtttaaactatctaaaaaaacaactttctgcttttttaagaagcaaatattattttcttcttagaaaatcactttttcataaacactttcaatattaaacaaacaggcccataatcattataccatgtggtgtatgttatcagagggaaatatgctagacatggcttcagccaagattcattagctgtcacatctgcagattctagcctatggaaagctctggtggaaatctggcctaacattgttaatggggagtnttggacagttggcaatggcaactcagttgatgtctggcatgataaatgggaggatcgggatntgatgctggtggaatatcttcac

SEQ ID NO: 229824 - DNA, 481 bp, Glycine max
  unsure (1)..(481): unsure at all n locations
cttgatgccaacattggagaggttaatgaaacaacgagatgatgcgcttcatgagagggtggatcaaatggagaatagagatcataatgaagaagaaagaaggagaagagggaatgatggtgttcctagacaaaaccgaattgatggtattaaactcaacattcctccatttaaaggaaagaatgatccagagtcctacttggagtgggagatgaaaatagagcatgttttctcatgcaacaactatgaggaggaccaaaaggtgaagcttgccaccacggagttttccaactatgctcttgtgtggtggaacaagctacaaaaggagagagcaaganatgaagagccaatggttgatacatggacagagatgaaaaagatcatgaggaagcgatatgtgccggctagttactcaagggacttgaaattcaagctccataaactaacccaagggcaacagggggttgaggagtatttcaag

SEQ ID NO: 229825 - DNA, 386 bp, Glycine max
agcttgcagattggtataccatgctacagctgctccggccaagctgtcttgaaagagatggaccaacaacttttcgttcgcggaatacgcccccatctttcagcaatacatccggagatgcccttttggacatctcgtccctttgtacttatcaaagtctggcactttgaacttgggagggatgacaatgttgggcacgagacataaatccgcttaatcccagaatgggtaattaccaaggccctctactgctcttaacctctcttcaagcgcctcaatctttcccttatcttccgcgaagggaacaaattattctacgggtgtgggtgaagccaggatatggcatacattgttctgttggggtagtcatggggggacggatcttt

SEQ ID NO: 229826 - DNA, 434 bp, Glycine max
  unsure (1)..(434): unsure at all n locations
tgtaatcgattacacatatactgtaatcgattaccagagcattatttcagaaaatattctcaactgtcacatctttttatgtggttcttgaatggctatcaaaggcctatatatatgtgacttgagacacgaatttgctaagagtttttcagaacaaaaaggtcttatcctcttataaagcaaaatcattttatcctcttacaaattccttggccaaattacttgtgattcaataaggaattatttgagtgttcaaattgttcaatctatctctttcaagagagatttcttcttttcttcttcttcattctgaanagggattaagagactgagggtctcttgttgtgaaagaattctaaacacaaaggaagggttgtccttgtgtgtttagaacttgtanaaggaatctacaagatagtggaactcttaagcgg

SEQ ID NO: 229827 - DNA, 396 bp, Glycine max
agctttgagctaattcaaacgacaataactgtttgctcggatgtatgattgagtcccgtaatctattgagacgcttgaaattgaatgttgaagctgagagctaattcaaacgacaataactttttactcggatgtctgattgagtcccgtaatacatcgagacgctcgaaattgaatgttgaagctctcagcaaattcaaacaacaataacttttaactcggatggctgattgagtcccgtaaaatatcgagacgctcgaaattgaatgtcgaagctctcagcatattcaaacaaccataatctttacctcggatgtctggtaagtacctaatacttttgacactctaattgatggtgagctctagaaatttacaacatatctttttctcaatgtt

SEQ ID NO: 229828 - DNA, 490 bp, Glycine max
  unsure (1)..(490): unsure at all n locations
tcanaattcaatttcgatcgtcttggtataatatatgacttattcagacatcngagtaaaaaagttattgtcgtttgaatttgctgagagcttcaacattcaatttcgagcgtctcgatgtattacgggactcaatcagacatccgagtaaaaagttattgtcgtttgaattagctctgaggttcataattcaattctgagcgtcttaatagattacgggactcaatcagacatccgagcaaaaagttattgtcgcttgaattagctcacagcttcagaattcaatttcgatcatctcgatatattacgggactcaatcagacatctgagtaaaaaagttattgtcgtttgaatttgctgagaagctcaacattcaatttcgagcgtctcgatgtattacgggactcaatcagacatccgagtaaaangttattgtcgtttgaattagctcagagattcagaattcaatttcgagcgtgccgatgtatta

SEQ ID NO: 229829 - DNA, 399 bp, Glycine max
agcgtatgggtgatctcatgatgtggttctttggtgtgtttggctggaaagacatgggagaatcttctcatggcaatcatctattgagctcatttgggatcgagtagtttcatttgcttctttgtgttgatatgctcatgatctttttagttgtgttttctttagttcttgaggatttcttattccctttctctatattaataaatccctttctcataagaaaaaaggaacatggtagctggtgcaaattatagaactctcttttacctgatgcatgaaagcttaatgtaatcccatctaatgccacatattttccccttaaatatgcatagactcataagtagcttgttattatggttaaagatgtcattttttatttattgacttttttatgataga

SEQ ID NO: 229830 - DNA, 484 bp, Glycine max
  unsure (1)..(484): unsure at all n locations
tcatgccttggatgttctatcggagttagatggtagcagtgtatcgtcttctggccaaatgctggtaaatttatgtgtttgtttgcaaaacattgtctcgtttgttttggcattgctatttgaatttacattaagtgaaataattacttcactttagagggtaaaagtttcttggtgtgagtctgtgagattaanaggccatggcatgctaactttgacagactggagtctgtcaactaaaacttgttcttccaatttggccatctctaacttaataagacttaaattagatttatgacaaatttgatattatggacactcccttgtaatgatttgatctgggcttctttaatttacaataaaggatatggaatagggaaaccaaaattgtcctcacaagntttcatgctctcctgtcagcaatatgcatggctngttggatcacaatacacaccaatggagttggcagaatcagactgggatg

SEQ ID NO: 229831 - DNA, 423 bp, Glycine max
  unsure (1)..(423): unsure at all n locations
agcttgtgtaaattgtatcaaactcttccattttatgnngtgtatcgagcattataagaactcttcgttaagcatagactatacatacttaatacatctatgttgtgtgtataataatcaaattctctcaatttcaggttaattaggcaatctggcaaagtgtggatattcacctcctcgctaagccaatctgctggcttagcgagcatccgctaagcgcaacactcaatggctaagtgcgaggaagaatccataagaagatgagctatataggttcgctaagtgaaccacttcagttcatacgctaagcgagaaaggcgcgctaagccaaatatcactaacgtgcgctaagtggtccataagtgcgctaagtgcacgatcatgaacaatgccacctatataagcctgacatcagattctgaa

SEQ ID NO: 229832 - DNA, 478 bp, Glycine max
  unsure (1)..(478): unsure at all n locations
cgcttacaatgtcggcttctttttttatgagcttccattcctatttattaaaggcccgagatggttttccctttgctggtgtaagatctttgactcttcgatctatagtggtcaatattcttgccttttgctgaaattaaacattgcaattttcagtttatagaattaagctttttttaattgttgtcaagtcaactcaattgagaaaattagaaccacanatcttttggtgtgttcaaaaatttctaagagcaagatccattgaaatgatttttatggttgaagagatattgttatatttggcatgatgtggattatttgttttaactttgcagcttattgatttacaaggtactttgataaagaggtgtctgggtctaaaaactcttaatcaaagaagaaaatgcttaaccaanagaaaatcaagggtatgtaatcattntgtggtggtgctaatcagtcttgatatgaaataaaa

SEQ ID NO: 229833 - DNA, 435 bp, Glycine max
  unsure (1)..(435): unsure at all n locations
agcttatcataatcgatcacatagttgnttttgagacaacaactaatttattcaggagtctctactttagtcaatatcgattgcttctctttctataagcgtttaagaagtatacaagaagactttaatcgattactttgaggatctaattgactacattgttcttgagctgtttccaatctttgggaagaatactctaatcaattgaaaagataatctaattgattagctcattgaaataatcaattacattgtagatttactcgattacaggcagctataattattttctttataaatatgtaccttttgctctctttaaaatacaatgaaatgaacttctgagtgagcttgagtcacgcgttgattttacttatagaaatacgagaagaaaacgcttataaatcatgactcacacctctaccctttgatatg

SEQ ID NO: 229834 - DNA, 489 bp, Glycine max
  unsure (1)..(489): unsure at all n locations
ngccacccagctcgcncaggcgagctatgttgctttctctataangcaccgccttctggaggaaattcctggaaggtccaagtgggcctggttgctatttgcacccctatgtttactaaatacaccttcccatgccttcttttgttgattctttggtatccttccgtaatgttatggaaccttacagattacgtaatcatcccttttttggctgtcggaatgttacggaacctcacgaattgtgtaacaatgcttccttctgatttccggcatgttacggaacttcacggatcatgcaacaacgctctcttttgacttctggcacgttatggaacttcacgtattgtgcaacaatgggtgccaagtacctcgaagcggtcaagcataggttgcacgccatcaaagaatggtccccgaacgaaattatggtatgacagatggaaatataaagtgcttaaccttcaccacaacatcttcaatgactccata

SEQ ID NO: 229835 - DNA, 244 bp, Glycine max
aggttaaattaaaaaaagacaatggattaaaaaaatatgaaaagaatatagaaaataaaaagaaaaaatatagaagtaaaagaaaaaagaaaagaaaagattattaaatagagataaaaataaaacaggataatagtgaataaataatataagtagtaaaatataaaaaaaaaaggttaaaaaagtaaaaaagttaataaagaaaaattgataataaaaaattagaagaataaaaaataagtaa

SEQ ID NO: 229836 - DNA, 502 bp, Glycine max
  unsure (1)..(502): unsure at all n locations
tgtagtgaaagatagaacagcataaaagactgacaaactgtctttaattatgnactattgttgnaagctntncaaggaatcaccgcatcctgatgaaaagcagaggcaacaactcagcaaccaacttggccttgctccaaggcaagttaagttttggttccaaaatcgtcgaacccaaatcaaggtatctaaatttatttacctaattattactcaagaatatatgcaaacttaatttatttaattagaaattatgtaagcattatgcaatattattgccttttgcaggcaatacaagagcgccatgaaaattcattgttgaagacagaattagacagacttatggaggaaaataaggccatgagagagaccataaacaaatcttgttgccccaattgtggcatggtaacggctaccatagatgcttccatgtccactgaagagatacaacttcttattgaatatgccaaactcaaagccgaggtaattaatttgtataaaa

SEQ ID NO: 229837 - DNA, 274 bp, Glycine max
agctcgcctcatagaggtccaggaaggacaagtgcggccaaaggaactatttccgccccggagtatgacagtcaccgctttatgagcgttgtacaccagcagcgcttcgaagccatcaagggatggtcgtttctccgggagcgacgcgtccagctcagggacgacgagtatactgattttcaggaggaaataaggcgccggcggcgggcaccactgattactcctatggccaagtttgatccacaaatagtccttgaattttatgtcaatgctt

SEQ ID NO: 229838 - DNA, 487 bp, Glycine max
  unsure (1)..(487): unsure at all n locations
ntctgtctnttactnttgtagtagttagtatctacttgtgaaacaattttttttaattggtcaacctttcaagtggcagtagcattaaggtaaatgctcatttattataagatcttctcctgctagaaattgtgcccccaaactaccttatagattccgaatcagtactagtacctttttttgttaacatgtaataaattttgtgtgattagataataacacttgctgggataactaaggctgatgttaacacaaaagaagaaatttcatcttatctatcaagtggttcattgtcacgtgccataaatatgtttcaacattttttgctttgacaatcataagaatacgcatgaaatttatatgatgaanaattaatttatagtatgttaactggggggttcatatngtttgcctagttgtttgcatgctatgttcacaatctcaatggagcgaaagaaaggtgatgatgtaacatgcgtaaagtctg

SEQ ID NO: 229839 - DNA, 448 bp, Glycine max
agcttgccaccccgctcgtccaggcgagctcttctcgcccaagcgagcaaggttgcttcctccagaagcaacagccttctggaggaaggatctggaaggcccatgtgggccagattgctattggcaccccatgtttactaaatgcacccccttctattattttggtaattctttttccgtaacgttaacaaactttacaaattgtctaacgatacttattgtccttccgcaaggttaaaaatccttacggattatgtatttacttttcttaagctttcgaagaagatactgaaactcacggattgcgctaaaacacctcttttcgacttccgccacattatggaatttcacggatcgcgcaagcttgctttcttttgatatctgagacgactcgggactatatttattgtgcaacataggacgccatgtatctcaatacacctatcca

SEQ ID NO: 229840 - DNA, 480 bp, Glycine max
  unsure (1)..(480): unsure at all n locations
ttaagagacnagactcccactagagctaatctctcaaggagatgggtgatcattcaagatattgcttggcctttatgtggtgatgaataagaggaggtggngcatctattnttcaattgcaagaagatagtanggctatggtgggagtccatgagctggattcaagctatgggacctctcctagcttctccagtggaccattttcttcagttttgtgatggttntggagcagagaataatcatagtacttgttgtggatggtgggttgctttgacaagtactatatggaagcataggaacttcctcattttccaggacaaacctttcgagccgcagaaggtcatggaagatgctatngttctcaattggtcttggttaaaggctagaacaaaaggctacaacatcagttctaaccattggtcttccaacatctcgaaatcctttggttaacctgtatgggataacccttttagatgggat

SEQ ID NO: 229841 - DNA, 469 bp, Glycine max
catgcaagcttggcattatatgtgagtgacttatgatattacttgagttacttcaattgttgctccctacaaaacctgtcttttgtgaatacacatactataaattcttagtatgcataaactcttaaagcttatgatttgtgctcaaaaggtttgtcataattaaaattccaagggttttatactcaacaatctccccctttttgatgatgacaaacctttaaactaatcttagtcgtttgaggggtttctcaacatatagattataatcaactcctccttatcatatgcacccctatcaacatatgataaatattcattaagcataaagatcatatatgaagacattttcgtcaaactatgatgtgaatgtaatatatctattaatcgatactgcacatacatatcatatgatatcatatcttttctttccatatcatatcatatcatatcgtccatatcctttcct

SEQ ID NO: 229842 - DNA, 283 bp, Glycine max
agcttctggtgactgagaagcacgttattctgttgttatccagatcggttccttcgccaagtatgtgtatatgtgtatatgtgtattatgttcattgttctttgttattgtttatattttgttttgtgcagaagaaaaatagaaggaatggagacgagagtcgtcatcacagaaaagggcaggacggaccaaatccctgccctatctttgctttcctcttatctccgatgagaggtaagtatagaggggcaactgtcttacccttaatttgtccgggattatt

SEQ ID NO: 229843 - DNA, 410 bp, Glycine max
  unsure (1)..(410): unsure at all n locations
tctagcttcttgtcataacagcttgcattcttcattgggatttttctcggtatttgctccaaagctgctagatgacttctaatgtagctccatgtgaatcttgtaggccttggatcttcttcatcaatggatttctttgcttcttgaggtctgattgcagcggaatggagaaggagaaagatgaatggagatgccacttcaagtagaagattagtctagaagaagctcaccaccatatgaagccatggataagagcttgaaggtagaagaagatgaatgaagggaaaggaagagaagagcacggaatttagtgcctctaaagaagtatgaactttgaattttaattctcaaatgatcaaagttcanaanatgcacacacaaagcctctatttatagactaagtgtcacac

SEQ ID NO: 229844 - DNA, 485 bp, Glycine max
  unsure (1)..(485): unsure at all n locations
atcctcttagtcacctgcggcatgcaagcgtatagacctgatatactggttcccattatacatcagggagtgaagattgctganaaccctatccttgcaacaagtcctagggaagtagacacggagatggacaagataatcctcagtatagtgagtagcattttgaaagaagcttctgtgcctgatgttgagaaagatgttccaacatcttccggcccanatgctgaagccctcccttcacccagtgaagaggaatcaacagaagaagaggatcaagcctcaaaggagactcctgcaccacgggcaccagaacctgctccaggtgacctcattgacctggaagaagtagaatctgatgaagaacccattgccaacaggttggcacctggcattgctgaaaggttacaaagcagaaagggaaaaactcccattaagaggtctggaagaatcaagactatggcccagaagaagagtactctcatcac

SEQ ID NO: 229845 - DNA, 451 bp, Glycine max
  unsure (1)..(451): unsure at all n locations
ntaaactntnnttaatcggtggcagcataggatttactntttacactngtggngtatgaaaattaaatcattttctaatatatcgaatttctttccaagaaaaataagcatgtcaactgtttgcatttgcagatgagatgacatacgtgaatcttcaactgaatcccgaaagatatactggttatactggtccatcagcaagaaggatatgggatgctgtctactcagagaactgccccaaatgtaagttttctctgaaaagcttatgcactttaatctccccttcctcaatcccttccccaaaaaaatgaanacaatgaatcaaagttctgctcctgtagcgctaatgaggtatagttgtttattttttttggtcagcctaatgaggtatagttaattctggggatccagttatactttcataattatggtctaaactgtaacaacttga

SEQ ID NO: 229846 - DNA, 427 bp, Glycine max
  unsure (1)..(427): unsure at all n locations
agctggcatgatatacatgctcccactttctctagcacattcttaattcttcttgacatcgtcaaaatcttcatgatttacacaaattacataattacaaaacggtcctcaattgtggtggttgttctctctttggngattcactcaatatggagtacttcttagtccaatagctcttaaggtggttggccccttgcttctggactcaaattcttcaagggatggcaccaatcttccttccaattccctatatggcaacccacaaacaatgaaacaaagagacaagcaataaccataaacaaaaaaaaaatgaaatgaaagctaaaccaatggagttttaacaagacaatttttcaaggattattcaacaattaaagcattgaacaggacatagaagcaagctaggactcatagagaaacttagaat

SEQ ID NO: 229847 - DNA, 434 bp, Glycine max
  unsure (1)..(434): unsure at all n locations
tgcctcanagaggtccaggaaggacaaggcagcataaggatctagttccgctccggagtatgatagtccccgctttaggagcgcggtacaccagcagcgcttcgaagccatcaaggggtggtcgtttctccgggagcgatgcgtccagctcagggacgacgagtatactgatttccaggaggaaatagggcgccggcggtgggcaccactggttactcccatggccaagtttgatccagaaatagtccttgagttttatgccaatgcttggccaacagaggagggcgtgcgtgacatgagatcctgcgttaggggtcagtggatcccgttcgatgccgacgctatcggccagctcctgagatatccgttggtgttagaagagggccaggagtgcgagtatggccataggaggaaccggtctgatgggttcgatg

SEQ ID NO: 229848 - DNA, 421 bp, Glycine max
  unsure (1)..(421): unsure at all n locations
agcttgagntngcttatgcgacatgtgatttatacctgttttcttccgttatcatttcttacagagtgatccattcggggcactcttttttacattccctctacagaactagcccttctctcacagaaaatgaataaataaaaatgcggcaccgtcagaatcgcgttcgatgtgactatgatcattttcggtgagtactgctatgatctacaggctggtcttctgtgatgattgaccatcctcagagtattgatgacaccaccgttcataacatatcggcattactatgcataagtactgtctcatattctcgccaaaacactttttaatgcctatgcgaattctccagacttatattgtcaatttttgcccaacgataactgactcgagacatctgccattgcgggccatcgccgtttgt

SEQ ID NO: 229849 - DNA, 468 bp, Glycine max
  unsure (1)..(468): unsure at all n locations
tgaaaaacgactttgtgtttccatatttctttcgatcggcgatgctatggncatctttcctggtattcgggcgcttgaattgcatataattaagcatcttttaattggaacgtcgacaattaatttataagtctttaatgcgcttaaacttgaacagactattataacattattcacaatgactatgcaggatcacgccacatttaaagaaataaaagatttatcatagaacataacacagcaatacggtacgccggatctttgcattgaggggatgcgttaaaagaacctgaaaacgatgttatttatcagtcagttgaaagcaaaaacgaattttcaggttgttggtataaccatgaattgcttcttaccttttgcaagaacgcgtccagtatggatcagaaactccgggctcncgtacctatgactatggcatttatgatgcgtgagggcggtntccagcagtca

SEQ ID NO: 229850 - DNA, 346 bp, Glycine max
  unsure (1)..(346): unsure at all n locations
agcatgtgtgcaatcgtctacactgatgtgattatcaactaccagngatagtctcttgaacacatcaaaagatgtaactcttcaaatagttctcgactttttcaaattgcgtttaagtttgtctaaaggtcataactctcctaatggttctcttgaccatacttgaagagtctataacagcaaggctctgttttgcattcctaatcaatcattatatatatctattctttccaattcattctttatacaagaacatttctccacattgatttctaagtctctttgaactttttcttcttcttcttacttgtgccagatactatccaaagtttcatggttttttaaa

SEQ ID NO: 229851 - DNA, 124 bp, Glycine max
cactatgatactcagctttgagtgctcttgtagaggttagagatattactcttttctctaaacggccgaggcatagatcctaccaactacacggttactcgacccattgcttatgttatccgca

SEQ ID NO: 229852 - DNA, 450 bp, Glycine max
  unsure (1)..(450): unsure at all n locations
agcttgccgcccagctcgcccaggcgagcattggtgcttcctccagaagcaatagccttctggaggaatcttctggagggcccaagtgggcctggttgctatttgcacccccctttctactaaatgtaccccccttctatttttttgtaattctttttccgtaacgttacgaaactttgcgaatntcgtaacgatgcttattttccttccgcaaggttacgaatccttacggattatgtatttactcttatctagctttcgaagaagttacggaaactcacggattgcgcaaaaacacctcttttcaacttccgccacattacggaatttcacggatcgcgcaagcctgcttccttttgatttctgagacgtctcgggacttcatttactatgcaacagaggacgccgagtatcttatagcggctaaccaaagggtgcatgtcatcaagt

SEQ ID NO: 229853 - DNA, 455 bp, Glycine max
  unsure (1)..(455): unsure at all n locations
ntgcttctacaggggttgatggggactcggtgctganaggttctaggagaagggctacgtacgtgtgcgtgagctcaatttanaggtggggaaactgggatggtgtgcttatgcctgngcttgtggaaatgggatatttgttttgcgccattgcccgatcgccacctagtaccacatatgacgggtgccccataatccaataagccatgtgtgagaaagcgtggaagagtcagtcttccaacttttattagttgaccacagagtggtacctgaagatatgtcgcgggggtcaggagaccttggggacgtcaagtggggtgctattgcccaaaaccaagcttaaccaatccagacccaccccgggcatagtcagccagtgagaacctatgacgtacctaagcaggcgagctcctaacagtcaaccaataaaggaacaaaactccacgaagcaagga

SEQ ID NO: 229854 - DNA, 448 bp, Glycine max
  unsure (1)..(448): unsure at all n locations
agctnttccctctccctcacgttgcttnnctccctcttttcctctcctgaagcctccatcaaagctccaaactttactcaccatttctgctccaaatcgcaaaaggaagccattttcggagtcgtgaagcgcacctctacgttgtgggacttcaaatttcaggtttgggtagacttcttctcacataaatttttgtgggtattgggttttgggagatatgatgggtagttctactaggtttatgccttatggcagttatttgcgaaggaatctgttgaaagcttgctaaacttgtcatgtttgatgtgagctaaatatacccattctgttctaagcttttataatgatgttttgcgatgcttgcgcgctacaatctgtggtagacaactgatagagatggagggtagagctaacctaaggttaaaagcgagactggttgtgatatgag

SEQ ID NO: 229855 - DNA, 317 bp, Glycine max
tacttcgggcgtgtattatagatcaacaaggaagctggatggatagttatgccattgattgagattacttacaacattatataccaagccagtattggtatggctccatctgaagctttatatggacgaaagtgctaaactcctattcgttggtatgatgatggagaagcagtacttcttggacctgaaatgctacaacagattaatgaacatgtgaagctgattcgagagactataaaggcatcttacgatatgcagataagctattatgattgaatgagtgaacctctatattttcatgaaggagaacatgtgtt

SEQ ID NO: 229856 - DNA, 464 bp, Glycine max
  unsure (1)..(464): unsure at all n locations
ntngaagggggttcgtattaaggcggtcagagaatattagacatattctgaaacaaaacgaacaagtattgtaacattgtcagtccattgaacaaaagacacttgatcgaattaagagaatattatctntgctaagttagcgagtttcattgtatttaagtttactgtgtaaacactctttgagtgattagaatacattgtctatcaaacatacttgggtattaatctcagaggagtggcttagtgacaaagaataattgggtgttaatctcagggggagattaagtgtagtgccaggagtggcctatagagtacttgttgtatcctgaagtggcgttaagaatgcgtggttgtaatcaaagaattcattagtggaacccttcaaggtttaatggagaactagacgtagcccaagagttgcggtgaaccagaataanatctgtgttctctttaatgctactatg

SEQ ID NO: 229857 - DNA, 298 bp, Glycine max
atctaccgcgtacctcttgaatagctaatctcaactccatgaaatgattagctatagcttctctacacaccttctataatatgttagcctaccatcgtgactaaaatatcatgtgaatgctatataaaaggccttactacaaaggttactcttaatgccccgaatactacgctcaaactctactctattagaatggccaaaatacaatgcccatacgatagaaaaacctattctaaattttacaaagattggtgggctcatacttagctcatggggctcaaatatatcctgatgatca

SEQ ID NO: 229858 - DNA, 205 bp, Glycine max
ccaccaagaagctccaagaaacgtcaatactttatcaagagtacatccagacttaatcggaattgtgtggacatataaccttaaataatgtgaaacaacataaaatatctatagaatatcaggctcttgatatctggtaaaaatgacctggggagaataccggtatactattgcgaagactcatactgaagtttaataaagtcat

SEQ ID NO: 229859 - DNA, 401 bp, Glycine max
  unsure (1)..(401): unsure at all n locations
tatgctgaagaattattgttttaccntactatttgttacctgatggaaattctattaatagaccttctatctttaatggagtgggttaccactactggaaaactcgcatgcaattttttatagaggcaatatatttaattatatgggaagccaaagaacaccgaccttatgttccctctataatatccggaagtgcaactatatattaacctatagcatactggactgaggaagaaagaagactagtacaatataatttaaaggccacatatattattacatctgccctacgaatatatgaatacttcatggtttcaaatcttaacagtgctaatgatatgctggatacactacaagtcctcatgaaggcactacagatgttataagatctacgtaaacaa

SEQ ID NO: 229860 - DNA, 435 bp, Glycine max
  unsure (1)..(435): unsure at all n locations
tatctgatcanggacaagctagtgacctgtagtatggatgttgttgctggtgccacgcctctcccttaacaagcccttatctctggcttcatcaagcatgagacaaacgtgaggctctatcttctagaaagggtgctgacgaaatatggacatgtataccgcatgccatgccatccaccataatgtctcacgtatgaggcgtctgatacagattgggtagagtggtagcaacatgtcatttaatgggcgatgctgtcccacccaagggtccttgggatagcacccatgactatttgccttggttttattgggtatcccactcctatgccatgccaccagatgacggagagccaccacgtcttcttgtcatttaccgcctatctaatacagctaccgcctaagaaccactgcagagtatgtcctgtggaactactc

SEQ ID NO: 229861 - DNA, 393 bp, Glycine max
  unsure (1)..(393): unsure at all n locations
agctttcataggtaaaatcaggtgcagccatttcccttatagtcctctcacgaggaggaggttgtgccatgttctcagaatgtgcaaaatcagaatgctcagaatcagaatgctcaaaattataatgctcaagatcaggatgttcaaaatcaccaataacagaatgcacagattcaccagttgtggaatgctcagaatgatcaaaaggtataaaatgatgcctaactaatctatgaaatgtcctatctatctcangatcaaagggttgtaagtcagatggattgcctctagtcatacactacattcagcatgcacacaactagttgccttgtcatgtaaataaaggtgtaggtttgaactacagctaccctcaaatgatatcataatgacttg

SEQ ID NO: 229862 - DNA, 294 bp, Glycine max
  unsure (1)..(294): unsure at all n locations
acctggagatatgtcgcgtgggtcatgagaccttgtngacctcatgtgtggtgctatagcccaaaaccaagcttgaccaatccccacccaacccgggcatagtcggtcagtgaaaacctgtgatgtacctaaacaggcgagctcctggcagtcaacagataatatgataacacgaccactcatcaatgaggcttgtggtggctggccagctgtgaattctgtgtaatatgtggattgtgggctctggtaatcgattaccataggtgagtaatcgattacaacgcttaataattg

SEQ ID NO: 229863 - DNA, 337 bp, Glycine max
  unsure (1)..(337): unsure at all n locations
agctngatatgaggaagcgtataacagtttttttcctactatcgcttgacgaccacagagtggtacttggagatatgtagcggcggtcacgagaccttggggacgccaagtggggcgctatcgcccaataccaagctgaagtaatcctgacccaacccgggaatagtcagtcttcgagaacctgagaggtacctaagcaggctagcttctggcagtcgaccaataaaagaacaaattccactaagcatggaagcttgtgtggctgttggccaactatgattcttgggaggtatatgaagattacaccttgcgaatcgattaccattcgtgggtaatc

SEQ ID NO: 229864 - DNA, 460 bp, Glycine max
  unsure (1)..(460): unsure at all n locations
acgcgacctatagatactcaagctgcataaagaaagaagagaggagttatgagctcttatattcacaacaaatgcatcgttgacaatgcatttatcatgaaacatacatcatgtactcctgtactaaaagattaatgcactagcaactaatagatacatcgctctcttacatatgaacagccacaacctgatatgcaaggaacatgtgaaaatagcagtgtgtctttacatcatttatatatgttccgcatccatatatacatctttttcgttagaacactatataattagcgttagacattaaagaatctgacgcaatgagtctctcctacaacaattaagttaggcacgcttgaataacctctaagttgcatggttctctagtactgacattgtgctatcgcattatattanaatgttggtactaagatgcttaccatattttctaaccataataata

SEQ ID NO: 229865 - DNA, 420 bp, Glycine max
  unsure (1)..(420): unsure at all n locations
agcttctttgaganaacttccttgagaagctagagcttagctacacacacccatctaaaaactaagctcacctccttgagaagcttccttgagaagctagagcttagctacacacacccctctaataactaagctcacctccttgagaagagaagctagagcttagctacacacccctataatagttaagctcacctgtcataccctaatttcgtccggggattattacttaatgacatgcaacctttggttagccgctttgagatacttggcatcctttgttgcacaataaatgaagtcctgagacgtctcagaaatctaaaggaagcaggcttgcgcgatccgtgaaattccgtaatgtggcggaagtcgaaaagagggtgttttgcgcaatccgtaagntttcgaacttcttcgaaa

SEQ ID NO: 229866 - DNA, 509 bp, Glycine max
  unsure (1)..(509): unsure at all n locations
cggacctatgaaactcagcttctatccaggctcagtttggtgatgaagctctntcttctctggcttattccttaatggatggcgcctcctctcacctcttttcctttgtcttccgctgcatctccatggtggaaaatcaccattaaaggaccccattgaagctcaaagatccagcctccatagaagccccacaagcaagtttccatcaaatgctctttcaacaactcttgggtaaacacttgcaaatctattgagagttcgtctaggaacttcaaattgtattatccactctaaaggagagaaatctttntgttcttttcagacagtcaattgtaatcaagagaactggtgtctcttgaattatgagtttctggaacacaaggganagggattccttgggagttcagaagttatataaaagattttaacaagatagtggaacatctcaagtgggttgtgaatgtatgtatacatgaatttggtgatgtcaaaacaataatcaaacaaag

SEQ ID NO: 229867 - DNA, 461 bp, Glycine max
  unsure (1)..(461): unsure at all n locations
agctggtagcatatncgaacgacaataacatttcactcggaagtgcgattgagtcccgtaatatatcgagacgctcgaactttacaaccgaagctcgcatcaaatttgaacgacaatgacatttcactcggaagtcctattgagtcccgtaatatatcgagacgctcgaaatttaaaatcgaagctcgtagaaaatacgaacaacaataacttttcactcggaagtccgattgagtcccgtaatatatcgagacactcaaaatttaatacccaagctctcagatacttctaacgacaataactttccactcggaagtcctattgagtcccgtaatatatcgagacgctcgaaatttaataccgaagcccgtagcatattcgaacgactataacatttcactcggaagtctgattgagtctcgtatatatcgtgacctcgaatttaaaaccgatgtcgtaca

SEQ ID NO: 229868 - DNA, 416 bp, Glycine max
  unsure (1)..(416): unsure at all n locations
cgagagtctcgatatattacgggactcaatcggacttccgagtgaaaagttattgtcgttagaattagctgcgagcttctgntttaaatttcgagcgtctcgatatattacaggactcaatcggactttcgagtgaaatgttattgtcgttcgaatttgctacgagcttcggntttaaatttcgagcgtctcgatatgttacgggactcagtcggacttccgagtgaaatgttattgtcgttagcatttgctgcgagcttcggttctaaattttgagcgtctcgatatattacgggactcaatcggacttccgagtgaaatgttatggtcgttcaaatttgctacgagcttcgattttaaatttcgagcgtcacgatatattacgggactctatcggacttccgagtgaaatgtta

SEQ ID NO: 229869 - DNA, 463 bp, Glycine max
  unsure (1)..(463): unsure at all n locations
tagctttcactcacaaacagtctctnaaatattagttacttcgatcttaatttaatcaaagagctacagggagatattttggctgaatagtgtttgagtaaaaattaagcaaaactgaacatgtgcttagttatgttatgtcagttcttgtgatatctgagaataaaaaggatatatgactggatggactatactttcaataaaaaaaaaagtgctttattttgagagtatgaaactcaaatacgcattctcaaagatgtaacgaaatcctggggaacaagtttaaattctaaataataatattagtattcgtttgttaatcaaaatactctattgagctgatgcattgtgtcattgtatcttgcatgattaccttcgctgtaaattggcactgcatgatacttgtgatgtgacatatgtgagcagcttagtcaaagagtatggctagacgttatactatatt

SEQ ID NO: 229870 - DNA, 480 bp, Glycine max
  unsure (1)..(480): unsure at all n locations
ngttaaagaactgaggaaaaatcaagaacaagcttgtacgcacatcgttctcgtgtatgatatccactccacaagggttgaagtagaggagagcttcaaccctataacgcaacgtggcggacaaaagtgggcagtaaacttgaatgatcgtcattgtcaatgcggaaggtattctgcgcttcactatccatgttcacacattattgcagcttgtggttacgtgagcatgaactactaccaatatatagatgttgtttatacaaacgagcacatccttaaagcttactccgcacaatggtggcctcttgggaatgaagcggctattcctccttctgatgacgcatggacacttatccctgacccaactacaattcgtgcgaaaggtcgtgcaaaatcaacaaggataagaaatgagatggatcgngtcgaaccatctgagcaccgaacataatgtagtagatgtggagccgaaggcataac

SEQ ID NO: 229871 - DNA, 447 bp, Glycine max
  unsure (1)..(447): unsure at all n locations
agctnggacgcaatattataatctcccttagtcattatttaattttatgatcgaatgtggcctatttccagacctatgatctgatagggctgttacatataatattcaatggagacccttggagtaaaaaataagagcctgagtactttgtctgtttgttctgagtttttatttggggggtaaatctcgatgctcatagtgcccattgctcctttaaatactgcttgactatatgtagtaccaccattattttatgtatgtatagtacacttaattaatcacattatcactagttcatctgtgtaagttaagagtgtaattactaccaaagcattagtacctcttgttaaatgttaaggggagttgatcaatataaaagtctagaaactacaataattctataatacttaagacctaaaaactaatatactctaataataacattat

SEQ ID NO: 229872 - DNA, 504 bp, Glycine max
  unsure (1)..(504): unsure at all n locations
tataatgaacattcaaacaactcaaaatgaagatgcaagcattattgaattaacaattctttaaagcttttagtttcaaggatagttcttcaataaaaacctcttgataaaccaatatcaattatgttgtttagatgtaaaataacatatttagtgtttatgaacaaaacctgttttcaaatttgtgcaaagaaaaataagataagtagaaaagaagagtgcacatagatatctttatactagttcacccaaactttgggttacttttagtccttacccttcaagatgagagtttcactaacacaatcaattcacggctggactagtaaccattagatttcacaacnttgctagttccccactagacttcaaacctagcctttgctagaccatctataccatntgaattcactcttgctagacacttatgggctntacagaaaataaggtatgtgatgttagtgcacatagaacagatcttctcctcacaagaaggattctact

SEQ ID NO: 229873 - DNA, 379 bp, Glycine max
cttacctgtgaagctgaactactttacacttcttattcaccctgatctcaccgagttccaaagagtttctttagtcctactcacgatatctgtgagcgatgagatcaatggatattctgattttcttggatactgtacttgattctagtttttactgatgtaacacacttttctgttattaaaaggccgcgattatcgttctgtggcttacgaactcagtccgtgtaatctggactcgtctctggacggttactgaaataatataacctggatgctatgacatggatacatctggatatcctactattttatgtaccattaatatagactgtgggttgccccccaccgacaatacattcaacctactgcttgatactta

SEQ ID NO: 229874 - DNA, 446 bp, Glycine max
tgaagcacatgggctaagattatgagattttgtttctgagaagcacaatgatcatgccttacatgcccagacaagtatgattatttgacaagcatggagacaaattctaacagaacaaaggatagtggcgtgatgagaagtggagatagactgaatattcaaaatgtggtgattctggatcatcttcacagaaagctatgtctaattccagatgccaattctcatggaaaaagatatgggtcgacaagaagaaggtgcagtgttacaactgcatgaactttggccatttacagctgattgagattcttagaggattcttgtgaacgcgataatccggttggttcatatgtaatccataatgatcttatagctacggttccaccaatgatttaatggctactttggcctaacctggtgtcaacatttgcagtaaaaatggttcacac

SEQ ID NO: 229875 - DNA, 451 bp, Glycine max
agctgtgatggtgttatgaagaaatcacatgtttgtcatcatcaaatagggggatgatgtgattgtactgtatacatgatcttgatgatgtcaaagaagaaccaagcaatgctacttcaaatgataagcatattgcttaagaataattcaagattgcttcaacaatcaagccttgttcaagattcctaaagaccaatccttgtcttaaaacaaagtgctttcaagacatgcaagactctggtaatcgtataccatcaagtgtaatcgattaccacaagacagggttgagaaatatctgttgataaaggttatgaatttgaattctcaacatgtaatcgattaacatcaacggaactttggacatctaaattcaatagtcattgacccttcaaattataattgcgtaatcgattacactatcattgtattctatcacctctgaaagttttac

SEQ ID NO: 229876 - DNA, 470 bp, Glycine max
  unsure (1)..(470): unsure at all n locations
nntgcagattggtcttcgccagtgaaaggatctatgtgggtctctaaagaggcacanttgatcatcctactangacgactgagataactggggcaaatgaagagggtgagaaagagggataaacccatgctgtgactgccattcctatacggccaagtttcccaccaaacccaacaatgtcattactcagtcaataacaaacctcctccttacccaccacccagttatccacgaaggccatccctaaatcaaccacaaagcctgtctaccgcacttccaatgacgaagaccacctttagcacataccaaaaaaaaaacaccaaccaagaagtgaattttgcagcgagaaagcctgtagaattcaccccaattccagtgtcctatgctgacttgctcccatatctacttgataattcaatggtggccataaccctaaccaaggctcatcaacctccatttctccgagaata

SEQ ID NO: 229877 - DNA, 412 bp, Glycine max
agcttgtatagaatgtcagtggtgaagaatggctgtcgcaagaccttctgaatgaaaggcaagcgaatgagagcaccagttctcttgtcatacttctttagtattttcactaatcctgtacacggaaaattgaagaaatacttaaatatattagttgctgatgtgaatcttaattcttaggtgaatcaatcttcaatttagcacaaaatatcaactttagactggtcacagaggcattaggcatatctctataaagctactcaatcttaaataacagtttttcttaccctaacaaaaacatctggattatatatgccttagggtataggagcattttcgaattttaaagggagaatatctaatttgctgtgttcaactgctgtggcctttagttctaggtgatgtgatcttt

SEQ ID NO: 229878 - DNA, 368 bp, Glycine max
  unsure (1)..(368): unsure at all n locations
atgaatgagcactgataaatcacgaaggaggacactacctagttatgaatatctactcacagatattaccaatgggtgctgactatagatgtatgtgagaggagccacgataatgccttacatgctaatgataagggaaaacctatggnggagactgcttcctcgtctatgtggaaagcactgatagtgctgcatactaccatgaacgcctagaaaagcatgcctggaacctcatgatccgttccagcagaaggatgagagccaagtatgactaaactcgtttgctgtaaaacacgaccgtatgcgtagaaggatgaatgactatactagtgccacgcttgggtgcttgctgatatgcgtacacacca

SEQ ID NO: 229879 - DNA, 400 bp, Glycine max
agctggccacccagctcgcccaggcgagcatgtttgcttcctccagaagcaacagccttttggaggaatcttctggagggcccaagtgggtctggttgctattcgcacccccatttttactaaatacacccccctgccttattttgttgattcttttttcgtaaagttacggaaacttacgaatttcgtaacgatacttgttttctttccgtaatgttacggagccttgcggatcacacaatcatccccttattgacttacggaatgttacagaacctcactaattgtgcaacgatgctttcattcgatctccggtgtgtcacggaaccttacggattgtgcatcaatattctctattgatttccggcatgtgccagaacttcacaaattaccttatgat

SEQ ID NO: 229880 - DNA, 464 bp, Glycine max
  unsure (1)..(464): unsure at all n locations
tctaagccncatttctctctccctttggaacatcttaaagctcaagtatgtggaaattaacatatggcagaatataacacaaccataatcattcataagtcataatcaaacataattcagtcataaaatactaagtgccaaatacttaaatataactaaagttctaagaataatgtcttaaaaaacatagccaaatacacggcgtagaatcaaatataataataatctaaatctatgaagatggtggaggaagattgaagcactgacgaacataacttatatcctcctcaagctgagtgatgcgggtatccatgccttgcaagcgagcatcaatggcatcgatacgaccatccaaggaatcaaagcgctcaccaacataggtgcagaggccttgtaactctgaaagaacttcatgcatgagggctgaggagtcatctcgctgagtcggatgagagggagtacgc

SEQ ID NO: 229881 - DNA, 355 bp, Glycine max
agctggccttgataatgtagacaaatagattgtcttttattctaagtagggtcagctacgcccatcttagtaccttaagcttgttaagaaattgtacaaacatgagggaataggtgagacatgctattactatattttccacttcttatctaaccttggaaaggctccacaaagagaaagccaatattagaaatatgtttatttctgatgaatggatcctaaacaagttatctaaagagcctaacgggaaagaagctgcataggtagagctcacgccttcttcttggaataatgtggtttacactcttaaagtcatggctccacttgtcaaagtgattcttcttgtggatggtga

SEQ ID NO: 229882 - DNA, 415 bp, Glycine max
cgcttgtcttctttggatgctgacttgtggcgagagcattcactatgcgcatcaggtttcgttacattaacaagacctgtgatttaatagacttgcctcctgggtgcaaaccaattagatgtgaaatcattgctgagtcacatctttgatatgaaagacctctgagaaggaagtgtaatccttggtattaacattactatgtcacatgacggaatttctctggatcaatctcactacattgagaagatcttaaagaaatatgactactttgattgtaaatctactagtacaccatatgatccaagtgtataactgtttaagaacattggtgaagggatacgacaaattgagtacgcacgtttcattggttaccttaggtatgtcactgattgtactagacccgacatagcctatg

SEQ ID NO: 229883 - DNA, 445 bp, Glycine max
  unsure (1)..(445): unsure at all n locations
agcttcttatccaaggctcatcttggnggttaatctccttcttccaaggcttattccctagtggatggcgcctcctctcacctattctcctttgtcttccgctgcatctccatgggggaaaatcaccattaatggacctcatagaagctcaaagatccagcctccatagaagccccacaagcaagcttccatcacaaagtcctgtgatcaatgtgggaaatcccatggccccgttggacttatccgggtccaaagggtgcctggtcggtgccatacctgcaaatagataaatggcatcagcaatcaactgagccacgtgaatgctcatccgcgtcaggacggcgtacaccagctgacacttcgacagggggaggtcggaattatgatcgctgcgctggatgttgctgagcagcaacgtcttccatatctgggttagggtggtcat

SEQ ID NO: 229884 - DNA, 445 bp, Glycine max
  unsure (1)..(445): unsure at all n locations
ngcctgtccgatgcagtagtaatgatggcccgagttatgttgtggaacggttacgaacccggaatgggtttagggaaagacaacggcggcatgactaacctgataaatgccaaaggaaatcgcgggaagtatggtttaggctataaacccactcaggcggatataaagagaagcatcgtgggaagaaagagcggtggtcaaagctcgcggttgaggcaagaaagtgaaggaagcccgccctgccacataagtagaagctctataagcgcgggtctgggagacgaaggtcaagtggtcgcgatatacgaagatgatgttccgagtacattggatttggtacgaccatgccctcctgatttccagctgggaaattggcgagtggaggaacgccccggcatttacgcaacgagcataatgtaaacctctacgggtttaaaagctctat

SEQ ID NO: 229885 - DNA, 472 bp, Glycine max
  unsure (1)..(472): unsure at all n locations
cgactaggcgagttgattntagccttagtttcactttagttattagtcaattcaattaagaatgagaaatcccaaagagaaaacgtccgattgattnttcgctctattttactaaaaggtattttttattattatattattattttacctcttttttgatttccaacgtagttacggcacgaccgaacggtcggaattcattttaaccgaaattaacggatgatacaattcaaatgatcggtggaaatttattttatttttagattangcgagaaatgacttaaataaatgactgaagcacgtcaaaaggggatatagaaagcgaatgataatgagaataaaaatacatgaaataatatgtggaccaccacgggtacatagnaatgaatgaaaagctcggtttgaggtacttacccgttgaagactgaagaatacgaagaacgaacgatgaatgttgaagaacggtcgagaa

SEQ ID NO: 229886 - DNA, 501 bp, Glycine max
  unsure (1)..(501): unsure at all n locations
tcacacctaataatggagacacgtgaacagcgctagtcaatgacattcatggtgctccgaacaaatgtggagtatggaggattgccttgagggtccgcacttaggcaatcatgaaactcaactccaaactcgaaagtggaggacataagaacagccttaagcaataacattcatgtggctccggaataggatgagaatggaggattgccttgagggtcctctcttaggcaatcatggaacacaactccaaactcgaaagtggagaacacatgaacagccctaagcaataacattcatgtggctccggaacaggatgagaatgaaggattgccttgagggtcctctcttaggcaatcatggaacacagctccaaactcgaaagtggaggacacatgaatgacaacgcaattcattcacgtggctccggaacaggatgagaatggaggaatgccttgagggcctctcttangaatcatggaacacagctccaaactcgaaaag

SEQ ID NO: 229887 - DNA, 397 bp, Glycine max
agcttaaaggaagtgaacatattagcatgggctgagatgtctccgttttgtattggaaatctgcttcccaaattcctgaaaaatgtaaagatccatgtacattcatcataccttgtattatagggaatagtaagctcgacaatgccatgctagatttaggagcttctattagtgttatgcctttgtctatttttaattctctatctctaggccccttgcagtcaactgatgtggtaattcatttagctaatagaagtgctgcctatcctgttggtttcatagaagacgtcttacttagaggtggcgaactgactttctctgatgattcttatactttgaatatggaggatgcgatttctcatcgatcggttccatcattctatgcagaccctttatg

SEQ ID NO: 229888 - DNA, 498 bp, Glycine max
  unsure (1)..(498): unsure at all n locations
ngctaacccatggaagctcctaatatctcccacactatgtggtgtgggccattcttggatggccttgattttctcagggtcgaattggaccccatttctaccaactacaaatcctaagaaaactatactatctacacaaaaggtacacttctctatatttgcatagagggtgtttttaataaggactgaaagaacttgcctaagatgtcctaagtgatcatctaggctcttactgtacactaaaatatcatcaaaataaacaactacaaatctacctagtaaatcccttaagacataatgcataagcctcataaaggtgcttggtgcattagtgagcccaaaaggcattactagccattcatacaaaccanacttggtcttgaaagcggttntccactcatcaccctttntcatcctgatttggtgatggccacttttaacatcacattttgaanagatattggcatcatgcaactcatcaagtaaatcatcaagtct

SEQ ID NO: 229889 - DNA, 409 bp, Glycine max
  unsure (1)..(409): unsure at all n locations
agctctcaacatgttccttggcaaataatcattacgcagcagagttctaacaaaaccacccatcatatctcccaaaaccccatacccacgaaatttaagagagaaagaagtccacccaaacctgaattttcgaagtcccactcgtagccacgcacttcacgaccccaaaaatgctctcctttcacgatttggggcagaaatgagcaccaaaggttgaagctttgtgtggagcttcaatggagaatgaagaagaagagaatggcaacgtgagggagagagnagggctgtctgaaattctgttttgctgagtgaggagagagaaaagctctttggtcttaaataaaagggtttcctcttcttctattattttattcaagctctgccacatgtncctatttgattggagcaa

SEQ ID NO: 229890 - DNA, 423 bp, Glycine max
  unsure (1)..(423): unsure at all n locations
tagcccaattcaattcgatctgaattgagctgagcgagagtgcattcgcttatcgcatcatgtttcgttgctaagcgcgttgcactggcgctaagcactattctttgcggccaaatcactggtttaattgagctaagcgtgacccactcgtgctaagcgaatattcttacggcctatatagtgctaagctagcaaccactcgctaagcgcatgctccctgtatgcaagatgcagtattttcactaagccaaccaagagtgcgacttagcgagagttgcaggttttcttatctgcacaagtcgcttagcacgctgctttgcgctaagcgcagttctctatatatntgaatnntcaaatntgggcttgggctcggtagaacggcccgctaagcgagcatgttgagaaaccaaacgtctctcgcta

SEQ ID NO: 229891 - DNA, 460 bp, Glycine max
  unsure (1)..(460): unsure at all n locations
agctagtaaggtagtcatacctcacanaatatatatatgtatgtttaggtagtgaaaataccttatatatgcatgtatgtaaacaaaaaaatacttcacaatatatatatatatatatatatatatgtgtttaggtagaaagataccttggatatgcatgtatgtaaacaaaaaaatacttcacaaaatatatatatgtatgtttaggtagaaagataccttggatatgcatgtatgtaacaaaaatacctcacacaatatatatttgtatgtttaggtagcaagataccttggatatgcatgtacatagcaaaaatacctcacataaatatacacatgtttatgtagcgaaatacctcatgaaaaggaataaacataaacacacaagataaagaaataatcacatgataaaatggaaaagagaaaaaagaaaaatatgttgtctagctgaaaaccaaca

SEQ ID NO: 229892 - DNA, 422 bp, Glycine max
gtgtagaatggctacacatgatacatgtcaaggtttggtttggttcacggataaaagggatgccccacattatttccatgacacaaatgctgaaatgatgatttggagattatatgcggaactggtcatgcatgcacctatgcggacactcaagtgtcaaatatttatggtcatgtgatgctagggctcacgattcatttgctctattttagatcaacccaatgtttccaaaatatgttcttttatcaatttgtgcattcatacgagtccattttgggtactcgggagaattttcacagcattcacccttcaggtgtgcacacatttttttttcaacaactagctatgatcagccaattctttcaaagaagagttggaagtcatctcttttcgaaagcatgttggttattcagctagacaac

SEQ ID NO: 229893 - DNA, 445 bp, Glycine max
  unsure (1)..(445): unsure at all n locations
agctgtatggattaaattgtgaagagaatcttgttcaaatttcaaaaattaccaaaagcatgtagggacaaatataaaaaaaatggagtttagtataattaggtgagtgaacataaagtccatcaattgtgaacagaccanaatcttgaaaatatgatttgaaaacatatcatagcttgcgataggaagtttaaggctagaagctagtaaaaatggagtccgatatcttaaaacatttgcaatcatatgtaaatgtggctgagccgcttaattaatttgaaagattatgcagtgattagagtggacaaatggcaggtgggatgcatgctaggacaaacaaattcccacattattcactttcttttcatttctgcttataccatattatgatttgaactgctcaagggcgctgaaccttataaagcaattgcttttacatcattat

SEQ ID NO: 229894 - DNA, 487 bp, Glycine max
  unsure (1)..(487): unsure at all n locations
ttgctctgtatctgagacctgtgggattgactgatgtcgngctaagttacgtacggcaatacagccccaacgtgagatggatgcttcttggttatgtgggagagactgatgcaaggcttttggaattctctaagggctgccccagtcttcagaaacttgaaatgagaggatgctcctttntcactgagtatgcactacctattgctgcaactcaactgaattctctcatgtacctatgggtgcaagggtatagtgcatctgcatctggacgcgatcttctggcaatggctcgcccctattggaacattgagctgattacttctagaagcgttggtgctagcaatcagcaagaagagcctgtagttgtcgagcacctggctcatattcttgcatattactctcttgctggcccaagaacagatgttacagataccgtaatacctttggatcctcgaacatatgttgacacctaaacttgtacataccg

SEQ ID NO: 229895 - DNA, 437 bp, Glycine max
  unsure (1)..(437): unsure at all n locations
agctgtaacctcatcgttcctcacagtctttataattgggagccaatccaatccttgggnnnngactctcagccacttatgatagccgccgataatctcattactgcttcccctaagctctctgtnctttcttaacgccgcatcccatgccttgcgaactccttggagtaccctcgcgttgtggtcactgaaacctcgtgcgatgaaaggcgtgatgctttcgtctgatggcactcctctcatgggacatccttcgccgctcttttacatccccggtcgaacgtgtcatacatggccaaaatggcgacgaccgggcttttcttgccatgatgaaaggcgaggaatgcgtcaatcgctgctaggtccactaacccttccacatttggaaagaggactccctcgaacatcaacagtgtgagaatatctatgaatggggt

SEQ ID NO: 229896 - DNA, 458 bp, Glycine max
ctattaggacctatgatactcagcttaaggctaagtcttcatgttgctcccgctactctaacagtttgttcctttttggttatctcatttggctttgtgttcctttttttcaaatgatgtttcatttggagtttatatttgggttctcaaaattgtttttttttacttttttcgttactgatgttgtgtataaacagggtttgtgaaaataaaaaaaaaatgatttttatgtttacctgtacgatttgtggtgaattcactcttattttgcaccataatggtaaattgatacaaaatgcaaatggcgcactagagtatgttagtggtgacatttgtatttgggaagatattgatacagatttggttaatgtgtggacaacccacaaattgtgcaaagctcgccgcaactatgtgaagtttgctatagtctgtcatttggtgcttgatagtggttatat

SEQ ID NO: 229897 - DNA, 444 bp, Glycine max
  unsure (1)..(444): unsure at all n locations
agctcgcaacctttctctgaagntcagagcttgatatagttaatctcaccacaaggaacatgaactgtgttggaagaccttgaaaatcaacactctttgtcctttgatatatacgtggcagcctgttgaaaacactttcatcaactatcctatcatgtcttgaaaaatggcgattgttaactccacaacatttatctacataacccccatatttgctgtccaatgcacggatagttatcataataagggttcctgtcaccattaaagagctcttcagttcaaatgataaaataaataagaattaacaaatggttatatatatccccaactcgtgtgagacatgatagatatacatgtgctcgttcaaaacatcatctgtaatatagctcttcagccacccatcatatagatgaagtattctattatgacttgtgacacatatgc

SEQ ID NO: 229898 - DNA, 403 bp, Glycine max
  unsure (1)..(403): unsure at all n locations
gattcaaatngacaatccttcttggaaaagatgaataagaaactgcataggaaaattaacttaagcaaaatagtatttaacttaagctgaatttacacagaggtatacaactgcacagttctagtatttgtttaaacccaaaatttgacttactttagagcagacttcttgttccgtataaatggactcttactcttgtacgggggatgtcttctcattgtgtaaaaataccgtatttactaaagttctcctccaactctcttcttctatcgagcgtccatctttcttgtttttggatgttatccatgaacatgagtaactaacacctcctgttgttgagctagattgtattagaaccttatgccctcatgtatctctcttgaacaagcactatatattcatt

SEQ ID NO: 229899 - DNA, 423 bp, Glycine max
  unsure (1)..(423): unsure at all n locations
cgacatgttcaagtgcaagtgctgctactggtgtatacacttgtaattggttgccagacctcaaggtgatggcactcacatttttcggattctgcacagattgtgaaggaaatttgtcatatcttgggactgagcttggttcaactaagtagccatctgccccatctgatctgtcagactctgaaaggaggctcttgtttcttgctgaaattgcatattctggatggtcatttgcctcactaactcttctaaagaagggtgaggaggagcctcagttgctctttgtctttgctgtgaccgtcgatgttgctgctgctgtattggacgaggaacatatggctttctttagacacgcacattctgaaaggagggacaactgttattgtgtggaggacttgccatctcagattnggttattcctcc

SEQ ID NO: 229900 - DNA, 394 bp, Glycine max
agcttcttatccaaggctcatcttggcggttttgctccttcttccatggcttattccttaatggatggcgcctcctctcacctcctttcctttgtcttccgctgcatctccatggtggataatcaccattaaaggaccccattgaagctcaaagatccagcctccatagaagctccacaagcaagcttccatcaataagagggtggttggcttggtcgatctgaacgacgaagtggaggagggttctcaggtagtggcgaattccgtgatggagtacgcaaagatgacggagaggagtaagagaatgttggtgtctctggatgcatgagtagctgtgaaaggatgtttggacaaagaagaacacggtttggttcattggacatggtggatctgt

SEQ ID NO: 229901 - DNA, 340 bp, Glycine max
atgagcttaatcatatctggagtctcaagaacggttctacactttgtatttataacaatttctacctataactcttgattaatagaataaaaatgacacacgtgattaagttaaacaccattcttgaaaccccactaaacagattaaggttttcggtgttcagcatgatactagagctcttatgtccaagtagtctagagttccatccttgtctccccattctttgtaaatatattaaatctaagcacagataaagtgagtctgtgtgcattgtccttactttaagcccataagctctggtgtgaacagctgtattgtgacttgatagagacaaacaaca

SEQ ID NO: 229902 - DNA, 389 bp, Glycine max
  unsure (1)..(389): unsure at all n locations
cgcctcgcgtaatcgagtacacagatgtggtagtcgttccttgttgccntgaaaaacaaagatgtaactcttcagaaggattgactcttcaaatggatcttaagtctctctaaaagctataacccttccgaatgggcgtcttgaccagacatgaacagcctatcaaagccacgcttcgtttgcattataaaccaatcttctaacaataattgcttacaatcctttacaagccttgaatcccttaaactacttcttcttctttgtccaaaagtctctgaagcctctggattctaaccttgaaacttggctattcatcttttattctcttctctttgccacaagatttgccacgacaatccctggattctttcggcattgtctctctttca

SEQ ID NO: 229903 - DNA, 470 bp, Glycine max
  unsure (1)..(470): unsure at all n locations
agcttatgaaagtgacttcacgaattgaaagtattgctattattgatttatcgccttatcgctatataattagttggaagaagaggataaaaagtagatgccataaataacaacccactaccacttttattattatcatnttaggctaaagaatcactcaggccttcaattcatgtgaagcatggcagagtgaccatgcatgcgacaaagtggagaatatatatatctgtatgtggggtactattctatgcgtctcttaacaaaaattaagtgacaatgtctcattaattttacaaaatataaagcaacaaatcagcaaaccaacacaatcgttaagcacagaactcatttttttaaaagatatgaattcaattctactgtcaacgaatccaactaacataatgtttttttatctaaaacaaattaacaaagcaccaagcatggaattgcaaaacaagggtcaactttca

SEQ ID NO: 229904 - DNA, 501 bp, Glycine max
  unsure (1)..(501): unsure at all n locations
gctatatgtcttgtcaacaacaataatattattcaatcagaatagaaagcagtanttttctgagntaaaaaaaaattaataagcagttgtagtgtatataatttgacataacaaagcattctgtataatatcttctataattttaccttactacaaaaatagtctgtatagactatacctgcagactacagttctttaaattttttgttttctttctttaactcgcataatgcaccacaatacttactagataaaacaaggatatcttactaaaagctgcaacagacatgtgcatctcttcattatgtaacacgaattntattttangaaaatcacataacaagaaatctattgtatagaacttctgatggcatttcagaaataagatcatcaataaattaattacactataagtagtgtatttgaaaacctttggcagccagcaaaaattaactactcccatagaanaaaatataanatatatcagttacttcttatgat

SEQ ID NO: 229905 - DNA, 226 bp, Glycine max
  unsure (1)..(226): unsure at all n locations
gatgcctatgggcatanacaacagtgttgataacactctttggcatctctccgactacaaatggtgtatggtcaagcctgacctctactatagtgagtacagatataagctcatctagccataaagttcctcaactctgactctactgcatatgaatagaacaggaaggttcaactaatagaacttgaagagatgcccctacacaatatgatacattcacgctcta

SEQ ID NO: 229906 - DNA, 468 bp, Glycine max
  unsure (1)..(468): unsure at all n locations
tactcaagcttctctcgcctttccctaatgcgtaacagtctcacatagattatgtgcttatgaacatataataagttcatgctctgatgataaacaggacataagtatccttttacatttgacaaggtattaaatcatgaggcttctcagcacgatgcttcactgagatatcacaactcggacaaagctgcgcttgatgcggacaaggtgattatcaatctgtgtcttctttgttcacagtaccttttgcaggtcaaaaatctcttgcattggatacaactattggtatgtgacaattattattttctgagaagcagtggctactggttgatcattggtgccagtcttgtatgtatatactngattattattattattattattcatatacacatgtttaactttctcgagtatgttgcgaagcatcatattaggatagctctcatgggatctattaatactcaatca

SEQ ID NO: 229907 - DNA, 469 bp, Glycine max
  unsure (1)..(469): unsure at all n locations
agcnttactataactgagatgcttaattacttttagatagntgaatgtgatcttctagtcctccacactcatctccaagttnttatttctcatgcccacaacacattctgctgtaagcatgaatggtcggcctagtattaagggaatatcagagtcctcttctttgtccgtgatcacaaagtccactggaaaagtgaattggcgaaccttattcagaacatcttcagctacaccatatgatctggtaatagagcggtctgctagctgaagcgtcatcctagtaggagcaattctcagatttccaattcttgagcacaaagagagaggcattaacattatgtttgcctcacgacaataagtctttaattcaatatatatataaacattattaaatgacaatatatataaataaatattaagaatgaattagatcaatattttacttaaatatacaaatctcaatatttta

SEQ ID NO: 229908 - DNA, 488 bp, Glycine max
  unsure (1)..(488): unsure at all n locations
cttcgccaatgcataccaatnggngaaagaggcttcatgattatctcttatctctaatacgatcctaattcttctcctcgctgctactgctgttatatagggcaacatgtcgttgtggctgaaacaagattaaaggatttggataaaaagcgagaaacggcgtagagagggctattgtggaagcgaagagagagatcgtaagtgcactacctttgcctgnggttcgagcctttgaaacttttaagatgccaagtcccacatgtggtgagagacacatgtatcattgtattataaaaagaaataacacaatgttctaaaagttatcgtgtgtaaattataatccgagaataaatatgtatgttgtgaaactatgtatcattttgggccgtcaatttatttgctaaaaactaaacacttccacagcttctgtaaccgctaanacttacgggcggaacttaatttgtactgtgagtaatagaactccaaga

SEQ ID NO: 229909 - DNA, 372 bp, Glycine max
agcttctgtgagaagacttccttgagaagctagctacacacaccctctcataactaagctcacctccttgagaagcttgcttaagaacattcctaaagaagctagagcttagctacacacacctctctaatagctaagctcacctccttgagatgagaagctagaacttagctacacaccccctataatagctaagctcacgcccatgaaataaaacatgagaatacaaaaaaaaagtccttactacaaagactactcaaaatgccccgaaaacaaggctaaaaccctatactactagaatggccaaaatataacgcctcaacgaaggagaaacctattctattattacaaagataagcggctcatacttag

SEQ ID NO: 229910 - DNA, 473 bp, Glycine max
  unsure (1)..(473): unsure at all n locations
tatcctgatgaggctgttccatatgttctctagactggactaatacatttgctgcccaagttggatggtcttgcaagtgaagatccttataagcatcttgaggagttccatattgtttgtttcaccatgaagccccctgatgtccaagaagatcatatctttctaaaggctcttccttattctctggaggaagtggcaaaagattggctatactaccttgctcctaggtgtattttcagctgggatgaccttaagagggtgtgttcttggagaaattcttccctgcatctaggaccactgccatcagaaaagacatttcatgcatcaggcaacttggtggagaaagcttgtatgagtactgcgaaagattcaagatatngtgtgcaagctgccctcaccaccagatttctgagcaacttcttctttaatatttctatgatggacttatcaacatggagaggaagtttattgat

SEQ ID NO: 229911 - DNA, 370 bp, Glycine max
agcgtgtgcatagatatatatgatacatattctatataaaaatctcattctatatgtttggcgaatggaaagggttgtactctaatcattgatggaggaagttgtaccaatgttgcaagcactatattagtggagaagcttgggttgaaaaccactcctcaccctaagccttataagttgcaatggtgagcgacaatggtgatgtggttgtggataagcaagtgttactctctccattcagaagtatgttgatgaagtgctttgtgatatggtttccatggaagccgaacatgtgtagcttgtgagacctttgcaatatgatatagaacgtgtccacaatgaggtcaccaatcgatattcttctttgtca

SEQ ID NO: 229912 - DNA, 478 bp, Glycine max
  unsure (1)..(478): unsure at all n locations
tctccacaggacatagactgtgtgttgtaccatccttgctttgaggcattngaagagttgaggaagaagtttaccacctctcctatcttgtagccactagattgggagcttccttttgtgctcatgtgcgatgcctctagccatgcacttgtggatattttgtcattgagagttggtagcctctcccacatcattgcttatggctcatgcactttagatgcaacctaagntaactacaccaccactgagaaggagcttttagctattatatttgctgtagataaattcatatcttattttctttgctctcatatgattgtctttactgaacatgcagctttgatatacttattgaagaagcctgatgctaaacctatattgatcaagtgaaagcttcttcttaagagcttgatttgagattgacacaacagtagtgtgtgaacttggtgctgatcattaagctggatcgcggacatgt

SEQ ID NO: 229913 - DNA, 386 bp, Glycine max
  unsure (1)..(386): unsure at all n locations
agcttatagtatatcgagatgctcgaaatattcatcggaagcgctcgagaaattcaatgggtcataatttttcacacggatgtccgtatttggcgcataacatatagaggcgctcaaaattgaacaacagaagctctcgtgaaattcagatggtcataacttgtaactcggatgtccgattcaggcgcatcacatattgatacgcatgaaattgaataacggaagctctcgagaaattaaatggtcatagctntctacaccgaggaccgattcaggcttataacatatagagatgttcgaaattaaagattggaagctctcgagacattcaaatggtcataacttttcacacggatgtccgatacaagcgaatcacatatcgagac

SEQ ID NO: 229914 - DNA, 478 bp, Glycine max
  unsure (1)..(478): unsure at all n locations
taaccaaggggagatggaccatttcaagtgcttgaaagaatcaatgacaatgcttacaaagttgagctgcccggtgagtataatgttagttccaccttcaatgtctctgatttatctctttttgatgcagatggagaatccgatttgaggacaaatccttctcaagagggagagaatgatgaggacatgaccaagagcaagggcaaggatccacttgaaggacttggaggacctattgatgaggacatgaccaagagcaagggcaaggatccacttgaaggacttggaggacctatgacaagggctagagcaaggatagccaaggacgctcttcaacaagtgctgtccatactatttgaatacaagcccaagtttcaaggagaaaagtccaaggttgtgagttgtatcatggcccatatggaggactaaatgacaccactntatttcaattttagagtgtttagtttgtctaaataat

SEQ ID NO: 229915 - DNA, 440 bp, Glycine max
tagctgatgagtatgttttatagtgtgaatagtttagcacggaggcacataagttcattactatgttaagcaggaatgcaactacttcaggtgccttgttctgtcaccattccatcgccactttcaatcatacaaagatcattgacgacaatatctagacaatgttggtacactatatctttttatatagtcaacttgattccactataaaaagatatacttcgaccctagaagcattggcattcgtatctcctatactaactgcatgattgaatttaaaggataaaaaatccataagttattttactttaaaagcaacaaatccgttcttcttatcataatatttcatgcactggaacacataatattgcattgcaattgcacaatacttttataactcttatatcaaaccatatttaagcctatacgcatcaaaacat

SEQ ID NO: 229916 - DNA, 457 bp, Glycine max
  unsure (1)..(457): unsure at all n locations
tcacanaagnttatatggctagatacaagcatctatgtcttgttacaataagntgaatgagttcatgagcaactcaggattcaaaagatgtgacatggaccattgctactatgttgagaaatatactaatagttatgatatccttgtccggtatgctgatgacatgttgattacaggatctagtatgatagaaattaatagtttgaagcagtagttggcagataactttgaaatgaaggatcttggtccagctatacaaattcttggtatgagaattcttataaacagatcagaacgaattttgaagttgtctcaggagaaatatatacacaagttgcttgacaggttttaccttgaagattctaagaccaggaatacccctttgggatctcatttgaagttctcatagaagcaatctttgcagacagatgaacaataatgctacatgttaagagta

SEQ ID NO: 229917 - DNA, 417 bp, Glycine max
agctttctaatgggcccagtgtgctgaaattgtcccaaaagagaccattctgcccttcttttgaatattctgcacatctccttccgaaacatcacataaccctacgaattgtgcggaaattagtggttagcagcttaattcggctagcgaaaatttaaatgttggctaacgattgtccccgaacgaaattatggtatgacaccccgaacgtacactttgcgagattcagccttaacctgtatttacgcaattgtccgaacaactttcacataatgactacgtgatcctcctccggccttgatttggcgatcatgtcaaccaccgagacctcaatttctttatgcatcatgtcgtcgaataacaccaccatggcccaccggtatgttgcctcaatgtgtcttggccctaatgacatca

SEQ ID NO: 229918 - DNA, 496 bp, Glycine max
  unsure (1)..(496): unsure at all n locations
tagagaataacaacggtattgctgtagcgtgctgattaaggtctttcttattacgatattgtaaactaaagtttgattttggatgaaagaaatattcaatgtctgattctatcccactgataataaaaaataaggtttatagaatgaataaaaaaatgttaacataatctggataagaggtctattttatcaacattgttagatattatgagcaaatttattgatttaaaaatacaaacactaacactaaattngatgataattaattttataagagatttcaattaattgttaactctttttattatctgaaaattttatttaattattcaataaataagtgcttttccgcattttctaaaatgttattcacagtaactctctaaaatgttaatctcttttatctctgtcttaatatatctattattgtcattattggcacttataagaaaatcacaaatntattaaatctttgtcatcttatatattctaatta

SEQ ID NO: 229919 - DNA, 425 bp, Glycine max
  unsure (1)..(425): unsure at all n locations
agcttgtataaatntgcttctttaactccttgtactatgnatttgtgctcgtttcattattagatcgtggcatgaaagccatgtgttgtatattttaactttgcttgtatcttctggctctattgcattatcttctgtgtgtaactgcagaggtttttgaagaatgtttggagattgtatcatatatgacttttttctcttcatcaatttcattggatatgtggagtctttggccattgatgatggaagcactggcggactgggcaatagatatctttccaagtatggtgctcaactactttcaactcttatttcctctctgaaataatctactagtgctgaaaatatgggatggctctttgtttgtgaattaagaaggagttgatcttgaatatctgaattacccagttaactgttaaacattt

SEQ ID NO: 229920 - DNA, 446 bp, Glycine max
  unsure (1)..(446): unsure at all n locations
tgnctagcctgttagccggnttgaatgctagcttcatattattaagngtaaaaaatattntctttcttcaacaaagccaaagattttctttaaaaataataaggtaattttaaaccacaagatgtgcccaaaacttgcctacatacattacatgtgacaagctaccaaaaccttttaagcccctccaaaagaaaattgtccttattcttgctatccatctatacttataggaattagcttatttcanatatcaaaatgattcaaattgttaaaccactaaaacaattttgtagtttcattaaaataattataatattatatatcttattaataataatattctaattacaaaatattgntgctaaatagactggccattatgcttaatagactctntntaatgcctgtgacctaacctagcctattaagtaaaaagtcttttaaaa

SEQ ID NO: 229921 - DNA, 365 bp, Glycine max
agcttacataaagacattgaattcagtatctctcaaactaaagatctattcgtacttgaagaacattatatttccacatatgaaatggataatcgaatactaatttcaatttttagctagtctgaataaataaaattgaaagatctttcttaattaacaaaaacaaatattgacaaacgtggttattcattcattataaaaaaaaaaaaatcgatgcaacatgtatggtgtacagcgactttctttactctgagaattagtacatgtcaatgctataagctttcccttttgaagaaaataatttcgcgagagaattattaatattgcaagtggccagcttaaatgagaaatgactttacttggaa

SEQ ID NO: 229922 - DNA, 449 bp, Glycine max
  unsure (1)..(449): unsure at all n locations
caacattcgtgttgagccaaaccaatccatgtgcttcaattataatggntnggtggaggaaacaacatctttagatataaaagaagctctttctatttgcttcccttggtgacatgtttcacaaagaagatgggttttccaacaaatcttagacaatcgtttctagatagttctgcaacatgtttcagattgacatgcccatgttttttgtgccaaatccatctctcattttctctagatagcagacatgttacattttgcttacttagatctattagatcattctcatacaacatgtcgtgtagtctagaagaaataaaggactttctatctttcgtcttgactatacattgggcnttgttgaaagacataatataaccactatctcacaattaacttatgctcaacaactaatacttaagaccttcaacatataaggcattgtttat

SEQ ID NO: 229923 - DNA, 394 bp, Glycine max
  unsure (1)..(394): unsure at all n locations
ttaagtcacctgcggctgcaagctgcctanagagatcaggaaggattatcggttgttgaaccagttccgctcccgaatatgacagcctccattntaggagcgctgagcaccagcagcgcttcgaggccatcaagggatggtcatttcttcgggagcgacgcgtccagctcaaggacgacgagtatacccactttcatgaggagatagttcgccggcgttgggcatcactggttacccccatggccaagttcgacccagacatagtcctcgaaatttatgctaatgcttggcctacagaggagggcgtgcgagatatgcgatcctgggtgaagggtcagtggatccctgtcgatgcatatgctcttagccagttcctgagataccctttagtgct

SEQ ID NO: 229924 - DNA, 406 bp, Glycine max
  unsure (1)..(406): unsure at all n locations
tcatactatgctggaaggtgttcatggtgaaagaagaggagagttgatagagttggagcacgaaatngaaggaagaaaagggagtgaagttgaactttgagttgtgtctcacaagactctcattcatcaaatgtacaacatgggttacacatgcttctatgtatagactaggtagcttccttgagaagctgtcttgataaaacttccttgagaagcttctttgagaaaacttccttgagaagctagagcttatctacacacacccctctcataactaagctcacctccttgagaaacttccttaagaagattcctaaagaagctagagcttagctacacatacctctctaatagctaagctcacctccttgagatgagatacaagagcttagcttttgacacccta

SEQ ID NO: 229925 - DNA, 335 bp, Glycine max
gacctattaacaactggcgtttgcccatcggtttgtgggtgacacgtggttgaaaataacaatttagcgcccaacttgctccacaaagtccttccaaaatggcttaagaactttagagtcctatcactaacaatgcttcttggcaaaccatggagtctcacaatctccttgaaaaacaaatcatctacatgggaagcatcatcaacttttttacatggaataaaatgagccattttagaaaacctatcaacaaccacaaaaatggaatctttaccattgcttgtttttggcagtcccaaaacaaaatccatggataaatcaatccaagaatactc

SEQ ID NO: 229926 - DNA, 445 bp, Glycine max
  unsure (1)..(445): unsure at all n locations
tgcatcaagcttggtcgtacgaacattttgacttcttcaagtttggccatggcggcctcgatgcggtccatgcaatcgatgtatgtgctgaaatganagggacagatgtgtgtgctgatggacgatattgtgaagaggatgcaatgagaagaggtggttcggcgggtagtgtgtgtttgaggtgtgttgggctggcatggcatccatggaaggcagccatttatgctctttcttttcataggtttcgctgattaagctaatggtcgatcgggtggaaatgttgttcgaacgaaattactatcttatctttacttcccttttatctccaataaaagataagtaaagaggggcaactatcataccctaatttcgtgcgaggacaatatttgtgtcaacatgcagacctttgctgaccaatatgatgaggttaacactcatcgccatg

SEQ ID NO: 229927 - DNA, 318 bp, Glycine max
aactgatgttcatgaagctaagcgccagtcatggcaactaagctaaattccttgcggcgatgtgagcactaaccgagtccttatcagctaaacacatgctcctctgtacttcagaagcataatgttagctaagctggcagagcctgcttatcgggagttgcagctctttggaattgcatacctcgctaaacaagcttatcctcgctctataccaagactgcgtgtaaaaaataacacttatgttgaatttgaaacgtcggctaagcgcgcatgtccgctaaatatcttcattgagaaacaaacatctctctaactcgc

SEQ ID NO: 229928 - DNA, 451 bp, Glycine max
agcttacatgctataatactattatactgtttgttttctaaagcgccagaggaagccttcgctattctctgctactctcaacaacgcacgggaatgcatatatcatagatatccacgttacatacataatatggctcactttgtcttgtaaatgacgtatctgaaacacgtaatgacggttaacattgtttcttaaatgagtatgttaatacgtaacctaaccatgtccttctgcttgagcttgattatctgagaaggataagacaaatgcattaaccatttgttagaatcattggatcattgttcaagatactatcttcgacgatcattctgttgattattggttacatagttgcaggattcatactttatcggatagatatgactccaccatactgccagtcatacagctaaatatcgaatgtcgaaagataggtctgactaattaaca

SEQ ID NO: 229929 - DNA, 354 bp, Glycine max
  unsure (1)..(354): unsure at all n locations
ggatcctctaagtcacctgctgcagcaagctaacaacagagaggagtttgctttgtangatgaaanncaacgcgtttcatataattaagagaacattatctccctacacgacggcttntgccgactaagctcagtccacagacccttatctctctttctctatctctctctctctctctctcttctctgagggccaagagtcttccattgaccgcgtggaatgataaattctccattctttcctcctatgacggattagctctttatcttcttagaaaaatattatctatttaataaaaatataataaacatctaatatgttgatattagttcatgaactgtttcaagatttta

SEQ ID NO: 229930 - DNA, 382 bp, Glycine max
  unsure (1)..(382): unsure at all n locations
ntatagcaagtctcattattttcttttttatttatacctttttcattgtcctagagaaaaaaaatcagaaaatgaatatattgttttcttctaagccgatgtgttcatcatacatgttattccttgaaattttgataggatcaaatttatgaactcaaattcaattaagactctaccaatatgcgacataatctgattaatccaatttgttagcataatatattaatcttaatataattaatcatagaattaaaaatatatataattatattttacaatttatattttaagataaattatataaatacagacaatgtttatttagtcaaaaaggatgattattaataatacataattattgttaataattatacttatcaaa

SEQ ID NO: 229931 - DNA, 424 bp, Glycine max
  unsure (1)..(424): unsure at all n locations
ttctgtcttgatgatgtgaatgatgtggatcaattgagtgctttatgtggaaatcgcgaattggttggttcaaggagtaaaataatcatcacaactagagataagcatattcttagaggggatagagttgacaaaatgtacacaatgaaagaaatggatgaaagtgagtctattgagctttttagttggcatgcattcaagcaagcagtccaagagagggtttactgaactttaaatgatgtaatgaatatctgtggggttgcattagctctacagtccttgtttgccattgtttgtataaaataatagaatggagactgattagacaacttaaagaattctatgatcaagacanagngttaaataagcttgaggttaatgatgatcnagagaacatattctgatatactgttctttatgaatg

SEQ ID NO: 229932 - DNA, 409 bp, Glycine max
  unsure (1)..(409): unsure at all n locations
acttcaattngcttgccagacctcaaggtgatggcactcacattcttcggattctgcatagnttgtgaaggcaatttgtcaaaattttgggactgagcttggttcaactgagtatccatctgtcccttttgatttgtcaaactctgaatggaggctcttgtctcttgctaaaattgcatattctggatggtcattttccccactaactcctctaaggaaggttgagaaggggcctcagttgcttggtggctttggtgtagtgctgctgttgcattggaggaggaacatatggcctgcttagactagcagcattctggaagagagggacaggctgttgtgctgctgttgttgttgtggaggatttgcccatctcagatttggatgattcctctaacctggattgtatctg

SEQ ID NO: 229933 - DNA, 430 bp, Glycine max
  unsure (1)..(430): unsure at all n locations
cacttaatgtacattagttcactcatgctgagctttgtccagatcttctttacatactataaatggttccactaatcaataatgattacaaacaagtgttctaacactccactctcggttaaacaagtattctcaaggtcactactgacacactattttgactccccctgattctaagaacatccaagtattgttctgttactaagtcattccttgctttcacaaacagattgtttgattgaatacaatgattcatatactcaaagagtggataaacaataagctcaaatacaaaagatgaatttgccaggcaaatgatacaactgttttaagtatagaatgtattgccaatgactcgtagaaaacatatgcttcactttgatgcgtcacttcatatttcacttctttacttcactntataacttgagtc

SEQ ID NO: 229934 - DNA, 405 bp, Glycine max
  unsure (1)..(405): unsure at all n locations
agcttctaagggaggcttccataatacagtgtttgattttatgtaggncnccaccaacttgcttgtcttctcatgaaggttttgagcatagcatggcattggaactactcctttgatctagatcttgtcctatgctaagatgaggtttgtatccttggtggctgtagttgatgtagttccttcacctttgttattcatgtactgaacttcctcttgaatcatagcacactcatttgttgtatggcatcctctacaagattcacaaacaaaacatttaaatttgggaatagagggtgttgattgcaactcgaagtgctgaagaagatcaatgatttgttgtgtaagctcttcaattatcctagtgagcaatttgtgttgtgctaagaagtcatcttgggtatatac

SEQ ID NO: 229935 - DNA, 350 bp, Glycine max
atgtacttcttgactaatccaacatttgttaggtgggttgacatatgagtattatctttaacctaacggtcttaaatatattatgaagctctctagcgatttcgaaaatctctcaatatctgctctctctgtctcacatgcatcactgtaagataagtgtcataaatataggattgaagttaaatttaaacctaatgttttgaaatgaaggaatataataaagagattaatgacgctctggaacttgaatgaagaaagagaaaggaacataattaatcctttgaactgattggggtggggagtgtggcacgaaacataatatctagttctatggatttattcatgacact

SEQ ID NO: 229936 - DNA, 423 bp, Glycine max
  unsure (1)..(423): unsure at all n locations
tgagtctgacattccaaaaaccgcatttcgaacacatcaggggcattacgaattcacctaacaatgatcccatggtagtcaaactggagatttctaactttatagtgtgcagagtcttgattgaccagaggagctcgaccaatattctctattggtnnctaccttcaaaaaatttgatattccaacaagtcagatcaagccattctctgaacaactcataggcttcttgngagagacaacttacacaatgggacatgtcaacttgctaacgactttcagaaacgagaagtgttccaagaccataatgatcaggtatctcctagtcaagcactcatttctataatatttaatttgtgggggacttaataatatgggctatattcaactctatcaaggatgaatctgatatagtgcagatatatc

SEQ ID NO: 229937 - DNA, 402 bp, Glycine max
  unsure (1)..(402): unsure at all n locations
atcgattaaactgatatgaaacgcgtctntgcactcttaaccaacttatgtaatgaattacgatcagctggtaatcggttaaaacaaagactttgaactactgaagaaaatttctgactttagaaactttctccttactcctacatcatgatgcatgatgcatatatgaaatgatggcgactaatgtgcaacgcataatacaacaaccaatacatatgtcactcgagagagttggccatgtaataggcaaaacttcttcaagctttatgactaagtcttcatgttgctccccatatctctaacatacatcattaatccatgttcaacacaaatttgcctaagcacacaaaatatcccccataatcgcattataacacataatgattgtacctaatgattcta

SEQ ID NO: 229938 - DNA, 456 bp, Glycine max
  unsure (1)..(456): unsure at all n locations
agcttgagccagaatcctgactcttcatattccttgtcccagggtgagaatgtcaattcttaccctcggaagcaaaaaaataggggagagggaaaatctccaatcaaagaggaagcaaaaaaggagagaatgaaaatttccaatcaaaggaaaaaaagagaggaaagggaattcccaatcaaagagtgggagatagcaaaatgaatagacagataattcccaatcaaagaatgggagaaagaaaaaagagaagaagacagggaagatagttcccgatcaataaaaaataatatgcagaaaggtctttggaccggacaatatctgaacaatacagaatngtcaccaaatgaataaaaagaaggaaagggaaccattgacctaaatggtcttccncctttagttgccaggcaaaatcttgtgcgctagcaacctttttcgcccccacttaccagaaca

SEQ ID NO: 229939 - DNA, 453 bp, Glycine max
  unsure (1)..(453): unsure at all n locations
cgctgagatgatgaagtgttgaatggtgaaacttcctgcntttattgttgaccacttagtggtacctgtagatatgtcgcgggggtcatgagaccttggtgacgtcatgtggtgtgctattgcccaaaaccaagctggaccaatcccgacccaacccgggcatattctgtcagtgagaacctgtgatgtacctaagcaagcgagctcctggcagtcaacagataaaaggaaaacaagaccacaaagcaaggatgcttgtggtggctggccagctgtgaattttgtgtaatatgtggatcgtggcctctggtaatcgattaccaaaggtgagtaatcgatcacaaggcttaaaattgacgacaggatgctaagatggtctctggtaatcgaataccaatgtgtgatatcgattaccaggcttgaatacaaatcaggaaactatggaacctctgt

SEQ ID NO: 229940 - DNA, 432 bp, Glycine max
  unsure (1)..(432): unsure at all n locations
agcttcttcttaccacccactttaccattgctcccacgaactgccgnagntctccattgaaaccccacatcgagagaaacccttcaattgaagtggaatcttctaaacttgtctcgcggtttcggtagagaacggagcacaatctgaccttcatggttttcttcaaggtaaccgtgattctacacttgttccttgttagttttagcttatctttgcatcttttccgactttggaaccaccattgntatgtttatgtgtccttngaaaaaccctagagaaatagactttgtaaacgttatctttttatgaaatgggtggtatttttgtgaccttcactgaaccctgatcacattggcgtgattggaatttcaaatgatgctccttttgtagaatccgaaacacccttatccttttcatgtagtgacatgagta

SEQ ID NO: 229941 - DNA, 416 bp, Glycine max
gtagtcaaacagaataatgccgaaatgtcttataattgtgttgttgaaaagcataacaagactgtttgtgattggtttaaagatacaatctttgcagatgagaatgattcataaacatttagatagcttgcagatgggcctaacagaaatgttatgacctggctaggatacgacataaacaagtattcattgttcacaaatgcacattatgtacaatgtacattgctgaacagcggtgtcaccctaatgcctgaatctcaacactttgcaagtgtcattgacgccaatccctgtgtagctttcatcccttactttgggatcattgatgaaatttgtgagcttaactatgtgaaatttacagtatgtgttttcaaatgtatatgggttggcagcaacaccggtgtgcgcaccgatga

SEQ ID NO: 229942 - DNA, 395 bp, Glycine max
tgtccaaatgagctaagtttattcttcttgttgatgcattctttctatccccaccaatttcaattcaacatcctttgaatctcatactttagatgtgacggaagcaagtagatactcatggtgtatgaaggcattgcttgagcactatatttaattataacttacttaccagctttggatagatacttccccgatcagtgattgatgcattttcaaattcgatcctctacataattgaaaattgctctctttgttctgccattgacagatgagaggcccaagttattttacagaccctatgattgttgagacaccctaaccatacatgattgtttgcctcacagattgttgagtgttgttgctgaaaacaatatatgacttgtcttaatagatca
